United States Patent Application Publication US 2007/0214517 A1 - sequence listing, part 39

SEQ ID NO: 45327 - DNA, 2478 bp, Arabidopsis thaliana; identical to SEQ ID NO: 44906
  misc_feature (1)..(2478): Ceres Seq. ID no. 12600031
  misc_feature: MA Experiment ID: 20000166 Result: Down-regulated in Transcription
  misc_feature: MA Experiment 20000166 PARAMETER Experiment Name: At_100uM_ABA_P Parameter: Age (day) Value: 14
  misc_feature: MA Experiment 20000166 PARAMETER Experiment Name: At_100uM_ABA_P Parameter: Organism Value: A. thaliana
  misc_feature: MA Experiment 20000166 PARAMETER Experiment Name: At_100uM_ABA_P Parameter: Plant Line Value: WS
  misc_feature: MA Experiment 20000166 PARAMETER Experiment Name: At_100uM_ABA_P Parameter: Timepoint (hr) Value: 1
  misc_feature: MA Experiment 20000166 PARAMETER Experiment Name: At_100uM_ABA_P Parameter: Tissue Value: Aerial
  misc_feature: MA Experiment 20000166 PARAMETER Experiment Name: At_100uM_ABA_P Parameter: Treatment Value: 100uM ABA vs. No Treatment
  misc_feature: MA Experiment ID: 20000173 Result: Up-regulated in Transcription
  misc_feature: MA Experiment 20000173 PARAMETER Experiment Name: At_42deg_Heat_P Parameter: Age (day) Value: 14
  misc_feature: MA Experiment 20000173 PARAMETER Experiment Name: At_42deg_Heat_P Parameter: Organism Value: A. thaliana
  misc_feature: MA Experiment 20000173 PARAMETER Experiment Name: At_42deg_Heat_P Parameter: Plant Line Value: WS
  misc_feature: MA Experiment 20000173 PARAMETER Experiment Name: At_42deg_Heat_P Parameter: Temperature (deg C) Value: 42 vs. 22
  misc_feature: MA Experiment 20000173 PARAMETER Experiment Name: At_42deg_Heat_P Parameter: Timepoint (hr) Value: 6
  misc_feature: MA Experiment 20000173 PARAMETER Experiment Name: At_42deg_Heat_P Parameter: Tissue Value: Aerial
  misc_feature: MA Experiment ID: 20000179 Result: Up-regulated in Transcription
  misc_feature: MA Experiment 20000179 PARAMETER Experiment Name: At_Germinating_Seeds_P Parameter: Age (hr) Value: 6 vs. 0
  misc_feature: MA Experiment 20000179 PARAMETER Experiment Name: At_Germinating_Seeds_P Parameter: Tissue Value: Germinating Seeds
  misc_feature: MA Experiment ID: 20000185 Result: Down-regulated in Transcription
  misc_feature: MA Experiment 20000185 PARAMETER Experiment Name: At_Roots__P Parameter: Age (day) Value: 7 vs. 21
  misc_feature: MA Experiment 20000185 PARAMETER Experiment Name: At_Roots__P Parameter: Organism Value: A. thaliana
  misc_feature: MA Experiment 20000185 PARAMETER Experiment Name: At_Roots__P Parameter: Tissue Value: Roots vs. Whole Plant
  misc_feature: MA Experiment ID: 20000214 Result: Down-regulated in Transcription
  misc_feature: MA Experiment 20000214 PARAMETER Experiment Name: At_4deg_Cold_P Parameter: Timepoint (hr) Value: 6
  misc_feature: MA Experiment ID: 20000264 Result: Down-regulated in Transcription
  misc_feature: MA Experiment 20000264 PARAMETER Experiment Name: At_Open_Flower_P Parameter: Age (day) Value: 21
  misc_feature: MA Experiment 20000264 PARAMETER Experiment Name: At_Open_Flower_P Parameter: Plant Line Value: WS
  misc_feature: MA Experiment 20000264 PARAMETER Experiment Name: At_Open_Flower_P Parameter: Tissue Value: Open Flower vs. Whole Plant
  misc_feature: MA Experiment ID: 20000265 Result: Down-regulated in Transcription
  misc_feature: MA Experiment 20000265 PARAMETER Experiment Name: At_Open_Flower_P Parameter: Age (day) Value: 21
  misc_feature: MA Experiment 20000265 PARAMETER Experiment Name: At_Open_Flower_P Parameter: Plant Line Value: WS
  misc_feature: MA Experiment 20000265 PARAMETER Experiment Name: At_Open_Flower_P Parameter: Tissue Value: Closed Flower vs. Whole Plant
  misc_feature: MA Experiment ID: 20000268 Result: Down-regulated in Transcription
  misc_feature: MA Experiment 20000268 PARAMETER Experiment Name: At_100mM_NaCl__P Parameter: Age (day) Value: 14
  misc_feature: MA Experiment 20000268 PARAMETER Experiment Name: At_100mM_NaCl__P Parameter: Organism Value: A. thaliana
  misc_feature: MA Experiment 20000268 PARAMETER Experiment Name: At_100mM_NaCl__P Parameter: Plant Line Value: WS
  misc_feature: MA Experiment 20000268 PARAMETER Experiment Name: At_100mM_NaCl__P Parameter: Timepoint (hr) Value: 6
  misc_feature: MA Experiment 20000268 PARAMETER Experiment Name: At_100mM_NaCl__P Parameter: Tissue Value: Whole Plant
  misc_feature: MA Experiment 20000268 PARAMETER Experiment Name: At_100mM_NaCl__P Parameter: Treatment Value: 100mM NaCl vs. No Treatment
  misc_feature: MA Experiment ID: 20000269 Result: Down-regulated in Transcription
  misc_feature: MA Experiment 20000269 PARAMETER Experiment Name: At_1mM_KNO3_L-vs-H_Roots_P Parameter: Age (day) Value: 7,10,12
  misc_feature: MA Experiment 20000269 PARAMETER Experiment Name: At_1mM_KNO3_L-vs-H_Roots_P Parameter: Organism Value: A. thaliana
  misc_feature: MA Experiment 20000269 PARAMETER Experiment Name: At_1mM_KNO3_L-vs-H_Roots_P Parameter: Plant Line Value: WS
  misc_feature: MA Experiment 20000269 PARAMETER Experiment Name: At_1mM_KNO3_L-vs-H_Roots_P Parameter: Timepoint (day) Value: 7,10,12
  misc_feature: MA Experiment 20000269 PARAMETER Experiment Name: At_1mM_KNO3_L-vs-H_Roots_P Parameter: Tissue Value: Roots
  misc_feature: MA Experiment 20000269 PARAMETER Experiment Name: At_1mM_KNO3_L-vs-H_Roots_P Parameter: Treatment Value: 1mM KNO3 vs. 50mM KNO3
  misc_feature: MA Experiment ID: 20000286 Result: Down-regulated in Transcription
  misc_feature: MA Experiment 20000286 PARAMETER Experiment Name: At_Open_Flower_P Parameter: Age (day) Value: 21
  misc_feature: MA Experiment 20000286 PARAMETER Experiment Name: At_Open_Flower_P Parameter: Plant Line Value: WS
  misc_feature: MA Experiment 20000286 PARAMETER Experiment Name: At_Open_Flower_P Parameter: Tissue Value: Half Open vs. Whole Plant
  misc_feature: MA Experiment ID: 20000308 Result: Down-regulated in Transcription
  misc_feature: MA Experiment 20000308 PARAMETER Experiment Name: At_100mM_NaCl__P Parameter: Age (day) Value: 17
  misc_feature: MA Experiment 20000308 PARAMETER Experiment Name: At_100mM_NaCl__P Parameter: Organism Value: A. thaliana
  misc_feature: MA Experiment 20000308 PARAMETER Experiment Name: At_100mM_NaCl__P Parameter: Plant Line Value: WS
  misc_feature: MA Experiment 20000308 PARAMETER Experiment Name: At_100mM_NaCl__P Parameter: Timepoint (hr) Value: 72
  misc_feature: MA Experiment 20000308 PARAMETER Experiment Name: At_100mM_NaCl__P Parameter: Tissue Value: Whole Plant
  misc_feature: MA Experiment 20000308 PARAMETER Experiment Name: At_100mM_NaCl__P Parameter: Treatment Value: 100mM NaCl vs. No Treatment
  misc_feature: MA Experiment ID: 20000438 Result: Down-regulated in Transcription
  misc_feature: MA Experiment 20000438 PARAMETER Experiment Name: At_Shoots__P Parameter: Age (day) Value: 14
  misc_feature: MA Experiment 20000438 PARAMETER Experiment Name: At_Shoots__P Parameter: Tissue Value: Shoots vs. Whole Plant
  misc_feature: MA Experiment ID: 20000439 Result: Down-regulated in Transcription
  misc_feature: MA Experiment 20000439 PARAMETER Experiment Name: At_Roots__P Parameter: Age (day) Value: 14 vs. 21
  misc_feature: MA Experiment 20000439 PARAMETER Experiment Name: At_Roots__P Parameter: Organism Value: A. thaliana
  misc_feature: MA Experiment 20000439 PARAMETER Experiment Name: At_Roots__P Parameter: Tissue Value: Roots vs. Whole Plant
  misc_feature: MA Experiment ID: 20000441 Result: Up-regulated in Transcription
  misc_feature: MA Experiment 20000441 PARAMETER Experiment Name: At_1uM_BR-BRZ__P Parameter: Tissue Value: Shoot Apices
  misc_feature: MA Experiment 20000441 PARAMETER Experiment Name: At_1uM_BR-BRZ__P Parameter: Treatment Value: 1uM BR vs. No Treatment
  misc_feature: MA Experiment ID: 20000443 Result: Up-regulated in Transcription
  misc_feature: MA Experiment 20000443 PARAMETER Experiment Name: At_1uM_BR-BRZ__P Parameter: Tissue Value: Shoot Apices
  misc_feature: MA Experiment 20000443 PARAMETER Experiment Name: At_1uM_BR-BRZ__P Parameter: Treatment Value: 1uM BRZ vs. No Treatment
  misc_feature: MA Experiment ID: 20000451 Result: Down-regulated in Transcription
  misc_feature: MA Experiment 20000451 PARAMETER Experiment Name: At_CS6879_Shoots-Roots_P Parameter: Age (day) Value: 14
  misc_feature: MA Experiment 20000451 PARAMETER Experiment Name: At_CS6879_Shoots-Roots_P Parameter: Organism Value: A. thaliana
  misc_feature: MA Experiment 20000451 PARAMETER Experiment Name: At_CS6879_Shoots-Roots_P Parameter: Plant Line Value: CS6879 vs. WS
  misc_feature: MA Experiment 20000451 PARAMETER Experiment Name: At_CS6879_Shoots-Roots_P Parameter: Tissue Value: Roots
  misc_feature: MA Experiment ID: 20000453 Result: Down-regulated in Transcription
  misc_feature: MA Experiment 20000453 PARAMETER Experiment Name: At_100uM_ABA_P Parameter: Age (day) Value: 15
  misc_feature: MA Experiment 20000453 PARAMETER Experiment Name: At_100uM_ABA_P Parameter: Organism Value: A. thaliana
  misc_feature: MA Experiment 20000453 PARAMETER Experiment Name: At_100uM_ABA_P Parameter: Plant Line Value: WS
  misc_feature: MA Experiment 20000453 PARAMETER Experiment Name: At_100uM_ABA_P Parameter: Timepoint (hr) Value: 24
  misc_feature: MA Experiment 20000453 PARAMETER Experiment Name: At_100uM_ABA_P Parameter: Tissue Value: Aerial
  misc_feature: MA Experiment 20000453 PARAMETER Experiment Name: At_100uM_ABA_P Parameter: Treatment Value: 100uM ABA vs. No Treatment
  misc_feature: MA Experiment ID: 20000455 Result: Down-regulated in Transcription
  misc_feature: MA Experiment 20000455 PARAMETER Experiment Name: At_100uM_ABA_P Parameter: Age (day) Value: 16
  misc_feature: MA Experiment 20000455 PARAMETER Experiment Name: At_100uM_ABA_P Parameter: Organism Value: A. thaliana
  misc_feature: MA Experiment 20000455 PARAMETER Experiment Name: At_100uM_ABA_P Parameter: Plant Line Value: WS
  misc_feature: MA Experiment 20000455 PARAMETER Experiment Name: At_100uM_ABA_P Parameter: Timepoint (hr) Value: 48
  misc_feature: MA Experiment 20000455 PARAMETER Experiment Name: At_100uM_ABA_P Parameter: Tissue Value: Aerial
  misc_feature: MA Experiment 20000455 PARAMETER Experiment Name: At_100uM_ABA_P Parameter: Treatment Value: 100uM ABA vs. No Treatment
  misc_feature: MA Experiment ID: 20000495 Result: Up-regulated in Transcription
  misc_feature: MA Experiment 20000495 PARAMETER Experiment Name: At_Guard_Cells_P Parameter: Harvest Date Value: 8/2/2002
  misc_feature: MA Experiment 20000495 PARAMETER Experiment Name: At_Guard_Cells_P Parameter: Organism Value: A. thaliana
  misc_feature: MA Experiment 20000495 PARAMETER Experiment Name: At_Guard_Cells_P Parameter: Tissue Value: Guard Cells vs. Leaves
  misc_feature: MA Experiment ID: 20000496 Result: Up-regulated in Transcription
  misc_feature: MA Experiment 20000496 PARAMETER Experiment Name: At_Guard_Cells_P Parameter: Harvest Date Value: 7/19/2002
  misc_feature: MA Experiment 20000496 PARAMETER Experiment Name: At_Guard_Cells_P Parameter: Organism Value: Canola
  misc_feature: MA Experiment 20000496 PARAMETER Experiment Name: At_Guard_Cells_P Parameter: Tissue Value: Guard Cells vs. Leaves
  misc_feature: MA Experiment ID: 20000794 Result: Down-regulated in Transcription
  misc_feature: MA Experiment 20000794 PARAMETER Experiment Name: At_Petals_P Parameter: Age (day) Value: 23-25 days
  misc_feature: MA Experiment 20000794 PARAMETER Experiment Name: At_Petals_P Parameter: Plant Line Value: WS
  misc_feature: MA Experiment 20000794 PARAMETER Experiment Name: At_Petals_P Parameter: Tissue Value: Petals vs. Whole plant
  misc_feature: MA Experiment ID: 20001248 Result: Up-regulated in Transcription
  misc_feature: MA Experiment 20001248 PARAMETER Experiment Name: At_Far-red-induction_P Parameter: Age (day) Value: 7
  misc_feature: MA Experiment 20001248 PARAMETER Experiment Name: At_Far-red-induction_P Parameter: Light Value: Far-red vs. White
  misc_feature: MA Experiment 20001248 PARAMETER Experiment Name: At_Far-red-induction_P Parameter: Organism Value: A. thaliana
  misc_feature: MA Experiment 20001248 PARAMETER Experiment Name: At_Far-red-induction_P Parameter: Plant Line Value: Columbia
  misc_feature: MA Experiment 20001248 PARAMETER Experiment Name: At_Far-red-induction_P Parameter: Timepoint (hr) Value: 4
  misc_feature: MA Experiment 20001248 PARAMETER Experiment Name: At_Far-red-induction_P Parameter: Tissue Value: Whole Plant
  misc_feature: MA Experiment ID: 20001450 Result: Up-regulated in Transcription
  misc_feature: MA Experiment 20001450 PARAMETER Experiment Name: At_Far-red-induction_P Parameter: Age (day) Value: 7
  misc_feature: MA Experiment 20001450 PARAMETER Experiment Name: At_Far-red-induction_P Parameter: Light Value: Far-red vs. White
  misc_feature: MA Experiment 20001450 PARAMETER Experiment Name: At_Far-red-induction_P Parameter: Organism Value: A. thaliana
  misc_feature: MA Experiment 20001450 PARAMETER Experiment Name: At_Far-red-induction_P Parameter: Plant Line Value: Columbia
  misc_feature: MA Experiment 20001450 PARAMETER Experiment Name: At_Far-red-induction_P Parameter: Timepoint (hr) Value: 8
  misc_feature: MA Experiment 20001450 PARAMETER Experiment Name: At_Far-red-induction_P Parameter: Tissue Value: Whole Plant
  misc_feature: MA Experiment ID: 20001451 Result: Up-regulated in Transcription
  misc_feature: MA Experiment 20001451 PARAMETER Experiment Name: At_Far-red-induction_P Parameter: Age (day) Value: 7
  misc_feature: MA Experiment 20001451 PARAMETER Experiment Name: At_Far-red-induction_P Parameter: Light Value: Far-red vs. White
  misc_feature: MA Experiment 20001451 PARAMETER Experiment Name: At_Far-red-induction_P Parameter: Organism Value: A. thaliana
  misc_feature: MA Experiment 20001451 PARAMETER Experiment Name: At_Far-red-induction_P Parameter: Plant Line Value: Columbia
  misc_feature: MA Experiment 20001451 PARAMETER Experiment Name: At_Far-red-induction_P Parameter: Timepoint (hr) Value: 24
  misc_feature: MA Experiment 20001451 PARAMETER Experiment Name: At_Far-red-induction_P Parameter: Tissue Value: Whole Plant
  misc_feature: MA Experiment ID: 20001555 Result: Down-regulated in Transcription
  misc_feature: MA Experiment 20001555 PARAMETER Experiment Name: At_Drought_Soil_Dry_P Parameter: Age (day) Value: 24
  misc_feature: MA Experiment 20001555 PARAMETER Experiment Name: At_Drought_Soil_Dry_P Parameter: Organism Value: A. thaliana
  misc_feature: MA Experiment 20001555 PARAMETER Experiment Name: At_Drought_Soil_Dry_P Parameter: Plant Line Value: WS
  misc_feature: MA Experiment 20001555 PARAMETER Experiment Name: At_Drought_Soil_Dry_P Parameter: Post Timepoint (hr) Value: None
  misc_feature: MA Experiment 20001555 PARAMETER Experiment Name: At_Drought_Soil_Dry_P Parameter: Post-Treatment Value: None
  misc_feature: MA Experiment 20001555 PARAMETER Experiment Name: At_Drought_Soil_Dry_P Parameter: Timepoint (day) Value: 10
  misc_feature: MA Experiment 20001555 PARAMETER Experiment Name: At_Drought_Soil_Dry_P Parameter: Treatment Value: Drought vs. No Drought
  misc_feature: MA Experiment ID: 20001556 Result: Down-regulated in Transcription
  misc_feature: MA Experiment 20001556 PARAMETER Experiment Name: At_Drought_Soil_Dry_P Parameter: Age (day) Value: 26
  misc_feature: MA Experiment 20001556 PARAMETER Experiment Name: At_Drought_Soil_Dry_P Parameter: Organism Value: A. thaliana
  misc_feature: MA Experiment 20001556 PARAMETER Experiment Name: At_Drought_Soil_Dry_P Parameter: Plant Line Value: WS
  misc_feature: MA Experiment 20001556 PARAMETER Experiment Name: At_Drought_Soil_Dry_P Parameter: Post Timepoint (hr) Value: None
  misc_feature: MA Experiment 20001556 PARAMETER Experiment Name: At_Drought_Soil_Dry_P Parameter: Post-Treatment Value: None
  misc_feature: MA Experiment 20001556 PARAMETER Experiment Name: At_Drought_Soil_Dry_P Parameter: Timepoint (day) Value: 12
  misc_feature: MA Experiment 20001556 PARAMETER Experiment Name: At_Drought_Soil_Dry_P Parameter: Treatment Value: Drought vs. No Drought
  misc_feature: MA Experiment ID: 20001559 Result: Down-regulated in Transcription
  misc_feature: MA Experiment 20001559 PARAMETER Experiment Name: At_Drought_Soil_Dry_P Parameter: Age (day) Value: 28
  misc_feature: MA Experiment 20001559 PARAMETER Experiment Name: At_Drought_Soil_Dry_P Parameter: Organism Value: A. thaliana
  misc_feature: MA Experiment 20001559 PARAMETER Experiment Name: At_Drought_Soil_Dry_P Parameter: Plant Line Value: WS
  misc_feature: MA Experiment 20001559 PARAMETER Experiment Name: At_Drought_Soil_Dry_P Parameter: Post Timepoint (hr) Value: 29
  misc_feature: MA Experiment 20001559 PARAMETER Experiment Name: At_Drought_Soil_Dry_P Parameter: Post-Treatment Value: Re-Water vs. No Drought
  misc_feature: MA Experiment 20001559 PARAMETER Experiment Name: At_Drought_Soil_Dry_P Parameter: Timepoint (day) Value: 14
  misc_feature: MA Experiment 20001559 PARAMETER Experiment Name: At_Drought_Soil_Dry_P Parameter: Treatment Value: Drought vs. No Drought
  misc_feature: MA Experiment ID: 20001773 Result: Up-regulated in Transcription
  misc_feature: MA Experiment 20001773 PARAMETER Experiment Name: At_Far-red-enriched-adult_P Parameter: Age (day) Value: 30
  misc_feature: MA Experiment 20001773 PARAMETER Experiment Name: At_Far-red-enriched-adult_P Parameter: Light Value: Far-red enriched vs. White
  misc_feature: MA Experiment 20001773 PARAMETER Experiment Name: At_Far-red-enriched-adult_P Parameter: Organism Value: A. thaliana
  misc_feature: MA Experiment 20001773 PARAMETER Experiment Name: At_Far-red-enriched-adult_P Parameter: Plant Line Value: Columbia
  misc_feature: MA Experiment 20001773 PARAMETER Experiment Name: At_Far-red-enriched-adult_P Parameter: Timepoint (hr) Value: 48
  misc_feature: MA Experiment 20001773 PARAMETER Experiment Name: At_Far-red-enriched-adult_P Parameter: Tissue Value: Aerial
  misc_feature: MA Experiment ID: 20001906 Result: Down-regulated in Transcription
  misc_feature: MA Experiment 20001906 PARAMETER Experiment Name: At_Drought_Reproduction_P Parameter: Age (day) Value: 35
  misc_feature: MA Experiment 20001906 PARAMETER Experiment Name: At_Drought_Reproduction_P Parameter: Organism Value: A. thaliana
  misc_feature: MA Experiment 20001906 PARAMETER Experiment Name: At_Drought_Reproduction_P Parameter: Plant Line Value: WS
  misc_feature: MA Experiment 20001906 PARAMETER Experiment Name: At_Drought_Reproduction_P Parameter: Timepoint (day) Value: 5
  misc_feature: MA Experiment 20001906 PARAMETER Experiment Name: At_Drought_Reproduction_P Parameter: Tissue Value: Siliques
  misc_feature: MA Experiment 20001906 PARAMETER Experiment Name: At_Drought_Reproduction_P Parameter: Treatment Value: Drought vs. No Drought
  misc_feature: MA Experiment ID: 20001908 Result: Down-regulated in Transcription
  misc_feature: MA Experiment 20001908 PARAMETER Experiment Name: At_Drought_Reproduction_P Parameter: Age (day) Value: 40
  misc_feature: MA Experiment 20001908 PARAMETER Experiment Name: At_Drought_Reproduction_P Parameter: Organism Value: A. thaliana
  misc_feature: MA Experiment 20001908 PARAMETER Experiment Name: At_Drought_Reproduction_P Parameter: Plant Line Value: WS
  misc_feature: MA Experiment 20001908 PARAMETER Experiment Name: At_Drought_Reproduction_P Parameter: Timepoint (day) Value: 10
  misc_feature: MA Experiment 20001908 PARAMETER Experiment Name: At_Drought_Reproduction_P Parameter: Tissue Value: Siliques
  misc_feature: MA Experiment 20001908 PARAMETER Experiment Name: At_Drought_Reproduction_P Parameter: Treatment Value: Drought vs. No Drought

SEQ ID NO: 45328 - protein, 797 aa, Arabidopsis thaliana; identical to SEQ ID NO: 44907
  peptide (1)..(797): Ceres Seq. ID no. 12600032
  misc_feature (425)..(657): Pfam Name: Glycosyl hydrolase family 3 C terminal domain Pfam Description: Glycosyl hydrolase family 3 C terminal domain
  misc_feature (425)..(657): Pfam Name: Glycosyl hydrolase family 3 C terminal domain Pfam Description: Glycosyl hydrolase family 3 C terminal domain
  misc_feature (74)..(793): Homolog of NCBI NO: 2791278 NR Description: beta-xylosidase [Hypocrea jecorina]
  misc_feature (341)..(796): Homolog of NCBI NO: 30316196 NR Description: Putative beta-D-xylosidase (PpAz152)
  misc_feature (36)..(789): Homolog of NCBI NO: 18025342 NR Description: beta-D-xylosidase [Hordeum vulgare]
  misc_feature (38)..(780): Homolog of NCBI NO: 15218202 NR Description: glycosyl hydrolase family 3
  misc_feature (30)..(782): Homolog of NCBI NO: 25453520 NR Description: beta-1,4-xylosidase [imported] - Arabidopsis
  misc_feature (74)..(793): Homolog of NCBI NO: 2791278 NR Description: beta-xylosidase [Hypocrea jecorina]
  misc_feature (36)..(789): Homolog of NCBI NO: 18025342 NR Description: beta-D-xylosidase [Hordeum vulgare]
  misc_feature (30)..(782): Homolog of NCBI NO: 25453520 NR Description: beta-1,4-xylosidase [imported] - Arabidopsis
  misc_feature (26)..(788): Homolog of NCBI NO: 15239867 NR Description: glycosyl hydrolase family 3; protein id:
  misc_feature (35)..(788): Homolog of NCBI NO: 15237736 NR Description: glycosyl hydrolase family 3; protein id:
  misc_feature (41)..(787): Homolog of NCBI NO: 15242492 NR Description: glycosyl hydrolase family 3
  misc_feature (59)..(788): Homolog of NCBI NO: 18025340 NR Description: alpha-L-arabinofuranosidase/beta-D-xylosidase
  misc_feature (30)..(782): Homolog of NCBI NO: 15230897 NR Description: glycosyl hydrolase family 3; protein id:
  misc_feature (38)..(780): Homolog of NCBI NO: 15218202 NR Description: glycosyl hydrolase family 3
  misc_feature (341)..(796): Homolog of NCBI NO: 30316196 NR Description: Putative beta-D-xylosidase (PpAz152)
  misc_feature (30)..(782): Homolog of NCBI NO: 15230897 NR Description: glycosyl hydrolase family 3; protein id:
  misc_feature (59)..(788): Homolog of NCBI NO: 18025340 NR Description: alpha-L-arabinofuranosidase/beta-D-xylosidase
  misc_feature (41)..(787): Homolog of NCBI NO: 15242492 NR Description: glycosyl hydrolase family 3
  misc_feature (35)..(788): Homolog of NCBI NO: 15237736 NR Description: glycosyl hydrolase family 3; protein id:
  misc_feature (26)..(788): Homolog of NCBI NO: 15239867 NR Description: glycosyl hydrolase family 3; protein id:

SEQ ID NO: 45329 - protein, 768 aa, Arabidopsis thaliana; identical to SEQ ID NO: 44908
  peptide (1)..(768): Ceres Seq. ID no. 12600033
  misc_feature (396)..(628): Pfam Name: Glycosyl hydrolase family 3 C terminal domain Pfam Description: Glycosyl hydrolase family 3 C terminal domain
  misc_feature (396)..(628): Pfam Name: Glycosyl hydrolase family 3 C terminal domain Pfam Description: Glycosyl hydrolase family 3 C terminal domain
  misc_feature (45)..(764): Homolog of NCBI NO: 2791278 NR Description: beta-xylosidase [Hypocrea jecorina]
  misc_feature (312)..(767): Homolog of NCBI NO: 30316196 NR Description: Putative beta-D-xylosidase (PpAz152)
  misc_feature (7)..(760): Homolog of NCBI NO: 18025342 NR Description: beta-D-xylosidase [Hordeum vulgare]
  misc_feature (9)..(751): Homolog of NCBI NO: 15218202 NR Description: glycosyl hydrolase family 3
  misc_feature (1)..(753): Homolog of NCBI NO: 25453520 NR Description: beta-1,4-xylosidase [imported] - Arabidopsis
  misc_feature (45)..(764): Homolog of NCBI NO: 2791278 NR Description: beta-xylosidase [Hypocrea jecorina]
  misc_feature (7)..(760): Homolog of NCBI NO: 18025342 NR Description: beta-D-xylosidase [Hordeum vulgare]
  misc_feature (1)..(753): Homolog of NCBI NO: 25453520 NR Description: beta-1,4-xylosidase [imported] - Arabidopsis
  misc_feature (1)..(759): Homolog of NCBI NO: 15239867 NR Description: glycosyl hydrolase family 3; protein id:
  misc_feature (6)..(759): Homolog of NCBI NO: 15237736 NR Description: glycosyl hydrolase family 3; protein id:
  misc_feature (12)..(758): Homolog of NCBI NO: 15242492 NR Description: glycosyl hydrolase family 3
  misc_feature (30)..(759): Homolog of NCBI NO: 18025340 NR Description: alpha-L-arabinofuranosidase/beta-D-xylosidase
  misc_feature (1)..(753): Homolog of NCBI NO: 15230897 NR Description: glycosyl hydrolase family 3; protein id:
  misc_feature (9)..(751): Homolog of NCBI NO: 15218202 NR Description: glycosyl hydrolase family 3
  misc_feature (312)..(767): Homolog of NCBI NO: 30316196 NR Description: Putative beta-D-xylosidase (PpAz152)
  misc_feature (1)..(753): Homolog of NCBI NO: 15230897 NR Description: glycosyl hydrolase family 3; protein id:
  misc_feature (30)..(759): Homolog of NCBI NO: 18025340 NR Description: alpha-L-arabinofuranosidase/beta-D-xylosidase
  misc_feature (12)..(758): Homolog of NCBI NO: 15242492 NR Description: glycosyl hydrolase family 3
  misc_feature (6)..(759): Homolog of NCBI NO: 15237736 NR Description: glycosyl hydrolase family 3; protein id:
  misc_feature (1)..(759): Homolog of NCBI NO: 15239867 NR Description: glycosyl hydrolase family 3; protein id:

SEQ ID NO: 45330 - protein, 763 aa, Arabidopsis thaliana; identical to SEQ ID NO: 44909
  peptide (1)..(763): Ceres Seq. ID no. 12600034
  misc_feature (391)..(623): Pfam Name: Glycosyl hydrolase family 3 C terminal domain Pfam Description: Glycosyl hydrolase family 3 C terminal domain
  misc_feature (391)..(623): Pfam Name: Glycosyl hydrolase family 3 C terminal domain Pfam Description: Glycosyl hydrolase family 3 C terminal domain
  misc_feature (40)..(759): Homolog of NCBI NO: 2791278 NR Description: beta-xylosidase [Hypocrea jecorina]
  misc_feature (307)..(762): Homolog of NCBI NO: 30316196 NR Description: Putative beta-D-xylosidase (PpAz152)
  misc_feature (2)..(755): Homolog of NCBI NO: 18025342 NR Description: beta-D-xylosidase [Hordeum vulgare]
  misc_feature (4)..(746): Homolog of NCBI NO: 15218202 NR Description: glycosyl hydrolase family 3
  misc_feature (1)..(748): Homolog of NCBI NO: 25453520 NR Description: beta-1,4-xylosidase [imported] - Arabidopsis
  misc_feature (40)..(759): Homolog of NCBI NO: 2791278 NR Description: beta-xylosidase [Hypocrea jecorina]
  misc_feature (2)..(755): Homolog of NCBI NO: 18025342 NR Description: beta-D-xylosidase [Hordeum vulgare]
  misc_feature (1)..(748): Homolog of NCBI NO: 25453520 NR Description: beta-1,4-xylosidase [imported] - Arabidopsis
  misc_feature (1)..(754): Homolog of NCBI NO: 15239867 NR Description: glycosyl hydrolase family 3; protein id:
  misc_feature (1)..(754): Homolog of NCBI NO: 15237736 NR Description: glycosyl hydrolase family 3; protein id:
  misc_feature (7)..(753): Homolog of NCBI NO: 15242492 NR Description: glycosyl hydrolase family 3
  misc_feature (25)..(754): Homolog of NCBI NO: 18025340 NR Description: alpha-L-arabinofuranosidase/beta-D-xylosidase
  misc_feature (1)..(748): Homolog of NCBI NO: 15230897 NR Description: glycosyl hydrolase family 3; protein id:
  misc_feature (4)..(746): Homolog of NCBI NO: 15218202 NR Description: glycosyl hydrolase family 3
  misc_feature (307)..(762): Homolog of NCBI NO: 30316196 NR Description: Putative beta-D-xylosidase (PpAz152)
  misc_feature (1)..(748): Homolog of NCBI NO: 15230897 NR Description: glycosyl hydrolase family 3; protein id:
  misc_feature (25)..(754): Homolog of NCBI NO: 18025340 NR Description: alpha-L-arabinofuranosidase/beta-D-xylosidase
  misc_feature (7)..(753): Homolog of NCBI NO: 15242492 NR Description: glycosyl hydrolase family 3
  misc_feature (1)..(754): Homolog of NCBI NO: 15237736 NR Description: glycosyl hydrolase family 3; protein id:
  misc_feature (1)..(754): Homolog of NCBI NO: 15239867 NR Description: glycosyl hydrolase family 3; protein id:

SEQ ID NO: 45331 - DNA, 2256 bp, Arabidopsis thaliana; identical to SEQ ID NO: 22038
  misc_feature (1)..(2256): Ceres Seq. ID no. 13646318
  misc_feature: MA Experiment ID: 108434 Result: Up-regulated in Transcription
  misc_feature: MA Experiment 108434 PARAMETER Experiment Name: At_Root_Tips_cDNA_P Parameter: Tissue Value: Root Tips
  misc_feature: MA Experiment ID: 108462 Result: Down-regulated in Transcription
  misc_feature: MA Experiment 108462 PARAMETER Experiment Name: At_Germinating_Seeds_cDNA_P Parameter: Age (day) Value: 2 vs. 0
  misc_feature: MA Experiment 108462 PARAMETER Experiment Name: At_Germinating_Seeds_cDNA_P Parameter: Tissue Value: Germinating Seeds
  misc_feature: MA Experiment ID: 108463 Result: Down-regulated in Transcription
  misc_feature: MA Experiment 108463 PARAMETER Experiment Name: At_Germinating_Seeds_cDNA_P Parameter: Age (day) Value: 3 vs. 0
  misc_feature: MA Experiment 108463 PARAMETER Experiment Name: At_Germinating_Seeds_cDNA_P Parameter: Tissue Value: Germinating Seeds
  misc_feature: MA Experiment ID: 108464 Result: Down-regulated in Transcription
  misc_feature: MA Experiment 108464 PARAMETER Experiment Name: At_Germinating_Seeds_cDNA_P Parameter: Age (day) Value: 4 vs. 0
  misc_feature: MA Experiment 108464 PARAMETER Experiment Name: At_Germinating_Seeds_cDNA_P Parameter: Tissue Value: Germinating Seeds
  misc_feature: MA Experiment ID: 108501 Result: Up-regulated in Transcription
  misc_feature: MA Experiment 108501 PARAMETER Experiment Name: At_ap2_floral_buds_cDNA_P Parameter: Plant Line Value: ap2 (Ler.)
  misc_feature: MA Experiment 108501 PARAMETER Experiment Name: At_ap2_floral_buds_cDNA_P Parameter: Tissue Value: Closed Flower
  misc_feature: MA Experiment ID: 108573 Result: Up-regulated in Transcription
  misc_feature: MA Experiment 108573 PARAMETER Experiment Name: At_Drought_cDNA_P Parameter: Timepoint (hr) Value: 6
  misc_feature: MA Experiment 108573 PARAMETER Experiment Name: At_Drought_cDNA_P Parameter: Tissue Value: Aerial
  misc_feature: MA Experiment 108573 PARAMETER Experiment Name: At_Drought_cDNA_P Parameter: Treatment Value: Drought vs. No Drought
  misc_feature: MA Experiment ID: 108576 Result: Up-regulated in Transcription
  misc_feature: MA Experiment 108576 PARAMETER Experiment Name: At_42deg_Heat_cDNA_P Parameter: Temperature (deg C) Value: 42 vs. 22
  misc_feature: MA Experiment 108576 PARAMETER Experiment Name: At_42deg_Heat_cDNA_P Parameter: Timepoint (hr) Value: 1
  misc_feature: MA Experiment 108576 PARAMETER Experiment Name: At_42deg_Heat_cDNA_P Parameter: Tissue Value: Aerial
  misc_feature: MA Experiment ID: 108577 Result: Up-regulated in Transcription
  misc_feature: MA Experiment 108577 PARAMETER Experiment Name: At_42deg_Heat_cDNA_P Parameter: Temperature (deg C) Value: 42 vs. 22
  misc_feature: MA Experiment 108577 PARAMETER Experiment Name: At_42deg_Heat_cDNA_P Parameter: Timepoint (hr) Value: 6
  misc_feature: MA Experiment 108577 PARAMETER Experiment Name: At_42deg_Heat_cDNA_P Parameter: Tissue Value: Aerial
  misc_feature: MA Experiment ID: 108585 Result: Up-regulated in Transcription
  misc_feature: MA Experiment 108585 PARAMETER Experiment Name: At_5mM_NaNP_cDNA_P Parameter: Timepoint (hr) Value: 6
  misc_feature: MA Experiment 108585 PARAMETER Experiment Name: At_5mM_NaNP_cDNA_P Parameter: Tissue Value: Aerial
  misc_feature: MA Experiment 108585 PARAMETER Experiment Name: At_5mM_NaNP_cDNA_P Parameter: Treatment Value: null
  misc_feature: MA Experiment ID: 108595 Result: Down-regulated in Transcription
  misc_feature: MA Experiment 108595 PARAMETER Experiment Name: At_Ler-pi_Ovule_cDNA_P Parameter: Plant Line Value: null
  misc_feature: MA Experiment ID: 20000069 Result: Down-regulated in Transcription
  misc_feature: MA Experiment 20000069 PARAMETER Experiment Name: At_100uM_ABA_Mutants_cDNA_P Parameter: Plant Line Value: CS23
  misc_feature: MA Experiment 20000069 PARAMETER Experiment Name: At_100uM_ABA_Mutants_cDNA_P Parameter: Timepoint (hr) Value: 6
  misc_feature: MA Experiment 20000069 PARAMETER Experiment Name: At_100uM_ABA_Mutants_cDNA_P Parameter: Tissue Value: Aerial
  misc_feature: MA Experiment 20000069 PARAMETER Experiment Name: At_100uM_ABA_Mutants_cDNA_P Parameter: Treatment Value: 100uM ABA vs. No Treatment
  misc_feature: MA Experiment ID: 20000087 Result: Down-regulated in Transcription
  misc_feature: MA Experiment 20000087 PARAMETER Experiment Name: At_100uM_ABA_Mutants_cDNA_P Parameter: Plant Line Value: WS
  misc_feature: MA Experiment 20000087 PARAMETER Experiment Name: At_100uM_ABA_Mutants_cDNA_P Parameter: Timepoint (hr) Value: 6
  misc_feature: MA Experiment 20000087 PARAMETER Experiment Name: At_100uM_ABA_Mutants_cDNA_P Parameter: Tissue Value: Aerial
  misc_feature: MA Experiment 20000087 PARAMETER Experiment Name: At_100uM_ABA_Mutants_cDNA_P Parameter: Treatment Value: 100uM ABA vs. No Treatment
  misc_feature: MA Experiment ID: 20000111 Result: Up-regulated in Transcription
  misc_feature: MA Experiment 20000111 PARAMETER Experiment Name: At_42deg_Heat_cDNA_P Parameter: Temperature (deg C) Value: 42 vs. 22
  misc_feature: MA Experiment 20000111 PARAMETER Experiment Name: At_42deg_Heat_cDNA_P Parameter: Timepoint (hr) Value: 6
  misc_feature: MA Experiment 20000111 PARAMETER Experiment Name: At_42deg_Heat_cDNA_P Parameter: Tissue Value: Aerial
  misc_feature: MA Experiment ID: 20000112 Result: Up-regulated in Transcription
  misc_feature: MA Experiment 20000112 PARAMETER Experiment Name: At_42deg_Heat_cDNA_P Parameter: Temperature (deg C) Value: 42 vs. 22
  misc_feature: MA Experiment 20000112 PARAMETER Experiment Name: At_42deg_Heat_cDNA_P Parameter: Timepoint (hr) Value: 2
  misc_feature: MA Experiment 20000112 PARAMETER Experiment Name: At_42deg_Heat_cDNA_P Parameter: Tissue Value: Aerial
  misc_feature: MA Experiment ID: 20000113 Result: Up-regulated in Transcription
  misc_feature: MA Experiment 20000113 PARAMETER Experiment Name: At_42deg_Heat_cDNA_P Parameter: Temperature (deg C) Value: 42 vs. 22
  misc_feature: MA Experiment 20000113 PARAMETER Experiment Name: At_42deg_Heat_cDNA_P Parameter: Timepoint (hr) Value: 8
  misc_feature: MA Experiment 20000113 PARAMETER Experiment Name: At_42deg_Heat_cDNA_P Parameter: Tissue Value: Aerial
  misc_feature: MA Experiment ID: 20000144 Result: Up-regulated in Transcription
  misc_feature: MA Experiment 20000144 PARAMETER Experiment Name: At_42deg_Heat_cDNA_P Parameter: Temperature (deg C) Value: 42 vs. 22
  misc_feature: MA Experiment 20000144 PARAMETER Experiment Name: At_42deg_Heat_cDNA_P Parameter: Timepoint (hr) Value: 1
  misc_feature: MA Experiment 20000144 PARAMETER Experiment Name: At_42deg_Heat_cDNA_P Parameter: Tissue Value: Aerial
  misc_feature: MA Experiment ID: 20000314 Result: Down-regulated in Transcription
  misc_feature: MA Experiment 20000314 PARAMETER Experiment Name: At_14day_Shoots-Roots_Sub_P Parameter: Age (day) Value: 14
  misc_feature: MA Experiment 20000314 PARAMETER Experiment Name: At_14day_Shoots-Roots_Sub_P Parameter: Organism Value: A. thaliana
  misc_feature: MA Experiment 20000314 PARAMETER Experiment Name: At_14day_Shoots-Roots_Sub_P Parameter: Plant Line Value: WS
  misc_feature: MA Experiment 20000314 PARAMETER Experiment Name: At_14day_Shoots-Roots_Sub_P Parameter: Tissue Value: Roots vs. Whole Plant
  misc_feature: MA Experiment ID: 20000327 Result: Up-regulated in Transcription
  misc_feature: MA Experiment 20000327 PARAMETER Experiment Name: At_42deg_Heat_Sub_P Parameter: Age (day) Value: 14
  misc_feature: MA Experiment 20000327 PARAMETER Experiment Name: At_42deg_Heat_Sub_P Parameter: Organism Value: A. thaliana
  misc_feature: MA Experiment 20000327 PARAMETER Experiment Name: At_42deg_Heat_Sub_P Parameter: Plant Line Value: WS
  misc_feature: MA Experiment 20000327 PARAMETER Experiment Name: At_42deg_Heat_Sub_P Parameter: Temperature (deg C) Value: 42 vs. 22
  misc_feature: MA Experiment 20000327 PARAMETER Experiment Name: At_42deg_Heat_Sub_P Parameter: Timepoint (hr) Value: 1
  misc_feature: MA Experiment 20000327 PARAMETER Experiment Name: At_42deg_Heat_Sub_P Parameter: Tissue Value: Aerial
  misc_feature: MA Experiment ID: 20000328 Result: Up-regulated in Transcription
  misc_feature: MA Experiment 20000328 PARAMETER Experiment Name: At_42deg_Heat_Sub_P Parameter: Age (day) Value: 14
  misc_feature: MA Experiment 20000328 PARAMETER Experiment Name: At_42deg_Heat_Sub_P Parameter: Organism Value: A. thaliana
  misc_feature: MA Experiment 20000328 PARAMETER Experiment Name: At_42deg_Heat_Sub_P Parameter: Plant Line Value: WS
  misc_feature: MA Experiment 20000328 PARAMETER Experiment Name: At_42deg_Heat_Sub_P Parameter: Temperature (deg C) Value: 42 vs. 22
  misc_feature: MA Experiment 20000328 PARAMETER Experiment Name: At_42deg_Heat_Sub_P Parameter: Timepoint (hr) Value: 6
  misc_feature: MA Experiment 20000328 PARAMETER Experiment Name: At_42deg_Heat_Sub_P Parameter: Tissue Value: Aerial
  misc_feature: MA Experiment ID: 20000355 Result: Down-regulated in Transcription
  misc_feature: MA Experiment 20000355 PARAMETER Experiment Name: At_Siliques_Sub_P Parameter: Age (day) Value: 21
  misc_feature: MA Experiment 20000355 PARAMETER Experiment Name: At_Siliques_Sub_P Parameter: Organism Value: A. thaliana
  misc_feature: MA Experiment 20000355 PARAMETER Experiment Name: At_Siliques_Sub_P Parameter: Plant Line Value: WS
  misc_feature: MA Experiment 20000355 PARAMETER Experiment Name: At_Siliques_Sub_P Parameter: Tissue Value: Less Than 5mm Siliques vs. Whole Plant
  misc_feature: MA Experiment ID: 20001807 Result: Up-regulated in Transcription
  misc_feature: MA Experiment 20001807 PARAMETER Experiment Name: At_50mM_NH4NO3_L-to-H_Sub_P Parameter: Timepoint (hr) Value: 6
  misc_feature: MA Experiment 20001807 PARAMETER Experiment Name: At_50mM_NH4NO3_L-to-H_Sub_P Parameter: Tissue Value: Leaf
  misc_feature: MA Experiment 20001807 PARAMETER Experiment Name: At_50mM_NH4NO3_L-to-H_Sub_P Parameter: Treatment Value: 50mM NH4NO3 vs 100mM Mannitol

SEQ ID NO: 45332 - protein, 651 aa, Arabidopsis thaliana; identical to SEQ ID NO: 22039
  peptide (1)..(651): Ceres Seq. ID no. 13646319
  misc_feature (124)..(646): Homolog of NCBI NO: 4164594 NR Description: heat shock protein 70 [Paracoccidioides
  misc_feature (1)..(635): Homolog of NCBI NO: 23480384 NR Description: heat shock protein [Plasmodium yoelii yoelii]
  misc_feature (3)..(635): Homolog of NCBI NO: 29539338 NR Description: Heat shock 70 kDa protein [Cyanidioschyzon
  misc_feature (1)..(626): Homolog of NCBI NO: 481576 NR Description: dnaK-type molecular chaperone GRP78/BiP -
  misc_feature (3)..(635): Homolog of NCBI NO: 1037176 NR Description: immunoglobulin heavy chain binding protein
  misc_feature (1)..(635): Homolog of NCBI NO: 6016151 NR Description: Luminal binding protein 3 precursor (BiP3)
  misc_feature (8)..(651): Homolog of NCBI NO: 14423732 NR Description: Heat shock 70 kDa protein
  misc_feature (6)..(626): Homolog of NCBI NO: 21263753 NR Description: Heat shock cognate 71 kDa protein (Hsc70.1)
  misc_feature (124)..(646): Homolog of NCBI NO: 4164594 NR Description: heat shock protein 70 [Paracoccidioides
  misc_feature (1)..(635): Homolog of NCBI NO: 23480384 NR Description: heat shock protein [Plasmodium yoelii yoelii]
  misc_feature (3)..(635): Homolog of NCBI NO: 29539338 NR Description: Heat shock 70 kDa protein [Cyanidioschyzon
  misc_feature (1)..(626): Homolog of NCBI NO: 481576 NR Description: dnaK-type molecular chaperone GRP78/BiP -
  misc_feature (3)..(635): Homolog of NCBI NO: 1037176 NR Description: immunoglobulin heavy chain binding protein
  misc_feature (1)..(635): Homolog of NCBI NO: 6016151 NR Description: Luminal binding protein 3 precursor (BiP3)
  misc_feature (8)..(651): Homolog of NCBI NO: 14423732 NR Description: Heat shock 70 kDa protein
  misc_feature (6)..(626): Homolog of NCBI NO: 21263753 NR Description: Heat shock cognate 71 kDa protein (Hsc70.1)
  misc_feature (124)..(646): Homolog of NCBI NO: 4164594 NR Description: heat shock protein 70 [Paracoccidioides
  misc_feature (1)..(635): Homolog of NCBI NO: 23480384 NR Description: heat shock protein [Plasmodium yoelii yoelii]
  misc_feature (3)..(635): Homolog of NCBI NO: 29539338 NR Description: Heat shock 70 kDa protein [Cyanidioschyzon
  misc_feature (1)..(626): Homolog of NCBI NO: 481576 NR Description: dnaK-type molecular chaperone GRP78/BiP -
  misc_feature (3)..(635): Homolog of NCBI NO: 1037176 NR Description: immunoglobulin heavy chain binding protein
  misc_feature (1)..(635): Homolog of NCBI NO: 6016151 NR Description: Luminal binding protein 3 precursor (BiP3)
  misc_feature (8)..(651): Homolog of NCBI NO: 14423732 NR Description: Heat shock 70 kDa protein
  misc_feature (6)..(626): Homolog of NCBI NO: 21263753 NR Description: Heat shock cognate 71 kDa protein (Hsc70.1)
  misc_feature (124)..(646): Homolog of NCBI NO: 4164594 NR Description: heat shock protein 70 [Paracoccidioides
  misc_feature (1)..(635): Homolog of NCBI NO: 23480384 NR Description: heat shock protein [Plasmodium yoelii yoelii]
  misc_feature (3)..(635): Homolog of NCBI NO: 29539338 NR Description: Heat shock 70 kDa protein [Cyanidioschyzon
  misc_feature (1)..(626): Homolog of NCBI NO: 481576 NR Description: dnaK-type molecular chaperone GRP78/BiP -
  misc_feature (3)..(635): Homolog of NCBI NO: 1037176 NR Description: immunoglobulin heavy chain binding protein
  misc_feature (1)..(635): Homolog of NCBI NO: 6016151 NR Description: Luminal binding protein 3 precursor (BiP3)
  misc_feature (8)..(651): Homolog of NCBI NO: 14423732 NR Description: Heat shock 70 kDa protein
  misc_feature (6)..(626): Homolog of NCBI NO: 21263753 NR Description: Heat shock cognate 71 kDa protein (Hsc70.1)
  misc_feature (124)..(646): Homolog of NCBI NO: 4164594 NR Description: heat shock protein 70 [Paracoccidioides
  misc_feature (1)..(635): Homolog of NCBI NO: 23480384 NR Description: heat shock protein [Plasmodium yoelii yoelii]
  misc_feature (3)..(635): Homolog of NCBI NO: 29539338 NR Description: Heat shock 70 kDa protein [Cyanidioschyzon
  misc_feature (1)..(626): Homolog of NCBI NO: 481576 NR Description: dnaK-type molecular chaperone GRP78/BiP -
  misc_feature (3)..(635): Homolog of NCBI NO: 1037176 NR Description: immunoglobulin heavy chain binding protein
  misc_feature (1)..(635): Homolog of NCBI NO: 6016151 NR Description: Luminal binding protein 3 precursor (BiP3)
  misc_feature (8)..(651): Homolog of NCBI NO: 14423732 NR Description: Heat shock 70 kDa protein
  misc_feature (6)..(626): Homolog of NCBI NO: 21263753 NR Description: Heat shock cognate 71 kDa protein (Hsc70.1)
  misc_feature (124)..(646): Homolog of NCBI NO: 4164594 NR Description: heat shock protein 70 [Paracoccidioides
  misc_feature (1)..(635): Homolog of NCBI NO: 23480384 NR Description: heat shock protein [Plasmodium yoelii yoelii]
  misc_feature (3)..(635): Homolog of NCBI NO: 29539338 NR Description: Heat shock 70 kDa protein [Cyanidioschyzon
  misc_feature (1)..(626): Homolog of NCBI NO: 481576 NR Description: dnaK-type molecular chaperone GRP78/BiP -
  misc_feature (3)..(635): Homolog of NCBI NO: 1037176 NR Description: immunoglobulin heavy chain binding protein
  misc_feature (1)..(635): Homolog of NCBI NO: 6016151 NR Description: Luminal binding protein 3 precursor (BiP3)
  misc_feature (8)..(651): Homolog of NCBI NO: 14423732 NR Description: Heat shock 70 kDa protein
  misc_feature (6)..(626): Homolog of NCBI NO: 21263753 NR Description: Heat shock cognate 71 kDa protein (Hsc70.1)
  misc_feature (124)..(646): Homolog of NCBI NO: 4164594 NR Description: heat shock protein 70 [Paracoccidioides
  misc_feature (1)..(635): Homolog of NCBI NO: 23480384 NR Description: heat shock protein [Plasmodium yoelii yoelii]
  misc_feature (3)..(635): Homolog of NCBI NO: 29539338 NR Description: Heat shock 70 kDa protein [Cyanidioschyzon
  misc_feature (1)..(626): Homolog of NCBI NO: 481576 NR Description: dnaK-type molecular chaperone GRP78/BiP -
  misc_feature (3)..(635): Homolog of NCBI NO: 1037176 NR Description: immunoglobulin heavy chain binding protein
  misc_feature (1)..(635): Homolog of NCBI NO: 6016151 NR Description: Luminal binding protein 3 precursor (BiP3)
  misc_feature (8)..(651): Homolog of NCBI NO: 14423732 NR Description: Heat shock 70 kDa protein
  misc_feature (6)..(626): Homolog of NCBI NO: 21263753 NR Description: Heat shock cognate 71 kDa protein (Hsc70.1)

SEQ ID NO: 45333 - protein, 588 aa, Arabidopsis thaliana; identical to SEQ ID NO: 22040
  peptide (1)..(588): Ceres Seq. ID no. 13646320
  misc_feature (61)..(583): Homolog of NCBI NO: 4164594 NR Description: heat shock protein 70 [Paracoccidioides
  misc_feature (1)..(572): Homolog of NCBI NO: 23480384 NR Description: heat shock protein [Plasmodium yoelii yoelii]
  misc_feature (1)..(572): Homolog of NCBI NO: 29539338 NR Description: Heat shock 70 kDa protein [Cyanidioschyzon
  misc_feature (1)..(563): Homolog of NCBI NO: 481576 NR Description: dnaK-type molecular chaperone GRP78/BiP -
  misc_feature (1)..(572): Homolog of NCBI NO: 1037176 NR Description: immunoglobulin heavy chain binding protein
  misc_feature (1)..(572): Homolog of NCBI NO: 6016151 NR Description: Luminal binding protein 3 precursor (BiP3)
  misc_feature (1)..(588): Homolog of NCBI NO: 14423732 NR Description: Heat shock 70 kDa protein
  misc_feature (1)..(563): Homolog of NCBI NO: 21263753 NR Description: Heat shock cognate 71 kDa protein (Hsc70.1)
  misc_feature (61)..(583): Homolog of NCBI NO: 4164594 NR Description: heat shock protein 70 [Paracoccidioides
  misc_feature (1)..(572): Homolog of NCBI NO: 23480384 NR Description: heat shock protein [Plasmodium yoelii yoelii]
  misc_feature (1)..(572): Homolog of NCBI NO: 29539338 NR Description: Heat shock 70 kDa protein [Cyanidioschyzon
  misc_feature (1)..(563): Homolog of NCBI NO: 481576 NR Description: dnaK-type molecular chaperone GRP78/BiP -
  misc_feature (1)..(572): Homolog of NCBI NO: 1037176 NR Description: immunoglobulin heavy chain binding protein
  misc_feature (1)..(572): Homolog of NCBI NO: 6016151 NR Description: Luminal binding protein 3 precursor (BiP3)
  misc_feature (1)..(588): Homolog of NCBI NO: 14423732 NR Description: Heat shock 70 kDa protein
  misc_feature (1)..(563): Homolog of NCBI NO: 21263753 NR Description: Heat shock cognate 71 kDa protein (Hsc70.1)
  misc_feature (61)..(583): Homolog of NCBI NO: 4164594 NR Description: heat shock protein 70 [Paracoccidioides
  misc_feature (1)..(572): Homolog of NCBI NO: 23480384 NR Description: heat shock protein [Plasmodium yoelii yoelii]
  misc_feature (1)..(572): Homolog of NCBI NO: 29539338 NR Description: Heat shock 70 kDa protein [Cyanidioschyzon
  misc_feature (1)..(563): Homolog of NCBI NO: 481576 NR Description: dnaK-type molecular chaperone GRP78/BiP -
  misc_feature (1)..(572): Homolog of NCBI NO: 1037176 NR Description: immunoglobulin heavy chain binding protein
  misc_feature (1)..(572): Homolog of NCBI NO: 6016151 NR Description: Luminal binding protein 3 precursor (BiP3)
  misc_feature (1)..(588): Homolog of NCBI NO: 14423732 NR Description: Heat shock 70 kDa protein
  misc_feature (1)..(563): Homolog of NCBI NO: 21263753 NR Description: Heat shock cognate 71 kDa protein (Hsc70.1)
  misc_feature (61)..(583): Homolog of NCBI NO: 4164594 NR Description: heat shock protein 70 [Paracoccidioides
  misc_feature (1)..(572): Homolog of NCBI NO: 23480384 NR Description: heat shock protein [Plasmodium yoelii yoelii]
  misc_feature (1)..(572): Homolog of NCBI NO: 29539338 NR Description: Heat shock 70 kDa protein [Cyanidioschyzon
  misc_feature (1)..(563): Homolog of NCBI NO: 481576 NR Description: dnaK-type molecular chaperone GRP78/BiP -
  misc_feature (1)..(572): Homolog of NCBI NO: 1037176 NR Description: immunoglobulin heavy chain binding protein
  misc_feature (1)..(572): Homolog of NCBI NO: 6016151 NR Description: Luminal binding protein 3 precursor (BiP3)
  misc_feature (1)..(588): Homolog of NCBI NO: 14423732 NR Description: Heat shock 70 kDa protein
  misc_feature (1)..(563): Homolog of NCBI NO: 21263753 NR Description: Heat shock cognate 71 kDa protein (Hsc70.1)
  misc_feature (61)..(583): Homolog of NCBI NO: 4164594 NR Description: heat shock protein 70 [Paracoccidioides
  misc_feature (1)..(572): Homolog of NCBI NO: 23480384 NR Description: heat shock protein [Plasmodium yoelii yoelii]
  misc_feature (1)..(572): Homolog of NCBI NO: 29539338 NR Description: Heat shock 70 kDa protein [Cyanidioschyzon
  misc_feature (1)..(563): Homolog of NCBI NO: 481576 NR Description: dnaK-type molecular chaperone GRP78/BiP -
  misc_feature (1)..(572): Homolog of NCBI NO: 1037176 NR Description: immunoglobulin heavy chain binding protein
  misc_feature (1)..(572): Homolog of NCBI NO: 6016151 NR Description: Luminal binding protein 3 precursor (BiP3)
  misc_feature (1)..(588): Homolog of NCBI NO: 14423732 NR Description: Heat shock 70 kDa protein
  misc_feature (1)..(563): Homolog of NCBI NO: 21263753 NR Description: Heat shock cognate 71 kDa protein (Hsc70.1)
  misc_feature (61)..(583): Homolog of NCBI NO: 4164594 NR Description: heat shock protein 70 [Paracoccidioides
  misc_feature (1)..(572): Homolog of NCBI NO: 23480384 NR Description: heat shock protein [Plasmodium yoelii yoelii]
  misc_feature (1)..(572): Homolog of NCBI NO: 29539338 NR Description: Heat shock 70 kDa protein [Cyanidioschyzon
  misc_feature (1)..(563): Homolog of NCBI NO: 481576 NR Description: dnaK-type molecular chaperone GRP78/BiP -
  misc_feature (1)..(572): Homolog of NCBI NO: 1037176 NR Description: immunoglobulin heavy chain binding protein
  misc_feature (1)..(572): Homolog of NCBI NO: 6016151 NR Description: Luminal binding protein 3 precursor (BiP3)
  misc_feature (1)..(588): Homolog of NCBI NO: 14423732 NR Description: Heat shock 70 kDa protein
  misc_feature (1)..(563): Homolog of NCBI NO: 21263753 NR Description: Heat shock cognate 71 kDa protein (Hsc70.1)
  misc_feature (61)..(583): Homolog of NCBI NO: 4164594 NR Description: heat shock protein 70 [Paracoccidioides
  misc_feature (1)..(572): Homolog of NCBI NO: 23480384 NR Description: heat shock protein [Plasmodium yoelii yoelii]
  misc_feature (1)..(572): Homolog of NCBI NO: 29539338 NR Description: Heat shock 70 kDa protein [Cyanidioschyzon
  misc_feature (1)..(563): Homolog of NCBI NO: 481576 NR Description: dnaK-type molecular chaperone GRP78/BiP -
  misc_feature (1)..(572): Homolog of NCBI NO: 1037176 NR Description: immunoglobulin heavy chain binding protein
  misc_feature (1)..(572): Homolog of NCBI NO: 6016151 NR Description: Luminal binding protein 3 precursor (BiP3)
  misc_feature (1)..(588): Homolog of NCBI NO: 14423732 NR Description: Heat shock 70 kDa protein
  misc_feature (1)..(563): Homolog of NCBI NO: 21263753 NR Description: Heat shock cognate 71 kDa protein (Hsc70.1)

SEQ ID NO: 45334 - protein, 562 aa, Arabidopsis thaliana; identical to SEQ ID NO: 22041
  peptide (1)..(562): Ceres Seq. ID no. 13646321
  misc_feature (35)..(557): Homolog of NCBI NO: 4164594 NR Description: heat shock protein 70 [Paracoccidioides
  misc_feature (1)..(546): Homolog of NCBI NO: 23480384 NR Description: heat shock protein [Plasmodium yoelii yoelii]
  misc_feature (1)..(546): Homolog of NCBI NO: 29539338 NR Description: Heat shock 70 kDa protein [Cyanidioschyzon
  misc_feature (1)..(537): Homolog of NCBI NO: 481576 NR Description: dnaK-type molecular chaperone GRP78/BiP -
  misc_feature (1)..(546): Homolog of NCBI NO: 1037176 NR Description: immunoglobulin heavy chain binding protein
  misc_feature (1)..(546): Homolog of NCBI NO: 6016151 NR Description: Luminal binding protein 3 precursor (BiP3)
  misc_feature (1)..(562): Homolog of NCBI NO: 14423732 NR Description: Heat shock 70 kDa protein
  misc_feature (1)..(537): Homolog of NCBI NO: 21263753 NR Description: Heat shock cognate 71 kDa protein (Hsc70.1)
  misc_feature (35)..(557): Homolog of NCBI NO: 4164594 NR Description: heat shock protein 70 [Paracoccidioides
  misc_feature (1)..(546): Homolog of NCBI NO: 23480384 NR Description: heat shock protein [Plasmodium yoelii yoelii]
  misc_feature (1)..(546): Homolog of NCBI NO: 29539338 NR Description: Heat shock 70 kDa protein [Cyanidioschyzon
  misc_feature (1)..(537): Homolog of NCBI NO: 481576 NR Description: dnaK-type molecular chaperone GRP78/BiP -
  misc_feature (1)..(546): Homolog of NCBI NO: 1037176 NR Description: immunoglobulin heavy chain binding protein
  misc_feature (1)..(546): Homolog of NCBI NO: 6016151 NR Description: Luminal binding protein 3 precursor (BiP3)
  misc_feature (1)..(562): Homolog of NCBI NO: 14423732 NR Description: Heat shock 70 kDa protein
  misc_feature (1)..(537): Homolog of NCBI NO: 21263753 NR Description: Heat shock cognate 71 kDa protein (Hsc70.1)
  misc_feature (35)..(557): Homolog of NCBI NO: 4164594 NR Description: heat shock protein 70 [Paracoccidioides
  misc_feature (1)..(546): Homolog of NCBI NO: 23480384 NR Description: heat shock protein [Plasmodium yoelii yoelii]
  misc_feature (1)..(546): Homolog of NCBI NO: 29539338 NR Description: Heat shock 70 kDa protein [Cyanidioschyzon
  misc_feature (1)..(537): Homolog of NCBI NO: 481576 NR Description: dnaK-type molecular chaperone GRP78/BiP -
  misc_feature (1)..(546): Homolog of NCBI NO: 1037176 NR Description: immunoglobulin heavy chain binding protein
  misc_feature (1)..(546): Homolog of NCBI NO: 6016151 NR Description: Luminal binding protein 3 precursor (BiP3)
  misc_feature (1)..(562): Homolog of NCBI NO: 14423732 NR Description: Heat shock 70 kDa protein
  misc_feature (1)..(537): Homolog of NCBI NO: 21263753 NR Description: Heat shock cognate 71 kDa protein (Hsc70.1)
  misc_feature (35)..(557): Homolog of NCBI NO: 4164594 NR Description: heat shock protein 70 [Paracoccidioides
  misc_feature (1)..(546): Homolog of NCBI NO: 23480384 NR Description: heat shock protein [Plasmodium yoelii yoelii]
  misc_feature (1)..(546): Homolog of NCBI NO: 29539338 NR Description: Heat shock 70 kDa protein [Cyanidioschyzon
  misc_feature (1)..(537): Homolog of NCBI NO: 481576 NR Description: dnaK-type molecular chaperone GRP78/BiP -
  misc_feature (1)..(546): Homolog of NCBI NO: 1037176 NR Description: immunoglobulin heavy chain binding protein
  misc_feature (1)..(546): Homolog of NCBI NO: 6016151 NR Description: Luminal binding protein 3 precursor (BiP3)
  misc_feature (1)..(562): Homolog of NCBI NO: 14423732 NR Description: Heat shock 70 kDa protein
  misc_feature (1)..(537): Homolog of NCBI NO: 21263753 NR Description: Heat shock cognate 71 kDa protein (Hsc70.1)
  misc_feature (35)..(557): Homolog of NCBI NO: 4164594 NR Description: heat shock protein 70 [Paracoccidioides
  misc_feature (1)..(546): Homolog of NCBI NO: 23480384 NR Description: heat shock protein [Plasmodium yoelii yoelii]
  misc_feature (1)..(546): Homolog of NCBI NO: 29539338 NR Description: Heat shock 70 kDa protein [Cyanidioschyzon
  misc_feature (1)..(537): Homolog of NCBI NO: 481576 NR Description: dnaK-type molecular chaperone GRP78/BiP -
  misc_feature (1)..(546): Homolog of NCBI NO: 1037176 NR Description: immunoglobulin heavy chain binding protein
  misc_feature (1)..(546): Homolog of NCBI NO: 6016151 NR Description: Luminal binding protein 3 precursor (BiP3)
  misc_feature (1)..(562): Homolog of NCBI NO: 14423732 NR Description: Heat shock 70 kDa protein
  misc_feature (1)..(537): Homolog of NCBI NO: 21263753 NR Description: Heat shock cognate 71 kDa protein (Hsc70.1)
  misc_feature (1)..(546): Homolog of NCBI NO: 29539338 NR Description: Heat shock 70 kDa protein [Cyanidioschyzon
  misc_feature (1)..(537): Homolog of NCBI NO: 481576 NR Description: dnaK-type molecular chaperone GRP78/BiP -
  misc_feature (1)..(546): Homolog of NCBI NO: 1037176 NR Description: immunoglobulin heavy chain binding protein
  misc_feature (1)..(546): Homolog of NCBI NO: 6016151 NR Description: Luminal binding protein 3 precursor (BiP3)
  misc_feature (1)..(562): Homolog of NCBI NO: 14423732 NR Description: Heat shock 70 kDa protein
  misc_feature (1)..(537): Homolog of NCBI NO: 21263753 NR Description: Heat shock cognate 71 kDa protein (Hsc70.1)
  misc_feature (35)..(557): Homolog of NCBI NO: 4164594 NR Description: heat shock protein 70 [Paracoccidioides
  misc_feature (1)..(546): Homolog of NCBI NO: 23480384 NR Description: heat shock protein [Plasmodium yoelii yoelii]
  misc_feature (35)..(557): Homolog of NCBI NO: 4164594 NR Description: heat shock protein 70 [Paracoccidioides
  misc_feature (1)..(546): Homolog of NCBI NO: 23480384 NR Description: heat shock protein [Plasmodium yoelii yoelii]
  misc_feature (1)..(546): Homolog of NCBI NO: 29539338 NR Description: Heat shock 70 kDa protein [Cyanidioschyzon
  misc_feature (1)..(537): Homolog of NCBI NO: 481576 NR Description: dnaK-type molecular chaperone GRP78/BiP -
  misc_feature (1)..(546): Homolog of NCBI NO: 1037176 NR Description: immunoglobulin heavy chain binding protein
  misc_feature (1)..(546): Homolog of NCBI NO: 6016151 NR Description: Luminal binding protein 3 precursor (BiP3)
  misc_feature (1)..(562): Homolog of NCBI NO: 14423732 NR Description: Heat shock 70 kDa protein
  misc_feature (1)..(537): Homolog of NCBI NO: 21263753 NR Description: Heat shock cognate 71 kDa protein (Hsc70.1)

SEQ ID NO: 45335 - DNA, 946 bp, Arabidopsis thaliana; identical to SEQ ID NO: 43845
  misc_feature (1)..(946): Ceres Seq. ID no. 12562112

SEQ ID NO: 45336 - protein, 257 aa, Arabidopsis thaliana; identical to SEQ ID NO: 43846
  peptide (1)..(257): Ceres Seq. ID no. 12562113
  misc_feature (81)..(256): Homolog of NCBI NO: 11231121 NR Description: hypothetical protein [Macaca fascicularis]
  misc_feature (54)..(212): Homolog of NCBI NO: 28573123 NR Description: CG9473-PB [Drosophila melanogaster]
  misc_feature (32)..(161): Homolog of NCBI NO: 26354242 NR Description: unnamed protein product [Mus musculus]
  misc_feature (32)..(161): Homolog of NCBI NO: 4885481 NR Description: mediator of RNA polymerase II transcription,
  misc_feature (33)..(256): Homolog of NCBI NO: 5360103 NR Description: NY-REN-28 antigen [Homo sapiens]
  misc_feature (32)..(256): Homolog of NCBI NO: 30583885 NR Description: Homo sapiens mediator of RNA polymerase II
  misc_feature (32)..(256): Homolog of NCBI NO: 29840782 NR Description: RNA polymerase transcriptional regulation subunit 6 homolog (Activator-recruited cofactor 33 kDa component)
  misc_feature (32)..(256): Homolog of NCBI NO: 3329506 NR Description: RNA polymerase transcriptional regulation
  misc_feature (32)..(256): Homolog of NCBI NO: 34867365 NR Description: similar to RNA polymerase II transcriptional
  misc_feature (1)..(257): Homolog of NCBI NO: 22331241 NR Description: hypothetical protein
  misc_feature (81)..(256): Homolog of NCBI NO: 11231121 NR Description: hypothetical protein [Macaca fascicularis]
  misc_feature (54)..(212): Homolog of NCBI NO: 28573123 NR Description: CG9473-PB [Drosophila melanogaster]
  misc_feature (32)..(161): Homolog of NCBI NO: 26354242 NR Description: unnamed protein product [Mus musculus]
  misc_feature (32)..(161): Homolog of NCBI NO: 4885481 NR Description: mediator of RNA polymerase II transcription,
  misc_feature (33)..(256): Homolog of NCBI NO: 5360103 NR Description: NY-REN-28 antigen [Homo sapiens]
  misc_feature (32)..(256): Homolog of NCBI NO: 30583885 NR Description: Homo sapiens mediator of RNA polymerase II
  misc_feature (32)..(256): Homolog of NCBI NO: 29840782 NR Description: RNA polymerase transcriptional regulation subunit 6 homolog (Activator-recruited cofactor 33 kDa component)
  misc_feature (32)..(256): Homolog of NCBI NO: 3329506 NR Description: RNA polymerase transcriptional regulation
  misc_feature (32)..(256): Homolog of NCBI NO: 34867365 NR Description: similar to RNA polymerase II transcriptional
  misc_feature (1)..(257): Homolog of NCBI NO: 22331241 NR Description: hypothetical protein

SEQ ID NO: 45337 - protein, 225 aa, Arabidopsis thaliana; identical to SEQ ID NO: 43847
  peptide (1)..(225): Ceres Seq. ID no. 12562114
  misc_feature (49)..(224): Homolog of NCBI NO: 11231121 NR Description: hypothetical protein [Macaca fascicularis]
  misc_feature (22)..(180): Homolog of NCBI NO: 28573123 NR Description: CG9473-PB [Drosophila melanogaster]
  misc_feature (1)..(129): Homolog of NCBI NO: 26354242 NR Description: unnamed protein product [Mus musculus]
  misc_feature (1)..(129): Homolog of NCBI NO: 4885481 NR Description: mediator of RNA polymerase II transcription,
  misc_feature (1)..(224): Homolog of NCBI NO: 5360103 NR Description: NY-REN-28 antigen [Homo sapiens]
  misc_feature (1)..(224): Homolog of NCBI NO: 29840782 NR Description: RNA polymerase transcriptional regulation subunit 6 homolog (Activator-recruited cofactor 33 kDa component)
  misc_feature (1)..(224): Homolog of NCBI NO: 30583885 NR Description: Homo sapiens mediator of RNA polymerase II
  misc_feature (1)..(224): Homolog of NCBI NO: 3329506 NR Description: RNA polymerase transcriptional regulation
  misc_feature (1)..(224): Homolog of NCBI NO: 34867365 NR Description: similar to RNA polymerase II transcriptional
  misc_feature (1)..(225): Homolog of NCBI NO: 22331241 NR Description: hypothetical protein
  misc_feature (49)..(224): Homolog of NCBI NO: 11231121 NR Description: hypothetical protein [Macaca fascicularis]
  misc_feature (22)..(180): Homolog of NCBI NO: 28573123 NR Description: CG9473-PB [Drosophila melanogaster]
  misc_feature (1)..(129): Homolog of NCBI NO: 26354242 NR Description: unnamed protein product [Mus musculus]
  misc_feature (1)..(129): Homolog of NCBI NO: 4885481 NR Description: mediator of RNA polymerase II transcription,
  misc_feature (1)..(224): Homolog of NCBI NO: 5360103 NR Description: NY-REN-28 antigen [Homo sapiens]
  misc_feature (1)..(224): Homolog of NCBI NO: 29840782 NR Description: RNA polymerase transcriptional regulation subunit 6 homolog (Activator-recruited cofactor 33 kDa component)
  misc_feature (1)..(224): Homolog of NCBI NO: 30583885 NR Description: Homo sapiens mediator of RNA polymerase II
  misc_feature (1)..(224): Homolog of NCBI NO: 3329506 NR Description: RNA polymerase transcriptional regulation
  misc_feature (1)..(224): Homolog of NCBI NO: 34867365 NR Description: similar to RNA polymerase II transcriptional
  misc_feature (1)..(225): Homolog of NCBI NO: 22331241 NR Description: hypothetical protein

SEQ ID NO: 45338 - protein, 169 aa, Arabidopsis thaliana; identical to SEQ ID NO: 43848
  peptide (1)..(169): Ceres Seq. ID no. 12562115
  misc_feature (1)..(168): Homolog of NCBI NO: 11231121 NR Description: hypothetical protein [Macaca fascicularis]
  misc_feature (1)..(124): Homolog of NCBI NO: 28573123 NR Description: CG9473-PB [Drosophila melanogaster]
  misc_feature (1)..(73): Homolog of NCBI NO: 26354242 NR Description: unnamed protein product [Mus musculus]
  misc_feature (1)..(73): Homolog of NCBI NO: 4885481 NR Description: mediator of RNA polymerase II transcription,
  misc_feature (1)..(168): Homolog of NCBI NO: 5360103 NR Description: NY-REN-28 antigen [Homo sapiens]
  misc_feature (1)..(168): Homolog of NCBI NO: 30583885 NR Description: Homo sapiens mediator of RNA polymerase II
  misc_feature (1)..(168): Homolog of NCBI NO: 29840782 NR Description: RNA polymerase transcriptional regulation subunit 6 homolog (Activator-recruited cofactor 33 kDa component)
  misc_feature (1)..(168): Homolog of NCBI NO: 3329506 NR Description: RNA polymerase transcriptional regulation
  misc_feature (1)..(168): Homolog of NCBI NO: 34867365 NR Description: similar to RNA polymerase II transcriptional
  misc_feature (1)..(169): Homolog of NCBI NO: 22331241 NR Description: hypothetical protein
  misc_feature (1)..(168): Homolog of NCBI NO: 11231121 NR Description: hypothetical protein [Macaca fascicularis]
  misc_feature (1)..(124): Homolog of NCBI NO: 28573123 NR Description: CG9473-PB [Drosophila melanogaster]
  misc_feature (1)..(73): Homolog of NCBI NO: 26354242 NR Description: unnamed protein product [Mus musculus]
  misc_feature (1)..(73): Homolog of NCBI NO: 4885481 NR Description: mediator of RNA polymerase II transcription,
  misc_feature (1)..(168): Homolog of NCBI NO: 5360103 NR Description: NY-REN-28 antigen [Homo sapiens]
  misc_feature (1)..(168): Homolog of NCBI NO: 30583885 NR Description: Homo sapiens mediator of RNA polymerase II
  misc_feature (1)..(168): Homolog of NCBI NO: 29840782 NR Description: RNA polymerase transcriptional regulation subunit 6 homolog (Activator-recruited cofactor 33 kDa component)
  misc_feature (1)..(168): Homolog of NCBI NO: 3329506 NR Description: RNA polymerase transcriptional regulation
  misc_feature (1)..(168): Homolog of NCBI NO: 34867365 NR Description: similar to RNA polymerase II transcriptional
  misc_feature (1)..(169): Homolog of NCBI NO: 22331241 NR Description: hypothetical protein

SEQ ID NO: 45339 - DNA, 1499 bp, Arabidopsis thaliana; identical to SEQ ID NO: 36597
  misc_feature (1)..(1499): Ceres Seq. ID no. 12560653
  misc_feature: MA Experiment ID: 20000179 Result: Up-regulated in Transcription
  misc_feature: MA Experiment 20000179 PARAMETER Experiment Name: At_Germinating_Seeds_P Parameter: Age (hr) Value: 6 vs. 0
  misc_feature: MA Experiment 20000179 PARAMETER Experiment Name: At_Germinating_Seeds_P Parameter: Tissue Value: Germinating Seeds
  misc_feature: MA Experiment ID: 20000180 Result: Up-regulated in Transcription
  misc_feature: MA Experiment 20000180 PARAMETER Experiment Name: At_Germinating_Seeds_P Parameter: Age (hr) Value: 24 vs. 0
  misc_feature: MA Experiment 20000180 PARAMETER Experiment Name: At_Germinating_Seeds_P Parameter: Tissue Value: Germinating Seeds
  misc_feature: MA Experiment ID: 20000265 Result: Up-regulated in Transcription
  misc_feature: MA Experiment 20000265 PARAMETER Experiment Name: At_Open_Flower_P Parameter: Age (day) Value: 21
  misc_feature: MA Experiment 20000265 PARAMETER Experiment Name: At_Open_Flower_P Parameter: Plant Line Value: WS
  misc_feature: MA Experiment 20000265 PARAMETER Experiment Name: At_Open_Flower_P Parameter: Tissue Value: Closed Flower vs. Whole Plant
  misc_feature: MA Experiment ID: 20001451 Result: Down-regulated in Transcription
  misc_feature: MA Experiment 20001451 PARAMETER Experiment Name: At_Far-red-induction_P Parameter: Age (day) Value: 7
  misc_feature: MA Experiment 20001451 PARAMETER Experiment Name: At_Far-red-induction_P Parameter: Light Value: Far-red vs. White
  misc_feature: MA Experiment 20001451 PARAMETER Experiment Name: At_Far-red-induction_P Parameter: Organism Value: A. thaliana
  misc_feature: MA Experiment 20001451 PARAMETER Experiment Name: At_Far-red-induction_P Parameter: Plant Line Value: Columbia
  misc_feature: MA Experiment 20001451 PARAMETER Experiment Name: At_Far-red-induction_P Parameter: Timepoint (hr) Value: 24
  misc_feature: MA Experiment 20001451 PARAMETER Experiment Name: At_Far-red-induction_P Parameter: Tissue Value: Whole Plant

SEQ ID NO: 45340 - protein, 428 aa, Arabidopsis thaliana; identical to SEQ ID NO: 36598
  peptide (1)..(428): Ceres Seq. ID no. 12560654
  misc_feature (376)..(416): Pfam Name: Zinc finger, C3HC4 type (RING finger) Pfam Description: Zinc finger, C3HC4 type (RING finger)
  misc_feature (376)..(416): Pfam Name: Zinc finger, C3HC4 type (RING finger) Pfam Description: Zinc finger, C3HC4 type (RING finger)
  misc_feature (280)..(425): Homolog of NCBI NO: 15222059 NR Description: unknown protein; protein id: At1g12760.1
  misc_feature (46)..(260): Homolog of NCBI NO: 15222059 NR Description: unknown protein; protein id: At1g12760.1
  misc_feature (119)..(426): Homolog of NCBI NO: 38344371 NR Description: OSJNBb0032E06.5 [Oryza sativa (japonica
  misc_feature (72)..(423): Homolog of NCBI NO: 33146524 NR Description: putative RES protein [Oryza sativa (japonica
  misc_feature (96)..(424): Homolog of NCBI NO: 16604388 NR Description: At1g63170/F16M19_7 [Arabidopsis thaliana]
  misc_feature (280)..(425): Homolog of NCBI NO: 15222059 NR Description: unknown protein; protein id: At1g12760.1
  misc_feature (119)..(426): Homolog of NCBI NO: 38344371 NR Description: OSJNBb0032E06.5 [Oryza sativa (japonica
  misc_feature (96)..(424): Homolog of NCBI NO: 16604388 NR Description: At1g63170/F16M19_7 [Arabidopsis thaliana]
  misc_feature (39)..(428): Homolog of NCBI NO: 18413629 NR Description: putative protein
  misc_feature (39)..(374): Homolog of NCBI NO: 7487667 NR Description: hypothetical protein T5C23.110 - Arabidopsis
  misc_feature (375)..(428): Homolog of NCBI NO: 7487667 NR Description: hypothetical protein T5C23.110 - Arabidopsis
  misc_feature (96)..(427): Homolog of NCBI NO: 18407748 NR Description: expressed protein
  misc_feature (96)..(427): Homolog of NCBI NO: 21554228 NR Description: unknown [Arabidopsis thaliana]
  misc_feature (72)..(423): Homolog of NCBI NO: 33146524 NR Description: putative RES protein [Oryza sativa (japonica
  misc_feature (46)..(260): Homolog of NCBI NO: 15222059 NR Description: unknown protein; protein id: At1g12760.1
  misc_feature (96)..(427): Homolog of NCBI NO: 21554228 NR Description: unknown [Arabidopsis thaliana]
  misc_feature (96)..(427): Homolog of NCBI NO: 18407748 NR Description: expressed protein
  misc_feature (375)..(428): Homolog of NCBI NO: 7487667 NR Description: hypothetical protein T5C23.110 - Arabidopsis
  misc_feature (39)..(374): Homolog of NCBI NO: 7487667 NR Description: hypothetical protein T5C23.110 - Arabidopsis
  misc_feature (39)..(428): Homolog of NCBI NO: 18413629 NR Description: putative protein

SEQ ID NO: 45341 - protein, 390 aa, Arabidopsis thaliana; identical to SEQ ID NO: 36599
  peptide (1)..(390): Ceres Seq. ID no. 12560655
  misc_feature (338)..(378): Pfam Name: Zinc finger, C3HC4 type (RING finger) Pfam Description: Zinc finger, C3HC4 type (RING finger)
  misc_feature (338)..(378): Pfam Name: Zinc finger, C3HC4 type (RING finger) Pfam Description: Zinc finger, C3HC4 type (RING finger)
  misc_feature (242)..(387): Homolog of NCBI NO: 15222059 NR Description: unknown protein; protein id: At1g12760.1
  misc_feature (8)..(222): Homolog of NCBI NO: 15222059 NR Description: unknown protein; protein id: At1g12760.1
  misc_feature (81)..(388): Homolog of NCBI NO: 38344371 NR Description: OSJNBb0032E06.5 [Oryza sativa (japonica
  misc_feature (34)..(385): Homolog of NCBI NO: 33146524 NR Description: putative RES protein [Oryza sativa (japonica
  misc_feature (58)..(386): Homolog of NCBI NO: 16604388 NR Description: At1g63170/F16M19_7 [Arabidopsis thaliana]
  misc_feature (242)..(387): Homolog of NCBI NO: 15222059 NR Description: unknown protein; protein id: At1g12760.1
  misc_feature (81)..(388): Homolog of NCBI NO: 38344371 NR Description: OSJNBb0032E06.5 [Oryza sativa (japonica
  misc_feature (58)..(386): Homolog of NCBI NO: 16604388 NR Description: At1g63170/F16M19_7 [Arabidopsis thaliana]
  misc_feature (1)..(390): Homolog of NCBI NO: 18413629 NR Description: putative protein
  misc_feature (1)..(336): Homolog of NCBI NO: 7487667 NR Description: hypothetical protein T5C23.110 - Arabidopsis
  misc_feature (337)..(390): Homolog of NCBI NO: 7487667 NR Description: hypothetical protein T5C23.110 - Arabidopsis
  misc_feature (58)..(389): Homolog of NCBI NO: 18407748 NR Description: expressed protein
  misc_feature (58)..(389): Homolog of NCBI NO: 21554228 NR Description: unknown [Arabidopsis thaliana]
  misc_feature (34)..(385): Homolog of NCBI NO: 33146524 NR Description: putative RES protein [Oryza sativa (japonica
  misc_feature (8)..(222): Homolog of NCBI NO: 15222059 NR Description: unknown protein; protein id: At1g12760.1
  misc_feature (58)..(389): Homolog of NCBI NO: 21554228 NR Description: unknown [Arabidopsis thaliana]
  misc_feature (58)..(389): Homolog of NCBI NO: 18407748 NR Description: expressed protein
  misc_feature (337)..(390): Homolog of NCBI NO: 7487667 NR Description: hypothetical protein T5C23.110 - Arabidopsis
  misc_feature (1)..(336): Homolog of NCBI NO: 7487667 NR Description: hypothetical protein T5C23.110 - Arabidopsis
  misc_feature (1)..(390): Homolog of NCBI NO: 18413629 NR Description: putative protein

SEQ ID NO: 45342 - protein, 311 aa, Arabidopsis thaliana; identical to SEQ ID NO: 36600
  peptide (1)..(311): Ceres Seq. ID no. 12560656
  misc_feature (259)..(299): Pfam Name: Zinc finger, C3HC4 type (RING finger) Pfam Description: Zinc finger, C3HC4 type (RING finger)
  misc_feature (259)..(299): Pfam Name: Zinc finger, C3HC4 type (RING finger) Pfam Description: Zinc finger, C3HC4 type (RING finger)
  misc_feature (163)..(308): Homolog of NCBI NO: 15222059 NR Description: unknown protein; protein id: At1g12760.1
  misc_feature (1)..(143): Homolog of NCBI NO: 15222059 NR Description: unknown protein; protein id: At1g12760.1
  misc_feature (2)..(309): Homolog of NCBI NO: 38344371 NR Description: OSJNBb0032E06.5 [Oryza sativa (japonica
  misc_feature (1)..(306): Homolog of NCBI NO: 33146524 NR Description: putative RES protein [Oryza sativa (japonica
  misc_feature (1)..(307): Homolog of NCBI NO: 16604388 NR Description: At1g63170/F16M19_7 [Arabidopsis thaliana]
  misc_feature (163)..(308): Homolog of NCBI NO: 15222059 NR Description: unknown protein; protein id: At1g12760.1
  misc_feature (2)..(309): Homolog of NCBI NO: 38344371 NR Description: OSJNBb0032E06.5 [Oryza sativa (japonica
  misc_feature (1)..(307): Homolog of NCBI NO: 16604388 NR Description: At1g63170/F16M19_7 [Arabidopsis thaliana]
  misc_feature (1)..(311): Homolog of NCBI NO: 18413629 NR Description: putative protein
  misc_feature (1)..(257): Homolog of NCBI NO: 7487667 NR Description: hypothetical protein T5C23.110 - Arabidopsis
  misc_feature (258)..(311): Homolog of NCBI NO: 7487667 NR Description: hypothetical protein T5C23.110 - Arabidopsis
  misc_feature (1)..(310): Homolog of NCBI NO: 18407748 NR Description: expressed protein
  misc_feature (1)..(310): Homolog of NCBI NO: 21554228 NR Description: unknown [Arabidopsis thaliana]
  misc_feature (1)..(306): Homolog of NCBI NO: 33146524 NR Description: putative RES protein [Oryza sativa (japonica
  misc_feature (1)..(143): Homolog of NCBI NO: 15222059 NR Description: unknown protein; protein id: At1g12760.1
  misc_feature (1)..(310): Homolog of NCBI NO: 21554228 NR Description: unknown [Arabidopsis thaliana]
  misc_feature (1)..(310): Homolog of NCBI NO: 18407748 NR Description: expressed protein
  misc_feature (258)..(311): Homolog of NCBI NO: 7487667 NR Description: hypothetical protein T5C23.110 - Arabidopsis
  misc_feature (1)..(257): Homolog of NCBI NO: 7487667 NR Description: hypothetical protein T5C23.110 - Arabidopsis
  misc_feature (1)..(311): Homolog of NCBI NO: 18413629 NR Description: putative protein

SEQ ID NO: 45343 - DNA, 1422 bp, Arabidopsis thaliana
  misc_feature (1)..(1422): Ceres Seq. ID no. 13576507
  misc_feature: MA Experiment ID: 20000184 Result: Down-regulated in Transcription
  misc_feature: MA Experiment 20000184 PARAMETER Experiment Name: At_Shoots__P Parameter: Age (day) Value: 7
  misc_feature: MA Experiment 20000184 PARAMETER Experiment Name: At_Shoots__P Parameter: Tissue Value: Shoots vs. Whole Plant
  misc_feature: MA Experiment ID: 20001911 Result: Up-regulated in Transcription
  misc_feature: MA Experiment 20001911 PARAMETER Experiment Name: At_Drought_Reproduction_P Parameter: Age (day) Value: 40
  misc_feature: MA Experiment 20001911 PARAMETER Experiment Name: At_Drought_Reproduction_P Parameter: Organism Value: A. thaliana
  misc_feature: MA Experiment 20001911 PARAMETER Experiment Name: At_Drought_Reproduction_P Parameter: Plant Line Value: WS
  misc_feature: MA Experiment 20001911 PARAMETER Experiment Name: At_Drought_Reproduction_P Parameter: Timepoint (day) Value: 10
  misc_feature: MA Experiment 20001911 PARAMETER Experiment Name: At_Drought_Reproduction_P Parameter: Tissue Value: Flowers
  misc_feature: MA Experiment 20001911 PARAMETER Experiment Name: At_Drought_Reproduction_P Parameter: Treatment Value: Drought vs. No Drought
tgtcggaaggagccgaatgattctgctatggctgctggtccggtggttatcaagcgcgaaactgaagatactcctggagaagaagaagaaggtaacacctctagagacaacgccttggttgaagtcaagttagagaagcaagaagaacttggtcttctcgttacttgtggaatccagaaacgaaaacgactcgctcgtggagcaagatctcgaagatattcagacaccagcttcgaggaaaagccgattattatccctccgaagcacaagcagcagagagtattaaccactcgatggaacaatgaaaggattaagttcgcagagcaaaccttagcggatattatgaaggagaaaggtgctacttttgaaaaacctgttacgcgacaactgttaagagttattgctcgaagcaagataggtgatactgggctcttggatcattccttgaagcacatggatggcaaagtaacaccaggtggttctgatcggtttaggaggtgttacaatactgatggatgcatgcagtattggctcgaaagtgctgaccttgtcaagattaaacttgaatctggaattcctgatcctacttgggttcccccagcttggtggatggttcagactgcatcatcacatgatcaatctgcggttacgtcaaagcttcttatgggggagattgagcaaatgaagagtgaaatcaaagaacttgtatcaaagcaaaatttaccagatcatgctgatgcaaatgagaaactattcaaggaacttaagagttggagggaaaacactgataagcaaattgtggagatctcagaatcgttgacttcaactcagggcatgttcaaggaattgaattcgtggaaagataaagtagatcagcagttactgggaatttcaaacacgctgagcaatctgcagccgaatgggagcacgtcattcagtccagctcaggaaaattgggaacatatattgaagacttccaatttggaagattttacaacgaatggttttgaccaatgggatgaccttattgatggtctaccagaggctgtcaggccggagacctacgcgcttccaacaaatccttgcaaaagctctctccaagatcagtcattgatctctctccaagaccagtcattggtctctctccaagaccagtcattggtcaacgtagatatgcaaatgacagaaagcatgactagaggtgaatccagaagctccagtcaggaaaaagctgaaatgactccgggttcttcgattactgcaggtccaaaatcagatattgacgacccaacaatccagactcaggaaaccttgaaggagttggtgacatggaaagccaaagcggagcagcagctgatggaattatcaaacgctgtccttgctcttaagggacagaatcaacccaactggcgttacccgtga

SEQ ID NO: 45344 - protein, 473 aa, Arabidopsis thaliana
  peptide (1)..(473): Ceres Seq. ID no. 13576508
  misc_feature (27)..(319): Homolog of NCBI NO: 30696040 NR Description: DYAD [Arabidopsis thaliana]
  misc_feature (27)..(319): Homolog of NCBI NO: 9759279 NR Description: gb|AAD12714.1~gene_id:MFG13.3~similar to unknown
  misc_feature (27)..(319): Homolog of NCBI NO: 16033414 NR Description: SWITCH1 splice variant S [Arabidopsis thaliana]
  misc_feature (10)..(473): Homolog of NCBI NO: 15237794 NR Description: expressed protein [Arabidopsis thaliana]
CRKEPNDSAMAAGPVVIKRETEDTPGEEEEGNTSRDNALVEVKLEKQEELGLLVTCGIQKRKRLARGARSRRYSDTSFEEKPIIIPPKHKQQRVLTTRWNNERIKFAEQTLADIMKEKGATFEKPVTRQLLRVIARSKIGDTGLLDHSLKHMDGKVTPGGSDRFRRCYNTDGCMQYWLESADLVKIKLESGIPDPTWVPPAWWMVQTASSHDQSAVTSKLLMGEIEQMKSEIKELVSKQNLPDHADANEKLFKELKSWRENTDKQIVEISESLTSTQGMFKELNSWKDKVDQQLLGISNTLSNLQPNGSTSFSPAQENWEHILKTSNLEDFTTNGFDQWDDLIDGLPEAVRPETYALPTNPCKSSLQDQSLISLQDQSLVSLQDQSLVNVDMQMTESMTRGESRSSSQEKAEMTPGSSITAGPKSDIDDPTIQTQETLKELVTWKAKAEQQLMELSNAVLALKGQNQPNWRYP

SEQ ID NO: 45345 - protein, 464 aa, Arabidopsis thaliana
  peptide (1)..(464): Ceres Seq. ID no. 13576509
  misc_feature (18)..(310): Homolog of NCBI NO: 30696040 NR Description: DYAD [Arabidopsis thaliana]
  misc_feature (18)..(310): Homolog of NCBI NO: 9759279 NR Description: gb|AAD12714.1~gene_id:MFG13.3~similar to unknown
  misc_feature (18)..(310): Homolog of NCBI NO: 16033414 NR Description: SWITCH1 splice variant S [Arabidopsis thaliana]
  misc_feature (1)..(464): Homolog of NCBI NO: 15237794 NR Description: expressed protein [Arabidopsis thaliana]
MAAGPVVIKRETEDTPGEEEEGNTSRDNALVEVKLEKQEELGLLVTCGIQKRKRLARGARSRRYSDTSFEEKPIIIPPKHKQQRVLTTRWNNERIKFAEQTLADIMKEKGATFEKPVTRQLLRVIARSKIGDTGLLDHSLKHMDGKVTPGGSDRFRRCYNTDGCMQYWLESADLVKIKLESGIPDPTWVPPAWWMVQTASSHDQSAVTSKLLMGEIEQMKSEIKELVSKQNLPDHADANEKLFKELKSWRENTDKQIVEISESLTSTQGMFKELNSWKDKVDQQLLGISNTLSNLQPNGSTSFSPAQENWEHILKTSNLEDFTTNGFDQWDDLIDGLPEAVRPETYALPTNPCKSSLQDQSLISLQDQSLVSLQDQSLVNVDMQMTESMTRGESRSSSQEKAEMTPGSSITAGPKSDIDDPTIQTQETLKELVTWKAKAEQQLMELSNAVLALKGQNQPNWRYP

SEQ ID NO: 45346 - protein, 359 aa, Arabidopsis thaliana
  peptide (1)..(359): Ceres Seq. ID no. 13576510
  misc_feature (1)..(205): Homolog of NCBI NO: 30696040 NR Description: DYAD [Arabidopsis thaliana]
  misc_feature (1)..(205): Homolog of NCBI NO: 9759279 NR Description: gb|AAD12714.1~gene_id:MFG13.3~similar to unknown
  misc_feature (1)..(205): Homolog of NCBI NO: 16033414 NR Description: SWITCH1 splice variant S [Arabidopsis thaliana]
  misc_feature (1)..(359): Homolog of NCBI NO: 15237794 NR Description: expressed protein [Arabidopsis thaliana]
MKEKGATFEKPVTRQLLRVIARSKIGDTGLLDHSLKHMDGKVTPGGSDRFRRCYNTDGCMQYWLESADLVKIKLESGIPDPTWVPPAWWMVQTASSHDQSAVTSKLLMGEIEQMKSEIKELVSKQNLPDHADANEKLFKELKSWRENTDKQIVEISESLTSTQGMFKELNSWKDKVDQQLLGISNTLSNLQPNGSTSFSPAQENWEHILKTSNLEDFTTNGFDQWDDLIDGLPEAVRPETYALPTNPCKSSLQDQSLISLQDQSLVSLQDQSLVNVDMQMTESMTRGESRSSSQEKAEMTPGSSITAGPKSDIDDPTIQTQETLKELVTWKAKAEQQLMELSNAVLALKGQNQPNWRYP

SEQ ID NO: 45347 - DNA, 1623 bp, Arabidopsis thaliana
  misc_feature (1)..(1623): Ceres Seq. ID no. 12560657
  misc_feature: MA Experiment ID: 20000166 Result: Up-regulated in Transcription
  misc_feature: MA Experiment 20000166 PARAMETER Experiment Name: At_100uM_ABA_P Parameter: Age (day) Value: 14
  misc_feature: MA Experiment 20000166 PARAMETER Experiment Name: At_100uM_ABA_P Parameter: Organism Value: A. thaliana
  misc_feature: MA Experiment 20000166 PARAMETER Experiment Name: At_100uM_ABA_P Parameter: Plant Line Value: WS
  misc_feature: MA Experiment 20000166 PARAMETER Experiment Name: At_100uM_ABA_P Parameter: Timepoint (hr) Value: 1
  misc_feature: MA Experiment 20000166 PARAMETER Experiment Name: At_100uM_ABA_P Parameter: Tissue Value: Aerial
  misc_feature: MA Experiment 20000166 PARAMETER Experiment Name: At_100uM_ABA_P Parameter: Treatment Value: 100uM ABA vs. No Treatment
  misc_feature: MA Experiment ID: 20000169 Result: Up-regulated in Transcription
  misc_feature: MA Experiment 20000169 PARAMETER Experiment Name: At_100uM_ABA_P Parameter: Age (day) Value: 14
  misc_feature: MA Experiment 20000169 PARAMETER Experiment Name: At_100uM_ABA_P Parameter: Organism Value: A. thaliana
  misc_feature: MA Experiment 20000169 PARAMETER Experiment Name: At_100uM_ABA_P Parameter: Plant Line Value: WS
  misc_feature: MA Experiment 20000169 PARAMETER Experiment Name: At_100uM_ABA_P Parameter: Timepoint (hr) Value: 6
  misc_feature: MA Experiment 20000169 PARAMETER Experiment Name: At_100uM_ABA_P Parameter: Tissue Value: Aerial
  misc_feature: MA Experiment 20000169 PARAMETER Experiment Name: At_100uM_ABA_P Parameter: Treatment Value: 100uM ABA vs. No Treatment
  misc_feature: MA Experiment ID: 20000173 Result: Up-regulated in Transcription
  misc_feature: MA Experiment 20000173 PARAMETER Experiment Name: At_42deg_Heat_P Parameter: Age (day) Value: 14
  misc_feature: MA Experiment 20000173 PARAMETER Experiment Name: At_42deg_Heat_P Parameter: Organism Value: A. thaliana
  misc_feature: MA Experiment 20000173 PARAMETER Experiment Name: At_42deg_Heat_P Parameter: Plant Line Value: WS
  misc_feature: MA Experiment 20000173 PARAMETER Experiment Name: At_42deg_Heat_P Parameter: Temperature (deg C) Value: 42 vs. 22
  misc_feature: MA Experiment 20000173 PARAMETER Experiment Name: At_42deg_Heat_P Parameter: Timepoint (hr) Value: 6
  misc_feature: MA Experiment 20000173 PARAMETER Experiment Name: At_42deg_Heat_P Parameter: Tissue Value: Aerial
  misc_feature: MA Experiment ID: 20000182 Result: Up-regulated in Transcription
  misc_feature: MA Experiment 20000182 PARAMETER Experiment Name: At_2mM_SA_P Parameter: Age (day) Value: 14
  misc_feature: MA Experiment 20000182 PARAMETER Experiment Name: At_2mM_SA_P Parameter: Organism Value: A. thaliana
  misc_feature: MA Experiment 20000182 PARAMETER Experiment Name: At_2mM_SA_P Parameter: Plant Line Value: WS
  misc_feature: MA Experiment 20000182 PARAMETER Experiment Name: At_2mM_SA_P Parameter: Timepoint (hr) Value: 6
  misc_feature: MA Experiment 20000182 PARAMETER Experiment Name: At_2mM_SA_P Parameter: Tissue Value: Aerial
  misc_feature: MA Experiment 20000182 PARAMETER Experiment Name: At_2mM_SA_P Parameter: Treatment Value: 2mM SA vs. No Treatment
  misc_feature: MA Experiment ID: 20000184 Result: Up-regulated in Transcription
  misc_feature: MA Experiment 20000184 PARAMETER Experiment Name: At_Shoots__P Parameter: Age (day) Value: 7
  misc_feature: MA Experiment 20000184 PARAMETER Experiment Name: At_Shoots__P Parameter: Tissue Value: Shoots vs. Whole Plant
  misc_feature: MA Experiment ID: 20000185 Result: Up-regulated in Transcription
  misc_feature: MA Experiment 20000185 PARAMETER Experiment Name: At_Roots__P Parameter: Age (day) Value: 7 vs. 21
  misc_feature: MA Experiment 20000185 PARAMETER Experiment Name: At_Roots__P Parameter: Organism Value: A. thaliana
  misc_feature: MA Experiment 20000185 PARAMETER Experiment Name: At_Roots__P Parameter: Tissue Value: Roots vs. Whole Plant
  misc_feature: MA Experiment ID: 20000211 Result: Up-regulated in Transcription
  misc_feature: MA Experiment 20000211 PARAMETER Experiment Name: At_0.001percent_MeJA__P Parameter: Age (day) Value: 14
  misc_feature: MA Experiment 20000211 PARAMETER Experiment Name: At_0.001percent_MeJA__P Parameter: Organism Value: A. thaliana
  misc_feature: MA Experiment 20000211 PARAMETER Experiment Name: At_0.001percent_MeJA__P Parameter: Plant Line Value: WS
  misc_feature: MA Experiment 20000211 PARAMETER Experiment Name: At_0.001percent_MeJA__P Parameter: Timepoint (hr) Value: 1
  misc_feature: MA Experiment 20000211 PARAMETER Experiment Name: At_0.001percent_MeJA__P Parameter: Tissue Value: Aerial
  misc_feature: MA Experiment 20000211 PARAMETER Experiment Name: At_0.001percent_MeJA__P Parameter: Treatment Value: 0.001percent MeJA vs. No Treatment
  misc_feature: MA Experiment ID: 20000227 Result: Down-regulated in Transcription
  misc_feature: MA Experiment 20000227 PARAMETER Experiment Name: At_Root-Tips-vs-Tops_P Parameter: Tissue Value: Root Tips vs. Root Tops
  misc_feature: MA Experiment ID: 20000234 Result: Down-regulated in Transcription
  misc_feature: MA Experiment 20000234 PARAMETER Experiment Name: At_Siliques_P Parameter: Age (day) Value: 21
  misc_feature: MA Experiment 20000234 PARAMETER Experiment Name: At_Siliques_P Parameter: Organism Value: A. thaliana
  misc_feature: MA Experiment 20000234 PARAMETER Experiment Name: At_Siliques_P Parameter: Plant Line Value: WS
  misc_feature: MA Experiment 20000234 PARAMETER Experiment Name: At_Siliques_P Parameter: Tissue Value: Less Than 5mm Siliques vs. Whole Plant
  misc_feature: MA Experiment ID: 20000264 Result: Down-regulated in Transcription
  misc_feature: MA Experiment 20000264 PARAMETER Experiment Name: At_Open_Flower_P Parameter: Age (day) Value: 21
  misc_feature: MA Experiment 20000264 PARAMETER Experiment Name: At_Open_Flower_P Parameter: Plant Line Value: WS
  misc_feature: MA Experiment 20000264 PARAMETER Experiment Name: At_Open_Flower_P Parameter: Tissue Value: Open Flower vs. Whole Plant
  misc_feature: MA Experiment ID: 20000265 Result: Down-regulated in Transcription
  misc_feature: MA Experiment 20000265 PARAMETER Experiment Name: At_Open_Flower_P Parameter: Age (day) Value: 21
  misc_feature: MA Experiment 20000265 PARAMETER Experiment Name: At_Open_Flower_P Parameter: Plant Line Value: WS
  misc_feature: MA Experiment 20000265 PARAMETER Experiment Name: At_Open_Flower_P Parameter: Tissue Value: Closed Flower vs. Whole Plant
  misc_feature: MA Experiment ID: 20000269 Result: Down-regulated in Transcription
  misc_feature: MA Experiment 20000269 PARAMETER Experiment Name: At_1mM_KNO3_L-vs-H_Roots_P Parameter: Age (day) Value: 7,10,12
  misc_feature: MA Experiment 20000269 PARAMETER Experiment Name: At_1mM_KNO3_L-vs-H_Roots_P Parameter: Organism Value: A. thaliana
  misc_feature: MA Experiment 20000269 PARAMETER Experiment Name: At_1mM_KNO3_L-vs-H_Roots_P Parameter: Plant Line Value: WS
  misc_feature: MA Experiment 20000269 PARAMETER Experiment Name: At_1mM_KNO3_L-vs-H_Roots_P Parameter: Timepoint (day) Value: 7,10,12
  misc_feature: MA Experiment 20000269 PARAMETER Experiment Name: At_1mM_KNO3_L-vs-H_Roots_P Parameter: Tissue Value: Roots
  misc_feature: MA Experiment 20000269 PARAMETER Experiment Name: At_1mM_KNO3_L-vs-H_Roots_P Parameter: Treatment Value: 1mM KNO3 vs. 50mM KNO3
  misc_feature: MA Experiment ID: 20000286 Result: Down-regulated in Transcription
  misc_feature: MA Experiment 20000286 PARAMETER Experiment Name: At_Open_Flower_P Parameter: Age (day) Value: 21
  misc_feature: MA Experiment 20000286 PARAMETER Experiment Name: At_Open_Flower_P Parameter: Plant Line Value: WS
  misc_feature: MA Experiment 20000286 PARAMETER Experiment Name: At_Open_Flower_P Parameter: Tissue Value: Half Open vs. Whole Plant
  misc_feature: MA Experiment ID: 20000436 Result: Up-regulated in Transcription
  misc_feature: MA Experiment 20000436 PARAMETER Experiment Name: At_Drought_P Parameter: Age (day) Value: 7
  misc_feature: MA Experiment 20000436 PARAMETER Experiment Name: At_Drought_P Parameter: Organism Value: A. thaliana
  misc_feature: MA Experiment 20000436 PARAMETER Experiment Name: At_Drought_P Parameter: Plant Line Value: WS
  misc_feature: MA Experiment 20000436 PARAMETER Experiment Name: At_Drought_P Parameter: Timepoint (hr) Value: 12
  misc_feature: MA Experiment 20000436 PARAMETER Experiment Name: At_Drought_P Parameter: Tissue Value: Whole Plant
  misc_feature: MA Experiment 20000436 PARAMETER Experiment Name: At_Drought_P Parameter: Treatment Value: Drought vs. No Drought
  misc_feature: MA Experiment ID: 20000437 Result: Up-regulated in Transcription
  misc_feature: MA Experiment 20000437 PARAMETER Experiment Name: At_Drought_P Parameter: Age (day) Value: 8
  misc_feature: MA Experiment 20000437 PARAMETER Experiment Name: At_Drought_P Parameter: Organism Value: A. thaliana
  misc_feature: MA Experiment 20000437 PARAMETER Experiment Name: At_Drought_P Parameter: Plant Line Value: WS
  misc_feature: MA Experiment 20000437 PARAMETER Experiment Name: At_Drought_P Parameter: Timepoint (hr) Value: 24
  misc_feature: MA Experiment 20000437 PARAMETER Experiment Name: At_Drought_P Parameter: Tissue Value: Whole Plant
  misc_feature: MA Experiment 20000437 PARAMETER Experiment Name: At_Drought_P Parameter: Treatment Value: Drought vs. No Drought
  misc_feature: MA Experiment ID: 20000438 Result: Up-regulated in Transcription
  misc_feature: MA Experiment 20000438 PARAMETER Experiment Name: At_Shoots__P Parameter: Age (day) Value: 14
  misc_feature: MA Experiment 20000438 PARAMETER Experiment Name: At_Shoots__P Parameter: Tissue Value: Shoots vs. Whole Plant
  misc_feature: MA Experiment ID: 20000441 Result: Up-regulated in Transcription
  misc_feature: MA Experiment 20000441 PARAMETER Experiment Name: At_1uM_BR-BRZ__P Parameter: Tissue Value: Shoot Apices
  misc_feature: MA Experiment 20000441 PARAMETER Experiment Name: At_1uM_BR-BRZ__P Parameter: Treatment Value: 1uM BR vs. No Treatment
  misc_feature: MA Experiment ID: 20000443 Result: Up-regulated in Transcription
  misc_feature: MA Experiment 20000443 PARAMETER Experiment Name: At_1uM_BR-BRZ__P Parameter: Tissue Value: Shoot Apices
  misc_feature: MA Experiment 20000443 PARAMETER Experiment Name: At_1uM_BR-BRZ__P Parameter: Treatment Value: 1uM BRZ vs. No Treatment
  misc_feature: MA Experiment ID: 20000452 Result: Down-regulated in Transcription
  misc_feature: MA Experiment 20000452 PARAMETER Experiment Name: At_CS6879_Shoots-Roots_P Parameter: Age (day) Value: 14
  misc_feature: MA Experiment 20000452 PARAMETER Experiment Name: At_CS6879_Shoots-Roots_P Parameter: Organism Value: A. thaliana
  misc_feature: MA Experiment 20000452 PARAMETER Experiment Name: At_CS6879_Shoots-Roots_P Parameter: Plant Line Value: CS6879 vs. WS
  misc_feature: MA Experiment 20000452 PARAMETER Experiment Name: At_CS6879_Shoots-Roots_P Parameter: Tissue Value: Shoots
  misc_feature: MA Experiment ID: 20000453 Result: Up-regulated in Transcription
  misc_feature: MA Experiment 20000453 PARAMETER Experiment Name: At_100uM_ABA_P Parameter: Age (day) Value: 15
  misc_feature: MA Experiment 20000453 PARAMETER Experiment Name: At_100uM_ABA_P Parameter: Organism Value: A. thaliana
  misc_feature: MA Experiment 20000453 PARAMETER Experiment Name: At_100uM_ABA_P Parameter: Plant Line Value: WS
  misc_feature: MA Experiment 20000453 PARAMETER Experiment Name: At_100uM_ABA_P Parameter: Timepoint (hr) Value: 24
  misc_feature: MA Experiment 20000453 PARAMETER Experiment Name: At_100uM_ABA_P Parameter: Tissue Value: Aerial
  misc_feature: MA Experiment 20000453 PARAMETER Experiment Name: At_100uM_ABA_P Parameter: Treatment Value: 100uM ABA vs. No Treatment
  misc_feature: MA Experiment ID: 20000455 Result: Up-regulated in Transcription
  misc_feature: MA Experiment 20000455 PARAMETER Experiment Name: At_100uM_ABA_P Parameter: Age (day) Value: 16
  misc_feature: MA Experiment 20000455 PARAMETER Experiment Name: At_100uM_ABA_P Parameter: Organism Value: A. thaliana
  misc_feature: MA Experiment 20000455 PARAMETER Experiment Name: At_100uM_ABA_P Parameter: Plant Line Value: WS
  misc_feature: MA Experiment 20000455 PARAMETER Experiment Name: At_100uM_ABA_P Parameter: Timepoint (hr) Value: 48
  misc_feature: MA Experiment 20000455 PARAMETER Experiment Name: At_100uM_ABA_P Parameter: Tissue Value: Aerial
  misc_feature: MA Experiment 20000455 PARAMETER Experiment Name: At_100uM_ABA_P Parameter: Treatment Value: 100uM ABA vs. No Treatment
  misc_feature: MA Experiment ID: 20000709 Result: Up-regulated in Transcription
  misc_feature: MA Experiment 20000709 PARAMETER Experiment Name: At_15mM_NH4NO3_L-to-H_P Parameter: Age (hr) Value: 14
  misc_feature: MA Experiment 20000709 PARAMETER Experiment Name: At_15mM_NH4NO3_L-to-H_P Parameter: Organism Value: A. thaliana
  misc_feature: MA Experiment 20000709 PARAMETER Experiment Name: At_15mM_NH4NO3_L-to-H_P Parameter: Plant Line Value: WS
  misc_feature: MA Experiment 20000709 PARAMETER Experiment Name: At_15mM_NH4NO3_L-to-H_P Parameter: Timepoint (hr) Value: 4
  misc_feature: MA Experiment 20000709 PARAMETER Experiment Name: At_15mM_NH4NO3_L-to-H_P Parameter: Tissue Value: Aerial
  misc_feature: MA Experiment 20000709 PARAMETER Experiment Name: At_15mM_NH4NO3_L-to-H_P Parameter: Treatment Value: 15mM NH4NO3 vs. 30mM Mannitol
  misc_feature: MA Experiment ID: 20001247 Result: Up-regulated in Transcription
  misc_feature: MA Experiment 20001247 PARAMETER Experiment Name: At_Far-red-induction_P Parameter: Age (day) Value: 7
  misc_feature: MA Experiment 20001247 PARAMETER Experiment Name: At_Far-red-induction_P Parameter: Light Value: Far-red vs. White
  misc_feature: MA Experiment 20001247 PARAMETER Experiment Name: At_Far-red-induction_P Parameter: Organism Value: A. thaliana
  misc_feature: MA Experiment 20001247 PARAMETER Experiment Name: At_Far-red-induction_P Parameter: Plant Line Value: Columbia
  misc_feature: MA Experiment 20001247 PARAMETER Experiment Name: At_Far-red-induction_P Parameter: Timepoint (hr) Value: 1
  misc_feature: MA Experiment 20001247 PARAMETER Experiment Name: At_Far-red-induction_P Parameter: Tissue Value: Whole Plant
  misc_feature: MA Experiment ID: 20001450 Result: Up-regulated in Transcription
  misc_feature: MA Experiment 20001450 PARAMETER Experiment Name: At_Far-red-induction_P Parameter: Age (day) Value: 7
  misc_feature: MA Experiment 20001450 PARAMETER Experiment Name: At_Far-red-induction_P Parameter: Light Value: Far-red vs. White
  misc_feature: MA Experiment 20001450 PARAMETER Experiment Name: At_Far-red-induction_P Parameter: Organism Value: A. thaliana
  misc_feature: MA Experiment 20001450 PARAMETER Experiment Name: At_Far-red-induction_P Parameter: Plant Line Value: Columbia
  misc_feature: MA Experiment 20001450 PARAMETER Experiment Name: At_Far-red-induction_P Parameter: Timepoint (hr) Value: 8
  misc_feature: MA Experiment 20001450 PARAMETER Experiment Name: At_Far-red-induction_P Parameter: Tissue Value: Whole Plant
  misc_feature: MA Experiment ID: 20001451 Result: Up-regulated in Transcription
  misc_feature: MA Experiment 20001451 PARAMETER Experiment Name: At_Far-red-induction_P Parameter: Age (day) Value: 7
  misc_feature: MA Experiment 20001451 PARAMETER Experiment Name: At_Far-red-induction_P Parameter: Light Value: Far-red vs. White
  misc_feature: MA Experiment 20001451 PARAMETER Experiment Name: At_Far-red-induction_P Parameter: Organism Value: A. thaliana
  misc_feature: MA Experiment 20001451 PARAMETER Experiment Name: At_Far-red-induction_P Parameter: Plant Line Value: Columbia
  misc_feature: MA Experiment 20001451 PARAMETER Experiment Name: At_Far-red-induction_P Parameter: Timepoint (hr) Value: 24
  misc_feature: MA Experiment 20001451 PARAMETER Experiment Name: At_Far-red-induction_P Parameter: Tissue Value: Whole Plant
  misc_feature: MA Experiment ID: 20001555 Result: Up-regulated in Transcription
  misc_feature: MA Experiment 20001555 PARAMETER Experiment Name: At_Drought_Soil_Dry_P Parameter: Age (day) Value: 24
  misc_feature: MA Experiment 20001555 PARAMETER Experiment Name: At_Drought_Soil_Dry_P Parameter: Organism Value: A. thaliana
  misc_feature: MA Experiment 20001555 PARAMETER Experiment Name: At_Drought_Soil_Dry_P Parameter: Plant Line Value: WS
  misc_feature: MA Experiment 20001555 PARAMETER Experiment Name: At_Drought_Soil_Dry_P Parameter: Post Timepoint (hr) Value: None
  misc_feature: MA Experiment 20001555 PARAMETER Experiment Name: At_Drought_Soil_Dry_P Parameter: Post-Treatment Value: None
  misc_feature: MA Experiment 20001555 PARAMETER Experiment Name: At_Drought_Soil_Dry_P Parameter: Timepoint (day) Value: 10
  misc_feature: MA Experiment 20001555 PARAMETER Experiment Name: At_Drought_Soil_Dry_P Parameter: Treatment Value: Drought vs. No Drought
  misc_feature: MA Experiment ID: 20001556 Result: Up-regulated in Transcription
  misc_feature: MA Experiment 20001556 PARAMETER Experiment Name: At_Drought_Soil_Dry_P Parameter: Age (day) Value: 26
  misc_feature: MA Experiment 20001556 PARAMETER Experiment Name: At_Drought_Soil_Dry_P Parameter: Organism Value: A. thaliana
  misc_feature: MA Experiment 20001556 PARAMETER Experiment Name: At_Drought_Soil_Dry_P Parameter: Plant Line Value: WS
  misc_feature: MA Experiment 20001556 PARAMETER Experiment Name: At_Drought_Soil_Dry_P Parameter: Post Timepoint (hr) Value: None
  misc_feature: MA Experiment 20001556 PARAMETER Experiment Name: At_Drought_Soil_Dry_P Parameter: Post-Treatment Value: None
  misc_feature: MA Experiment 20001556 PARAMETER Experiment Name: At_Drought_Soil_Dry_P Parameter: Timepoint (day) Value: 12
  misc_feature: MA Experiment 20001556 PARAMETER Experiment Name: At_Drought_Soil_Dry_P Parameter: Treatment Value: Drought vs. No Drought
  misc_feature: MA Experiment ID: 20001773 Result: Down-regulated in Transcription
  misc_feature: MA Experiment 20001773 PARAMETER Experiment Name: At_Far-red-enriched-adult_P Parameter: Age (day) Value: 30
  misc_feature: MA Experiment 20001773 PARAMETER Experiment Name: At_Far-red-enriched-adult_P Parameter: Light Value: Far-red enriched vs. White
  misc_feature: MA Experiment 20001773 PARAMETER Experiment Name: At_Far-red-enriched-adult_P Parameter: Organism Value: A. thaliana
  misc_feature: MA Experiment 20001773 PARAMETER Experiment Name: At_Far-red-enriched-adult_P Parameter: Plant Line Value: Columbia
  misc_feature: MA Experiment 20001773 PARAMETER Experiment Name: At_Far-red-enriched-adult_P Parameter: Timepoint (hr) Value: 48
  misc_feature: MA Experiment 20001773 PARAMETER Experiment Name: At_Far-red-enriched-adult_P Parameter: Tissue Value: Aerial
  misc_feature: MA Experiment ID: 20001904 Result: Up-regulated in Transcription
  misc_feature: MA Experiment 20001904 PARAMETER Experiment Name: At_Drought_Reproduction_P Parameter: Age (day) Value: 37
  misc_feature: MA Experiment 20001904 PARAMETER Experiment Name: At_Drought_Reproduction_P Parameter: Organism Value: A. thaliana
  misc_feature: MA Experiment 20001904 PARAMETER Experiment Name: At_Drought_Reproduction_P Parameter: Plant Line Value: WS
  misc_feature: MA Experiment 20001904 PARAMETER Experiment Name: At_Drought_Reproduction_P Parameter: Timepoint (day) Value: 7
  misc_feature: MA Experiment 20001904 PARAMETER Experiment Name: At_Drought_Reproduction_P Parameter: Tissue Value: Rosettes
  misc_feature: MA Experiment 20001904 PARAMETER Experiment Name: At_Drought_Reproduction_P Parameter: Treatment Value: Drought vs. No Drought
  misc_feature: MA Experiment ID: 20001905 Result: Up-regulated in Transcription
  misc_feature: MA Experiment 20001905 PARAMETER Experiment Name: At_Drought_Reproduction_P Parameter: Age (day) Value: 40
  misc_feature: MA Experiment 20001905 PARAMETER Experiment Name: At_Drought_Reproduction_P Parameter: Organism Value: A. thaliana
  misc_feature: MA Experiment 20001905 PARAMETER Experiment Name: At_Drought_Reproduction_P Parameter: Plant Line Value: WS
  misc_feature: MA Experiment 20001905 PARAMETER Experiment Name: At_Drought_Reproduction_P Parameter: Timepoint (day) Value: 10
  misc_feature: MA Experiment 20001905 PARAMETER Experiment Name: At_Drought_Reproduction_P Parameter: Tissue Value: Rosettes
  misc_feature: MA Experiment 20001905 PARAMETER Experiment Name: At_Drought_Reproduction_P Parameter: Treatment Value: Drought vs. No Drought
  misc_feature: MA Experiment ID: 20001906 Result: Up-regulated in Transcription
  misc_feature: MA Experiment 20001906 PARAMETER Experiment Name: At_Drought_Reproduction_P Parameter: Age (day) Value: 35
  misc_feature: MA Experiment 20001906 PARAMETER Experiment Name: At_Drought_Reproduction_P Parameter: Organism Value: A. thaliana
  misc_feature: MA Experiment 20001906 PARAMETER Experiment Name: At_Drought_Reproduction_P Parameter: Plant Line Value: WS
  misc_feature: MA Experiment 20001906 PARAMETER Experiment Name: At_Drought_Reproduction_P Parameter: Timepoint (day) Value: 5
  misc_feature: MA Experiment 20001906 PARAMETER Experiment Name: At_Drought_Reproduction_P Parameter: Tissue Value: Siliques
  misc_feature: MA Experiment 20001906 PARAMETER Experiment Name: At_Drought_Reproduction_P Parameter: Treatment Value: Drought vs. No Drought
  misc_feature: MA Experiment ID: 20001911 Result: Up-regulated in Transcription
  misc_feature: MA Experiment 20001911 PARAMETER Experiment Name: At_Drought_Reproduction_P Parameter: Age (day) Value: 40
  misc_feature: MA Experiment 20001911 PARAMETER Experiment Name: At_Drought_Reproduction_P Parameter: Organism Value: A. thaliana
  misc_feature: MA Experiment 20001911 PARAMETER Experiment Name: At_Drought_Reproduction_P Parameter: Plant Line Value: WS
  misc_feature: MA Experiment 20001911 PARAMETER Experiment Name: At_Drought_Reproduction_P Parameter: Timepoint (day) Value: 10
  misc_feature: MA Experiment 20001911 PARAMETER Experiment Name: At_Drought_Reproduction_P Parameter: Tissue Value: Flowers
  misc_feature: MA Experiment 20001911 PARAMETER Experiment Name: At_Drought_Reproduction_P Parameter: Treatment Value: Drought vs. No Drought
aaccagaaagaaaaaaaaaatgaagaagagtatcgaaactccgttattgttgaacaccaaacaatcacaagacgaagataaagaaaaaataagatgggagaagatgaagaaagttgcttcaatggctgctccaatggtcgccgtgaacatgtctcaataccttcttcaagcaacttctacaatgatcgtcggtcaccggagcgaactcgctctcgccggaatcgctctaggaagctcctttgctaatgttaccggctttggtgttctttttggactttcaggttcattggaaacactatgtggtcaagcatatggagcaaaacaatatcacaagcttggatcttacactttcacttcaatagttttccttttgattatctctgttccgatttcgattctttggatgttcatgaaccagatcttgctgttgcttcatcaagatcctcaaatagcagagttagctggtgtgtactgtctctggctggtaccagctttattcggttactctgttctcgagtcgttggttcgatattttcagtcacaaagcttgatttatccaatggtcttgagctctctagctgctctgtctttccatgttcctctctgttggctaatggttcataaatttgattttggagccaaaggagcggctgcgtctatcggtatctcttactggctcaacgcggtttttctttgggtttatatgaaacgctctagtcgttgtgtcgaaacgcggatttatatgtccaaggatgtttttgttcatacaaatatcttctttcaatttgccattccttctgcaatgatgtgttgccttgagtggttagctttcgaggtcattactttgctgtctggtcttctacccaactcaaagctcgaaacatcggttatttcgatttgcctcacgacctcttcattgcattacaatctagtaaatggaattggtgatgcagcaagcaccaatgtggctaatgagctaggagctgggaatccgcgaggggctcgtgattctgctgcggctgcaatcataattgcagctgttgagtcagttattgtgagctctagtctgttcttgtctcgcagtgtgtggccttatgcatatagcaatgtggaggaagtaattagttatgtgactgatatcactcctattctttgtatctcaatcctcatggacagcttcttgaccgtcctctccgggattgtgagaggaacagggtggcaaaaaattggagcttatgtgaacataacctcttattatgtcattggtattcctgttggacttctattgtgttttcatcttcacttcaatgggaaaggactttgggctggtttagtcacaggatcaacattacaaactctaatcctatttcttgttattggatttaccaattggagcaaagaggcaattaaggctagggagagaattggtgatgagaaagtttggagacatgactcattgcttaattgaagaaaaaaagaaatacaaacttttgggggattttgattgcttctttttttgtgtgtgtttgtgcaataaccttcagttgattgtaatttatattgaaagtacattatagtctttcatatgatattagagtgtaagaaagtttgaaaatatatctc

SEQ ID NO: 45348 - protein, 488 aa, Arabidopsis thaliana
  peptide (1)..(488): Ceres Seq. ID no. 12560658
  misc_feature (11)..(467): Homolog of NCBI NO: 25411056 NR Description: hypothetical protein At2g04100 [imported] -
  misc_feature (11)..(467): Homolog of NCBI NO: 15228085 NR Description: hypothetical protein; protein id: At2g04090.1
  misc_feature (34)..(475): Homolog of NCBI NO: 15228071 NR Description: hypothetical protein; protein id: At2g04040.1
  misc_feature (11)..(475): Homolog of NCBI NO: 15228073 NR Description: hypothetical protein; protein id: At2g04050.1
  misc_feature (10)..(478): Homolog of NCBI NO: 15223961 NR Description: hypothetical protein; protein id: At1g71140.1
  misc_feature (11)..(475): Homolog of NCBI NO: 22325453 NR Description: hypothetical protein
  misc_feature (11)..(475): Homolog of NCBI NO: 15217763 NR Description: hypothetical protein; protein id: At1g64820.1
  misc_feature (7)..(270): Homolog of NCBI NO: 18408592 NR Description: MATE efflux family protein, putative
  misc_feature (7)..(488): Homolog of NCBI NO: 13430684 NR Description: putative MATE efflux family protein [Arabidopsis
  misc_feature (7)..(488): Homolog of NCBI NO: 30697399 NR Description: MATE efflux protein - related [Arabidopsis
TRKKKKMKKSIETPLLLNTKQSQDEDKEKIRWEKMKKVASMAAPMVAVNMSQYLLQATSTMIVGHRSELALAGIALGSSFANVTGFGVLFGLSGSLETLCGQAYGAKQYHKLGSYTFTSIVFLLIISVPISILWMFMNQILLLLHQDPQIAELAGVYCLWLVPALFGYSVLESLVRYFQSQSLIYPMVLSSLAALSFHVPLCWLMVHKFDFGAKGAAASIGISYWLNAVFLWVYMKRSSRCVETRIYMSKDVFVHTNIFFQFAIPSAMMCCLEWLAFEVITLLSGLLPNSKLETSVISICLTTSSLHYNLVNGIGDAASTNVANELGAGNPRGARDSAAAAIIIAAVESVIVSSSLFLSRSVWPYAYSNVEEVISYVTDITPILCISILMDSFLTVLSGIVRGTGWQKIGAYVNITSYYVIGIPVGLLLCFHLHFNGKGLWAGLVTGSTLQTLILFLVIGFTNWSKEAIKARERIGDEKVWRHDSLLN

SEQ ID NO: 45349 - protein, 482 aa, Arabidopsis thaliana
  peptide (1)..(482): Ceres Seq. ID no. 12560659
  misc_feature (5)..(461): Homolog of NCBI NO: 25411056 NR Description: hypothetical protein At2g04100 [imported] -
  misc_feature (5)..(461): Homolog of NCBI NO: 15228085 NR Description: hypothetical protein; protein id: At2g04090.1
  misc_feature (28)..(469): Homolog of NCBI NO: 15228071 NR Description: hypothetical protein; protein id: At2g04040.1
  misc_feature (5)..(469): Homolog of NCBI NO: 15228073 NR Description: hypothetical protein; protein id: At2g04050.1
  misc_feature (4)..(472): Homolog of NCBI NO: 15223961 NR Description: hypothetical protein; protein id: At1g71140.1
  misc_feature (5)..(469): Homolog of NCBI NO: 22325453 NR Description: hypothetical protein
  misc_feature (5)..(469): Homolog of NCBI NO: 15217763 NR Description: hypothetical protein; protein id: At1g64820.1
  misc_feature (1)..(264): Homolog of NCBI NO: 18408592 NR Description: MATE efflux family protein, putative
  misc_feature (1)..(482): Homolog of NCBI NO: 13430684 NR Description: putative MATE efflux family protein [Arabidopsis
  misc_feature (1)..(482): Homolog of NCBI NO: 30697399 NR Description: MATE efflux protein - related [Arabidopsis
MKKSIETPLLLNTKQSQDEDKEKIRWEKMKKVASMAAPMVAVNMSQYLLQATSTMIVGHRSELALAGIALGSSFANVTGFGVLFGLSGSLETLCGQAYGAKQYHKLGSYTFTSIVFLLIISVPISILWMFMNQILLLLHQDPQIAELAGVYCLWLVPALFGYSVLESLVRYFQSQSLIYPMVLSSLAALSFHVPLCWLMVHKFDFGAKGAAASIGISYWLNAVFLWVYMKRSSRCVETRIYMSKDVFVHTNIFFQFAIPSAMMCCLEWLAFEVITLLSGLLPNSKLETSVISICLTTSSLHYNLVNGIGDAASTNVANELGAGNPRGARDSAAAAIIIAAVESVIVSSSLFLSRSVWPYAYSNVEEVISYVTDITPILCISILMDSFLTVLSGIVRGTGWQKIGAYVNITSYYVIGIPVGLLLCFHLHFNGKGLWAGLVTGSTLQTLILFLVIGFTNWSKEAIKARERIGDEKVWRHDSLLN

SEQ ID NO: 45350 - protein, 454 aa, Arabidopsis thaliana
  peptide (1)..(454): Ceres Seq. ID no. 12560660
  misc_feature (1)..(433): Homolog of NCBI NO: 25411056 NR Description: hypothetical protein At2g04100 [imported] -
  misc_feature (1)..(433): Homolog of NCBI NO: 15228085 NR Description: hypothetical protein; protein id: At2g04090.1
  misc_feature (1)..(441): Homolog of NCBI NO: 15228071 NR Description: hypothetical protein; protein id: At2g04040.1
  misc_feature (1)..(441): Homolog of NCBI NO: 15228073 NR Description: hypothetical protein; protein id: At2g04050.1
  misc_feature (1)..(444): Homolog of NCBI NO: 15223961 NR Description: hypothetical protein; protein id: At1g71140.1
  misc_feature (1)..(441): Homolog of NCBI NO: 22325453 NR Description: hypothetical protein
  misc_feature (1)..(441): Homolog of NCBI NO: 15217763 NR Description: hypothetical protein; protein id: At1g64820.1
  misc_feature (1)..(236): Homolog of NCBI NO: 18408592 NR Description: MATE efflux family protein, putative
  misc_feature (1)..(454): Homolog of NCBI NO: 13430684 NR Description: putative MATE efflux family protein [Arabidopsis
  misc_feature (1)..(454): Homolog of NCBI NO: 30697399 NR Description: MATE efflux protein - related [Arabidopsis
MKKVASMAAPMVAVNMSQYLLQATSTMIVGHRSELALAGIALGSSFANVTGFGVLFGLSGSLETLCGQAYGAKQYHKLGSYTFTSIVFLLIISVPISILWMFMNQILLLLHQDPQIAELAGVYCLWLVPALFGYSVLESLVRYFQSQSLIYPMVLSSLAALSFHVPLCWLMVHKFDFGAKGAAASIGISYWLNAVFLWVYMKRSSRCVETRIYMSKDVFVHTNIFFQFAIPSAMMCCLEWLAFEVITLLSGLLPNSKLETSVISICLTTSSLHYNLVNGIGDAASTNVANELGAGNPRGARDSAAAAIIIAAVESVIVSSSLFLSRSVWPYAYSNVEEVISYVTDITPILCISILMDSFLTVLSGIVRGTGWQKIGAYVNITSYYVIGIPVGLLLCFHLHFNGKGLWAGLVTGSTLQTLILFLVIGFTNWSKEAIKARERIGDEKVWRHDSLLN

SEQ ID NO: 45351 - DNA, 1459 bp, Arabidopsis thaliana
  misc_feature (1)..(1459): Ceres Seq. ID no. 12560499
  misc_feature: MA Experiment ID: 20000180 Result: Up-regulated in Transcription
  misc_feature: MA Experiment 20000180 PARAMETER Experiment Name: At_Germinating_Seeds_P Parameter: Age (hr) Value: 24 vs. 0
  misc_feature: MA Experiment 20000180 PARAMETER Experiment Name: At_Germinating_Seeds_P Parameter: Tissue Value: Germinating Seeds
  misc_feature: MA Experiment ID: 20000185 Result: Down-regulated in Transcription
  misc_feature: MA Experiment 20000185 PARAMETER Experiment Name: At_Roots__P Parameter: Age (day) Value: 7 vs. 21
  misc_feature: MA Experiment 20000185 PARAMETER Experiment Name: At_Roots__P Parameter: Organism Value: A. thaliana
  misc_feature: MA Experiment 20000185 PARAMETER Experiment Name: At_Roots__P Parameter: Tissue Value: Roots vs. Whole Plant
  misc_feature: MA Experiment ID: 20000439 Result: Down-regulated in Transcription
  misc_feature: MA Experiment 20000439 PARAMETER Experiment Name: At_Roots__P Parameter: Age (day) Value: 14 vs. 21
  misc_feature: MA Experiment 20000439 PARAMETER Experiment Name: At_Roots__P Parameter: Organism Value: A. thaliana
  misc_feature: MA Experiment 20000439 PARAMETER Experiment Name: At_Roots__P Parameter: Tissue Value: Roots vs. Whole Plant
  misc_feature: MA Experiment ID: 20001557 Result: Down-regulated in Transcription
  misc_feature: MA Experiment 20001557 PARAMETER Experiment Name: At_Drought_Soil_Dry_P Parameter: Age (day) Value: 27
  misc_feature: MA Experiment 20001557 PARAMETER Experiment Name: At_Drought_Soil_Dry_P Parameter: Organism Value: A. thaliana
  misc_feature: MA Experiment 20001557 PARAMETER Experiment Name: At_Drought_Soil_Dry_P Parameter: Plant Line Value: WS
  misc_feature: MA Experiment 20001557 PARAMETER Experiment Name: At_Drought_Soil_Dry_P Parameter: Post Timepoint (hr) Value: 3
  misc_feature: MA Experiment 20001557 PARAMETER Experiment Name: At_Drought_Soil_Dry_P Parameter: Post-Treatment Value: Re-Water vs. No Drought
  misc_feature: MA Experiment 20001557 PARAMETER Experiment Name: At_Drought_Soil_Dry_P Parameter: Timepoint (day) Value: 13
  misc_feature: MA Experiment 20001557 PARAMETER Experiment Name: At_Drought_Soil_Dry_P Parameter: Treatment Value: Drought vs. No Drought
  misc_feature: MA Experiment ID: 20001905 Result: Down-regulated in Transcription
  misc_feature: MA Experiment 20001905 PARAMETER Experiment Name: At_Drought_Reproduction_P Parameter: Age (day) Value: 40
  misc_feature: MA Experiment 20001905 PARAMETER Experiment Name: At_Drought_Reproduction_P Parameter: Organism Value: A. thaliana
  misc_feature: MA Experiment 20001905 PARAMETER Experiment Name: At_Drought_Reproduction_P Parameter: Plant Line Value: WS
  misc_feature: MA Experiment 20001905 PARAMETER Experiment Name: At_Drought_Reproduction_P Parameter: Timepoint (day) Value: 10
  misc_feature: MA Experiment 20001905 PARAMETER Experiment Name: At_Drought_Reproduction_P Parameter: Tissue Value: Rosettes
  misc_feature: MA Experiment 20001905 PARAMETER Experiment Name: At_Drought_Reproduction_P Parameter: Treatment Value: Drought vs. No Drought
  misc_feature: MA Experiment ID: 20001908 Result: Down-regulated in Transcription
  misc_feature: MA Experiment 20001908 PARAMETER Experiment Name: At_Drought_Reproduction_P Parameter: Age (day) Value: 40
  misc_feature: MA Experiment 20001908 PARAMETER Experiment Name: At_Drought_Reproduction_P Parameter: Organism Value: A. thaliana
  misc_feature: MA Experiment 20001908 PARAMETER Experiment Name: At_Drought_Reproduction_P Parameter: Plant Line Value: WS
  misc_feature: MA Experiment 20001908 PARAMETER Experiment Name: At_Drought_Reproduction_P Parameter: Timepoint (day) Value: 10
  misc_feature: MA Experiment 20001908 PARAMETER Experiment Name: At_Drought_Reproduction_P Parameter: Tissue Value: Siliques
  misc_feature: MA Experiment 20001908 PARAMETER Experiment Name: At_Drought_Reproduction_P Parameter: Treatment Value: Drought vs. No Drought
tttttcttttaatctttttttttatggctgccttcagtagtaacctctgagcttgagggaaactcatgtccatggcgctaattgtccggccattctttgttcctggaagtgctggaatttctgggagtagaaacatatgcaagaaaaatcaatggaggaagtatcttctgaaacccagtggatcatccattaattgctcatttagtacagagaagaatcctctattaccatctatccagcagttagccgatgctcgtctcatatacagtgtatctgcagcattgggtcataacaaggaatcacatccagaatgcagcgctagagttcctgccattgttaatgctctcgagatgaatgagctcactcctaagttccgtggctcacagattcttgaactcgcaaatttcaagactgcaactgtagaagacattgcaaatgttcacgacaaggcttatgtctttggcctagaaaaggcaatggatgaggcttcagattcgggactaattttcattgaaggctctggaccaacatatgccacttcaacgacattccaagattcacttatcgcagcaggagccggaatggctttagttgattcagtgatcgcagcatccagaaacagcgtagatccacccattggttttgcattgataagacctcctgggcaccacgccgtgccaaaaggtccgatggggttctgtgtttttggtaatgtggcaatcgcagctcgtcatgcccaacgcacacatggtctgaagcgcatcttcataattgacttcgatgttcaccacgggaatggcacaaatgatgcatttactgaggaccctgatatattctttttgtcaactcatcaggacggaagctaccctggaacagggaaaatcagtgacataggtaaaggaaaaggtgaaggtaccactctaaatttacctttgcctggaggttcaggtgatattgcaatgagaaccgtttttgaagaaatcattgttccatgtgctcaacggttcaagccagatattattcttgtttctgctgggtatgatgctcatgtcctggatccactagcaaatttacagttcacgaccgcaacatactactcattggcaaaagatataaagcggttagcaaaagaagtatgcggagggcggtgtgtgtttttcttggaaggaggatacaatcttgaatcactttcatcatctgtggcagactcgtttcgagcattgcttggagaagatagcttggcatcagagtttgataacccagcttacttgtacgatgaaccaatgagaaaggtgcgagatgcaattcagagagccaaaagcattcattgcttataaggtgaatttgtttgagaagttctgcatcttagtcgtcttaaactgcctgcctacttatgttttcttttgtaaaaatatcattgtaaacattgttgattagaaaattaaagttatgtaaacag

SEQ ID NO: 45352 - protein, 423 aa, Arabidopsis thaliana
  peptide (1)..(423): Ceres Seq. ID no. 12560500
  misc_feature (65)..(392): Pfam Name: Histone deacetylase family Pfam Description: Histone deacetylase family
  misc_feature (115)..(387): Homolog of NCBI NO: 15607064 NR Description: acetoin utilization protein [Aquifex aeolicus]
  misc_feature (109)..(388): Homolog of NCBI NO: 22962933 NR Description: hypothetical protein [Rhodopseudomonas palustris]
  misc_feature (93)..(421): Homolog of NCBI NO: 11497747 NR Description: acetylpolyamine aminohydrolase (aphA)
  misc_feature (126)..(388): Homolog of NCBI NO: 27377764 NR Description: bll2653 [Bradyrhizobium japonicum]
  misc_feature (80)..(387): Homolog of NCBI NO: 23501331 NR Description: histone deacetylase family protein [Brucella suis
  misc_feature (80)..(387): Homolog of NCBI NO: 17987787 NR Description: acetylspermidine deacetylase [Brucella
  misc_feature (117)..(421): Homolog of NCBI NO: 15789452 NR Description: acetoin utilization protein; Aup [Halobacterium
  misc_feature (158)..(386): Homolog of NCBI NO: 24213615 NR Description: histone deacetylase family protein
  misc_feature (65)..(423): Homolog of NCBI NO: 7445481 NR Description: hypothetical protein F17M5.230 - Arabidopsis
  misc_feature (1)..(423): Homolog of NCBI NO: 18418220 NR Description: putative protein
MSMALIVRPFFVPGSAGISGSRNICKKNQWRKYLLKPSGSSINCSFSTEKNPLLPSIQQLADARLIYSVSAALGHNKESHPECSARVPAIVNALEMNELTPKFRGSQILELANFKTATVEDIANVHDKAYVFGLEKAMDEASDSGLIFIEGSGPTYATSTTFQDSLIAAGAGMALVDSVIAASRNSVDPPIGFALIRPPGHHAVPKGPMGFCVFGNVAIAARHAQRTHGLKRIFIIDFDVHHGNGTNDAFTEDPDIFFLSTHQDGSYPGTGKISDIGKGKGEGTTLNLPLPGGSGDIAMRTVFEEIIVPCAQRFKPDIILVSAGYDAHVLDPLANLQFTTATYYSLAKDIKRLAKEVCGGRCVFFLEGGYNLESLSSSVADSFRALLGEDSLASEFDNPAYLYDEPMRKVRDAIQRAKSIHCL

SEQ ID NO: 45353 - protein, 421 aa, Arabidopsis thaliana
  peptide (1)..(421): Ceres Seq. ID no. 12560501
  misc_feature (63)..(390): Pfam Name: Histone deacetylase family Pfam Description: Histone deacetylase family
  misc_feature (113)..(385): Homolog of NCBI NO: 15607064 NR Description: acetoin utilization protein [Aquifex aeolicus]
  misc_feature (107)..(386): Homolog of NCBI NO: 22962933 NR Description: hypothetical protein [Rhodopseudomonas palustris]
  misc_feature (91)..(419): Homolog of NCBI NO: 11497747 NR Description: acetylpolyamine aminohydrolase (aphA)
  misc_feature (124)..(386): Homolog of NCBI NO: 27377764 NR Description: bll2653 [Bradyrhizobium japonicum]
  misc_feature (78)..(385): Homolog of NCBI NO: 23501331 NR Description: histone deacetylase family protein [Brucella suis
  misc_feature (78)..(385): Homolog of NCBI NO: 17987787 NR Description: acetylspermidine deacetylase [Brucella
  misc_feature (115)..(419): Homolog of NCBI NO: 15789452 NR Description: acetoin utilization protein; Aup [Halobacterium
  misc_feature (156)..(384): Homolog of NCBI NO: 24213615 NR Description: histone deacetylase family protein
  misc_feature (63)..(421): Homolog of NCBI NO: 7445481 NR Description: hypothetical protein F17M5.230 - Arabidopsis
  misc_feature (1)..(421): Homolog of NCBI NO: 18418220 NR Description: putative protein
MALIVRPFFVPGSAGISGSRNICKKNQWRKYLLKPSGSSINCSFSTEKNPLLPSIQQLADARLIYSVSAALGHNKESHPECSARVPAIVNALEMNELTPKFRGSQILELANFKTATVEDIANVHDKAYVFGLEKAMDEASDSGLIFIEGSGPTYATSTTFQDSLIAAGAGMALVDSVIAASRNSVDPPIGFALIRPPGHHAVPKGPMGFCVFGNVAIAARHAQRTHGLKRIFIIDFDVHHGNGTNDAFTEDPDIFFLSTHQDGSYPGTGKISDIGKGKGEGTTLNLPLPGGSGDIAMRTVFEEIIVPCAQRFKPDIILVSAGYDAHVLDPLANLQFTTATYYSLAKDIKRLAKEVCGGRCVFFLEGGYNLESLSSSVADSFRALLGEDSLASEFDNPAYLYDEPMRKVRDAIQRAKSIHCL

SEQ ID NO: 45354 - protein, 328 aa, Arabidopsis thaliana
  peptide (1)..(328): Ceres Seq. ID no. 12560502
  misc_feature (1)..(297): Pfam Name: Histone deacetylase family Pfam Description: Histone deacetylase family
  misc_feature (20)..(292): Homolog of NCBI NO: 15607064 NR Description: acetoin utilization protein [Aquifex aeolicus]
  misc_feature (14)..(293): Homolog of NCBI NO: 22962933 NR Description: hypothetical protein [Rhodopseudomonas palustris]
  misc_feature (1)..(326): Homolog of NCBI NO: 11497747 NR Description: acetylpolyamine aminohydrolase (aphA)
  misc_feature (31)..(293): Homolog of NCBI NO: 27377764 NR Description: bll2653 [Bradyrhizobium japonicum]
  misc_feature (1)..(292): Homolog of NCBI NO: 23501331 NR Description: histone deacetylase family protein [Brucella suis
  misc_feature (1)..(292): Homolog of NCBI NO: 17987787 NR Description: acetylspermidine deacetylase [Brucella
  misc_feature (22)..(326): Homolog of NCBI NO: 15789452 NR Description: acetoin utilization protein; Aup [Halobacterium
  misc_feature (63)..(291): Homolog of NCBI NO: 24213615 NR Description: histone deacetylase family protein
  misc_feature (1)..(328): Homolog of NCBI NO: 7445481 NR Description: hypothetical protein F17M5.230 - Arabidopsis
  misc_feature (1)..(328): Homolog of NCBI NO: 18418220 NR Description: putative protein
MNELTPKFRGSQILELANFKTATVEDIANVHDKAYVFGLEKAMDEASDSGLIFIEGSGPTYATSTTFQDSLIAAGAGMALVDSVIAASRNSVDPPIGFALIRPPGHHAVPKGPMGFCVFGNVAIAARHAQRTHGLKRIFIIDFDVHHGNGTNDAFTEDPDIFFLSTHQDGSYPGTGKISDIGKGKGEGTTLNLPLPGGSGDIAMRTVFEEIIVPCAQRFKPDIILVSAGYDAHVLDPLANLQFTTATYYSLAKDIKRLAKEVCGGRCVFFLEGGYNLESLSSSVADSFRALLGEDSLASEFDNPAYLYDEPMRKVRDAIQRAKSIHCL

SEQ ID NO: 45355 - DNA, 1156 bp, Arabidopsis thaliana
  misc_feature (1)..(1156): Ceres Seq. ID no. 13576021
  misc_feature: MA Experiment ID: 108434 Result: Down-regulated in Transcription
  misc_feature: MA Experiment 108434 PARAMETER Experiment Name: At_Root_Tips_cDNA_P Parameter: Tissue Value: Root Tips
  misc_feature: MA Experiment ID: 108435 Result: Up-regulated in Transcription
  misc_feature: MA Experiment 108435 PARAMETER Experiment Name: At_stm_Mutants_cDNA_P Parameter: Plant Line Value: wt Landsburg vs stm
  misc_feature: MA Experiment 108435 PARAMETER Experiment Name: At_stm_Mutants_cDNA_P Parameter: Tissue Value: Shoot Apical Meristem Region
  misc_feature: MA Experiment ID: 108461 Result: Up-regulated in Transcription
  misc_feature: MA Experiment 108461 PARAMETER Experiment Name: At_Germinating_Seeds_cDNA_P Parameter: Age (day) Value: 1 vs. 0
  misc_feature: MA Experiment 108461 PARAMETER Experiment Name: At_Germinating_Seeds_cDNA_P Parameter: Tissue Value: Germinating Seeds
  misc_feature: MA Experiment ID: 108462 Result: Up-regulated in Transcription
  misc_feature: MA Experiment 108462 PARAMETER Experiment Name: At_Germinating_Seeds_cDNA_P Parameter: Age (day) Value: 2 vs. 0
  misc_feature: MA Experiment 108462 PARAMETER Experiment Name: At_Germinating_Seeds_cDNA_P Parameter: Tissue Value: Germinating Seeds
  misc_feature: MA Experiment ID: 108463 Result: Up-regulated in Transcription
  misc_feature: MA Experiment 108463 PARAMETER Experiment Name: At_Germinating_Seeds_cDNA_P Parameter: Age (day) Value: 3 vs. 0
  misc_feature: MA Experiment 108463 PARAMETER Experiment Name: At_Germinating_Seeds_cDNA_P Parameter: Tissue Value: Germinating Seeds
  misc_feature: MA Experiment ID: 108469 Result: Up-regulated in Transcription
  misc_feature: MA Experiment ID: 108501 Result: Down-regulated in Transcription
  misc_feature: MA Experiment 108501 PARAMETER Experiment Name: At_ap2_floral_buds_cDNA_P Parameter: Plant Line Value: ap2 (Ler.)
  misc_feature: MA Experiment 108501 PARAMETER Experiment Name: At_ap2_floral_buds_cDNA_P Parameter: Tissue Value: Closed Flower
  misc_feature: MA Experiment ID: 108573 Result: Up-regulated in Transcription
  misc_feature: MA Experiment 108573 PARAMETER Experiment Name: At_Drought_cDNA_P Parameter: Timepoint (hr) Value: 6
  misc_feature: MA Experiment 108573 PARAMETER Experiment Name: At_Drought_cDNA_P Parameter: Tissue Value: Aerial
  misc_feature: MA Experiment 108573 PARAMETER Experiment Name: At_Drought_cDNA_P Parameter: Treatment Value: Drought vs. No Drought
  misc_feature: MA Experiment ID: 108579 Result: Down-regulated in Transcription
  misc_feature: MA Experiment 108579 PARAMETER Experiment Name: At_4deg_Cold_cDNA_P Parameter: Temperature (deg C) Value: 4 vs. 22
  misc_feature: MA Experiment 108579 PARAMETER Experiment Name: At_4deg_Cold_cDNA_P Parameter: Timepoint (hr) Value: 6
  misc_feature: MA Experiment 108579 PARAMETER Experiment Name: At_4deg_Cold_cDNA_P Parameter: Tissue Value: Aerial
  misc_feature: MA Experiment ID: 108605 Result: Up-regulated in Transcription
  misc_feature: MA Experiment 108605 PARAMETER Experiment Name: At_100uM_ABA_cDNA_P Parameter: Timepoint (hr) Value: 6
  misc_feature: MA Experiment 108605 PARAMETER Experiment Name: At_100uM_ABA_cDNA_P Parameter: Tissue Value: Aerial
  misc_feature: MA Experiment 108605 PARAMETER Experiment Name: At_100uM_ABA_cDNA_P Parameter: Treatment Value: 100uM ABA vs. No Treatment
  misc_feature: MA Experiment ID: 108667 Result: Up-regulated in Transcription
  misc_feature: MA Experiment 108667 PARAMETER Experiment Name: At_2mM_SA_cDNA_P Parameter: Plant Line Value: WS
  misc_feature: MA Experiment 108667 PARAMETER Experiment Name: At_2mM_SA_cDNA_P Parameter: Timepoint (hr) Value: 1
  misc_feature: MA Experiment 108667 PARAMETER Experiment Name: At_2mM_SA_cDNA_P Parameter: Treatment Value: 2mM SA vs. No Treatment
  misc_feature: MA Experiment ID: 108668 Result: Up-regulated in Transcription
  misc_feature: MA Experiment 108668 PARAMETER Experiment Name: At_2mM_SA_cDNA_P Parameter: Plant Line Value: WS
  misc_feature: MA Experiment 108668 PARAMETER Experiment Name: At_2mM_SA_cDNA_P Parameter: Timepoint (hr) Value: 6
  misc_feature: MA Experiment 108668 PARAMETER Experiment Name: At_2mM_SA_cDNA_P Parameter: Treatment Value: 2mM SA vs. No Treatment
  misc_feature: MA Experiment ID: 20000182 Result: Up-regulated in Transcription
  misc_feature: MA Experiment 20000182 PARAMETER Experiment Name: At_2mM_SA_P Parameter: Age (day) Value: 14
  misc_feature: MA Experiment 20000182 PARAMETER Experiment Name: At_2mM_SA_P Parameter: Organism Value: A. thaliana
  misc_feature: MA Experiment 20000182 PARAMETER Experiment Name: At_2mM_SA_P Parameter: Plant Line Value: WS
  misc_feature: MA Experiment 20000182 PARAMETER Experiment Name: At_2mM_SA_P Parameter: Timepoint (hr) Value: 6
  misc_feature: MA Experiment 20000182 PARAMETER Experiment Name: At_2mM_SA_P Parameter: Tissue Value: Aerial
  misc_feature: MA Experiment 20000182 PARAMETER Experiment Name: At_2mM_SA_P Parameter: Treatment Value: 2mM SA vs. No Treatment
  misc_feature: MA Experiment ID: 20000184 Result: Down-regulated in Transcription
  misc_feature: MA Experiment 20000184 PARAMETER Experiment Name: At_Shoots__P Parameter: Age (day) Value: 7
  misc_feature: MA Experiment 20000184 PARAMETER Experiment Name: At_Shoots__P Parameter: Tissue Value: Shoots vs. Whole Plant
  misc_feature: MA Experiment ID: 20000224 Result: Up-regulated in Transcription
  misc_feature: MA Experiment ID: 20000227 Result: Down-regulated in Transcription
  misc_feature: MA Experiment 20000227 PARAMETER Experiment Name: At_Root-Tips-vs-Tops_P Parameter: Tissue Value: Root Tips vs. Root Tops
  misc_feature: MA Experiment ID: 20000234 Result: Down-regulated in Transcription
  misc_feature: MA Experiment 20000234 PARAMETER Experiment Name: At_Siliques_P Parameter: Age (day) Value: 21
  misc_feature: MA Experiment 20000234 PARAMETER Experiment Name: At_Siliques_P Parameter: Organism Value: A. thaliana
  misc_feature: MA Experiment 20000234 PARAMETER Experiment Name: At_Siliques_P Parameter: Plant Line Value: WS
  misc_feature: MA Experiment 20000234 PARAMETER Experiment Name: At_Siliques_P Parameter: Tissue Value: Less Than 5mm Siliques vs. Whole Plant
  misc_feature: MA Experiment ID: 20000235 Result: Down-regulated in Transcription
  misc_feature: MA Experiment 20000235 PARAMETER Experiment Name: At_Siliques_P Parameter: Age (day) Value: 21
  misc_feature: MA Experiment 20000235 PARAMETER Experiment Name: At_Siliques_P Parameter: Organism Value: A. thaliana
  misc_feature: MA Experiment 20000235 PARAMETER Experiment Name: At_Siliques_P Parameter: Plant Line Value: WS
  misc_feature: MA Experiment 20000235 PARAMETER Experiment Name: At_Siliques_P Parameter: Tissue Value: 5-10mm Siliques vs. Whole Plant
  misc_feature: MA Experiment ID: 20000264 Result: Down-regulated in Transcription
  misc_feature: MA Experiment 20000264 PARAMETER Experiment Name: At_Open_Flower_P Parameter: Age (day) Value: 21
  misc_feature: MA Experiment 20000264 PARAMETER Experiment Name: At_Open_Flower_P Parameter: Plant Line Value: WS
  misc_feature: MA Experiment 20000264 PARAMETER Experiment Name: At_Open_Flower_P Parameter: Tissue Value: Open Flower vs. Whole Plant
  misc_feature: MA Experiment ID: 20000265 Result: Down-regulated in Transcription
  misc_feature: MA Experiment 20000265 PARAMETER Experiment Name: At_Open_Flower_P Parameter: Age (day) Value: 21
  misc_feature: MA Experiment 20000265 PARAMETER Experiment Name: At_Open_Flower_P Parameter: Plant Line Value: WS
  misc_feature: MA Experiment 20000265 PARAMETER Experiment Name: At_Open_Flower_P Parameter: Tissue Value: Closed Flower vs. Whole Plant
  misc_feature: MA Experiment ID: 20000286 Result: Down-regulated in Transcription
  misc_feature: MA Experiment 20000286 PARAMETER Experiment Name: At_Open_Flower_P Parameter: Age (day) Value: 21
  misc_feature: MA Experiment 20000286 PARAMETER Experiment Name: At_Open_Flower_P Parameter: Plant Line Value: WS
  misc_feature: MA Experiment 20000286 PARAMETER Experiment Name: At_Open_Flower_P Parameter: Tissue Value: Half Open vs. Whole Plant
  misc_feature: MA Experiment ID: 20000437 Result: Down-regulated in Transcription
  misc_feature: MA Experiment 20000437 PARAMETER Experiment Name: At_Drought_P Parameter: Age (day) Value: 8
  misc_feature: MA Experiment 20000437 PARAMETER Experiment Name: At_Drought_P Parameter: Organism Value: A. thaliana
  misc_feature: MA Experiment 20000437 PARAMETER Experiment Name: At_Drought_P Parameter: Plant Line Value: WS
  misc_feature: MA Experiment 20000437 PARAMETER Experiment Name: At_Drought_P Parameter: Timepoint (hr) Value: 24
  misc_feature: MA Experiment 20000437 PARAMETER Experiment Name: At_Drought_P Parameter: Tissue Value: Whole Plant
  misc_feature: MA Experiment 20000437 PARAMETER Experiment Name: At_Drought_P Parameter: Treatment Value: Drought vs. No Drought
  misc_feature: MA Experiment ID: 20000438 Result: Down-regulated in Transcription
  misc_feature: MA Experiment 20000438 PARAMETER Experiment Name: At_Shoots__P Parameter: Age (day) Value: 14
  misc_feature: MA Experiment 20000438 PARAMETER Experiment Name: At_Shoots__P Parameter: Tissue Value: Shoots vs. Whole Plant
  misc_feature: MA Experiment ID: 20000573 Result: Up-regulated in Transcription
  misc_feature: MA Experiment 20000573 PARAMETER Experiment Name: At_100uM_ABA_Mutants__P Parameter: Organism Value: A. thaliana
  misc_feature: MA Experiment 20000573 PARAMETER Experiment Name: At_100uM_ABA_Mutants__P Parameter: Plant Line Value: CS22 vs. Ler wt
  misc_feature: MA Experiment 20000573 PARAMETER Experiment Name: At_100uM_ABA_Mutants__P Parameter: Timepoint (hr) Value: N/A
  misc_feature: MA Experiment 20000573 PARAMETER Experiment Name: At_100uM_ABA_Mutants__P Parameter: Tissue Value: Whole Plant
  misc_feature: MA Experiment 20000573 PARAMETER Experiment Name: At_100uM_ABA_Mutants__P Parameter: Treatment Value: None
  misc_feature: MA Experiment ID: 20000574 Result: Up-regulated in Transcription
  misc_feature: MA Experiment 20000574 PARAMETER Experiment Name: At_100uM_ABA_Mutants__P Parameter: Organism Value: A. thaliana
  misc_feature: MA Experiment 20000574 PARAMETER Experiment Name: At_100uM_ABA_Mutants__P Parameter: Plant Line Value: CS23 vs. Ler wt
  misc_feature: MA Experiment 20000574 PARAMETER Experiment Name: At_100uM_ABA_Mutants__P Parameter: Timepoint (hr) Value: N/A
  misc_feature: MA Experiment 20000574 PARAMETER Experiment Name: At_100uM_ABA_Mutants__P Parameter: Tissue Value: Whole Plant
  misc_feature: MA Experiment 20000574 PARAMETER Experiment Name: At_100uM_ABA_Mutants__P Parameter: Treatment Value: None
  misc_feature: MA Experiment ID: 20000794 Result: Down-regulated in Transcription
  misc_feature: MA Experiment 20000794 PARAMETER Experiment Name: At_Petals_P Parameter: Age (day) Value: 23-25 days
  misc_feature: MA Experiment 20000794 PARAMETER Experiment Name: At_Petals_P Parameter: Plant Line Value: WS
  misc_feature: MA Experiment 20000794 PARAMETER Experiment Name: At_Petals_P Parameter: Tissue Value: Petals vs. Whole plant
  misc_feature: MA Experiment ID: 20001555 Result: Down-regulated in Transcription
  misc_feature: MA Experiment 20001555 PARAMETER Experiment Name: At_Drought_Soil_Dry_P Parameter: Age (day) Value: 24
  misc_feature: MA Experiment 20001555 PARAMETER Experiment Name: At_Drought_Soil_Dry_P Parameter: Organism Value: A. thaliana
  misc_feature: MA Experiment 20001555 PARAMETER Experiment Name: At_Drought_Soil_Dry_P Parameter: Plant Line Value: WS
  misc_feature: MA Experiment 20001555 PARAMETER Experiment Name: At_Drought_Soil_Dry_P Parameter: Post Timepoint (hr) Value: None
  misc_feature: MA Experiment 20001555 PARAMETER Experiment Name: At_Drought_Soil_Dry_P Parameter: Post-Treatment Value: None
  misc_feature: MA Experiment 20001555 PARAMETER Experiment Name: At_Drought_Soil_Dry_P Parameter: Timepoint (day) Value: 10
  misc_feature: MA Experiment 20001555 PARAMETER Experiment Name: At_Drought_Soil_Dry_P Parameter: Treatment Value: Drought vs. No Drought
  misc_feature: MA Experiment ID: 20001556 Result: Down-regulated in Transcription
  misc_feature: MA Experiment 20001556 PARAMETER Experiment Name: At_Drought_Soil_Dry_P Parameter: Age (day) Value: 26
  misc_feature: MA Experiment 20001556 PARAMETER Experiment Name: At_Drought_Soil_Dry_P Parameter: Organism Value: A. thaliana
  misc_feature: MA Experiment 20001556 PARAMETER Experiment Name: At_Drought_Soil_Dry_P Parameter: Plant Line Value: WS
  misc_feature: MA Experiment 20001556 PARAMETER Experiment Name: At_Drought_Soil_Dry_P Parameter: Post Timepoint (hr) Value: None
  misc_feature: MA Experiment 20001556 PARAMETER Experiment Name: At_Drought_Soil_Dry_P Parameter: Post-Treatment Value: None
  misc_feature: MA Experiment 20001556 PARAMETER Experiment Name: At_Drought_Soil_Dry_P Parameter: Timepoint (day) Value: 12
  misc_feature: MA Experiment 20001556 PARAMETER Experiment Name: At_Drought_Soil_Dry_P Parameter: Treatment Value: Drought vs. No Drought
tatacacatatagagagattgagtgaaaatatttttttttaaatggttgtggtgaacaaaacgaatctcttattgcttcttctctctctatgtctcaccctcgacctctcctccgcacaactccgccgtaacttctacgccggaagttgtcctaacgtcgaacaaatcgttagaaacgccgtacagaaaaaagtccaacaaactttcaccaccattcccgccactctacgcctctatttccatgattgtttcgtcaatgggtgtgatgcatcagtgatgatagcgtcaacaaataataataaggcggagaaggatcatgaggaaaatttatcgttggccggagatggattcgacaccgtcattaaagctaaagaagctctcgatgccgtcccaaattgtcgtaacaaagtttcatgcgctgatattctcacgatggccactcgtgacgtcgttaatcttgcgggtggaccacaatacgacgtggaattgggaaggctagatggactatcatcaacagcggctagcgtcggagggaagttgccgcatccgaccgacgatgtcaataaactcacttcactcttcgccaaaaacggccttagccttaacgacatgatcgctctctccggggcacacacattaggattcgcgcattgcacaaaagtgttcaatcggatatacactttcaacaagacaactaaagtggatcccacggttaacaaagattacgtgacagagctaaaagcgtcgtgtcctcgaaacatagatccaagagtggctattaacatggacccaacaacaccaagacaattcgacaacgtttactacaaaaacttgcaacaagggaaaggattgttcacgtcggatcaagtcttattcacggatcgtcggtcaaagccaaccgttgacttatgggctaataatggacagttgtttaatcaagcttttattaactcgatgatcaagcttggtcgtgttggtgttaaaactggtagtaatggtaatatccgtcgtgattgtggagcttttaattgatttaaatatatctgtattagattttgtttattgtatttgggtataggatgggtcatgggtctcataaagctggttcagctaaattgaaaattgtaataaatctctgtcttgggtttcagtttgc

SEQ ID NO: 45356 - protein, 329 aa, Arabidopsis thaliana
  peptide (1)..(329): Ceres Seq. ID no. 13576022
  misc_feature (43)..(293): Pfam Name: Peroxidase Pfam Description: Peroxidase
  misc_feature (12)..(325): Homolog of NCBI NO: 4138647 NR Description: peroxidase [Trifolium repens]
  misc_feature (10)..(329): Homolog of NCBI NO: 14485511 NR Description: putative peroxidase [Solanum tuberosum]
  misc_feature (10)..(329): Homolog of NCBI NO: 28629828 NR Description: peroxidase 1 [Artemisia annua]
  misc_feature (10)..(329): Homolog of NCBI NO: 15229646 NR Description: peroxidase, putative [Arabidopsis thaliana]
  misc_feature (9)..(329): Homolog of NCBI NO: 15240737 NR Description: peroxidase, putative [Arabidopsis thaliana]
  misc_feature (1)..(329): Homolog of NCBI NO: 17979440 NR Description: putative peroxidase [Arabidopsis thaliana]
  misc_feature (1)..(329): Homolog of NCBI NO: 15235600 NR Description: peroxidase, putative [Arabidopsis thaliana]
  misc_feature (18)..(329): Homolog of NCBI NO: 1546708 NR Description: peroxidase ATP9a [Arabidopsis thaliana]
  misc_feature (1)..(329): Homolog of NCBI NO: 21554605 NR Description: peroxidase, prxr2 [Arabidopsis thaliana]
  misc_feature (1)..(329): Homolog of NCBI NO: 15235597 NR Description: peroxidase, putative [Arabidopsis thaliana]
MVVVNKTNLLLLLLSLCLTLDLSSAQLRRNFYAGSCPNVEQIVRNAVQKKVQQTFTTIPATLRLYFHDCFVNGCDASVMIASTNNNKAEKDHEENLSLAGDGFDTVIKAKEALDAVPNCRNKVSCADILTMATRDVVNLAGGPQYDVELGRLDGLSSTAASVGGKLPHPTDDVNKLTSLFAKNGLSLNDMIALSGAHTLGFAHCTKVFNRIYTFNKTTKVDPTVNKDYVTELKASCPRNIDPRVAINMDPTTPRQFDNVYYKNLQQGKGLFTSDQVLFTDRRSKPTVDLWANNGQLFNQAFINSMIKLGRVGVKTGSNGNIRRDCGAFN

SEQ ID NO: 45357 - protein, 251 aa, Arabidopsis thaliana
  peptide (1)..(251): Ceres Seq. ID no. 13576023
  misc_feature (1)..(215): Pfam Name: Peroxidase Pfam Description: Peroxidase
  misc_feature (1)..(247): Homolog of NCBI NO: 4138647 NR Description: peroxidase [Trifolium repens]
  misc_feature (1)..(251): Homolog of NCBI NO: 14485511 NR Description: putative peroxidase [Solanum tuberosum]
  misc_feature (1)..(251): Homolog of NCBI NO: 28629828 NR Description: peroxidase 1 [Artemisia annua]
  misc_feature (1)..(251): Homolog of NCBI NO: 15229646 NR Description: peroxidase, putative [Arabidopsis thaliana]
  misc_feature (1)..(251): Homolog of NCBI NO: 15240737 NR Description: peroxidase, putative [Arabidopsis thaliana]
  misc_feature (1)..(251): Homolog of NCBI NO: 17979440 NR Description: putative peroxidase [Arabidopsis thaliana]
  misc_feature (1)..(251): Homolog of NCBI NO: 15235600 NR Description: peroxidase, putative [Arabidopsis thaliana]
  misc_feature (1)..(251): Homolog of NCBI NO: 1546708 NR Description: peroxidase ATP9a [Arabidopsis thaliana]
  misc_feature (1)..(251): Homolog of NCBI NO: 21554605 NR Description: peroxidase, prxr2 [Arabidopsis thaliana]
  misc_feature (1)..(251): Homolog of NCBI NO: 15235597 NR Description: peroxidase, putative [Arabidopsis thaliana]
MIASTNNNKAEKDHEENLSLAGDGFDTVIKAKEALDAVPNCRNKVSCADILTMATRDVVNLAGGPQYDVELGRLDGLSSTAASVGGKLPHPTDDVNKLTSLFAKNGLSLNDMIALSGAHTLGFAHCTKVFNRIYTFNKTTKVDPTVNKDYVTELKASCPRNIDPRVAINMDPTTPRQFDNVYYKNLQQGKGLFTSDQVLFTDRRSKPTVDLWANNGQLFNQAFINSMIKLGRVGVKTGSNGNIRRDCGAFN

SEQ ID NO: 45358 - protein, 199 aa, Arabidopsis thaliana
  peptide (1)..(199): Ceres Seq. ID no. 13576024
  misc_feature (1)..(163): Pfam Name: Peroxidase Pfam Description: Peroxidase
  misc_feature (1)..(195): Homolog of NCBI NO: 4138647 NR Description: peroxidase [Trifolium repens]
  misc_feature (1)..(199): Homolog of NCBI NO: 14485511 NR Description: putative peroxidase [Solanum tuberosum]
  misc_feature (1)..(199): Homolog of NCBI NO: 28629828 NR Description: peroxidase 1 [Artemisia annua]
  misc_feature (1)..(199): Homolog of NCBI NO: 15229646 NR Description: peroxidase, putative [Arabidopsis thaliana]
  misc_feature (1)..(199): Homolog of NCBI NO: 15240737 NR Description: peroxidase, putative [Arabidopsis thaliana]
  misc_feature (1)..(199): Homolog of NCBI NO: 17979440 NR Description: putative peroxidase [Arabidopsis thaliana]
  misc_feature (1)..(199): Homolog of NCBI NO: 15235600 NR Description: peroxidase, putative [Arabidopsis thaliana]
  misc_feature (1)..(199): Homolog of NCBI NO: 1546708 NR Description: peroxidase ATP9a [Arabidopsis thaliana]
  misc_feature (1)..(199): Homolog of NCBI NO: 21554605 NR Description: peroxidase, prxr2 [Arabidopsis thaliana]
  misc_feature (1)..(199): Homolog of NCBI NO: 15235597 NR Description: peroxidase, putative [Arabidopsis thaliana]
MATRDVVNLAGGPQYDVELGRLDGLSSTAASVGGKLPHPTDDVNKLTSLFAKNGLSLNDMIALSGAHTLGFAHCTKVFNRIYTFNKTTKVDPTVNKDYVTELKASCPRNIDPRVAINMDPTTPRQFDNVYYKNLQQGKGLFTSDQVLFTDRRSKPTVDLWANNGQLFNQAFINSMIKLGRVGVKTGSNGNIRRDCGAFN

SEQ ID NO: 45359 - DNA, 1426 bp, Arabidopsis thaliana
  misc_feature (1)..(1426): Ceres Seq. ID no. 12560665
  misc_feature: MA Experiment ID: 20000307 Result: Up-regulated in Transcription
  misc_feature: MA Experiment 20000307 PARAMETER Experiment Name: At_Germinating_Seeds_Sub_P Parameter: Age (hr) Value: 24 vs. 0
  misc_feature: MA Experiment 20000307 PARAMETER Experiment Name: At_Germinating_Seeds_Sub_P Parameter: Organism Value: A. thaliana
  misc_feature: MA Experiment 20000307 PARAMETER Experiment Name: At_Germinating_Seeds_Sub_P Parameter: Plant Line Value: WS
  misc_feature: MA Experiment 20000307 PARAMETER Experiment Name: At_Germinating_Seeds_Sub_P Parameter: Tissue Value: Germinating Seeds
  misc_feature: MA Experiment ID: 20000314 Result: Up-regulated in Transcription
  misc_feature: MA Experiment 20000314 PARAMETER Experiment Name: At_14day_Shoots-Roots_Sub_P Parameter: Age (day) Value: 14
  misc_feature: MA Experiment 20000314 PARAMETER Experiment Name: At_14day_Shoots-Roots_Sub_P Parameter: Organism Value: A. thaliana
  misc_feature: MA Experiment 20000314 PARAMETER Experiment Name: At_14day_Shoots-Roots_Sub_P Parameter: Plant Line Value: WS
  misc_feature: MA Experiment 20000314 PARAMETER Experiment Name: At_14day_Shoots-Roots_Sub_P Parameter: Tissue Value: Roots vs. Whole Plant
  misc_feature: MA Experiment ID: 20000315 Result: Up-regulated in Transcription
  misc_feature: MA Experiment 20000315 PARAMETER Experiment Name: At_14day_Shoots-Roots_Sub_P Parameter: Age (day) Value: 14
  misc_feature: MA Experiment 20000315 PARAMETER Experiment Name: At_14day_Shoots-Roots_Sub_P Parameter: Organism Value: A. thaliana
  misc_feature: MA Experiment 20000315 PARAMETER Experiment Name: At_14day_Shoots-Roots_Sub_P Parameter: Plant Line Value: WS
  misc_feature: MA Experiment 20000315 PARAMETER Experiment Name: At_14day_Shoots-Roots_Sub_P Parameter: Tissue Value: Shoots vs. Whole Plant
  misc_feature: MA Experiment ID: 20000328 Result: Up-regulated in Transcription
  misc_feature: MA Experiment 20000328 PARAMETER Experiment Name: At_42deg_Heat_Sub_P Parameter: Age (day) Value: 14
  misc_feature: MA Experiment 20000328 PARAMETER Experiment Name: At_42deg_Heat_Sub_P Parameter: Organism Value: A. thaliana
  misc_feature: MA Experiment 20000328 PARAMETER Experiment Name: At_42deg_Heat_Sub_P Parameter: Plant Line Value: WS
  misc_feature: MA Experiment 20000328 PARAMETER Experiment Name: At_42deg_Heat_Sub_P Parameter: Temperature (deg C) Value: 42 vs. 22
  misc_feature: MA Experiment 20000328 PARAMETER Experiment Name: At_42deg_Heat_Sub_P Parameter: Timepoint (hr) Value: 6
  misc_feature: MA Experiment 20000328 PARAMETER Experiment Name: At_42deg_Heat_Sub_P Parameter: Tissue Value: Aerial
  misc_feature: MA Experiment ID: 20000329 Result: Up-regulated in Transcription
  misc_feature: MA Experiment 20000329 PARAMETER Experiment Name: At_4deg_Cold_Sub_P Parameter: Age (day) Value: 14
  misc_feature: MA Experiment 20000329 PARAMETER Experiment Name: At_4deg_Cold_Sub_P Parameter: Organism Value: A. thaliana
  misc_feature: MA Experiment 20000329 PARAMETER Experiment Name: At_4deg_Cold_Sub_P Parameter: Plant Line Value: WS
  misc_feature: MA Experiment 20000329 PARAMETER Experiment Name: At_4deg_Cold_Sub_P Parameter: Temperature (deg C) Value: 4 vs. 22
  misc_feature: MA Experiment 20000329 PARAMETER Experiment Name: At_4deg_Cold_Sub_P Parameter: Timepoint (hr) Value: 6
  misc_feature: MA Experiment 20000329 PARAMETER Experiment Name: At_4deg_Cold_Sub_P Parameter: Tissue Value: Aerial
  misc_feature: MA Experiment ID: 20000440 Result: Up-regulated in Transcription
  misc_feature: MA Experiment 20000440 PARAMETER Experiment Name: At_Closed-Flower__Sub_P Parameter: Tissue Value: Closed Flower vs. Whole Plant
aagtcttcttcttcattactcgcaccatgaccaaaccctccgacccaaccagagactcccacgtggcagttctcgcttttcctttcggcactcatgcagctcctctcctcaccgtcacgcgccgcctcgcctccgcctctccttccaccgtcttctctttcttcaacaccgcacaatccaactcttcgttattttcctccggtgacgaagcagatcgtccggcgaacatcagagtatacgatattgccgacggtgttccggagggatacgtgtttagcgggagaccacaggaggcgatcgagctgtttcttcaagctgcgccggagaatttccggagagaaatcgcgaaggcggagacggaggttggtacggaagtgaaatgtttgatgactgatgcgttcttctggttcgcggctgatatggcgacggagataaatgcgtcgtggattgcgttttggaccgccggagcaaactcactctctgctcatctctacacagatctcatcagagaaaccatcggtgtcaaagaagtaggtgagcgtatggaggagacaataggggttatctcaggaatggagaagatcagagtcaaagatacaccagaaggagttgtgtttgggaatttagactctgttttctcaaagatgcttcatcaaatgggtcttgctttgcctcgtgccactgctgttttcatcaattcttttgaagatttggatcctacattgacgaataacctcagatcgagatttaaacgatatctgaacatcggtcctctcgggttattatcttctacattgcaacaactagtgcaagatcctcacggttgtttggcttggatggagaagagatcttctggttctgtggcgtacattagctttggtacggtcatgacaccgcctcctggagagcttgcggcgatagcagaagggttggaatcgagtaaagtgccgtttgtttggtcgcttaaggagaagagcttggttcagttaccaaaagggtttttggataggacaagagagcaagggatagtggttccatgggcaccgcaagtggaactgctgaaacacgaagcaacgggtgtgtttgtgacgcattgtggatggaactcggtgttggagagtgtatcgggtggtgtaccgatgatttgcaggccattttttggggatcagagattgaacggaagagcggtggaggttgtgtgggagattggaatgacgattatcaatggagtcttcacgaaagatgggtttgagaagtgtttggataaagttttagttcaagatgatggtaagaagatgaaatgtaatgctaagaaacttaaagaactagcttacgaagctgtctcttctaaaggaaggtcctctgagaatttcagaggattgttggatgcagttgtaaacattatttgaatgtgaaatgattttgg

SEQ ID NO: 45360 - protein, 468 aa, Arabidopsis thaliana
  peptide (1)..(468): Ceres Seq. ID no. 12560666
  misc_feature (33)..(468): Pfam Name: UDP-glucoronosyl and UDP-glucosyl transferase Pfam Description: UDP-glucoronosyl and UDP-glucosyl transferase
  misc_feature (125)..(465): Homolog of NCBI NO: 25286821 NR Description: T16E15.2 protein - Arabidopsis thaliana
  misc_feature (13)..(464): Homolog of NCBI NO: 2564114 NR Description: UDP glucose:flavonoid 3-o-glucosyltransferase
  misc_feature (13)..(464): Homolog of NCBI NO: 13620859 NR Description: UDP-glucose:flavonoid 3-O-glucosyltransferase
  misc_feature (13)..(464): Homolog of NCBI NO: 13620855 NR Description: UDP-glucose:flavonoid 3-O-glucosyltransferase
  misc_feature (13)..(464): Homolog of NCBI NO: 13620869 NR Description: UDP-glucose:flavonoid 3-O-glucosyltransferase
  misc_feature (13)..(464): Homolog of NCBI NO: 13620861 NR Description: UDP-glucose:flavonoid 3-O-glucosyltransferase
  misc_feature (9)..(467): Homolog of NCBI NO: 21593372 NR Description: UDP glucose:flavonoid 3-o-glucosyltransferase,
  misc_feature (9)..(467): Homolog of NCBI NO: 18397552 NR Description: UDP glucose:flavonoid 3-o-glucosyltransferase,
  misc_feature (9)..(466): Homolog of NCBI NO: 15237895 NR Description: UDP glucose:flavonoid 3-o-glucosyltransferase
  misc_feature (9)..(468): Homolog of NCBI NO: 15237899 NR Description: UDP glucose:flavonoid 3-o-glucosyltransferase
VFFFITRTMTKPSDPTRDSHVAVLAFPFGTHAAPLLTVTRRLASASPSTVFSFFNTAQSNSSLFSSGDEADRPANIRVYDIADGVPEGYVFSGRPQEAIELFLQAAPENFRREIAKAETEVGTEVKCLMTDAFFWFAADMATEINASWIAFWTAGANSLSAHLYTDLIRETIGVKEVGERMEETIGVISGMEKIRVKDTPEGVVFGNLDSVFSKMLHQMGLALPRATAVFINSFEDLDPTLTNNLRSRFKRYLNIGPLGLLSSTLQQLVQDPHGCLAWMEKRSSGSVAYISFGTVMTPPPGELAAIAEGLESSKVPFVWSLKEKSLVQLPKGFLDRTREQGIVVPWAPQVELLKHEATGVFVTHCGWNSVLESVSGGVPMICRPFFGDQRLNGRAVEVVWEIGMTIINGVFTKDGFEKCLDKVLVQDDGKKMKCNAKKLKELAYEAVSSKGRSSENFRGLLDAVVNII

SEQ ID NO: 45361 - protein, 460 aa, Arabidopsis thaliana
  peptide (1)..(460): Ceres Seq. ID no. 12560667
  misc_feature (25)..(460): Pfam Name: UDP-glucoronosyl and UDP-glucosyl transferase Pfam Description: UDP-glucoronosyl and UDP-glucosyl transferase
  misc_feature (117)..(457): Homolog of NCBI NO: 25286821 NR Description: T16E15.2 protein - Arabidopsis thaliana
  misc_feature (5)..(456): Homolog of NCBI NO: 2564114 NR Description: UDP glucose:flavonoid 3-o-glucosyltransferase
  misc_feature (5)..(456): Homolog of NCBI NO: 13620859 NR Description: UDP-glucose:flavonoid 3-O-glucosyltransferase
  misc_feature (5)..(456): Homolog of NCBI NO: 13620855 NR Description: UDP-glucose:flavonoid 3-O-glucosyltransferase
  misc_feature (5)..(456): Homolog of NCBI NO: 13620869 NR Description: UDP-glucose:flavonoid 3-O-glucosyltransferase
  misc_feature (5)..(456): Homolog of NCBI NO: 13620861 NR Description: UDP-glucose:flavonoid 3-O-glucosyltransferase
  misc_feature (1)..(459): Homolog of NCBI NO: 21593372 NR Description: UDP glucose:flavonoid 3-o-glucosyltransferase,
  misc_feature (1)..(459): Homolog of NCBI NO: 18397552 NR Description: UDP glucose:flavonoid 3-o-glucosyltransferase,
  misc_feature (1)..(458): Homolog of NCBI NO: 15237895 NR Description: UDP glucose:flavonoid 3-o-glucosyltransferase
  misc_feature (1)..(460): Homolog of NCBI NO: 15237899 NR Description: UDP glucose:flavonoid 3-o-glucosyltransferase
MTKPSDPTRDSHVAVLAFPFGTHAAPLLTVTRRLASASPSTVFSFFNTAQSNSSLFSSGDEADRPANIRVYDIADGVPEGYVFSGRPQEAIELFLQAAPENFRREIAKAETEVGTEVKCLMTDAFFWFAADMATEINASWIAFWTAGANSLSAHLYTDLIRETIGVKEVGERMEETIGVISGMEKIRVKDTPEGVVFGNLDSVFSKMLHQMGLALPRATAVFINSFEDLDPTLTNNLRSRFKRYLNIGPLGLLSSTLQQLVQDPHGCLAWMEKRSSGSVAYISFGTVMTPPPGELAAIAEGLESSKVPFVWSLKEKSLVQLPKGFLDRTREQGIVVPWAPQVELLKHEATGVFVTHCGWNSVLESVSGGVPMICRPFFGDQRLNGRAVEVVWEIGMTIINGVFTKDGFEKCLDKVLVQDDGKKMKCNAKKLKELAYEAVSSKGRSSENFRGLLDAVVNII

SEQ ID NO: 45362 - protein, 340 aa, Arabidopsis thaliana
  peptide (1)..(340): Ceres Seq. ID no. 12560668
  misc_feature (1)..(340): Pfam Name: UDP-glucoronosyl and UDP-glucosyl transferase Pfam Description: UDP-glucoronosyl and UDP-glucosyl transferase
  misc_feature (1)..(337): Homolog of NCBI NO: 25286821 NR Description: T16E15.2 protein - Arabidopsis thaliana
  misc_feature (1)..(336): Homolog of NCBI NO: 2564114 NR Description: UDP glucose:flavonoid 3-o-glucosyltransferase
  misc_feature (1)..(336): Homolog of NCBI NO: 13620859 NR Description: UDP-glucose:flavonoid 3-O-glucosyltransferase
  misc_feature (1)..(336): Homolog of NCBI NO: 13620855 NR Description: UDP-glucose:flavonoid 3-O-glucosyltransferase
  misc_feature (1)..(336): Homolog of NCBI NO: 13620869 NR Description: UDP-glucose:flavonoid 3-O-glucosyltransferase
  misc_feature (1)..(336): Homolog of NCBI NO: 13620861 NR Description: UDP-glucose:flavonoid 3-O-glucosyltransferase
  misc_feature (1)..(339): Homolog of NCBI NO: 21593372 NR Description: UDP glucose:flavonoid 3-o-glucosyltransferase,
  misc_feature (1)..(339): Homolog of NCBI NO: 18397552 NR Description: UDP glucose:flavonoid 3-o-glucosyltransferase,
  misc_feature (1)..(338): Homolog of NCBI NO: 15237895 NR Description: UDP glucose:flavonoid 3-o-glucosyltransferase
  misc_feature (1)..(340): Homolog of NCBI NO: 15237899 NR Description: UDP glucose:flavonoid 3-o-glucosyltransferase
MTDAFFWFAADMATEINASWIAFWTAGANSLSAHLYTDLIRETIGVKEVGERMEETIGVISGMEKIRVKDTPEGVVFGNLDSVFSKMLHQMGLALPRATAVFINSFEDLDPTLTNNLRSRFKRYLNIGPLGLLSSTLQQLVQDPHGCLAWMEKRSSGSVAYISFGTVMTPPPGELAAIAEGLESSKVPFVWSLKEKSLVQLPKGFLDRTREQGIVVPWAPQVELLKHEATGVFVTHCGWNSVLESVSGGVPMICRPFFGDQRLNGRAVEVVWEIGMTIINGVFTKDGFEKCLDKVLVQDDGKKMKCNAKKLKELAYEAVSSKGRSSENFRGLLDAVVNII

SEQ ID NO: 45363 - DNA, 2893 bp, Arabidopsis thaliana
  misc_feature (1)..(2893): Ceres Seq. ID no. 13576025
  misc_feature: MA Experiment ID: 108462 Result: Up-regulated in Transcription
  misc_feature: MA Experiment 108462 PARAMETER Experiment Name: At_Germinating_Seeds_cDNA_P Parameter: Age (day) Value: 2 vs. 0
  misc_feature: MA Experiment 108462 PARAMETER Experiment Name: At_Germinating_Seeds_cDNA_P Parameter: Tissue Value: Germinating Seeds
  misc_feature: MA Experiment ID: 108463 Result: Up-regulated in Transcription
  misc_feature: MA Experiment 108463 PARAMETER Experiment Name: At_Germinating_Seeds_cDNA_P Parameter: Age (day) Value: 3 vs. 0
  misc_feature: MA Experiment 108463 PARAMETER Experiment Name: At_Germinating_Seeds_cDNA_P Parameter: Tissue Value: Germinating Seeds
  misc_feature: MA Experiment ID: 108464 Result: Up-regulated in Transcription
  misc_feature: MA Experiment 108464 PARAMETER Experiment Name: At_Germinating_Seeds_cDNA_P Parameter: Age (day) Value: 4 vs. 0
  misc_feature: MA Experiment 108464 PARAMETER Experiment Name: At_Germinating_Seeds_cDNA_P Parameter: Tissue Value: Germinating Seeds
  misc_feature: MA Experiment ID: 108488 Result: Down-regulated in Transcription
  misc_feature: MA Experiment ID: 108561 Result: Up-regulated in Transcription
  misc_feature: MA Experiment 108561 PARAMETER Experiment Name: At_100uM_ABA_cDNA_P Parameter: Timepoint (hr) Value: 6
  misc_feature: MA Experiment 108561 PARAMETER Experiment Name: At_100uM_ABA_cDNA_P Parameter: Tissue Value: Aerial
  misc_feature: MA Experiment 108561 PARAMETER Experiment Name: At_100uM_ABA_cDNA_P Parameter: Treatment Value: 100uM ABA vs. No Treatment
  misc_feature: MA Experiment ID: 108573 Result: Up-regulated in Transcription
  misc_feature: MA Experiment 108573 PARAMETER Experiment Name: At_Drought_cDNA_P Parameter: Timepoint (hr) Value: 6
  misc_feature: MA Experiment 108573 PARAMETER Experiment Name: At_Drought_cDNA_P Parameter: Tissue Value: Aerial
  misc_feature: MA Experiment 108573 PARAMETER Experiment Name: At_Drought_cDNA_P Parameter: Treatment Value: Drought vs. No Drought
  misc_feature: MA Experiment ID: 108605 Result: Up-regulated in Transcription
  misc_feature: MA Experiment 108605 PARAMETER Experiment Name: At_100uM_ABA_cDNA_P Parameter: Timepoint (hr) Value: 6
  misc_feature: MA Experiment 108605 PARAMETER Experiment Name: At_100uM_ABA_cDNA_P Parameter: Tissue Value: Aerial
  misc_feature: MA Experiment 108605 PARAMETER Experiment Name: At_100uM_ABA_cDNA_P Parameter: Treatment Value: 100uM ABA vs. No Treatment
  misc_feature: MA Experiment ID: 108607 Result: Up-regulated in Transcription
  misc_feature: MA Experiment 108607 PARAMETER Experiment Name: At_100uM_ABA_cDNA_P Parameter: Timepoint (hr) Value: 4
  misc_feature: MA Experiment 108607 PARAMETER Experiment Name: At_100uM_ABA_cDNA_P Parameter: Tissue Value: Aerial
  misc_feature: MA Experiment 108607 PARAMETER Experiment Name: At_100uM_ABA_cDNA_P Parameter: Treatment Value: 100uM ABA vs. No Treatment
  misc_feature: MA Experiment ID: 108609 Result: Up-regulated in Transcription
  misc_feature: MA Experiment 108609 PARAMETER Experiment Name: At_100uM_ABA_cDNA_P Parameter: Timepoint (hr) Value: 24
  misc_feature: MA Experiment 108609 PARAMETER Experiment Name: At_100uM_ABA_cDNA_P Parameter: Tissue Value: Aerial
  misc_feature: MA Experiment 108609 PARAMETER Experiment Name: At_100uM_ABA_cDNA_P Parameter: Treatment Value: 100uM ABA vs. No Treatment
  misc_feature: MA Experiment ID: 20000069 Result: Up-regulated in Transcription
  misc_feature: MA Experiment 20000069 PARAMETER Experiment Name: At_100uM_ABA_Mutants_cDNA_P Parameter: Plant Line Value: CS23
  misc_feature: MA Experiment 20000069 PARAMETER Experiment Name: At_100uM_ABA_Mutants_cDNA_P Parameter: Timepoint (hr) Value: 6
  misc_feature: MA Experiment 20000069 PARAMETER Experiment Name: At_100uM_ABA_Mutants_cDNA_P Parameter: Tissue Value: Aerial
  misc_feature: MA Experiment 20000069 PARAMETER Experiment Name: At_100uM_ABA_Mutants_cDNA_P Parameter: Treatment Value: 100uM ABA vs. No Treatment
  misc_feature: MA Experiment ID: 20000070 Result: Up-regulated in Transcription
  misc_feature: MA Experiment 20000070 PARAMETER Experiment Name: At_100uM_ABA_Mutants_cDNA_P Parameter: Plant Line Value: CS24
  misc_feature: MA Experiment 20000070 PARAMETER Experiment Name: At_100uM_ABA_Mutants_cDNA_P Parameter: Timepoint (hr) Value: 6
  misc_feature: MA Experiment 20000070 PARAMETER Experiment Name: At_100uM_ABA_Mutants_cDNA_P Parameter: Tissue Value: Aerial
  misc_feature: MA Experiment 20000070 PARAMETER Experiment Name: At_100uM_ABA_Mutants_cDNA_P Parameter: Treatment Value: 100uM ABA vs. No Treatment
  misc_feature: MA Experiment ID: 20000072 Result: Up-regulated in Transcription
  misc_feature: MA Experiment 20000072 PARAMETER Experiment Name: At_100uM_ABA_Mutants_cDNA_P Parameter: Plant Line Value: CS8105
  misc_feature: MA Experiment 20000072 PARAMETER Experiment Name: At_100uM_ABA_Mutants_cDNA_P Parameter: Timepoint (hr) Value: 6
  misc_feature: MA Experiment 20000072 PARAMETER Experiment Name: At_100uM_ABA_Mutants_cDNA_P Parameter: Tissue Value: Aerial
  misc_feature: MA Experiment 20000072 PARAMETER Experiment Name: At_100uM_ABA_Mutants_cDNA_P Parameter: Treatment Value: 100uM ABA vs. No Treatment
  misc_feature: MA Experiment ID: 20000086 Result: Up-regulated in Transcription
  misc_feature: MA Experiment 20000086 PARAMETER Experiment Name: At_100uM_ABA_Mutants_cDNA_P Parameter: Plant Line Value: CS22
  misc_feature: MA Experiment 20000086 PARAMETER Experiment Name: At_100uM_ABA_Mutants_cDNA_P Parameter: Timepoint (hr) Value: 6
  misc_feature: MA Experiment 20000086 PARAMETER Experiment Name: At_100uM_ABA_Mutants_cDNA_P Parameter: Tissue Value: Aerial
  misc_feature: MA Experiment 20000086 PARAMETER Experiment Name: At_100uM_ABA_Mutants_cDNA_P Parameter: Treatment Value: 100uM ABA vs. No Treatment
  misc_feature: MA Experiment ID: 20000087 Result: Up-regulated in Transcription
  misc_feature: MA Experiment 20000087 PARAMETER Experiment Name: At_100uM_ABA_Mutants_cDNA_P Parameter: Plant Line Value: WS
  misc_feature: MA Experiment 20000087 PARAMETER Experiment Name: At_100uM_ABA_Mutants_cDNA_P Parameter: Timepoint (hr) Value: 6
  misc_feature: MA Experiment 20000087 PARAMETER Experiment Name: At_100uM_ABA_Mutants_cDNA_P Parameter: Tissue Value: Aerial
  misc_feature: MA Experiment 20000087 PARAMETER Experiment Name: At_100uM_ABA_Mutants_cDNA_P Parameter: Treatment Value: 100uM ABA vs. No Treatment
  misc_feature: MA Experiment ID: 20000088 Result: Up-regulated in Transcription
  misc_feature: MA Experiment 20000088 PARAMETER Experiment Name: At_100uM_ABA_Mutants_cDNA_P Parameter: Plant Line Value: Landsberg
  misc_feature: MA Experiment 20000088 PARAMETER Experiment Name: At_100uM_ABA_Mutants_cDNA_P Parameter: Timepoint (hr) Value: 6
  misc_feature: MA Experiment 20000088 PARAMETER Experiment Name: At_100uM_ABA_Mutants_cDNA_P Parameter: Tissue Value: Aerial
  misc_feature: MA Experiment 20000088 PARAMETER Experiment Name: At_100uM_ABA_Mutants_cDNA_P Parameter: Treatment Value: 100uM ABA vs. No Treatment
  misc_feature: MA Experiment ID: 20000111 Result: Down-regulated in Transcription
  misc_feature: MA Experiment 20000111 PARAMETER Experiment Name: At_42deg_Heat_cDNA_P Parameter: Temperature (deg C) Value: 42 vs. 22
  misc_feature: MA Experiment 20000111 PARAMETER Experiment Name: At_42deg_Heat_cDNA_P Parameter: Timepoint (hr) Value: 6
  misc_feature: MA Experiment 20000111 PARAMETER Experiment Name: At_42deg_Heat_cDNA_P Parameter: Tissue Value: Aerial
  misc_feature: MA Experiment ID: 20000113 Result: Down-regulated in Transcription
  misc_feature: MA Experiment 20000113 PARAMETER Experiment Name: At_42deg_Heat_cDNA_P Parameter: Temperature (deg C) Value: 42 vs. 22
  misc_feature: MA Experiment 20000113 PARAMETER Experiment Name: At_42deg_Heat_cDNA_P Parameter: Timepoint (hr) Value: 8
  misc_feature: MA Experiment 20000113 PARAMETER Experiment Name: At_42deg_Heat_cDNA_P Parameter: Tissue Value: Aerial
  misc_feature: MA Experiment ID: 20000117 Result: Up-regulated in Transcription
  misc_feature: MA Experiment 20000117 PARAMETER Experiment Name: At_100uM_ABA_Mutants_cDNA_P Parameter: Plant Line Value: Columbia
  misc_feature: MA Experiment 20000117 PARAMETER Experiment Name: At_100uM_ABA_Mutants_cDNA_P Parameter: Timepoint (hr) Value: 6
  misc_feature: MA Experiment 20000117 PARAMETER Experiment Name: At_100uM_ABA_Mutants_cDNA_P Parameter: Tissue Value: Aerial
  misc_feature: MA Experiment 20000117 PARAMETER Experiment Name: At_100uM_ABA_Mutants_cDNA_P Parameter: Treatment Value: 100uM ABA vs. No Treatment
aaaaaaaaaaaaaaaaaaacttttcaaattcatctttggtttctgcagcagcaacaacaaccgagccctgttcgttagggttttcggtttttgttagcttttcttcttcttcttcttcgtttccttccacctgaattgttgtaaccatggcggagaaagtatcggaggacgttatgcttctacacggtgacctcgatttgaaaattgttaaggctaggaggttacctaacatggatatgttctcagaacatttgcgccgtctcttcaccgcctgtaacgcctgtgctagacccaccgataccgatgatgtcgatcccagagataaaggcgaattcggtgataaaaacatccgtagccaccgtaaggttatcaccagcgatccttacgtcaccgtcgtcgttcctcaagcgactctagctcgaacacgtgttttgaaaaactcacaagagcctctttgggacgagaaattcaacatttctatagcgcatccgtttgcttatctcgagttccaggtcaaagacgacgatgttttcggtgctcaaatcattggcacggctaagatcccggttcgagacatcgcatcgggagaacgcatttctggttggtttcctgtactcggtgcttcgggaaaaccgcctaaggcagaaactgctattttcatcgatatgaaatttactccgtttgaccagatccatagctaccgatgtggaatcgccggagatccggagcgtaggggtgttagacggacttatttccctgtgaggaaaggaagtcaggtgaggctttaccaggacgctcatgttatggacggaacgttgccggcgattgggttagataacgggaaagtttatgagcatgggaagtgttgggaagatatatgttatgctatatctgaggctcaccatatgatttacattgttggttggtctatcttccataagattaagcttgttagggaaacaaaagttccaagagataaggatatgacgcttggggaattgctcaaatacaaatcccaggaaggtgttcgagttttgctacttgtatgggatgataagacttctcatgataagtttgggataaaaacgcctggagttatggggacacatgatgaggagactaggaagttcttcaagcattcttctgtgatatgcgttttgtcaccccggtatgccagcagtaagcttgggttgttcaaacaacaggcaagtcctagctcttctatatatatcatgacagttgttggaactctcttcacgcaccatcaaaagtgtgttcttgtagacactcaggctgttggtaataatcgcaaggtcaccgcttttattggaggtctagatctttgtgatggccgttatgacacacctgagcataggatactccacgatcttgacactgtatttaaggatgatttccacaatcctacatttccagctggtaccaaggccccaagacaaccttggcacgatttgcactgtaggatagatgggcctgcggcatatgatgttctcataaactttgagcagcgatggagaaaggcaacacgatggaaggagtttagcttacgtttaaaggggaaaactcactggcaagatgatgctttgatccggatagggcgtatatcatggattctgagtccagtgtttaaatttctgaaggatggtacttcgataattccagaggacgatccatgtgtttgggtttctaaagaagatgatccagagaactggcatgttcagatattccgttctatcgactcaggatccgtgaaaggatttccaaaatatgaagatgaggctgaggcccagcatctggaatgtgccaagcgtcttgttgtagataaaagcatccagactgcatacatccagacaatcagatctgctcagcatttcatatatatcgagaatcagtatttcctgggttcttcttatgcttggccttcttatagagacgcaggagctgacaatcttattcctatggagttggcactaaagattgttagcaaaatcagagctaaggaaagatttgccgtatatgttgtcataccattgtggcctgaaggcgacccaaagtctggccctgtgcaagaaattctatattggcagagccaaactatgcagatgatgtatgatgttatagcaaaagaactgaaagcggtgcaatcagatgctcatcctctcgattaccttaacttttactgccttggtaaacgagagcagcttccagatgatatgccagccaccaatggcagtgtggtatcagattcttataatttccagcgtttcatgatttacgtgcacgcaaaagggatgatagtagatgatgagtatgtactcatgggatctgctaatatcaaccaaagatctatggcaggcaccaaagatactgaaatcgccatgggcgcataccaacctaatcatacatgggctcacaagggaagacacccacgtggccaggtgtatggatacagaatgtcactatgggcagagcatttaggcaaaactggagatgagtttgtggagccatcagatctggaatgtctgaagaaggtgaacacaatctctgaagaaaactggaaaagattcatagacccgaaattctcagagctacaaggtcacttaataaagtatcctctacaagtagacgttgatggtaaagtaagccctcttcctgattacgagaccttcccagatgttggtggtaagatcattggagctcattccatggctcttcctgacactttaaccacgtaatgtgaatgttcaatgtaaatttcagcatttgttttggggtttcttttgatcctgaataatattagctgaaagtgttgtttgagttgttgtacatttaactgtgttgtttcttttttatacattcttttgtgattgtcgtc

SEQ ID NO: 45364 - protein, 868 aa, Arabidopsis thaliana
  peptide (1)..(868): Ceres Seq. ID no. 13576026
  misc_feature (16)..(138): Pfam Name: C2 domain Pfam Description: C2 domain
  misc_feature (75)..(496): Homolog of NCBI NO: 13111661 NR Description: phospholipase PLDb1 [Lycopersicon esculentum]
  misc_feature (1)..(40): Homolog of NCBI NO: 20138867 NR Description: Phospholipase D beta 2 (AtPLDbeta2) (PLD beta 2)
  misc_feature (532)..(867): Homolog of NCBI NO: 20138867 NR Description: Phospholipase D beta 2 (AtPLDbeta2) (PLD beta 2)
  misc_feature (73)..(513): Homolog of NCBI NO: 20138867 NR Description: Phospholipase D beta 2 (AtPLDbeta2) (PLD beta 2)
  misc_feature (707)..(867): Homolog of NCBI NO: 22795058 NR Description: phospholipase D beta 1 isoform 1a [Gossypium
  misc_feature (518)..(702): Homolog of NCBI NO: 22795058 NR Description: phospholipase D beta 1 isoform 1a [Gossypium
  misc_feature (3)..(496): Homolog of NCBI NO: 22795058 NR Description: phospholipase D beta 1 isoform 1a [Gossypium
  misc_feature (1)..(40): Homolog of NCBI NO: 13111663 NR Description: phospholipase PLDb2 [Lycopersicon esculentum]
  misc_feature (513)..(867): Homolog of NCBI NO: 13111663 NR Description: phospholipase PLDb2 [Lycopersicon esculentum]
  misc_feature (75)..(496): Homolog of NCBI NO: 13111663 NR Description: phospholipase PLDb2 [Lycopersicon esculentum]
MAEKVSEDVMLLHGDLDLKIVKARRLPNMDMFSEHLRRLFTACNACARPTDTDDVDPRDKGEFGDKNIRSHRKVITSDPYVTVVVPQATLARTRVLKNSQEPLWDEKFNISIAHPFAYLEFQVKDDDVFGAQIIGTAKIPVRDIASGERISGWFPVLGASGKPPKAETAIFIDMKFTPFDQIHSYRCGIAGDPERRGVRRTYFPVRKGSQVRLYQDAHVMDGTLPAIGLDNGKVYEHGKCWEDICYAISEAHHMIYIVGWSIFHKIKLVRETKVPRDKDMTLGELLKYKSQEGVRVLLLVWDDKTSHDKFGIKTPGVMGTHDEETRKFFKHSSVICVLSPRYASSKLGLFKQQASPSSSIYIMTVVGTLFTHHQKCVLVDTQAVGNNRKVTAFIGGLDLCDGRYDTPEHRILHDLDTVFKDDFHNPTFPAGTKAPRQPWHDLHCRIDGPAAYDVLINFEQRWRKATRWKEFSLRLKGKTHWQDDALIRIGRISWILSPVFKFLKDGTSIIPEDDPCVWVSKEDDPENWHVQIFRSIDSGSVKGFPKYEDEAEAQHLECAKRLVVDKSIQTAYIQTIRSAQHFIYIENQYFLGSSYAWPSYRDAGADNLIPMELALKIVSKIRAKERFAVYVVIPLWPEGDPKSGPVQEILYWQSQTMQMMYDVIAKELKAVQSDAHPLDYLNFYCLGKREQLPDDMPATNGSVVSDSYNFQRFMIYVHAKGMIVDDEYVLMGSANINQRSMAGTKDTEIAMGAYQPNHTWAHKGRHPRGQVYGYRMSLWAEHLGKTGDEFVEPSDLECLKKVNTISEENWKRFIDPKFSELQGHLIKYPLQVDVDGKVSPLPDYETFPDVGGKIIGAHSMALPDTLTT

SEQ ID NO: 45365 - protein, 859 aa, Arabidopsis thaliana
  peptide (1)..(859): Ceres Seq. ID no. 13576027
  misc_feature (7)..(129): Pfam Name: C2 domain Pfam Description: C2 domain
  misc_feature (66)..(487): Homolog of NCBI NO: 13111661 NR Description: phospholipase PLDb1 [Lycopersicon esculentum]
  misc_feature (1)..(31): Homolog of NCBI NO: 20138867 NR Description: Phospholipase D beta 2 (AtPLDbeta2) (PLD beta 2)
  misc_feature (523)..(858): Homolog of NCBI NO: 20138867 NR Description: Phospholipase D beta 2 (AtPLDbeta2) (PLD beta 2)
  misc_feature (64)..(504): Homolog of NCBI NO: 20138867 NR Description: Phospholipase D beta 2 (AtPLDbeta2) (PLD beta 2)
  misc_feature (698)..(858): Homolog of NCBI NO: 22795058 NR Description: phospholipase D beta 1 isoform 1a [Gossypium
  misc_feature (509)..(693): Homolog of NCBI NO: 22795058 NR Description: phospholipase D beta 1 isoform 1a [Gossypium
  misc_feature (1)..(487): Homolog of NCBI NO: 22795058 NR Description: phospholipase D beta 1 isoform 1a [Gossypium
  misc_feature (1)..(31): Homolog of NCBI NO: 13111663 NR Description: phospholipase PLDb2 [Lycopersicon esculentum]
  misc_feature (504)..(858): Homolog of NCBI NO: 13111663 NR Description: phospholipase PLDb2 [Lycopersicon esculentum]
  misc_feature (66)..(487): Homolog of NCBI NO: 13111663 NR Description: phospholipase PLDb2 [Lycopersicon esculentum]
MLLHGDLDLKIVKARRLPNMDMFSEHLRRLFTACNACARPTDTDDVDPRDKGEFGDKNIRSHRKVITSDPYVTVVVPQATLARTRVLKNSQEPLWDEKFNISIAHPFAYLEFQVKDDDVFGAQIIGTAKIPVRDIASGERISGWFPVLGASGKPPKAETAIFIDMKFTPFDQIHSYRCGIAGDPERRGVRRTYFPVRKGSQVRLYQDAHVMDGTLPAIGLDNGKVYEHGKCWEDICYAISEAHHMIYIVGWSIFHKIKLVRETKVPRDKDMTLGELLKYKSQEGVRVLLLVWDDKTSHDKFGIKTPGVMGTHDEETRKFFKHSSVICVLSPRYASSKLGLFKQQASPSSSIYIMTVVGTLFTHHQKCVLVDTQAVGNNRKVTAFIGGLDLCDGRYDTPEHRILHDLDTVFKDDFHNPTFPAGTKAPRQPWHDLHCRIDGPAAYDVLINFEQRWRKATRWKEFSLRLKGKTHWQDDALIRIGRISWILSPVFKFLKDGTSIIPEDDPCVWVSKEDDPENWHVQIFRSIDSGSVKGFPKYEDEAEAQHLECAKRLVVDKSIQTAYIQTIRSAQHFIYIENQYFLGSSYAWPSYRDAGADNLIPMELALKIVSKIRAKERFAVYVVIPLWPEGDPKSGPVQEILYWQSQTMQMMYDVIAKELKAVQSDAHPLDYLNFYCLGKREQLPDDMPATNGSVVSDSYNFQRFMIYVHAKGMIVDDEYVLMGSANINQRSMAGTKDTEIAMGAYQPNHTWAHKGRHPRGQVYGYRMSLWAEHLGKTGDEFVEPSDLECLKKVNTISEENWKRFIDPKFSELQGHLIKYPLQVDVDGKVSPLPDYETFPDVGGKIIGAHSMALPDTLTT

SEQ ID NO: 45366 - protein, 840 aa, Arabidopsis thaliana
  peptide (1)..(840): Ceres Seq. ID no. 13576028
  misc_feature (1)..(110): Pfam Name: C2 domain Pfam Description: C2 domain
  misc_feature (47)..(468): Homolog of NCBI NO: 13111661 NR Description: phospholipase PLDb1 [Lycopersicon esculentum]
  misc_feature (1)..(12): Homolog of NCBI NO: 20138867 NR Description: Phospholipase D beta 2 (AtPLDbeta2) (PLD beta 2)
  misc_feature (504)..(839): Homolog of NCBI NO: 20138867 NR Description: Phospholipase D beta 2 (AtPLDbeta2) (PLD beta 2)
  misc_feature (45)..(485): Homolog of NCBI NO: 20138867 NR Description: Phospholipase D beta 2 (AtPLDbeta2) (PLD beta 2)
  misc_feature (679)..(839): Homolog of NCBI NO: 22795058 NR Description: phospholipase D beta 1 isoform 1a [Gossypium
  misc_feature (490)..(674): Homolog of NCBI NO: 22795058 NR Description: phospholipase D beta 1 isoform 1a [Gossypium
  misc_feature (1)..(468): Homolog of NCBI NO: 22795058 NR Description: phospholipase D beta 1 isoform 1a [Gossypium
  misc_feature (1)..(12): Homolog of NCBI NO: 13111663 NR Description: phospholipase PLDb2 [Lycopersicon esculentum]
  misc_feature (485)..(839): Homolog of NCBI NO: 13111663 NR Description: phospholipase PLDb2 [Lycopersicon esculentum]
  misc_feature (47)..(468): Homolog of NCBI NO: 13111663 NR Description: phospholipase PLDb2 [Lycopersicon esculentum]
MDMFSEHLRRLFTACNACARPTDTDDVDPRDKGEFGDKNIRSHRKVITSDPYVTVVVPQATLARTRVLKNSQEPLWDEKFNISIAHPFAYLEFQVKDDDVFGAQIIGTAKIPVRDIASGERISGWFPVLGASGKPPKAETAIFIDMKFTPFDQIHSYRCGIAGDPERRGVRRTYFPVRKGSQVRLYQDAHVMDGTLPAIGLDNGKVYEHGKCWEDICYAISEAHHMIYIVGWSIFHKIKLVRETKVPRDKDMTLGELLKYKSQEGVRVLLLVWDDKTSHDKFGIKTPGVMGTHDEETRKFFKHSSVICVLSPRYASSKLGLFKQQASPSSSIYIMTVVGTLFTHHQKCVLVDTQAVGNNRKVTAFIGGLDLCDGRYDTPEHRILHDLDTVFKDDFHNPTFPAGTKAPRQPWHDLHCRIDGPAAYDVLINFEQRWRKATRWKEFSLRLKGKTHWQDDALIRIGRISWILSPVFKFLKDGTSIIPEDDPCVWVSKEDDPENWHVQIFRSIDSGSVKGFPKYEDEAEAQHLECAKRLVVDKSIQTAYIQTIRSAQHFIYIENQYFLGSSYAWPSYRDAGADNLIPMELALKIVSKIRAKERFAVYVVIPLWPEGDPKSGPVQEILYWQSQTMQMMYDVIAKELKAVQSDAHPLDYLNFYCLGKREQLPDDMPATNGSVVSDSYNFQRFMIYVHAKGMIVDDEYVLMGSANINQRSMAGTKDTEIAMGAYQPNHTWAHKGRHPRGQVYGYRMSLWAEHLGKTGDEFVEPSDLECLKKVNTISEENWKRFIDPKFSELQGHLIKYPLQVDVDGKVSPLPDYETFPDVGGKIIGAHSMALPDTLTT

SEQ ID NO: 45367 - DNA, 1404 bp, Arabidopsis thaliana
  misc_feature (1)..(1404): Ceres Seq. ID no. 12560681
  misc_feature: MA Experiment ID: 20000184 Result: Up-regulated in Transcription
  misc_feature: MA Experiment 20000184 PARAMETER Experiment Name: At_Shoots__P Parameter: Age (day) Value: 7
  misc_feature: MA Experiment 20000184 PARAMETER Experiment Name: At_Shoots__P Parameter: Tissue Value: Shoots vs. Whole Plant
attaccgtcaccggtgagattcctccaaaatcgggactttttctcaggacgtttgagatgcattcgcgctccgccttgctctatagattcctccgtccggcgtcgagatgcttctcctcttcctcggctgtaactccggtcaccgtaacgcaatctcccaagagtctcgaggctcttcgagctcggctggcgaatgagtcgccttccctaaccgatttcatccacggcgatacctattcggtggaagttggaaccaaaaagaaacctctcccgaaacctaaatggatgaaggaatcaattcccggcggcgagagatatgtccagatcaagaagaaattgagagaccttaagcttcacaccgtctgcgaggaagcgaaatgtcccaatctcggtgagtgctggtctggtggtgaaactggaaccgccaccgctacgattatgatccttggggatacatgtacacgcggctgcaggttttgtaatgtgaagacatcgcgtacacctccaccgcctgatccaaatgaacctaacaatgtggctgaagcaattgcttcctggggggttgattatgttgtgatcaccagtgtagatcgagatgatttacctgatcaagggagtggtcattttgctgaaactgttcagagattgaaattcttgaagccggagatgttgattgaagcactagttcctgatttccgcggagatggtggatgtgttgagaaggtttccaagtcagggcttgatgtcttagctcacaacattgagacagttgaagagcttcagagttttgtgcgggaccatcgtgctaactttaagcagtcattggatgtgcttaggatggctaaggagtatgcacctgcaggcaccttaacaaagacttctgtaatgctgggatgtggagagacccctgatcaagtggttaagacaatggagaaggtgagagcagcaggggttgacgttatgacatttggccaatatatgcgaccatctaaacgccacatgccagtagctgagtacgtgacaccagatgccttcgagaggtatcgccttcttggcatggaaatgggattcagatacgtagcatcaggaccaatggtgaggtcgtcgtacaaagcgggagagtactacataaagtcgatgatagaagccgatcgagtggcttctccttctacatccccgtagattacacactataatatgtgaattctttcactttattgctttgtttcttctgcgggtaagccattcacaacacttatccgccacattctgaataatgtaatactattattgtccaatcttccatgtgtgtctagtctctctctctttctcatactatcattgtacttgtggaatgtttcatctttctctgatatataccagtcactctgttcttttaggagc

SEQ ID NO: 45368 - protein, 393 aa, Arabidopsis thaliana
  peptide (1)..(393): Ceres Seq. ID no. 12560682
  misc_feature (147)..(313): Pfam Name: Radical SAM superfamily Pfam Description: Radical SAM superfamily
  misc_feature (9)..(382): Homolog of NCBI NO: 18415808 NR Description: lipoic acid synthase - like protein
  misc_feature (27)..(382): Homolog of NCBI NO: 17737685 NR Description: Lipoic acid synthase CG5231-PA
  misc_feature (55)..(381): Homolog of NCBI NO: 34978347 NR Description: Lipoic acid synthetase, mitochondrial precursor
  misc_feature (55)..(381): Homolog of NCBI NO: 26327671 NR Description: unnamed protein product [Mus musculus]
  misc_feature (55)..(381): Homolog of NCBI NO: 37577166 NR Description: lipoic acid synthetase isoform 1 precursor;
  misc_feature (55)..(381): Homolog of NCBI NO: 13277380 NR Description: lipoic acid synthetase [Mus musculus]
  misc_feature (11)..(382): Homolog of NCBI NO: 33989742 NR Description: Unknown (protein for MGC:66080) [Danio rerio]
  misc_feature (20)..(392): Homolog of NCBI NO: 38347101 NR Description: OSJNBa0006M15.16 [Oryza sativa (japonica
  misc_feature (20)..(388): Homolog of NCBI NO: 13873338 NR Description: lipoic acid synthase [Bruguiera gymnorrhiza]
  misc_feature (20)..(393): Homolog of NCBI NO: 15226412 NR Description: lipoic acid synthase (LIP1)
ITVTGEIPPKSGLFLRTFEMHSRSALLYRFLRPASRCFSSSSAVTPVTVTQSPKSLEALRARLANESPSLTDFIHGDTYSVEVGTKKKPLPKPKWMKESIPGGERYVQIKKKLRDLKLHTVCEEAKCPNLGECWSGGETGTATATIMILGDTCTRGCRFCNVKTSRTPPPPDPNEPNNVAEAIASWGVDYVVITSVDRDDLPDQGSGHFAETVQRLKFLKPEMLIEALVPDFRGDGGCVEKVSKSGLDVLAHNIETVEELQSFVRDHRANFKQSLDVLRMAKEYAPAGTLTKTSVMLGCGETPDQVVKTMEKVRAAGVDVMTFGQYMRPSKRHMPVAEYVTPDAFERYRLLGMEMGFRYVASGPMVRSSYKAGEYYIKSMIEADRVASPSTSP

SEQ ID NO: 45369 - protein, 374 aa, Arabidopsis thaliana
  peptide (1)..(374): Ceres Seq. ID no. 12560683
  misc_feature (128)..(294): Pfam Name: Radical SAM superfamily Pfam Description: Radical SAM superfamily
  misc_feature (1)..(363): Homolog of NCBI NO: 18415808 NR Description: lipoic acid synthase - like protein
  misc_feature (8)..(363): Homolog of NCBI NO: 17737685 NR Description: Lipoic acid synthase CG5231-PA
  misc_feature (36)..(362): Homolog of NCBI NO: 34978347 NR Description: Lipoic acid synthetase, mitochondrial precursor
  misc_feature (36)..(362): Homolog of NCBI NO: 26327671 NR Description: unnamed protein product [Mus musculus]
  misc_feature (36)..(362): Homolog of NCBI NO: 37577166 NR Description: lipoic acid synthetase isoform 1 precursor;
  misc_feature (36)..(362): Homolog of NCBI NO: 13277380 NR Description: lipoic acid synthetase [Mus musculus]
  misc_feature (1)..(363): Homolog of NCBI NO: 33989742 NR Description: Unknown (protein for MGC:66080) [Danio rerio]
  misc_feature (1)..(373): Homolog of NCBI NO: 38347101 NR Description: OSJNBa0006M15.16 [Oryza sativa (japonica
  misc_feature (1)..(369): Homolog of NCBI NO: 13873338 NR Description: lipoic acid synthase [Bruguiera gymnorrhiza]
  misc_feature (1)..(374): Homolog of NCBI NO: 15226412 NR Description: lipoic acid synthase (LIP1)
MHSRSALLYRFLRPASRCFSSSSAVTPVTVTQSPKSLEALRARLANESPSLTDFIHGDTYSVEVGTKKKPLPKPKWMKESIPGGERYVQIKKKLRDLKLHTVCEEAKCPNLGECWSGGETGTATATIMILGDTCTRGCRFCNVKTSRTPPPPDPNEPNNVAEAIASWGVDYVVITSVDRDDLPDQGSGHFAETVQRLKFLKPEMLIEALVPDFRGDGGCVEKVSKSGLDVLAHNIETVEELQSFVRDHRANFKQSLDVLRMAKEYAPAGTLTKTSVMLGCGETPDQVVKTMEKVRAAGVDVMTFGQYMRPSKRHMPVAEYVTPDAFERYRLLGMEMGFRYVASGPMVRSSYKAGEYYIKSMIEADRVASPSTSP

SEQ ID NO: 45370 - protein, 298 aa, Arabidopsis thaliana
  peptide (1)..(298): Ceres Seq. ID no. 12560684
  misc_feature (52)..(218): Pfam Name: Radical SAM superfamily Pfam Description: Radical SAM superfamily
  misc_feature (1)..(287): Homolog of NCBI NO: 18415808 NR Description: lipoic acid synthase - like protein
  misc_feature (1)..(287): Homolog of NCBI NO: 17737685 NR Description: Lipoic acid synthase CG5231-PA
  misc_feature (1)..(286): Homolog of NCBI NO: 34978347 NR Description: Lipoic acid synthetase, mitochondrial precursor
  misc_feature (1)..(286): Homolog of NCBI NO: 26327671 NR Description: unnamed protein product [Mus musculus]
  misc_feature (1)..(286): Homolog of NCBI NO: 37577166 NR Description: lipoic acid synthetase isoform 1 precursor;
  misc_feature (1)..(286): Homolog of NCBI NO: 13277380 NR Description: lipoic acid synthetase [Mus musculus]
  misc_feature (1)..(287): Homolog of NCBI NO: 33989742 NR Description: Unknown (protein for MGC:66080) [Danio rerio]
  misc_feature (1)..(297): Homolog of NCBI NO: 38347101 NR Description: OSJNBa0006M15.16 [Oryza sativa (japonica
  misc_feature (1)..(293): Homolog of NCBI NO: 13873338 NR Description: lipoic acid synthase [Bruguiera gymnorrhiza]
  misc_feature (1)..(298): Homolog of NCBI NO: 15226412 NR Description: lipoic acid synthase (LIP1)
MKESIPGGERYVQIKKKLRDLKLHTVCEEAKCPNLGECWSGGETGTATATIMILGDTCTRGCRFCNVKTSRTPPPPDPNEPNNVAEAIASWGVDYVVITSVDRDDLPDQGSGHFAETVQRLKFLKPEMLIEALVPDFRGDGGCVEKVSKSGLDVLAHNIETVEELQSFVRDHRANFKQSLDVLRMAKEYAPAGTLTKTSVMLGCGETPDQVVKTMEKVRAAGVDVMTFGQYMRPSKRHMPVAEYVTPDAFERYRLLGMEMGFRYVASGPMVRSSYKAGEYYIKSMIEADRVASPSTSP

SEQ ID NO: 45371 - DNA, 1451 bp, Arabidopsis thaliana
  misc_feature (1)..(1451): Ceres Seq. ID no. 12561269
  misc_feature: MA Experiment ID: 20000436 Result: Up-regulated in Transcription
  misc_feature: MA Experiment 20000436 PARAMETER Experiment Name: At_Drought_P Parameter: Age (day) Value: 7
  misc_feature: MA Experiment 20000436 PARAMETER Experiment Name: At_Drought_P Parameter: Organism Value: A. thaliana
  misc_feature: MA Experiment 20000436 PARAMETER Experiment Name: At_Drought_P Parameter: Plant Line Value: WS
  misc_feature: MA Experiment 20000436 PARAMETER Experiment Name: At_Drought_P Parameter: Timepoint (hr) Value: 12
  misc_feature: MA Experiment 20000436 PARAMETER Experiment Name: At_Drought_P Parameter: Tissue Value: Whole Plant
  misc_feature: MA Experiment 20000436 PARAMETER Experiment Name: At_Drought_P Parameter: Treatment Value: Drought vs. No Drought
  misc_feature: MA Experiment ID: 20000437 Result: Up-regulated in Transcription
  misc_feature: MA Experiment 20000437 PARAMETER Experiment Name: At_Drought_P Parameter: Age (day) Value: 8
  misc_feature: MA Experiment 20000437 PARAMETER Experiment Name: At_Drought_P Parameter: Organism Value: A. thaliana
  misc_feature: MA Experiment 20000437 PARAMETER Experiment Name: At_Drought_P Parameter: Plant Line Value: WS
  misc_feature: MA Experiment 20000437 PARAMETER Experiment Name: At_Drought_P Parameter: Timepoint (hr) Value: 24
  misc_feature: MA Experiment 20000437 PARAMETER Experiment Name: At_Drought_P Parameter: Tissue Value: Whole Plant
  misc_feature: MA Experiment 20000437 PARAMETER Experiment Name: At_Drought_P Parameter: Treatment Value: Drought vs. No Drought
  misc_feature: MA Experiment ID: 20000573 Result: Down-regulated in Transcription
  misc_feature: MA Experiment 20000573 PARAMETER Experiment Name: At_100uM_ABA_Mutants__P Parameter: Organism Value: A. thaliana
  misc_feature: MA Experiment 20000573 PARAMETER Experiment Name: At_100uM_ABA_Mutants__P Parameter: Plant Line Value: CS22 vs. Ler wt
  misc_feature: MA Experiment 20000573 PARAMETER Experiment Name: At_100uM_ABA_Mutants__P Parameter: Timepoint (hr) Value: N/A
  misc_feature: MA Experiment 20000573 PARAMETER Experiment Name: At_100uM_ABA_Mutants__P Parameter: Tissue Value: Whole Plant
  misc_feature: MA Experiment 20000573 PARAMETER Experiment Name: At_100uM_ABA_Mutants__P Parameter: Treatment Value: None
  misc_feature: MA Experiment ID: 20000574 Result: Down-regulated in Transcription
  misc_feature: MA Experiment 20000574 PARAMETER Experiment Name: At_100uM_ABA_Mutants__P Parameter: Organism Value: A. thaliana
  misc_feature: MA Experiment 20000574 PARAMETER Experiment Name: At_100uM_ABA_Mutants__P Parameter: Plant Line Value: CS23 vs. Ler wt
  misc_feature: MA Experiment 20000574 PARAMETER Experiment Name: At_100uM_ABA_Mutants__P Parameter: Timepoint (hr) Value: N/A
  misc_feature: MA Experiment 20000574 PARAMETER Experiment Name: At_100uM_ABA_Mutants__P Parameter: Tissue Value: Whole Plant
  misc_feature: MA Experiment 20000574 PARAMETER Experiment Name: At_100uM_ABA_Mutants__P Parameter: Treatment Value: None
  misc_feature: MA Experiment ID: 20000709 Result: Down-regulated in Transcription
  misc_feature: MA Experiment 20000709 PARAMETER Experiment Name: At_15mM_NH4NO3_L-to-H_P Parameter: Age (hr) Value: 14
  misc_feature: MA Experiment 20000709 PARAMETER Experiment Name: At_15mM_NH4NO3_L-to-H_P Parameter: Organism Value: A. thaliana
  misc_feature: MA Experiment 20000709 PARAMETER Experiment Name: At_15mM_NH4NO3_L-to-H_P Parameter: Plant Line Value: WS
  misc_feature: MA Experiment 20000709 PARAMETER Experiment Name: At_15mM_NH4NO3_L-to-H_P Parameter: Timepoint (hr) Value: 4
  misc_feature: MA Experiment 20000709 PARAMETER Experiment Name: At_15mM_NH4NO3_L-to-H_P Parameter: Tissue Value: Aerial
  misc_feature: MA Experiment 20000709 PARAMETER Experiment Name: At_15mM_NH4NO3_L-to-H_P Parameter: Treatment Value: 15mM NH4NO3 vs. 30mM Mannitol
  misc_feature: MA Experiment ID: 20001451 Result: Down-regulated in Transcription
  misc_feature: MA Experiment 20001451 PARAMETER Experiment Name: At_Far-red-induction_P Parameter: Age (day) Value: 7
  misc_feature: MA Experiment 20001451 PARAMETER Experiment Name: At_Far-red-induction_P Parameter: Light Value: Far-red vs. White
  misc_feature: MA Experiment 20001451 PARAMETER Experiment Name: At_Far-red-induction_P Parameter: Organism Value: A. thaliana
  misc_feature: MA Experiment 20001451 PARAMETER Experiment Name: At_Far-red-induction_P Parameter: Plant Line Value: Columbia
  misc_feature: MA Experiment 20001451 PARAMETER Experiment Name: At_Far-red-induction_P Parameter: Timepoint (hr) Value: 24
  misc_feature: MA Experiment 20001451 PARAMETER Experiment Name: At_Far-red-induction_P Parameter: Tissue Value: Whole Plant
  misc_feature: MA Experiment ID: 20001560 Result: Down-regulated in Transcription
  misc_feature: MA Experiment 20001560 PARAMETER Experiment Name: At_Drought_Soil_Dry_P Parameter: Age (day) Value: 28
  misc_feature: MA Experiment 20001560 PARAMETER Experiment Name: At_Drought_Soil_Dry_P Parameter: Organism Value: A. thaliana
  misc_feature: MA Experiment 20001560 PARAMETER Experiment Name: At_Drought_Soil_Dry_P Parameter: Plant Line Value: WS
  misc_feature: MA Experiment 20001560 PARAMETER Experiment Name: At_Drought_Soil_Dry_P Parameter: Post Timepoint (hr) Value: None
  misc_feature: MA Experiment 20001560 PARAMETER Experiment Name: At_Drought_Soil_Dry_P Parameter: Post-Treatment Value: None
  misc_feature: MA Experiment 20001560 PARAMETER Experiment Name: At_Drought_Soil_Dry_P Parameter: Timepoint (day) Value: 14
  misc_feature: MA Experiment 20001560 PARAMETER Experiment Name: At_Drought_Soil_Dry_P Parameter: Treatment Value: Drought vs. No Drought
aaaaaaaaactccaaagtcaaaggaactaaaaatcaaacaatgtccttcctttgaatgattcaccatcttctctttcaccttcccccattttcaaaaacccagaaacaaagcttctcactttcttcacccaaccatgaattccccaagacccatctccgtcgtctccaccttcgcttcaccatcctccacctctgacccaacccgaaaacccttaagcttatggccaggtatgtaccattcacctgtcaccaccgctctttgggaagccagatccaaaatcttcgaatctcttctcgatcctcctaaagacgctccaccacagagccagcttctcaccagaactccttctcatagccgtaccaccattttctaccctttctccactgatttcattctcagagagcaatacagagatccttggaacgaggtccgtatcgggatcttgctcgaagatctcgatgctttagccggcactatctccgtcaagcattgttctgatgatgatagtacaacgaggccactcttgcttgttacagcttctgttcataagattgtcttaaagaagccgatttgtgtcgacattgatctcaagattgttgcttctgtcatttgggttggtcgttcatctatcgagattcaactcgaagttatgcaatccgaattgaaagatgtcaaggcttcttcagattctgttgctttaactgcaaatttcatttttgtggcgcgtgattctaagactggtaaagctgctcctatcaaccgtctttctcctgaaaccgaggttgagaaacttctctttgaggaagctgaagctaggaataacttaaggaagaagaagagaggaggtgacagaagggaatttgatcacggggagtgtaagaagcttgaggcttggttggctgaaggaaggattttctctgacatgccagctcttgctgacagaaacagcattcttcttaaagacactcgtcttgagaattcgctgatatgccaaccgcagcagaggaacatccatggtaggatctttggagggtttttaatgcatagagcatttgagttggctttctctactgcttatacgtttgcgggtctagtgccttacttcttagaagttgatcacgtcgatttcctaagaccggtggacgtcggggatttcttacgtttcaaatcctgtgttctttacactcaactggataaacaggattgtccgctcatcaatatcgaagttgttgctcatgttacaagtccagagattcgctccagtgaggtttcaaatacattctacttcaagttcactgtaaggccagaggcaaaggccagaaacaatgggtttaaacttcgaaatgtagttcctgccacagaggaagaagctcgtcatatcctcgagcgcatggatgcagaagctttgaagtcaagcaaacaacaatgtgtaggcacaattcttcagtaa

SEQ ID NO: 45372 - protein, 438 aa, Arabidopsis thaliana
  peptide (1)..(438): Ceres Seq. ID no. 12561270
  misc_feature (66)..(370): Homolog of NCBI NO: 39587012 NR Description: Hypothetical protein CBG07159 [Caenorhabditis
  misc_feature (59)..(389): Homolog of NCBI NO: 17561564 NR Description: Cytosolic long-chain acyl-CoA thioester hydrolase
  misc_feature (60)..(322): Homolog of NCBI NO: 33284898 NR Description: SI:bZ1F1.1.1 (novel protein similar to acyl-CoA
  misc_feature (1)..(389): Homolog of NCBI NO: 40741147 NR Description: hypothetical protein AN4420.2 [Aspergillus
  misc_feature (62)..(392): Homolog of NCBI NO: 12331400 NR Description: acyl-Coenzyme A thioesterase 3, mitochondrial;
  misc_feature (60)..(392): Homolog of NCBI NO: 6912518 NR Description: Mitochondrial Acyl-CoA Thioesterase [Homo
  misc_feature (60)..(392): Homolog of NCBI NO: 34880562 NR Description: similar to acyl-CoA thioesterase [Rattus
  misc_feature (24)..(76): Homolog of NCBI NO: 15224555 NR Description: hypothetical protein; protein id: At2g30720.1
  misc_feature (94)..(423): Homolog of NCBI NO: 15224555 NR Description: hypothetical protein; protein id: At2g30720.1
  misc_feature (1)..(438): Homolog of NCBI NO: 15238956 NR Description: putative protein; protein id: At5g48370.1
MNSPRPISVVSTFASPSSTSDPTRKPLSLWPGMYHSPVTTALWEARSKIFESLLDPPKDAPPQSQLLTRTPSHSRTTIFYPFSTDFILREQYRDPWNEVRIGILLEDLDALAGTISVKHCSDDDSTTRPLLLVTASVHKIVLKKPICVDIDLKIVASVIWVGRSSIEIQLEVMQSELKDVKASSDSVALTANFIFVARDSKTGKAAPINRLSPETEVEKLLFEEAEARNNLRKKKRGGDRREFDHGECKKLEAWLAEGRIFSDMPALADRNSILLKDTRLENSLICQPQQRNIHGRIFGGFLMHRAFELAFSTAYTFAGLVPYFLEVDHVDFLRPVDVGDFLRFKSCVLYTQLDKQDCPLINIEVVAHVTSPEIRSSEVSNTFYFKFTVRPEAKARNNGFKLRNVVPATEEEARHILERMDAEALKSSKQQCVGTILQ

SEQ ID NO: 45373 - protein, 406 aa, Arabidopsis thaliana
  peptide (1)..(406): Ceres Seq. ID no. 12561271
  misc_feature (34)..(338): Homolog of NCBI NO: 39587012 NR Description: Hypothetical protein CBG07159 [Caenorhabditis
  misc_feature (27)..(357): Homolog of NCBI NO: 17561564 NR Description: Cytosolic long-chain acyl-CoA thioester hydrolase
  misc_feature (28)..(290): Homolog of NCBI NO: 33284898 NR Description: SI:bZ1F1.1.1 (novel protein similar to acyl-CoA
  misc_feature (1)..(357): Homolog of NCBI NO: 40741147 NR Description: hypothetical protein AN4420.2 [Aspergillus
  misc_feature (30)..(360): Homolog of NCBI NO: 12331400 NR Description: acyl-Coenzyme A thioesterase 3, mitochondrial;
  misc_feature (28)..(360): Homolog of NCBI NO: 6912518 NR Description: Mitochondrial Acyl-CoA Thioesterase [Homo
  misc_feature (28)..(360): Homolog of NCBI NO: 34880562 NR Description: similar to acyl-CoA thioesterase [Rattus
  misc_feature (1)..(44): Homolog of NCBI NO: 15224555 NR Description: hypothetical protein; protein id: At2g30720.1
  misc_feature (62)..(391): Homolog of NCBI NO: 15224555 NR Description: hypothetical protein; protein id: At2g30720.1
  misc_feature (1)..(406): Homolog of NCBI NO: 15238956 NR Description: putative protein; protein id: At5g48370.1
MYHSPVTTALWEARSKIFESLLDPPKDAPPQSQLLTRTPSHSRTTIFYPFSTDFILREQYRDPWNEVRIGILLEDLDALAGTISVKHCSDDDSTTRPLLLVTASVHKIVLKKPICVDIDLKIVASVIWVGRSSIEIQLEVMQSELKDVKASSDSVALTANFIFVARDSKTGKAAPINRLSPETEVEKLLFEEAEARNNLRKKKRGGDRREFDHGECKKLEAWLAEGRIFSDMPALADRNSILLKDTRLENSLICQPQQRNIHGRIFGGFLMHRAFELAFSTAYTFAGLVPYFLEVDHVDFLRPVDVGDFLRFKSCVLYTQLDKQDCPLINIEVVAHVTSPEIRSSEVSNTFYFKFTVRPEAKARNNGFKLRNVVPATEEEARHILERMDAEALKSSKQQCVGTILQ

SEQ ID NO: 45374 - protein, 266 aa, Arabidopsis thaliana
  peptide (1)..(266): Ceres Seq. ID no. 12561272
  misc_feature (1)..(228): Homolog of NCBI NO: 39594293 NR Description: Hypothetical protein CBG18926 [Caenorhabditis
  misc_feature (1)..(198): Homolog of NCBI NO: 39587012 NR Description: Hypothetical protein CBG07159 [Caenorhabditis
  misc_feature (1)..(217): Homolog of NCBI NO: 17561564 NR Description: Cytosolic long-chain acyl-CoA thioester hydrolase
  misc_feature (1)..(150): Homolog of NCBI NO: 33284898 NR Description: SI:bZ1F1.1.1 (novel protein similar to acyl-CoA
  misc_feature (1)..(217): Homolog of NCBI NO: 40741147 NR Description: hypothetical protein AN4420.2 [Aspergillus
  misc_feature (1)..(220): Homolog of NCBI NO: 12331400 NR Description: acyl-Coenzyme A thioesterase 3, mitochondrial;
  misc_feature (1)..(220): Homolog of NCBI NO: 6912518 NR Description: Mitochondrial Acyl-CoA Thioesterase [Homo
  misc_feature (1)..(220): Homolog of NCBI NO: 34880562 NR Description: similar to acyl-CoA thioesterase [Rattus
  misc_feature (1)..(251): Homolog of NCBI NO: 15224555 NR Description: hypothetical protein; protein id: At2g30720.1
  misc_feature (1)..(266): Homolog of NCBI NO: 15238956 NR Description: putative protein; protein id: At5g48370.1
MQSELKDVKASSDSVALTANFIFVARDSKTGKAAPINRLSPETEVEKLLFEEAEARNNLRKKKRGGDRREFDHGECKKLEAWLAEGRIFSDMPALADRNSILLKDTRLENSLICQPQQRNIHGRIFGGFLMHRAFELAFSTAYTFAGLVPYFLEVDHVDFLRPVDVGDFLRFKSCVLYTQLDKQDCPLINIEVVAHVTSPEIRSSEVSNTFYFKFTVRPEAKARNNGFKLRNVVPATEEEARHILERMDAEALKSSKQQCVGTILQ

SEQ ID NO: 45375 - DNA, 1677 bp, Arabidopsis thaliana
  misc_feature (1)..(1677): Ceres Seq. ID no. 12600469
  misc_feature: MA Experiment ID: 20000315 Result: Down-regulated in Transcription
  misc_feature: MA Experiment 20000315 PARAMETER Experiment Name: At_14day_Shoots-Roots_Sub_P Parameter: Age (day) Value: 14
  misc_feature: MA Experiment 20000315 PARAMETER Experiment Name: At_14day_Shoots-Roots_Sub_P Parameter: Organism Value: A. thaliana
  misc_feature: MA Experiment 20000315 PARAMETER Experiment Name: At_14day_Shoots-Roots_Sub_P Parameter: Plant Line Value: WS
  misc_feature: MA Experiment 20000315 PARAMETER Experiment Name: At_14day_Shoots-Roots_Sub_P Parameter: Tissue Value: Shoots vs. Whole Plant
  misc_feature: MA Experiment ID: 20000347 Result: Up-regulated in Transcription
  misc_feature: MA Experiment 20000347 PARAMETER Experiment Name: At_2mM_SA_Sub_P Parameter: Age (day) Value: 14
  misc_feature: MA Experiment 20000347 PARAMETER Experiment Name: At_2mM_SA_Sub_P Parameter: Organism Value: A. thaliana
  misc_feature: MA Experiment 20000347 PARAMETER Experiment Name: At_2mM_SA_Sub_P Parameter: Plant Line Value: WS
  misc_feature: MA Experiment 20000347 PARAMETER Experiment Name: At_2mM_SA_Sub_P Parameter: Timepoint (hr) Value: 6
  misc_feature: MA Experiment 20000347 PARAMETER Experiment Name: At_2mM_SA_Sub_P Parameter: Tissue Value: Aerial
  misc_feature: MA Experiment 20000347 PARAMETER Experiment Name: At_2mM_SA_Sub_P Parameter: Treatment Value: 2mM SA vs. No Treatment
  misc_feature: MA Experiment ID: 20000355 Result: Up-regulated in Transcription
  misc_feature: MA Experiment 20000355 PARAMETER Experiment Name: At_Siliques_Sub_P Parameter: Age (day) Value: 21
  misc_feature: MA Experiment 20000355 PARAMETER Experiment Name: At_Siliques_Sub_P Parameter: Organism Value: A. thaliana
  misc_feature: MA Experiment 20000355 PARAMETER Experiment Name: At_Siliques_Sub_P Parameter: Plant Line Value: WS
  misc_feature: MA Experiment 20000355 PARAMETER Experiment Name: At_Siliques_Sub_P Parameter: Tissue Value: Less Than 5mm Siliques vs. Whole Plant
  misc_feature: MA Experiment ID: 20000440 Result: Up-regulated in Transcription
  misc_feature: MA Experiment 20000440 PARAMETER Experiment Name: At_Closed-Flower__Sub_P Parameter: Tissue Value: Closed Flower vs. Whole Plant
ttcttctctatctctctcgccaaagaatcgtacttcttctctcaggttttaaggagatgggatctggtcaatggcacgttgagaaaaggtctacgtttaggaatgattcgtttgtgagagaatatggtatagttccagaaactggttgtctttcaatcatagttcttggtgcttctggtgatcttgctaagaagaagacttttcctgctctttttaacttataccgtcagggatttctcaatccagatgaagttcatattttcgggtatgcgaggactaagatttctgatgaagagctgagagataggattcgtggatatcttgttgatgagaagaatgctgagcaagctgaagctttgtcaaagtttctgcagctgattaagtatgtgagtggcccttatgatgctgaggaggggttccagagattagacaaggcaatttcagagcacgaaatctccaaaaatagtactgaagggtcttctagaagactgttttatcttgcacttccaccgtctgtttatccttctgtatgcaagatgatcaagacgtgctgcatgaacaaatctgatcttggtggatggacacggattgttgtggagaagccatttggcaaggaccttgaatctgcagagcaactgagttctcagattggagagttatttgatgaatcacagatctatcgtatagaccattatcttgggaaggaattagttcaaaacatgttggtcctccggtttgcaaatcgctttttcttgccactttggaaccgtgacaatatcgagaacgtgcagattgttttcagggaagattttggaactgaagggcgtggcggatattttgacgaatatggaataatccgtgatattattcaaaaccatctgctacaggttctttgccttgttgccatggagaaaccaatatctcttaaacctgagcatatccgggatgagaaagtgaaggtgcttcaatctgtggttccgataagcgatgacgaggtagttcttggacaatacgaaggatatagggatgatgatactgttccaaacgactcaaacactccaacatttgccacaacaatccttcgcatacacaacgaaagatgggaaggtgttccatttatattaaaggccggaaaagcgttgaattcaaggaaggcagaaattcgcattcaattcaaggatgtcccaggcgacatattcagatgtcaaaagcaaggaaggaacgagtttgtgatacgcttgcaaccttcagaggcaatgtacatgaaactaactgttaagcaaccaggtctagatatgaatactgtgcaaagtgaactagacttgtcgtatgggcaacggtatcaaggtgtcgctatccctgaggcatacgagcgcttaattcttgacacaatcaaaggcgatcaacaacatttcgttcgtagagacgaattaaaggttgcgtgggagatcttcacgccgctactccacaggatcgacaaaggagaagtaaagtcaatcccatacaaaccaggaagccgaggaccgaaagaagctgatcagctactagagaaagctggttatcttcagactcacggctatatctggatccctcctacactataaaaccctacatatatataaatacacaatacatgtatctacatgtatatgtataaattatgctgaatagtccctc

SEQ ID NO: 45376 - protein, 533 aa, Arabidopsis thaliana
  peptide (1)..(533): Ceres Seq. ID no. 12600470
  misc_feature (241)..(525): Pfam Name: Glucose-6-phosphate dehydrogenase, C-terminal domain Pfam Description: Glucose-6-phosphate dehydrogenase, C-terminal
  misc_feature (21)..(533): Homolog of NCBI NO: 7431269 NR Description: glucose-6-phosphate 1-dehydrogenase (EC 1.1.1.49)
  misc_feature (19)..(533): Homolog of NCBI NO: 3023815 NR Description: Glucose-6-phosphate 1-dehydrogenase, cytoplasmic
  misc_feature (21)..(533): Homolog of NCBI NO: 3021510 NR Description: glucose-6-phosphate dehydrogenase [Nicotiana
  misc_feature (21)..(533): Homolog of NCBI NO: 3021508 NR Description: glucose-6-phosphate dehydrogenase [Nicotiana
  misc_feature (21)..(533): Homolog of NCBI NO: 585165 NR Description: Glucose-6-phosphate 1-dehydrogenase, cytoplasmic
  misc_feature (19)..(533): Homolog of NCBI NO: 18086470 NR Description: AT3g27300/K17E12_12 [Arabidopsis thaliana]
  misc_feature (19)..(533): Homolog of NCBI NO: 25283728 NR Description: glucose-6-phosphate 1-dehydrogenase (EC 1.1.1.49)
  misc_feature (19)..(533): Homolog of NCBI NO: 15232132 NR Description: glucose-6-phosphate 1-dehydrogenase, putative
  misc_feature (19)..(533): Homolog of NCBI NO: 25283727 NR Description: glucose-6-phosphate 1-dehydrogenase (EC 1.1.1.49)
  misc_feature (19)..(533): Homolog of NCBI NO: 15237485 NR Description: glucose-6-phosphate dehydrogenase; protein id:
LLYLSRQRIVLLLSGFKEMGSGQWHVEKRSTFRNDSFVREYGIVPETGCLSIIVLGASGDLAKKKTFPALFNLYRQGFLNPDEVHIFGYARTKISDEELRDRIRGYLVDEKNAEQAEALSKFLQLIKYVSGPYDAEEGFQRLDKAISEHEISKNSTEGSSRRLFYLALPPSVYPSVCKMIKTCCMNKSDLGGWTRIVVEKPFGKDLESAEQLSSQIGELFDESQIYRIDHYLGKELVQNMLVLRFANRFFLPLWNRDNIENVQIVFREDFGTEGRGGYFDEYGIIRDIIQNHLLQVLCLVAMEKPISLKPEHIRDEKVKVLQSVVPISDDEVVLGQYEGYRDDDTVPNDSNTPTFATTILRIHNERWEGVPFILKAGKALNSRKAEIRIQFKDVPGDIFRCQKQGRNEFVIRLQPSEAMYMKLTVKQPGLDMNTVQSELDLSYGQRYQGVAIPEAYERLILDTIKGDQQHFVRRDELKVAWEIFTPLLHRIDKGEVKSIPYKPGSRGPKEADQLLEKAGYLQTHGYIWIPPTL

SEQ ID NO: 45377 - protein, 515 aa, Arabidopsis thaliana [sequence omitted]

SEQ ID NO: 45378 - protein, 355 aa, Arabidopsis thaliana
  peptide (1)..(355): Ceres Seq. ID no. 12600472
  misc_feature (63)..(347): Pfam Name: Glucose-6-phosphate dehydrogenase, C-terminal domain Pfam Description: Glucose-6-phosphate dehydrogenase, C-terminal
  misc_feature (1)..(355): Homolog of NCBI NO: 7431269 NR Description: glucose-6-phosphate 1-dehydrogenase (EC 1.1.1.49)
  misc_feature (1)..(355): Homolog of NCBI NO: 3023815 NR Description: Glucose-6-phosphate 1-dehydrogenase, cytoplasmic
  misc_feature (1)..(355): Homolog of NCBI NO: 3021510 NR Description: glucose-6-phosphate dehydrogenase [Nicotiana
  misc_feature (1)..(355): Homolog of NCBI NO: 3021508 NR Description: glucose-6-phosphate dehydrogenase [Nicotiana
  misc_feature (1)..(355): Homolog of NCBI NO: 585165 NR Description: Glucose-6-phosphate 1-dehydrogenase, cytoplasmic
  misc_feature (1)..(355): Homolog of NCBI NO: 18086470 NR Description: AT3g27300/K17E12_12 [Arabidopsis thaliana]
  misc_feature (1)..(355): Homolog of NCBI NO: 25283728 NR Description: glucose-6-phosphate 1-dehydrogenase (EC 1.1.1.49)
  misc_feature (1)..(355): Homolog of NCBI NO: 15232132 NR Description: glucose-6-phosphate 1-dehydrogenase, putative
  misc_feature (1)..(355): Homolog of NCBI NO: 25283727 NR Description: glucose-6-phosphate 1-dehydrogenase (EC 1.1.1.49)
  misc_feature (1)..(355): Homolog of NCBI NO: 15237485 NR Description: glucose-6-phosphate dehydrogenase; protein id:
MIKTCCMNKSDLGGWTRIVVEKPFGKDLESAEQLSSQIGELFDESQIYRIDHYLGKELVQNMLVLRFANRFFLPLWNRDNIENVQIVFREDFGTEGRGGYFDEYGIIRDIIQNHLLQVLCLVAMEKPISLKPEHIRDEKVKVLQSVVPISDDEVVLGQYEGYRDDDTVPNDSNTPTFATTILRIHNERWEGVPFILKAGKALNSRKAEIRIQFKDVPGDIFRCQKQGRNEFVIRLQPSEAMYMKLTVKQPGLDMNTVQSELDLSYGQRYQGVAIPEAYERLILDTIKGDQQHFVRRDELKVAWEIFTPLLHRIDKGEVKSIPYKPGSRGPKEADQLLEKAGYLQTHGYIWIPPTL

SEQ ID NO: 45379 - DNA, 2510 bp, Arabidopsis thaliana
  misc_feature (1)..(2510): Ceres Seq. ID no. 12561296
  misc_feature: MA Experiment ID: 20000173 Result: Down-regulated in Transcription
  misc_feature: MA Experiment 20000173 PARAMETER Experiment Name: At_42deg_Heat_P Parameter: Age (day) Value: 14
  misc_feature: MA Experiment 20000173 PARAMETER Experiment Name: At_42deg_Heat_P Parameter: Organism Value: A. thaliana
  misc_feature: MA Experiment 20000173 PARAMETER Experiment Name: At_42deg_Heat_P Parameter: Plant Line Value: WS
  misc_feature: MA Experiment 20000173 PARAMETER Experiment Name: At_42deg_Heat_P Parameter: Temperature (deg C) Value: 42 vs. 22
  misc_feature: MA Experiment 20000173 PARAMETER Experiment Name: At_42deg_Heat_P Parameter: Timepoint (hr) Value: 6
  misc_feature: MA Experiment 20000173 PARAMETER Experiment Name: At_42deg_Heat_P Parameter: Tissue Value: Aerial
  misc_feature: MA Experiment ID: 20000495 Result: Down-regulated in Transcription
  misc_feature: MA Experiment 20000495 PARAMETER Experiment Name: At_Guard_Cells_P Parameter: Harvest Date Value: 8/2/2002
  misc_feature: MA Experiment 20000495 PARAMETER Experiment Name: At_Guard_Cells_P Parameter: Organism Value: A. thaliana
  misc_feature: MA Experiment 20000495 PARAMETER Experiment Name: At_Guard_Cells_P Parameter: Tissue Value: Guard Cells vs. Leaves
  misc_feature: MA Experiment ID: 20001451 Result: Down-regulated in Transcription
  misc_feature: MA Experiment 20001451 PARAMETER Experiment Name: At_Far-red-induction_P Parameter: Age (day) Value: 7
  misc_feature: MA Experiment 20001451 PARAMETER Experiment Name: At_Far-red-induction_P Parameter: Light Value: Far-red vs. White
  misc_feature: MA Experiment 20001451 PARAMETER Experiment Name: At_Far-red-induction_P Parameter: Organism Value: A. thaliana
  misc_feature: MA Experiment 20001451 PARAMETER Experiment Name: At_Far-red-induction_P Parameter: Plant Line Value: Columbia
  misc_feature: MA Experiment 20001451 PARAMETER Experiment Name: At_Far-red-induction_P Parameter: Timepoint (hr) Value: 24
  misc_feature: MA Experiment 20001451 PARAMETER Experiment Name: At_Far-red-induction_P Parameter: Tissue Value: Whole Plant
atacacaaacagtttctcgctctaaaccctcaaagttgttctctctctctctcttctcctttttcacagccatttattagattcctctctcacaattagtctcttctcttttctattggattgttgtattagactgatagctcaaggaacccaaaaaacaaaaaccaaaaaagataacataaattatcttcttgaaattgttctctttcttgctttgattttttcaattttcttatactgagtttttgtatttctgtaaaatttgcttataggagactttctgggtatcttggcttcaatttgcagaaaaccaaaaaaaaaaaaaaactttttttctgggtttttttccttagcagagaaaaggttcttaatagttttaagactctggttttgtatattccaattatagctgaatattaaacacaatttataaaacttaaatttctttccaaaaaatctcttctttttaagtctataaaaattgcaactttcttctgaaattattcatttttgaaaaacacaaaagaaacaaagagagagatagagatattatggggaagcaaggaccttgctaccactgtggagttacaaacacacctttgtggagaaatggaccaccagagaagccggtattgtgcaatgcgtgtggatcgcgttggaggacaaagggaacacttgtgaactacacaccgcttcatgctcgtgctgatggtgatgagaatgatgatcatcacaggtttcaaagaatgaagagcatttctttaggcaataagaacaaagagataaagatgctcaagaggaaagcaattcaagaaaacatcatcattaaaagaccggtctttgaattcagttatggtttgaaggcggctgtgatagaggaggatgctagtaatagatcgagttccggttcggctgtatcaaactctgagagctgtgcacagtttagcagtgcagatgggagtccatctcaatctaatgcgtgggacacaactgttccttgcaagaggaggacgtgtgtgggccgtcctaagtcctcttctgttgaaaagctcacaaaggacctttacaatattttacaagagcagcaatcgtcatgtctctcagtttcatcagaggaagatcttctttttgagaatgaaatgtcaatggtctcagttgagattggacatgggagtgttctgatgaagaatccccactcgtttgctcgggaagaggagtctgaagccagctcactctcttcgattgagaacaagtcctccatcagtgacgcatactcacattccgtgaagcgtgttgagattggagcagtgagaggttcatattatggtggacaaacaataaagcaagaacaattcaagagaaccaagtctcaaactgaaagagtgcatgtcctggggagtcatggttcaccactatgtagcatagatttgaaggatgttttcaactttgatgagttcatagaacaattcacagaggaagaacagaagaaactgatgaacttgcttcctcagattgactctgatgaccttcctcatagcctcagaatgatgtttgaaagtgctcagttcaaggacaacttctctttgtttcagcagctcattgctgatggtgtctttgatgtgtcttcttcctcgggggcaaaactcgaagaaatcaggacttttaagaagcttgctttgacagattttaacaaatctcgtttggtggaaagctataacctcctcaaggaacgcgaaaaagggaccggagattctgttactacaacttcaaaaagctcaatcccaaatgtacctaaaaatattgtaaccattaagaggcgctatgaaaaccaaatccaagtaaagtcagagtcaagggggctaatgaggagccccaaaagggtgatgaagatgaaagcaagccatgagacagagaacaatgtctcatgcttcagaccaagaagcttggcttctgtgtttgcacaagaaggtggctctgcagtgtttagctatgaaggtaattgcagttctgatcaagatctccttcttctggacttgccgtcaaacgggtcatttcctcaagcagagctacttcaccaactctgaaaggtcaaagctacaaaacctcattgagcttctcagagcttaaaggaaggattcttaagctctctatctctcttctttgatgagagatatactcttaagctttctgagaaaacgaccaaaatgaggtttctgctttagaaattggaatttgcagacataaaaaaaggaaggatatttatttgagtcttgcttgggcttctctttggtggttaagtttataaagtgggtcttataatatacatacatatacataaagcctcttctcttacctctctttctgtgacccttttaattttaaacttgaaagttccatcttttttggtttcttatctttggacttttttagtttctgcttttttttttgtataggatgaaaaagatactgtaatatcatgtaaacttccgaaaatgcagaaaatggaatac

SEQ ID NO: 45380 - protein, 510 aa, Arabidopsis thaliana
  peptide (1)..(510): Ceres Seq. ID no. 12561297
  misc_feature (1)..(294): Homolog of NCBI NO: 38345953 NR Description: OSJNBb0038F03.10 [Oryza sativa (japonica
  misc_feature (13)..(236): Homolog of NCBI NO: 8978081 NR Description: gene_id:K14A3.9~pir||D71445~similar to unknown
  misc_feature (238)..(510): Homolog of NCBI NO: 8978081 NR Description: gene_id:K14A3.9~pir||D71445~similar to unknown
  misc_feature (1)..(236): Homolog of NCBI NO: 22327632 NR Description: GATA zinc finger protein; protein id: At5g47140.1
  misc_feature (238)..(510): Homolog of NCBI NO: 22327632 NR Description: GATA zinc finger protein; protein id: At5g47140.1
  misc_feature (40)..(412): Homolog of NCBI NO: 7485111 NR Description: hypothetical protein - Arabidopsis thaliana
  misc_feature (1)..(510): Homolog of NCBI NO: 30684095 NR Description: GATA zinc finger protein [Arabidopsis thaliana]
MGKQGPCYHCGVTNTPLWRNGPPEKPVLCNACGSRWRTKGTLVNYTPLHARADGDENDDHHRFQRMKSISLGNKNKEIKMLKRKAIQENIIIKRPVFEFSYGLKAAVIEEDASNRSSSGSAVSNSESCAQFSSADGSPSQSNAWDTTVPCKRRTCVGRPKSSSVEKLTKDLYNILQEQQSSCLSVSSEEDLLFENEMSMVSVEIGHGSVLMKNPHSFAREEESEASSLSSIENKSSISDAYSHSVKRVEIGAVRGSYYGGQTIKQEQFKRTKSQTERVHVLGSHGSPLCSIDLKDVFNFDEFIEQFTEEEQKKLMNLLPQIDSDDLPHSLRMMFESAQFKDNFSLFQQLIADGVFDVSSSSGAKLEEIRTFKKLALTDFNKSRLVESYNLLKEREKGTGDSVTTTSKSSIPNVPKNIVTIKRRYENQIQVKSESRGLMRSPKRVMKMKASHETENNVSCFRPRSLASVFAQEGGSAVFSYEGNCSSDQDLLLLDLPSNGSFPQAELLHQL

SEQ ID NO: 45381 - protein, 445 aa, Arabidopsis thaliana
  peptide (1)..(445): Ceres Seq. ID no. 12561298
  misc_feature (1)..(229): Homolog of NCBI NO: 38345953 NR Description: OSJNBb0038F03.10 [Oryza sativa (japonica
  misc_feature (1)..(171): Homolog of NCBI NO: 8978081 NR Description: gene_id:K14A3.9~pir||D71445~similar to unknown
  misc_feature (173)..(445): Homolog of NCBI NO: 8978081 NR Description: gene_id:K14A3.9~pir||D71445~similar to unknown
  misc_feature (1)..(171): Homolog of NCBI NO: 22327632 NR Description: GATA zinc finger protein; protein id: At5g47140.1
  misc_feature (173)..(445): Homolog of NCBI NO: 22327632 NR Description: GATA zinc finger protein; protein id: At5g47140.1
  misc_feature (1)..(347): Homolog of NCBI NO: 7485111 NR Description: hypothetical protein - Arabidopsis thaliana
  misc_feature (1)..(445): Homolog of NCBI NO: 30684095 NR Description: GATA zinc finger protein [Arabidopsis thaliana]
MKSISLGNKNKEIKMLKRKAIQENIIIKRPVFEFSYGLKAAVIEEDASNRSSSGSAVSNSESCAQFSSADGSPSQSNAWDTTVPCKRRTCVGRPKSSSVEKLTKDLYNILQEQQSSCLSVSSEEDLLFENEMSMVSVEIGHGSVLMKNPHSFAREEESEASSLSSIENKSSISDAYSHSVKRVEIGAVRGSYYGGQTIKQEQFKRTKSQTERVHVLGSHGSPLCSIDLKDVFNFDEFIEQFTEEEQKKLMNLLPQIDSDDLPHSLRMMFESAQFKDNFSLFQQLIADGVFDVSSSSGAKLEEIRTFKKLALTDFNKSRLVESYNLLKEREKGTGDSVTTTSKSSIPNVPKNIVTIKRRYENQIQVKSESRGLMRSPKRVMKMKASHETENNVSCFRPRSLASVFAQEGGSAVFSYEGNCSSDQDLLLLDLPSNGSFPQAELLHQL

SEQ ID NO: 45382 - protein, 431 aa, Arabidopsis thaliana
  peptide (1)..(431): Ceres Seq. ID no. 12561299
  misc_feature (1)..(215): Homolog of NCBI NO: 38345953 NR Description: OSJNBb0038F03.10 [Oryza sativa (japonica
  misc_feature (1)..(157): Homolog of NCBI NO: 8978081 NR Description: gene_id:K14A3.9~pir||D71445~similar to unknown
  misc_feature (159)..(431): Homolog of NCBI NO: 8978081 NR Description: gene_id:K14A3.9~pir||D71445~similar to unknown
  misc_feature (1)..(157): Homolog of NCBI NO: 22327632 NR Description: GATA zinc finger protein; protein id: At5g47140.1
  misc_feature (159)..(431): Homolog of NCBI NO: 22327632 NR Description: GATA zinc finger protein; protein id: At5g47140.1
  misc_feature (1)..(333): Homolog of NCBI NO: 7485111 NR Description: hypothetical protein - Arabidopsis thaliana
  misc_feature (1)..(431): Homolog of NCBI NO: 30684095 NR Description: GATA zinc finger protein [Arabidopsis thaliana]
MLKRKAIQENIIIKRPVFEFSYGLKAAVIEEDASNRSSSGSAVSNSESCAQFSSADGSPSQSNAWDTTVPCKRRTCVGRPKSSSVEKLTKDLYNILQEQQSSCLSVSSEEDLLFENEMSMVSVEIGHGSVLMKNPHSFAREEESEASSLSSIENKSSISDAYSHSVKRVEIGAVRGSYYGGQTIKQEQFKRTKSQTERVHVLGSHGSPLCSIDLKDVFNFDEFIEQFTEEEQKKLMNLLPQIDSDDLPHSLRMMFESAQFKDNFSLFQQLIADGVFDVSSSSGAKLEEIRTFKKLALTDFNKSRLVESYNLLKEREKGTGDSVTTTSKSSIPNVPKNIVTIKRRYENQIQVKSESRGLMRSPKRVMKMKASHETENNVSCFRPRSLASVFAQEGGSAVFSYEGNCSSDQDLLLLDLPSNGSFPQAELLHQL

SEQ ID NO: 45383 - DNA, 948 bp, Arabidopsis thaliana
  misc_feature (1)..(948): Ceres Seq. ID no. 12561300
  misc_feature: MA Experiment ID: 20000234 Result: Down-regulated in Transcription
  misc_feature: MA Experiment 20000234 PARAMETER Experiment Name: At_Siliques_P Parameter: Age (day) Value: 21
  misc_feature: MA Experiment 20000234 PARAMETER Experiment Name: At_Siliques_P Parameter: Organism Value: A. thaliana
  misc_feature: MA Experiment 20000234 PARAMETER Experiment Name: At_Siliques_P Parameter: Plant Line Value: WS
  misc_feature: MA Experiment 20000234 PARAMETER Experiment Name: At_Siliques_P Parameter: Tissue Value: Less Than 5mm Siliques vs. Whole Plant
  misc_feature: MA Experiment ID: 20000235 Result: Down-regulated in Transcription
  misc_feature: MA Experiment 20000235 PARAMETER Experiment Name: At_Siliques_P Parameter: Age (day) Value: 21
  misc_feature: MA Experiment 20000235 PARAMETER Experiment Name: At_Siliques_P Parameter: Organism Value: A. thaliana
  misc_feature: MA Experiment 20000235 PARAMETER Experiment Name: At_Siliques_P Parameter: Plant Line Value: WS
  misc_feature: MA Experiment 20000235 PARAMETER Experiment Name: At_Siliques_P Parameter: Tissue Value: 5-10mm Siliques vs. Whole Plant
  misc_feature: MA Experiment ID: 20000264 Result: Down-regulated in Transcription
  misc_feature: MA Experiment 20000264 PARAMETER Experiment Name: At_Open_Flower_P Parameter: Age (day) Value: 21
  misc_feature: MA Experiment 20000264 PARAMETER Experiment Name: At_Open_Flower_P Parameter: Plant Line Value: WS
  misc_feature: MA Experiment 20000264 PARAMETER Experiment Name: At_Open_Flower_P Parameter: Tissue Value: Open Flower vs. Whole Plant
  misc_feature: MA Experiment ID: 20000265 Result: Down-regulated in Transcription
  misc_feature: MA Experiment 20000265 PARAMETER Experiment Name: At_Open_Flower_P Parameter: Age (day) Value: 21
  misc_feature: MA Experiment 20000265 PARAMETER Experiment Name: At_Open_Flower_P Parameter: Plant Line Value: WS
  misc_feature: MA Experiment 20000265 PARAMETER Experiment Name: At_Open_Flower_P Parameter: Tissue Value: Closed Flower vs. Whole Plant
  misc_feature: MA Experiment ID: 20000286 Result: Down-regulated in Transcription
  misc_feature: MA Experiment 20000286 PARAMETER Experiment Name: At_Open_Flower_P Parameter: Age (day) Value: 21
  misc_feature: MA Experiment 20000286 PARAMETER Experiment Name: At_Open_Flower_P Parameter: Plant Line Value: WS
  misc_feature: MA Experiment 20000286 PARAMETER Experiment Name: At_Open_Flower_P Parameter: Tissue Value: Half Open vs. Whole Plant
  misc_feature: MA Experiment ID: 20000573 Result: Down-regulated in Transcription
  misc_feature: MA Experiment 20000573 PARAMETER Experiment Name: At_100uM_ABA_Mutants__P Parameter: Organism Value: A. thaliana
  misc_feature: MA Experiment 20000573 PARAMETER Experiment Name: At_100uM_ABA_Mutants__P Parameter: Plant Line Value: CS22 vs. Ler wt
  misc_feature: MA Experiment 20000573 PARAMETER Experiment Name: At_100uM_ABA_Mutants__P Parameter: Timepoint (hr) Value: N/A
  misc_feature: MA Experiment 20000573 PARAMETER Experiment Name: At_100uM_ABA_Mutants__P Parameter: Tissue Value: Whole Plant
  misc_feature: MA Experiment 20000573 PARAMETER Experiment Name: At_100uM_ABA_Mutants__P Parameter: Treatment Value: None
  misc_feature: MA Experiment ID: 20000794 Result: Down-regulated in Transcription
  misc_feature: MA Experiment 20000794 PARAMETER Experiment Name: At_Petals_P Parameter: Age (day) Value: 23-25 days
  misc_feature: MA Experiment 20000794 PARAMETER Experiment Name: At_Petals_P Parameter: Plant Line Value: WS
  misc_feature: MA Experiment 20000794 PARAMETER Experiment Name: At_Petals_P Parameter: Tissue Value: Petals vs. Whole plant
  misc_feature: MA Experiment ID: 20001248 Result: Down-regulated in Transcription
  misc_feature: MA Experiment 20001248 PARAMETER Experiment Name: At_Far-red-induction_P Parameter: Age (day) Value: 7
  misc_feature: MA Experiment 20001248 PARAMETER Experiment Name: At_Far-red-induction_P Parameter: Light Value: Far-red vs. White
  misc_feature: MA Experiment 20001248 PARAMETER Experiment Name: At_Far-red-induction_P Parameter: Organism Value: A. thaliana
  misc_feature: MA Experiment 20001248 PARAMETER Experiment Name: At_Far-red-induction_P Parameter: Plant Line Value: Columbia
  misc_feature: MA Experiment 20001248 PARAMETER Experiment Name: At_Far-red-induction_P Parameter: Timepoint (hr) Value: 4
  misc_feature: MA Experiment 20001248 PARAMETER Experiment Name: At_Far-red-induction_P Parameter: Tissue Value: Whole Plant
  misc_feature: MA Experiment ID: 20001450 Result: Down-regulated in Transcription
  misc_feature: MA Experiment 20001450 PARAMETER Experiment Name: At_Far-red-induction_P Parameter: Age (day) Value: 7
  misc_feature: MA Experiment 20001450 PARAMETER Experiment Name: At_Far-red-induction_P Parameter: Light Value: Far-red vs. White
  misc_feature: MA Experiment 20001450 PARAMETER Experiment Name: At_Far-red-induction_P Parameter: Organism Value: A. thaliana
  misc_feature: MA Experiment 20001450 PARAMETER Experiment Name: At_Far-red-induction_P Parameter: Plant Line Value: Columbia
  misc_feature: MA Experiment 20001450 PARAMETER Experiment Name: At_Far-red-induction_P Parameter: Timepoint (hr) Value: 8
  misc_feature: MA Experiment 20001450 PARAMETER Experiment Name: At_Far-red-induction_P Parameter: Tissue Value: Whole Plant
  misc_feature: MA Experiment ID: 20001451 Result: Down-regulated in Transcription
  misc_feature: MA Experiment 20001451 PARAMETER Experiment Name: At_Far-red-induction_P Parameter: Age (day) Value: 7
  misc_feature: MA Experiment 20001451 PARAMETER Experiment Name: At_Far-red-induction_P Parameter: Light Value: Far-red vs. White
  misc_feature: MA Experiment 20001451 PARAMETER Experiment Name: At_Far-red-induction_P Parameter: Organism Value: A. thaliana
  misc_feature: MA Experiment 20001451 PARAMETER Experiment Name: At_Far-red-induction_P Parameter: Plant Line Value: Columbia
  misc_feature: MA Experiment 20001451 PARAMETER Experiment Name: At_Far-red-induction_P Parameter: Timepoint (hr) Value: 24
  misc_feature: MA Experiment 20001451 PARAMETER Experiment Name: At_Far-red-induction_P Parameter: Tissue Value: Whole Plant
agtcgtcttgttttttggttcggcgaaaacaagaatgtcaggtcatcagtgcaccgagaacccgcctgatctggatccaactagcgggtcgggtcatgtcgagaaactcggtaaccttgacacctacgtctgtggttccactcattcaaagcttgctgttcttcttgtccctcatgttttcggatatgaaactccaaacctgaggaaacttgctgacaaggttgcagaagctggattctacgcggtggttcctgatttcttccatggagatccttataatcccgagaaccaggatcgtccgtttcctatttggatgaaagatcatgaactagagaaagggtttgaggagtcaaagccaatagtggaggccttgaagaacaaaggcataactagtataggagcagcagggttctgttggggtgcaaaagttgcggtggaactagctaaggaaaagcttgttgacgctactgttttgttacatcctgctcgcgttacggtggatgatatcaaggaggtcaaccttccaattgctgtattaggagctgaaatcgatcaagtgtctcctccagaacttgtgaggcagttcgaagatattttagcttctaaacctcaggtgaagagttttgtgaagatattcccaagatgcaaacacggttggactgttagatacaatgaaaatgatccatcagaagttgaagctgcaatggaagctcacaaggacatgctcgcttggctcatcgactatctcaagtgagaacttgaaacggtctaagctttggtttgcacataaccagcggagacccaaaatcatgtctagtactctttaaataataaatgtaactagtagtatcttctttaatttatgttgctttgtcatgtttgtggctagtgttctctgtttcgtttcagtctgagaaacatcagtttgagttaaacttaagacgttct

SEQ ID NO: 45384 - protein, 250 aa, Arabidopsis thaliana
  peptide (1)..(250): Ceres Seq. ID no. 12561301
  misc_feature (39)..(249): Pfam Name: Dienelactone hydrolase family Pfam Description: Dienelactone hydrolase family
  misc_feature (29)..(249): Homolog of NCBI NO: 31712014 NR Description: RIKEN cDNA 2310016A09 [Mus musculus]
  misc_feature (31)..(249): Homolog of NCBI NO: 38181938 NR Description: Unknown (protein for MGC:76315) [Silurana
  misc_feature (80)..(250): Homolog of NCBI NO: 40253308 NR Description: Endo-1,3;1,4-beta-D-glucanase precursor-like
  misc_feature (2)..(205): Homolog of NCBI NO: 8928122 NR Description: Endo-1,3;1,4-beta-D-glucanase precursor
  misc_feature (17)..(250): Homolog of NCBI NO: 40253306 NR Description: putative Endo-1,3;1,4-beta-D-glucanase precursor
  misc_feature (16)..(250): Homolog of NCBI NO: 40253303 NR Description: putative Endo-1,3;1,4-beta-D-glucanase precursor
  misc_feature (12)..(250): Homolog of NCBI NO: 18403820 NR Description: expressed protein
  misc_feature (18)..(250): Homolog of NCBI NO: 9294513 NR Description: contains similarity to
  misc_feature (12)..(250): Homolog of NCBI NO: 24899687 NR Description: Unknown protein [Arabidopsis thaliana]
  misc_feature (12)..(250): Homolog of NCBI NO: 18403812 NR Description: expressed protein
VVLFFGSAKTRMSGHQCTENPPDLDPTSGSGHVEKLGNLDTYVCGSTHSKLAVLLVPHVFGYETPNLRKLADKVAEAGFYAVVPDFFHGDPYNPENQDRPFPIWMKDHELEKGFEESKPIVEALKNKGITSIGAAGFCWGAKVAVELAKEKLVDATVLLHPARVTVDDIKEVNLPIAVLGAEIDQVSPPELVRQFEDILASKPQVKSFVKIFPRCKHGWTVRYNENDPSEVEAAMEAHKDMLAWLIDYLK

SEQ ID NO: 45385 - protein, 239 aa, Arabidopsis thaliana
  peptide (1)..(239): Ceres Seq. ID no. 12561302
  misc_feature (28)..(238): Pfam Name: Dienelactone hydrolase family Pfam Description: Dienelactone hydrolase family
  misc_feature (18)..(238): Homolog of NCBI NO: 31712014 NR Description: RIKEN cDNA 2310016A09 [Mus musculus]
  misc_feature (20)..(238): Homolog of NCBI NO: 38181938 NR Description: Unknown (protein for MGC:76315) [Silurana
  misc_feature (69)..(239): Homolog of NCBI NO: 40253308 NR Description: Endo-1,3;1,4-beta-D-glucanase precursor-like
  misc_feature (1)..(194): Homolog of NCBI NO: 8928122 NR Description: Endo-1,3;1,4-beta-D-glucanase precursor
  misc_feature (6)..(239): Homolog of NCBI NO: 40253306 NR Description: putative Endo-1,3;1,4-beta-D-glucanase precursor
  misc_feature (5)..(239): Homolog of NCBI NO: 40253303 NR Description: putative Endo-1,3;1,4-beta-D-glucanase precursor
  misc_feature (1)..(239): Homolog of NCBI NO: 18403820 NR Description: expressed protein
  misc_feature (7)..(239): Homolog of NCBI NO: 9294513 NR Description: contains similarity to
  misc_feature (1)..(239): Homolog of NCBI NO: 24899687 NR Description: Unknown protein [Arabidopsis thaliana]
  misc_feature (1)..(239): Homolog of NCBI NO: 18403812 NR Description: expressed protein
MSGHQCTENPPDLDPTSGSGHVEKLGNLDTYVCGSTHSKLAVLLVPHVFGYETPNLRKLADKVAEAGFYAVVPDFFHGDPYNPENQDRPFPIWMKDHELEKGFEESKPIVEALKNKGITSIGAAGFCWGAKVAVELAKEKLVDATVLLHPARVTVDDIKEVNLPIAVLGAEIDQVSPPELVRQFEDILASKPQVKSFVKIFPRCKHGWTVRYNENDPSEVEAAMEAHKDMLAWLIDYLK

SEQ ID NO: 45386 - protein, 146 aa, Arabidopsis thaliana
  peptide (1)..(146): Ceres Seq. ID no. 12561303
  misc_feature (1)..(145): Pfam Name: Dienelactone hydrolase family Pfam Description: Dienelactone hydrolase family
  misc_feature (1)..(145): Homolog of NCBI NO: 31712014 NR Description: RIKEN cDNA 2310016A09 [Mus musculus]
  misc_feature (1)..(145): Homolog of NCBI NO: 38181938 NR Description: Unknown (protein for MGC:76315) [Silurana
  misc_feature (1)..(146): Homolog of NCBI NO: 40253308 NR Description: Endo-1,3;1,4-beta-D-glucanase precursor-like
  misc_feature (1)..(101): Homolog of NCBI NO: 8928122 NR Description: Endo-1,3;1,4-beta-D-glucanase precursor
  misc_feature (1)..(146): Homolog of NCBI NO: 40253306 NR Description: putative Endo-1,3;1,4-beta-D-glucanase precursor
  misc_feature (1)..(146): Homolog of NCBI NO: 40253303 NR Description: putative Endo-1,3;1,4-beta-D-glucanase precursor
  misc_feature (1)..(146): Homolog of NCBI NO: 18403820 NR Description: expressed protein
  misc_feature (1)..(146): Homolog of NCBI NO: 9294513 NR Description: contains similarity to
  misc_feature (1)..(146): Homolog of NCBI NO: 24899687 NR Description: Unknown protein [Arabidopsis thaliana]
  misc_feature (1)..(146): Homolog of NCBI NO: 18403812 NR Description: expressed protein
MKDHELEKGFEESKPIVEALKNKGITSIGAAGFCWGAKVAVELAKEKLVDATVLLHPARVTVDDIKEVNLPIAVLGAEIDQVSPPELVRQFEDILASKPQVKSFVKIFPRCKHGWTVRYNENDPSEVEAAMEAHKDMLAWLIDYLK

SEQ ID NO: 45387 - DNA, 2062 bp, Arabidopsis thaliana
  misc_feature (1)..(2062): Ceres Seq. ID no. 12600320
gatggtagacccaattctctctctctctcttaacaacactctctcctctctctccctctctctatctatccccatttccatggaagcaagcagatgtgttcttacatctctttctctctctacagccttacatgaacagtgactgttctctctctttccctctccttccttttttcttctacttctccttccctttgcttcgaaaagggtatctcgtgatctttatcgctcaaaaatcttcactttcagatcaggccactcgttgatggaatctgtgacagtattgattactagagagtaaagacaagttctttaaatctcagggaagaaggaattggtgtttaagattgctctgtgttaatgatggcttcaaaaactccagaaggatcacttaccaattccagtcaaagtatgtcaatcaacactttagcagatcaagtatcttcgagtttgtctttcgctgatccaagtagtgatggcaaaaccggtaatagtaagatcaacgagcaaggtgagagtggaaagagtagcacttgtagaccaagtacaagcagtgatataagcgatgagagcacttgtagcagctttagtagcagtatcaacaaacctcacaaggctaatgatgtgagatgggaagctattcaagctgttagaactaaacatggtggtttgggtttgaatcattttaggctcttgaagaggttaggatgtggagatattggaactgttcatcttgctgagttgaatggaactaggtgttattttgcgatgaaggttatggataaaactgctttggctagccggaaaaagcttcttagggctcaaactgaaagagagatattgcagtgtcttgatcacccgtttcttccgactttgtatagtcattttgagacagagaagttctcttgtttggtgatggagttttgtcctggtggtgatttgcatacactaaggcagagacaacccgggaaacgcttcaccgagcaagcagctaagttttatgtcgcggaagtgcttcttgcaatggaatatttacacatgcttgggatcatttaccgtgatctgaaacccgagaacgttcttgtgagagatgatgggcacgtgatgctttcggattttgatctctccctgagatgtactgtgagcctctctatagtcagatcagctaatgttggatccgaaggcttgtcgaagaattcggtttcttgctcgcaacaacctgcatgcatccagcaaccatcttgcatctcaatggctccaacatcttgcttcggtcctcggttcttctcatcgaaatccaagaaagacaagaaaccgaaaaccgaaaacgggaaccaccaagtaactccgttaccagaactcgttgcagagcccacaggcgcccgttctatgtcttttgttggcacacacgagtacttagctccagagatcatcaaaggtgaaggacatggaagtgcagttgattggtggacctttgggatctttctttatgaactattgtttggtaaaacaccgtttaaagggtcaggaaatcgagcaacgctcttcaacgtggttggtcagcctcttagattccctgaatctccggttgttagcttcgcagctagggatttgataaggagtttgcttgtgaaggagccacaacatagattagcttataagcgtggagcaacagagataaagcaacatcctttctttgaaggagtgaattgggctctggttcgatgtgccagtccaccggagattcctaaaccggttgatcttgaagctttgaatcctactcctactgtgccagcagccgcatcttcgagtgtaagatctgatcagagtaattatcttgagtttgatttcttctgaagaaactgtttccacagttgatgattctcattattgtttctttgcaaattctgtttagtgttttctacaaatgtgtttctttttttttcttctttttaattttcacgtcttggaaaaagttatgagatttgtaatcattcttcaaagttgtgagacagtctctgtaccatcttcttgagtttaatgttagacacgaaccattgag

SEQ ID NO: 45388 - protein, 498 aa, Arabidopsis thaliana
  peptide (1)..(498): Ceres Seq. ID no. 12600321
  misc_feature (109)..(446): Pfam Name: Protein kinase domain Pfam Description: Protein kinase domain
  misc_feature (109)..(446): Pfam Name: Protein kinase domain Pfam Description: Protein kinase domain
  misc_feature (10)..(498): Homolog of NCBI NO: 7488270 NR Description: protein kinase homolog T13E15.16 - Arabidopsis
  misc_feature (82)..(498): Homolog of NCBI NO: 320622 NR Description: probable protein kinase - maize (fragment)
  misc_feature (6)..(498): Homolog of NCBI NO: 125568 NR Description: Protein kinase PVPK-1
  misc_feature (12)..(498): Homolog of NCBI NO: 7446383 NR Description: probable protein kinase PK1 - potato
  misc_feature (48)..(493): Homolog of NCBI NO: 1346057 NR Description: Protein kinase G11A
  misc_feature (10)..(498): Homolog of NCBI NO: 7488270 NR Description: protein kinase homolog T13E15.16 - Arabidopsis
  misc_feature (6)..(498): Homolog of NCBI NO: 125568 NR Description: Protein kinase PVPK-1
  misc_feature (48)..(493): Homolog of NCBI NO: 1346057 NR Description: Protein kinase G11A
  misc_feature (1)..(498): Homolog of NCBI NO: 15241076 NR Description: serine threonine-specific protein kinase ATPK64
  misc_feature (1)..(498): Homolog of NCBI NO: 99749 NR Description: probable serine/threonine-specific protein kinase
  misc_feature (5)..(498): Homolog of NCBI NO: 15236802 NR Description: putative protein kinase
  misc_feature (28)..(498): Homolog of NCBI NO: 15238798 NR Description: protein kinase (EC 2.7.1.37) 5 (pir||JN0505)
  misc_feature (28)..(498): Homolog of NCBI NO: 17064850 NR Description: protein kinase 5 [Arabidopsis thaliana]
  misc_feature (12)..(498): Homolog of NCBI NO: 7446383 NR Description: probable protein kinase PK1 - potato
  misc_feature (82)..(498): Homolog of NCBI NO: 320622 NR Description: probable protein kinase - maize (fragment)
  misc_feature (28)..(498): Homolog of NCBI NO: 17064850 NR Description: protein kinase 5 [Arabidopsis thaliana]
  misc_feature (28)..(498): Homolog of NCBI NO: 15238798 NR Description: protein kinase (EC 2.7.1.37) 5 (pir||JN0505)
  misc_feature (5)..(498): Homolog of NCBI NO: 15236802 NR Description: putative protein kinase
  misc_feature (1)..(498): Homolog of NCBI NO: 99749 NR Description: probable serine/threonine-specific protein kinase
  misc_feature (1)..(498): Homolog of NCBI NO: 15241076 NR Description: serine threonine-specific protein kinase ATPK64
MMASKTPEGSLTNSSQSMSINTLADQVSSSLSFADPSSDGKTGNSKINEQGESGKSSTCRPSTSSDISDESTCSSFSSSINKPHKANDVRWEAIQAVRTKHGGLGLNHFRLLKRLGCGDIGTVHLAELNGTRCYFAMKVMDKTALASRKKLLRAQTEREILQCLDHPFLPTLYSHFETEKFSCLVMEFCPGGDLHTLRQRQPGKRFTEQAAKFYVAEVLLAMEYLHMLGIIYRDLKPENVLVRDDGHVMLSDFDLSLRCTVSLSIVRSANVGSEGLSKNSVSCSQQPACIQQPSCISMAPTSCFGPRFFSSKSKKDKKPKTENGNHQVTPLPELVAEPTGARSMSFVGTHEYLAPEIIKGEGHGSAVDWWTFGIFLYELLFGKTPFKGSGNRATLFNVVGQPLRFPESPVVSFAARDLIRSLLVKEPQHRLAYKRGATEIKQHPFFEGVNWALVRCASPPEIPKPVDLEALNPTPTVPAAASSSVRSDQSNYLEFDFF

SEQ ID NO: 45389 - protein, 497 aa, Arabidopsis thaliana
  peptide (1)..(497): Ceres Seq. ID no. 12600322
  misc_feature (108)..(445): Pfam Name: Protein kinase domain Pfam Description: Protein kinase domain
  misc_feature (108)..(445): Pfam Name: Protein kinase domain Pfam Description: Protein kinase domain
  misc_feature (9)..(497): Homolog of NCBI NO: 7488270 NR Description: protein kinase homolog T13E15.16 - Arabidopsis
  misc_feature (81)..(497): Homolog of NCBI NO: 320622 NR Description: probable protein kinase - maize (fragment)
  misc_feature (5)..(497): Homolog of NCBI NO: 125568 NR Description: Protein kinase PVPK-1
  misc_feature (11)..(497): Homolog of NCBI NO: 7446383 NR Description: probable protein kinase PK1 - potato
  misc_feature (47)..(492): Homolog of NCBI NO: 1346057 NR Description: Protein kinase G11A
  misc_feature (9)..(497): Homolog of NCBI NO: 7488270 NR Description: protein kinase homolog T13E15.16 - Arabidopsis
  misc_feature (5)..(497): Homolog of NCBI NO: 125568 NR Description: Protein kinase PVPK-1
  misc_feature (47)..(492): Homolog of NCBI NO: 1346057 NR Description: Protein kinase G11A
  misc_feature (1)..(497): Homolog of NCBI NO: 15241076 NR Description: serine threonine-specific protein kinase ATPK64
  misc_feature (1)..(497): Homolog of NCBI NO: 99749 NR Description: probable serine/threonine-specific protein kinase
  misc_feature (4)..(497): Homolog of NCBI NO: 15236802 NR Description: putative protein kinase
  misc_feature (27)..(497): Homolog of NCBI NO: 15238798 NR Description: protein kinase (EC 2.7.1.37) 5 (pir||JN0505)
  misc_feature (27)..(497): Homolog of NCBI NO: 17064850 NR Description: protein kinase 5 [Arabidopsis thaliana]
  misc_feature (11)..(497): Homolog of NCBI NO: 7446383 NR Description: probable protein kinase PK1 - potato
  misc_feature (81)..(497): Homolog of NCBI NO: 320622 NR Description: probable protein kinase - maize (fragment)
  misc_feature (27)..(497): Homolog of NCBI NO: 17064850 NR Description: protein kinase 5 [Arabidopsis thaliana]
  misc_feature (27)..(497): Homolog of NCBI NO: 15238798 NR Description: protein kinase (EC 2.7.1.37) 5 (pir||JN0505)
  misc_feature (4)..(497): Homolog of NCBI NO: 15236802 NR Description: putative protein kinase
  misc_feature (1)..(497): Homolog of NCBI NO: 99749 NR Description: probable serine/threonine-specific protein kinase
  misc_feature (1)..(497): Homolog of NCBI NO: 15241076 NR Description: serine threonine-specific protein kinase ATPK64
MASKTPEGSLTNSSQSMSINTLADQVSSSLSFADPSSDGKTGNSKINEQGESGKSSTCRPSTSSDISDESTCSSFSSSINKPHKANDVRWEAIQAVRTKHGGLGLNHFRLLKRLGCGDIGTVHLAELNGTRCYFAMKVMDKTALASRKKLLRAQTEREILQCLDHPFLPTLYSHFETEKFSCLVMEFCPGGDLHTLRQRQPGKRFTEQAAKFYVAEVLLAMEYLHMLGIIYRDLKPENVLVRDDGHVMLSDFDLSLRCTVSLSIVRSANVGSEGLSKNSVSCSQQPACIQQPSCISMAPTSCFGPRFFSSKSKKDKKPKTENGNHQVTPLPELVAEPTGARSMSFVGTHEYLAPEIIKGEGHGSAVDWWTFGIFLYELLFGKTPFKGSGNRATLFNVVGQPLRFPESPVVSFAARDLIRSLLVKEPQHRLAYKRGATEIKQHPFFEGVNWALVRCASPPEIPKPVDLEALNPTPTVPAAASSSVRSDQSNYLEFDFF

SEQ ID NO: 45390 - protein, 481 aa, Arabidopsis thaliana
  peptide (1)..(481): Ceres Seq. ID no. 12600323
  misc_feature (92)..(429): Pfam Name: Protein kinase domain Pfam Description: Protein kinase domain
  misc_feature (92)..(429): Pfam Name: Protein kinase domain Pfam Description: Protein kinase domain
  misc_feature (1)..(481): Homolog of NCBI NO: 7488270 NR Description: protein kinase homolog T13E15.16 - Arabidopsis
  misc_feature (65)..(481): Homolog of NCBI NO: 320622 NR Description: probable protein kinase - maize (fragment)
  misc_feature (1)..(481): Homolog of NCBI NO: 125568 NR Description: Protein kinase PVPK-1
  misc_feature (1)..(481): Homolog of NCBI NO: 7446383 NR Description: probable protein kinase PK1 - potato
  misc_feature (31)..(476): Homolog of NCBI NO: 1346057 NR Description: Protein kinase G11A
  misc_feature (1)..(481): Homolog of NCBI NO: 7488270 NR Description: protein kinase homolog T13E15.16 - Arabidopsis
  misc_feature (1)..(481): Homolog of NCBI NO: 125568 NR Description: Protein kinase PVPK-1
  misc_feature (31)..(476): Homolog of NCBI NO: 1346057 NR Description: Protein kinase G11A
  misc_feature (1)..(481): Homolog of NCBI NO: 15241076 NR Description: serine threonine-specific protein kinase ATPK64
  misc_feature (1)..(481): Homolog of NCBI NO: 99749 NR Description: probable serine/threonine-specific protein kinase
  misc_feature (1)..(481): Homolog of NCBI NO: 15236802 NR Description: putative protein kinase
  misc_feature (11)..(481): Homolog of NCBI NO: 15238798 NR Description: protein kinase (EC 2.7.1.37) 5 (pir||JN0505)
  misc_feature (11)..(481): Homolog of NCBI NO: 17064850 NR Description: protein kinase 5 [Arabidopsis thaliana]
  misc_feature (1)..(481): Homolog of NCBI NO: 7446383 NR Description: probable protein kinase PK1 - potato
  misc_feature (65)..(481): Homolog of NCBI NO: 320622 NR Description: probable protein kinase - maize (fragment)
  misc_feature (11)..(481): Homolog of NCBI NO: 17064850 NR Description: protein kinase 5 [Arabidopsis thaliana]
  misc_feature (11)..(481): Homolog of NCBI NO: 15238798 NR Description: protein kinase (EC 2.7.1.37) 5 (pir||JN0505)
  misc_feature (1)..(481): Homolog of NCBI NO: 15236802 NR Description: putative protein kinase
  misc_feature (1)..(481): Homolog of NCBI NO: 99749 NR Description: probable serine/threonine-specific protein kinase
  misc_feature (1)..(481): Homolog of NCBI NO: 15241076 NR Description: serine threonine-specific protein kinase ATPK64
MSINTLADQVSSSLSFADPSSDGKTGNSKINEQGESGKSSTCRPSTSSDISDESTCSSFSSSINKPHKANDVRWEAIQAVRTKHGGLGLNHFRLLKRLGCGDIGTVHLAELNGTRCYFAMKVMDKTALASRKKLLRAQTEREILQCLDHPFLPTLYSHFETEKFSCLVMEFCPGGDLHTLRQRQPGKRFTEQAAKFYVAEVLLAMEYLHMLGIIYRDLKPENVLVRDDGHVMLSDFDLSLRCTVSLSIVRSANVGSEGLSKNSVSCSQQPACIQQPSCISMAPTSCFGPRFFSSKSKKDKKPKTENGNHQVTPLPELVAEPTGARSMSFVGTHEYLAPEIIKGEGHGSAVDWWTFGIFLYELLFGKTPFKGSGNRATLFNVVGQPLRFPESPVVSFAARDLIRSLLVKEPQHRLAYKRGATEIKQHPFFEGVNWALVRCASPPEIPKPVDLEALNPTPTVPAAASSSVRSDQSNYLEFDFF

SEQ ID NO: 45391 - DNA, 1485 bp, Arabidopsis thaliana
  misc_feature (1)..(1485): Ceres Seq. ID no. 12561304
  misc_feature: MA Experiment ID: 20000173 Result: Down-regulated in Transcription
  misc_feature: MA Experiment 20000173 PARAMETER Experiment Name: At_42deg_Heat_P Parameter: Age (day) Value: 14
  misc_feature: MA Experiment 20000173 PARAMETER Experiment Name: At_42deg_Heat_P Parameter: Organism Value: A. thaliana
  misc_feature: MA Experiment 20000173 PARAMETER Experiment Name: At_42deg_Heat_P Parameter: Plant Line Value: WS
  misc_feature: MA Experiment 20000173 PARAMETER Experiment Name: At_42deg_Heat_P Parameter: Temperature (deg C) Value: 42 vs. 22
  misc_feature: MA Experiment 20000173 PARAMETER Experiment Name: At_42deg_Heat_P Parameter: Timepoint (hr) Value: 6
  misc_feature: MA Experiment 20000173 PARAMETER Experiment Name: At_42deg_Heat_P Parameter: Tissue Value: Aerial
  misc_feature: MA Experiment ID: 20000182 Result: Up-regulated in Transcription
  misc_feature: MA Experiment 20000182 PARAMETER Experiment Name: At_2mM_SA_P Parameter: Age (day) Value: 14
  misc_feature: MA Experiment 20000182 PARAMETER Experiment Name: At_2mM_SA_P Parameter: Organism Value: A. thaliana
  misc_feature: MA Experiment 20000182 PARAMETER Experiment Name: At_2mM_SA_P Parameter: Plant Line Value: WS
  misc_feature: MA Experiment 20000182 PARAMETER Experiment Name: At_2mM_SA_P Parameter: Timepoint (hr) Value: 6
  misc_feature: MA Experiment 20000182 PARAMETER Experiment Name: At_2mM_SA_P Parameter: Tissue Value: Aerial
  misc_feature: MA Experiment 20000182 PARAMETER Experiment Name: At_2mM_SA_P Parameter: Treatment Value: 2mM SA vs. No Treatment
  misc_feature: MA Experiment ID: 20000227 Result: Down-regulated in Transcription
  misc_feature: MA Experiment 20000227 PARAMETER Experiment Name: At_Root-Tips-vs-Tops_P Parameter: Tissue Value: Root Tips vs. Root Tops
  misc_feature: MA Experiment ID: 20000234 Result: Down-regulated in Transcription
  misc_feature: MA Experiment 20000234 PARAMETER Experiment Name: At_Siliques_P Parameter: Age (day) Value: 21
  misc_feature: MA Experiment 20000234 PARAMETER Experiment Name: At_Siliques_P Parameter: Organism Value: A. thaliana
  misc_feature: MA Experiment 20000234 PARAMETER Experiment Name: At_Siliques_P Parameter: Plant Line Value: WS
  misc_feature: MA Experiment 20000234 PARAMETER Experiment Name: At_Siliques_P Parameter: Tissue Value: Less Than 5mm Siliques vs. Whole Plant
  misc_feature: MA Experiment ID: 20000235 Result: Down-regulated in Transcription
  misc_feature: MA Experiment 20000235 PARAMETER Experiment Name: At_Siliques_P Parameter: Age (day) Value: 21
  misc_feature: MA Experiment 20000235 PARAMETER Experiment Name: At_Siliques_P Parameter: Organism Value: A. thaliana
  misc_feature: MA Experiment 20000235 PARAMETER Experiment Name: At_Siliques_P Parameter: Plant Line Value: WS
  misc_feature: MA Experiment 20000235 PARAMETER Experiment Name: At_Siliques_P Parameter: Tissue Value: 5-10mm Siliques vs. Whole Plant
  misc_feature: MA Experiment ID: 20000264 Result: Down-regulated in Transcription
  misc_feature: MA Experiment 20000264 PARAMETER Experiment Name: At_Open_Flower_P Parameter: Age (day) Value: 21
  misc_feature: MA Experiment 20000264 PARAMETER Experiment Name: At_Open_Flower_P Parameter: Plant Line Value: WS
  misc_feature: MA Experiment 20000264 PARAMETER Experiment Name: At_Open_Flower_P Parameter: Tissue Value: Open Flower vs. Whole Plant
  misc_feature: MA Experiment ID: 20000265 Result: Down-regulated in Transcription
  misc_feature: MA Experiment 20000265 PARAMETER Experiment Name: At_Open_Flower_P Parameter: Age (day) Value: 21
  misc_feature: MA Experiment 20000265 PARAMETER Experiment Name: At_Open_Flower_P Parameter: Plant Line Value: WS
  misc_feature: MA Experiment 20000265 PARAMETER Experiment Name: At_Open_Flower_P Parameter: Tissue Value: Closed Flower vs. Whole Plant
  misc_feature: MA Experiment ID: 20000286 Result: Down-regulated in Transcription
  misc_feature: MA Experiment 20000286 PARAMETER Experiment Name: At_Open_Flower_P Parameter: Age (day) Value: 21
  misc_feature: MA Experiment 20000286 PARAMETER Experiment Name: At_Open_Flower_P Parameter: Plant Line Value: WS
  misc_feature: MA Experiment 20000286 PARAMETER Experiment Name: At_Open_Flower_P Parameter: Tissue Value: Half Open vs. Whole Plant
  misc_feature: MA Experiment ID: 20000496 Result: Down-regulated in Transcription
  misc_feature: MA Experiment 20000496 PARAMETER Experiment Name: At_Guard_Cells_P Parameter: Harvest Date Value: 7/19/2002
  misc_feature: MA Experiment 20000496 PARAMETER Experiment Name: At_Guard_Cells_P Parameter: Organism Value: Canola
  misc_feature: MA Experiment 20000496 PARAMETER Experiment Name: At_Guard_Cells_P Parameter: Tissue Value: Guard Cells vs. Leaves
atatccactagctcttgtctgaattggtaaaacaagaagaagaagaagaagaagaagaagaaagagaaggctcattagaaattgatgggtgcttgtatttcgttcttttcttcttcctctccttccaaaacaggtctccatagtcatgccacaacgaacaaccacagcaatggaacagagttctcgtcaaccaccggcgcgacaacaaacagcagcgtcggacaacagagccaattctccgatatttccactgggattataagtgattccggtaaactactggaatcgccaaatctcaaagtctataactttctggatctaaagacggcgacgaagaatttcaaaccggattcgatgttgggtcaaggaggtttcgggaaagtatacagaggttgggtcgatgccacgactcttgctccttccagagtcggttctggtatgatcgttgccatcaagagattgaattctgagagtgttcaaggatttgcagagtggcgttcagaagttaacttcttgggaatgctttcgcaccgaaatctggtgaagttattgggatactgtcgtgaagacaaagagcttctccttgtctacgagttcatgcccaaaggaagtcttgagagtcatctttttagacgaaacgatccttttccttgggatttaaggatcaagattgtgattggtgcagctcgtggccttgcgtttctacacagcttacaaagagaagtcatctatagagacttcaaagcttccaatatacttcttgattcgaactatgacgcaaagctttcagatttcggactagcaaagctaggaccagcagatgagaagtcacacgtcacgactaggatcatgggcacatatggttatgctgctcctgaatatatggcaacaggccatttatacgttaagagtgacgtattcgcctttggtgtggttttactagaaataatgaccggactgacggcgcacaacacaaaacggcccagaggacaagagagtcttgtcgactggttaagaccagaactctcaaacaaacacagagtgaaacaaataatggacaaaggaatcaaaggtcaatacacaaccaaggtcgcgaccgaaatggcacgcattacactctcttgtatcgagccagacccaaaaaaccgaccacacatgaaggaagtagtcgaagtcctcgaacacatccaagggcttaatgttgtccctaaccgttcttccactaaacaggccgttgctaactcttcacgttcttcgccacatcactatcgctataaagctggcgcacttggggctgaacgcaagagagcaacgcctggacggtttggatcagtagaaaaataaatagttgtttggtatcttttttttccggcggtatgaaatgattttagagtctttattgtttcattctctttgaattaattcttgaaaggttttgtgtataatactgtttcttttgtaattctagataaatattttcattct

SEQ ID NO: 45392 - protein, 419 aa, Arabidopsis thaliana
  peptide (1)..(419): Ceres Seq. ID no. 12561305
  misc_feature (42)..(378): Homolog of NCBI NO: 15227001 NR Description: putative protein kinase; protein id: At2g28930.1
  misc_feature (34)..(391): Homolog of NCBI NO: 14719339 NR Description: putative protein kinase [Oryza sativa]
  misc_feature (61)..(397): Homolog of NCBI NO: 20503002 NR Description: Putative protein kinase [Oryza sativa (japonica
  misc_feature (1)..(396): Homolog of NCBI NO: 25287605 NR Description: probable protein kinase [imported] - Arabidopsis
  misc_feature (1)..(396): Homolog of NCBI NO: 18398350 NR Description: putative protein kinase
  misc_feature (1)..(413): Homolog of NCBI NO: 21537344 NR Description: putative protein kinase [Arabidopsis thaliana]
  misc_feature (12)..(411): Homolog of NCBI NO: 38345396 NR Description: OSJNBa0017B10.2 [Oryza sativa (japonica
  misc_feature (64)..(419): Homolog of NCBI NO: 7434285 NR Description: probable serine/threonine-specific protein kinase
  misc_feature (1)..(419): Homolog of NCBI NO: 25287611 NR Description: protein kinase-like protein [imported] -
  misc_feature (1)..(419): Homolog of NCBI NO: 30690422 NR Description: protein kinase family [Arabidopsis thaliana]
MGACISFFSSSSPSKTGLHSHATTNNHSNGTEFSSTTGATTNSSVGQQSQFSDISTGIISDSGKLLESPNLKVYNFLDLKTATKNFKPDSMLGQGGFGKVYRGWVDATTLAPSRVGSGMIVAIKRLNSESVQGFAEWRSEVNFLGMLSHRNLVKLLGYCREDKELLLVYEFMPKGSLESHLFRRNDPFPWDLRIKIVIGAARGLAFLHSLQREVIYRDFKASNILLDSNYDAKLSDFGLAKLGPADEKSHVTTRIMGTYGYAAPEYMATGHLYVKSDVFAFGVVLLEIMTGLTAHNTKRPRGQESLVDWLRPELSNKHRVKQIMDKGIKGQYTTKVATEMARITLSCIEPDPKNRPHMKEVVEVLEHIQGLNVVPNRSSTKQAVANSSRSSPHHYRYKAGALGAERKRATPGRFGSVEK

SEQ ID NO: 45393 - protein, 329 aa, Arabidopsis thaliana
  peptide (1)..(329): Ceres Seq. ID no. 12561306
  misc_feature (1)..(288): Homolog of NCBI NO: 15227001 NR Description: putative protein kinase; protein id: At2g28930.1
  misc_feature (1)..(301): Homolog of NCBI NO: 14719339 NR Description: putative protein kinase [Oryza sativa]
  misc_feature (1)..(307): Homolog of NCBI NO: 20503002 NR Description: Putative protein kinase [Oryza sativa (japonica
  misc_feature (1)..(306): Homolog of NCBI NO: 25287605 NR Description: probable protein kinase [imported] - Arabidopsis
  misc_feature (1)..(306): Homolog of NCBI NO: 18398350 NR Description: putative protein kinase
  misc_feature (1)..(323): Homolog of NCBI NO: 21537344 NR Description: putative protein kinase [Arabidopsis thaliana]
  misc_feature (1)..(321): Homolog of NCBI NO: 38345396 NR Description: OSJNBa0017B10.2 [Oryza sativa (japonica
  misc_feature (1)..(329): Homolog of NCBI NO: 7434285 NR Description: probable serine/threonine-specific protein kinase
  misc_feature (1)..(329): Homolog of NCBI NO: 25287611 NR Description: protein kinase-like protein [imported] -
  misc_feature (1)..(329): Homolog of NCBI NO: 30690422 NR Description: protein kinase family [Arabidopsis thaliana]
MLGQGGFGKVYRGWVDATTLAPSRVGSGMIVAIKRLNSESVQGFAEWRSEVNFLGMLSHRNLVKLLGYCREDKELLLVYEFMPKGSLESHLFRRNDPFPWDLRIKIVIGAARGLAFLHSLQREVIYRDFKASNILLDSNYDAKLSDFGLAKLGPADEKSHVTTRIMGTYGYAAPEYMATGHLYVKSDVFAFGVVLLEIMTGLTAHNTKRPRGQESLVDWLRPELSNKHRVKQIMDKGIKGQYTTKVATEMARITLSCIEPDPKNRPHMKEVVEVLEHIQGLNVVPNRSSTKQAVANSSRSSPHHYRYKAGALGAERKRATPGRFGSVEK

SEQ ID NO: 45394 - protein, 301 aa, Arabidopsis thaliana
  peptide (1)..(301): Ceres Seq. ID no. 12561307
  misc_feature (1)..(260): Homolog of NCBI NO: 15227001 NR Description: putative protein kinase; protein id: At2g28930.1
  misc_feature (1)..(273): Homolog of NCBI NO: 14719339 NR Description: putative protein kinase [Oryza sativa]
  misc_feature (1)..(279): Homolog of NCBI NO: 20503002 NR Description: Putative protein kinase [Oryza sativa (japonica
  misc_feature (1)..(278): Homolog of NCBI NO: 25287605 NR Description: probable protein kinase [imported] - Arabidopsis
  misc_feature (1)..(278): Homolog of NCBI NO: 18398350 NR Description: putative protein kinase
  misc_feature (1)..(295): Homolog of NCBI NO: 21537344 NR Description: putative protein kinase [Arabidopsis thaliana]
  misc_feature (1)..(293): Homolog of NCBI NO: 38345396 NR Description: OSJNBa0017B10.2 [Oryza sativa (japonica
  misc_feature (1)..(301): Homolog of NCBI NO: 7434285 NR Description: probable serine/threonine-specific protein kinase
  misc_feature (1)..(301): Homolog of NCBI NO: 25287611 NR Description: protein kinase-like protein [imported] -
  misc_feature (1)..(301): Homolog of NCBI NO: 30690422 NR Description: protein kinase family [Arabidopsis thaliana]
MIVAIKRLNSESVQGFAEWRSEVNFLGMLSHRNLVKLLGYCREDKELLLVYEFMPKGSLESHLFRRNDPFPWDLRIKIVIGAARGLAFLHSLQREVIYRDFKASNILLDSNYDAKLSDFGLAKLGPADEKSHVTTRIMGTYGYAAPEYMATGHLYVKSDVFAFGVVLLEIMTGLTAHNTKRPRGQESLVDWLRPELSNKHRVKQIMDKGIKGQYTTKVATEMARITLSCIEPDPKNRPHMKEVVEVLEHIQGLNVVPNRSSTKQAVANSSRSSPHHYRYKAGALGAERKRATPGRFGSVEK

SEQ ID NO: 45395 - DNA, 1837 bp, Arabidopsis thaliana
  misc_feature (1)..(1837): Ceres Seq. ID no. 12600379
  misc_feature: MA Experiment ID: 20000180 Result: Down-regulated in Transcription
  misc_feature: MA Experiment 20000180 PARAMETER Experiment Name: At_Germinating_Seeds_P Parameter: Age (hr) Value: 24 vs. 0
  misc_feature: MA Experiment 20000180 PARAMETER Experiment Name: At_Germinating_Seeds_P Parameter: Tissue Value: Germinating Seeds
  misc_feature: MA Experiment ID: 20000495 Result: Up-regulated in Transcription
  misc_feature: MA Experiment 20000495 PARAMETER Experiment Name: At_Guard_Cells_P Parameter: Harvest Date Value: 8/2/2002
  misc_feature: MA Experiment 20000495 PARAMETER Experiment Name: At_Guard_Cells_P Parameter: Organism Value: A. thaliana
  misc_feature: MA Experiment 20000495 PARAMETER Experiment Name: At_Guard_Cells_P Parameter: Tissue Value: Guard Cells vs. Leaves
  misc_feature: MA Experiment ID: 20001248 Result: Up-regulated in Transcription
  misc_feature: MA Experiment 20001248 PARAMETER Experiment Name: At_Far-red-induction_P Parameter: Age (day) Value: 7
  misc_feature: MA Experiment 20001248 PARAMETER Experiment Name: At_Far-red-induction_P Parameter: Light Value: Far-red vs. White
  misc_feature: MA Experiment 20001248 PARAMETER Experiment Name: At_Far-red-induction_P Parameter: Organism Value: A. thaliana
  misc_feature: MA Experiment 20001248 PARAMETER Experiment Name: At_Far-red-induction_P Parameter: Plant Line Value: Columbia
  misc_feature: MA Experiment 20001248 PARAMETER Experiment Name: At_Far-red-induction_P Parameter: Timepoint (hr) Value: 4
  misc_feature: MA Experiment 20001248 PARAMETER Experiment Name: At_Far-red-induction_P Parameter: Tissue Value: Whole Plant
  misc_feature: MA Experiment ID: 20001450 Result: Up-regulated in Transcription
  misc_feature: MA Experiment 20001450 PARAMETER Experiment Name: At_Far-red-induction_P Parameter: Age (day) Value: 7
  misc_feature: MA Experiment 20001450 PARAMETER Experiment Name: At_Far-red-induction_P Parameter: Light Value: Far-red vs. White
  misc_feature: MA Experiment 20001450 PARAMETER Experiment Name: At_Far-red-induction_P Parameter: Organism Value: A. thaliana
  misc_feature: MA Experiment 20001450 PARAMETER Experiment Name: At_Far-red-induction_P Parameter: Plant Line Value: Columbia
  misc_feature: MA Experiment 20001450 PARAMETER Experiment Name: At_Far-red-induction_P Parameter: Timepoint (hr) Value: 8
  misc_feature: MA Experiment 20001450 PARAMETER Experiment Name: At_Far-red-induction_P Parameter: Tissue Value: Whole Plant
  misc_feature: MA Experiment ID: 20001451 Result: Up-regulated in Transcription
  misc_feature: MA Experiment 20001451 PARAMETER Experiment Name: At_Far-red-induction_P Parameter: Age (day) Value: 7
  misc_feature: MA Experiment 20001451 PARAMETER Experiment Name: At_Far-red-induction_P Parameter: Light Value: Far-red vs. White
  misc_feature: MA Experiment 20001451 PARAMETER Experiment Name: At_Far-red-induction_P Parameter: Organism Value: A. thaliana
  misc_feature: MA Experiment 20001451 PARAMETER Experiment Name: At_Far-red-induction_P Parameter: Plant Line Value: Columbia
  misc_feature: MA Experiment 20001451 PARAMETER Experiment Name: At_Far-red-induction_P Parameter: Timepoint (hr) Value: 24
  misc_feature: MA Experiment 20001451 PARAMETER Experiment Name: At_Far-red-induction_P Parameter: Tissue Value: Whole Plant
aagagcctgagattatcccagtggaaagaagagaaaccctaatgggaacgagctcgtgtggcgatcacgagaagcagagaattgaagatgaagagcaatacggtgtgttgctgtactacaagtacacctctgttcctgatctagatgagctcgtttccttctatgaatctagctgcaactcattaggtctactcggccgagtcaggctctcccctaaaggcgtcaatgttactgttggtgggaaattaactgcattggaggaacatattgccgctgcaaagtcgaattgtttgtttgaagggactgacttcaagcttgcatcttgccatcatcccttgaatgacaaagttgctgaggaatgtgggtttacatcactctccatccgagttgttgaggagttagtgacctttagtccttgccctccccttaaacccccagaaatttcaaatgctgggaagcatctctctgctgcagagtttcattcggtcctgcagagtgccaatgggaagtctgagaataaggaacttgttttgcttgacgcgaggaacctgtacgagacacggattggaaaattcgaatcagaaaatgtggagacccttgatcctgaaatcaggcaatatagcgatttgccaacctggattgatcagaatgccgagaaaatgaagggcaaaaacgtgctcatgtactgcactggtggaatcagatgtgaaatggcatctgcatatatcagatctaaaggtgctggatttgagaatacttttcagctctatggtggcatacagagataccttgaacaatttcccagtggtgggttcttcaaagggaagaactttgtgtttgatcaccggatctcagttgggagctcaaaagaggatataataggcagctgccttctctgcaacaatacctttgacgactattctccacgttgccgttgcagattatgccggatgcttgttttagtctgcaatcattgtcgggttaaaggagatatatatatatgtgagctgtgtcgtaaacacggaaaaggggaagtccctttgagtcttgatcccttaaaccaaccttctgaaagcaatggtgacaatacaagacggaagctgaggatcttgtgcttgcatggatttaggcagaacgcgtctagctttaaagggaggaccggatcactagcaaagaaactgaagaatattgccgagcttgtgttcatcgatgcaccacacgaattacagttcatctaccaaactgctacccctccatccggagtatgcaataagaagtttgcgtggttggtgtcatcagattttgataaaccgagtgaaacaggctggacagtggcccaatgccagttcgatccattgcagtatcagactcaaactgaagggtttgataaatcgttgacatacttgaagacggcatttgaagagaaagggccttttgatggcattctcggattctctcaaggtgcagcaatggctgcggctgtatgtgggaaacaggagcagctcgtaggtgaaatagacttcagattctgcgtgttgtgctcgggtttcacaccgtggccattgttggagatgaaggagaaacgatcgattaaatgcccttcacttcacatattcggaagtcagcctggaaaagacagacaaattgtgactcaagccagctcagacctggcggggttgtttgaagatggttgcgccaccattgttgagcacgattttggccacatcattcctacaaagtctccttatattgatgagattaaagctttcctttaccaattcatttgaggactttattaacaagacaagaagactcttttgcaatcaaatatttcttg

SEQ ID NO: 45396 - protein, 594 aa, Arabidopsis thaliana
  peptide (1)..(594): Ceres Seq. ID no. 12600380
  misc_feature (363)..(593): Pfam Name: Domain of unknown function (DUF341) Pfam Description: Domain of unknown function (DUF341)
  misc_feature (364)..(593): Homolog of NCBI NO: 18158418 NR Description: candidate tumor suppressor OVCA2 [Mus musculus]
  misc_feature (145)..(293): Homolog of NCBI NO: 10834696 NR Description: PP4189 [Homo sapiens]
  misc_feature (39)..(290): Homolog of NCBI NO: 22985816 NR Description: hypothetical protein [Burkholderia fungorum]
  misc_feature (115)..(369): Homolog of NCBI NO: 16551861 NR Description: unnamed protein product [Homo sapiens]
  misc_feature (13)..(364): Homolog of NCBI NO: 26390123 NR Description: unnamed protein product [Mus musculus]
  misc_feature (13)..(364): Homolog of NCBI NO: 40254259 NR Description: hypothetical protein 3010020C06 [Mus musculus]
  misc_feature (28)..(369): Homolog of NCBI NO: 31377601 NR Description: PP4189 [Homo sapiens]
  misc_feature (313)..(594): Homolog of NCBI NO: 25402531 NR Description: hypothetical protein [imported] - Arabidopsis
  misc_feature (14)..(316): Homolog of NCBI NO: 25402531 NR Description: hypothetical protein [imported] - Arabidopsis
  misc_feature (14)..(594): Homolog of NCBI NO: 30681061 NR Description: expressed protein [Arabidopsis thaliana]
EPEIIPVERRETLMGTSSCGDHEKQRIEDEEQYGVLLYYKYTSVPDLDELVSFYESSCNSLGLLGRVRLSPKGVNVTVGGKLTALEEHIAAAKSNCLFEGTDFKLASCHHPLNDKVAEECGFTSLSIRVVEELVTFSPCPPLKPPEISNAGKHLSAAEFHSVLQSANGKSENKELVLLDARNLYETRIGKFESENVETLDPEIRQYSDLPTWIDQNAEKMKGKNVLMYCTGGIRCEMASAYIRSKGAGFENTFQLYGGIQRYLEQFPSGGFFKGKNFVFDHRISVGSSKEDIIGSCLLCNNTFDDYSPRCRCRLCRMLVLVCNHCRVKGDIYICELCRKHGKGEVPLSLDPLNQPSESNGDNTRRKLRILCLHGFRQNASSFKGRTGSLAKKLKNIAELVFIDAPHELQFIYQTATPPSGVCNKKFAWLVSSDFDKPSETGWTVAQCQFDPLQYQTQTEGFDKSLTYLKTAFEEKGPFDGILGFSQGAAMAAAVCGKQEQLVGEIDFRFCVLCSGFTPWPLLEMKEKRSIKCPSLHIFGSQPGKDRQIVTQASSDLAGLFEDGCATIVEHDFGHIIPTKSPYIDEIKAFLYQFI

SEQ ID NO: 45397 - protein, 581 aa, Arabidopsis thaliana
  peptide (1)..(581): Ceres Seq. ID no. 12600381
  misc_feature (350)..(580): Pfam Name: Domain of unknown function (DUF341) Pfam Description: Domain of unknown function (DUF341)
  misc_feature (351)..(580): Homolog of NCBI NO: 18158418 NR Description: candidate tumor suppressor OVCA2 [Mus musculus]
  misc_feature (132)..(280): Homolog of NCBI NO: 10834696 NR Description: PP4189 [Homo sapiens]
  misc_feature (26)..(277): Homolog of NCBI NO: 22985816 NR Description: hypothetical protein [Burkholderia fungorum]
  misc_feature (102)..(356): Homolog of NCBI NO: 16551861 NR Description: unnamed protein product [Homo sapiens]
  misc_feature (1)..(351): Homolog of NCBI NO: 26390123 NR Description: unnamed protein product [Mus musculus]
  misc_feature (1)..(351): Homolog of NCBI NO: 40254259 NR Description: hypothetical protein 3010020C06 [Mus musculus]
  misc_feature (15)..(356): Homolog of NCBI NO: 31377601 NR Description: PP4189 [Homo sapiens]
  misc_feature (300)..(581): Homolog of NCBI NO: 25402531 NR Description: hypothetical protein [imported] - Arabidopsis
  misc_feature (1)..(303): Homolog of NCBI NO: 25402531 NR Description: hypothetical protein [imported] - Arabidopsis
  misc_feature (1)..(581): Homolog of NCBI NO: 30681061 NR Description: expressed protein [Arabidopsis thaliana]
MGTSSCGDHEKQRIEDEEQYGVLLYYKYTSVPDLDELVSFYESSCNSLGLLGRVRLSPKGVNVTVGGKLTALEEHIAAAKSNCLFEGTDFKLASCHHPLNDKVAEECGFTSLSIRVVEELVTFSPCPPLKPPEISNAGKHLSAAEFHSVLQSANGKSENKELVLLDARNLYETRIGKFESENVETLDPEIRQYSDLPTWIDQNAEKMKGKNVLMYCTGGIRCEMASAYIRSKGAGFENTFQLYGGIQRYLEQFPSGGFFKGKNFVFDHRISVGSSKEDIIGSCLLCNNTFDDYSPRCRCRLCRMLVLVCNHCRVKGDIYICELCRKHGKGEVPLSLDPLNQPSESNGDNTRRKLRILCLHGFRQNASSFKGRTGSLAKKLKNIAELVFIDAPHELQFIYQTATPPSGVCNKKFAWLVSSDFDKPSETGWTVAQCQFDPLQYQTQTEGFDKSLTYLKTAFEEKGPFDGILGFSQGAAMAAAVCGKQEQLVGEIDFRFCVLCSGFTPWPLLEMKEKRSIKCPSLHIFGSQPGKDRQIVTQASSDLAGLFEDGCATIVEHDFGHIIPTKSPYIDEIKAFLYQFI

SEQ ID NO: 45398 - protein, 375 aa, Arabidopsis thaliana
  peptide (1)..(375): Ceres Seq. ID no. 12600382
  misc_feature (144)..(374): Pfam Name: Domain of unknown function (DUF341) Pfam Description: Domain of unknown function (DUF341)
  misc_feature (145)..(374): Homolog of NCBI NO: 18158418 NR Description: candidate tumor suppressor OVCA2 [Mus musculus]
  misc_feature (1)..(74): Homolog of NCBI NO: 10834696 NR Description: PP4189 [Homo sapiens]
  misc_feature (1)..(71): Homolog of NCBI NO: 22985816 NR Description: hypothetical protein [Burkholderia fungorum]
  misc_feature (1)..(150): Homolog of NCBI NO: 16551861 NR Description: unnamed protein product [Homo sapiens]
  misc_feature (1)..(145): Homolog of NCBI NO: 26390123 NR Description: unnamed protein product [Mus musculus]
  misc_feature (1)..(145): Homolog of NCBI NO: 40254259 NR Description: hypothetical protein 3010020C06 [Mus musculus]
  misc_feature (1)..(150): Homolog of NCBI NO: 31377601 NR Description: PP4189 [Homo sapiens]
  misc_feature (94)..(375): Homolog of NCBI NO: 25402531 NR Description: hypothetical protein [imported] - Arabidopsis
  misc_feature (1)..(97): Homolog of NCBI NO: 25402531 NR Description: hypothetical protein [imported] - Arabidopsis
  misc_feature (1)..(375): Homolog of NCBI NO: 30681061 NR Description: expressed protein [Arabidopsis thaliana]
MKGKNVLMYCTGGIRCEMASAYIRSKGAGFENTFQLYGGIQRYLEQFPSGGFFKGKNFVFDHRISVGSSKEDIIGSCLLCNNTFDDYSPRCRCRLCRMLVLVCNHCRVKGDIYICELCRKHGKGEVPLSLDPLNQPSESNGDNTRRKLRILCLHGFRQNASSFKGRTGSLAKKLKNIAELVFIDAPHELQFIYQTATPPSGVCNKKFAWLVSSDFDKPSETGWTVAQCQFDPLQYQTQTEGFDKSLTYLKTAFEEKGPFDGILGFSQGAAMAAAVCGKQEQLVGEIDFRFCVLCSGFTPWPLLEMKEKRSIKCPSLHIFGSQPGKDRQIVTQASSDLAGLFEDGCATIVEHDFGHIIPTKSPYIDEIKAFLYQFI

SEQ ID NO: 45399 - DNA, 1842 bp, Arabidopsis thaliana
  misc_feature (1)..(1842): Ceres Seq. ID no. 12600477
  misc_feature: MA Experiment ID: 20000184 Result: Down-regulated in Transcription
  misc_feature: MA Experiment 20000184 PARAMETER Experiment Name: At_Shoots__P Parameter: Age (day) Value: 7
  misc_feature: MA Experiment 20000184 PARAMETER Experiment Name: At_Shoots__P Parameter: Tissue Value: Shoots vs. Whole Plant
  misc_feature: MA Experiment ID: 20000234 Result: Down-regulated in Transcription
  misc_feature: MA Experiment 20000234 PARAMETER Experiment Name: At_Siliques_P Parameter: Age (day) Value: 21
  misc_feature: MA Experiment 20000234 PARAMETER Experiment Name: At_Siliques_P Parameter: Organism Value: A. thaliana
  misc_feature: MA Experiment 20000234 PARAMETER Experiment Name: At_Siliques_P Parameter: Plant Line Value: WS
  misc_feature: MA Experiment 20000234 PARAMETER Experiment Name: At_Siliques_P Parameter: Tissue Value: Less Than 5mm Siliques vs. Whole Plant
  misc_feature: MA Experiment ID: 20001451 Result: Down-regulated in Transcription
  misc_feature: MA Experiment 20001451 PARAMETER Experiment Name: At_Far-red-induction_P Parameter: Age (day) Value: 7
  misc_feature: MA Experiment 20001451 PARAMETER Experiment Name: At_Far-red-induction_P Parameter: Light Value: Far-red vs. White
  misc_feature: MA Experiment 20001451 PARAMETER Experiment Name: At_Far-red-induction_P Parameter: Organism Value: A. thaliana
  misc_feature: MA Experiment 20001451 PARAMETER Experiment Name: At_Far-red-induction_P Parameter: Plant Line Value: Columbia
  misc_feature: MA Experiment 20001451 PARAMETER Experiment Name: At_Far-red-induction_P Parameter: Timepoint (hr) Value: 24
  misc_feature: MA Experiment 20001451 PARAMETER Experiment Name: At_Far-red-induction_P Parameter: Tissue Value: Whole Plant
  misc_feature: MA Experiment ID: 20001557 Result: Down-regulated in Transcription
  misc_feature: MA Experiment 20001557 PARAMETER Experiment Name: At_Drought_Soil_Dry_P Parameter: Age (day) Value: 27
  misc_feature: MA Experiment 20001557 PARAMETER Experiment Name: At_Drought_Soil_Dry_P Parameter: Organism Value: A. thaliana
  misc_feature: MA Experiment 20001557 PARAMETER Experiment Name: At_Drought_Soil_Dry_P Parameter: Plant Line Value: WS
  misc_feature: MA Experiment 20001557 PARAMETER Experiment Name: At_Drought_Soil_Dry_P Parameter: Post Timepoint (hr) Value: 3
  misc_feature: MA Experiment 20001557 PARAMETER Experiment Name: At_Drought_Soil_Dry_P Parameter: Post-Treatment Value: Re-Water vs. No Drought
  misc_feature: MA Experiment 20001557 PARAMETER Experiment Name: At_Drought_Soil_Dry_P Parameter: Timepoint (day) Value: 13
  misc_feature: MA Experiment 20001557 PARAMETER Experiment Name: At_Drought_Soil_Dry_P Parameter: Treatment Value: Drought vs. No Drought
  misc_feature: MA Experiment ID: 20001558 Result: Down-regulated in Transcription
  misc_feature: MA Experiment 20001558 PARAMETER Experiment Name: At_Drought_Soil_Dry_P Parameter: Age (day) Value: 27
  misc_feature: MA Experiment 20001558 PARAMETER Experiment Name: At_Drought_Soil_Dry_P Parameter: Organism Value: A. thaliana
  misc_feature: MA Experiment 20001558 PARAMETER Experiment Name: At_Drought_Soil_Dry_P Parameter: Plant Line Value: WS
  misc_feature: MA Experiment 20001558 PARAMETER Experiment Name: At_Drought_Soil_Dry_P Parameter: Post Timepoint (hr) Value: 6
  misc_feature: MA Experiment 20001558 PARAMETER Experiment Name: At_Drought_Soil_Dry_P Parameter: Post-Treatment Value: Re-Water vs. No Drought
  misc_feature: MA Experiment 20001558 PARAMETER Experiment Name: At_Drought_Soil_Dry_P Parameter: Timepoint (day) Value: 13
  misc_feature: MA Experiment 20001558 PARAMETER Experiment Name: At_Drought_Soil_Dry_P Parameter: Treatment Value: Drought vs. No Drought
  misc_feature: MA Experiment ID: 20001560 Result: Down-regulated in Transcription
  misc_feature: MA Experiment 20001560 PARAMETER Experiment Name: At_Drought_Soil_Dry_P Parameter: Age (day) Value: 28
  misc_feature: MA Experiment 20001560 PARAMETER Experiment Name: At_Drought_Soil_Dry_P Parameter: Organism Value: A. thaliana
  misc_feature: MA Experiment 20001560 PARAMETER Experiment Name: At_Drought_Soil_Dry_P Parameter: Plant Line Value: WS
  misc_feature: MA Experiment 20001560 PARAMETER Experiment Name: At_Drought_Soil_Dry_P Parameter: Post Timepoint (hr) Value: None
  misc_feature: MA Experiment 20001560 PARAMETER Experiment Name: At_Drought_Soil_Dry_P Parameter: Post-Treatment Value: None
  misc_feature: MA Experiment 20001560 PARAMETER Experiment Name: At_Drought_Soil_Dry_P Parameter: Timepoint (day) Value: 14
  misc_feature: MA Experiment 20001560 PARAMETER Experiment Name: At_Drought_Soil_Dry_P Parameter: Treatment Value: Drought vs. No Drought
  misc_feature: MA Experiment ID: 20001905 Result: Down-regulated in Transcription
  misc_feature: MA Experiment 20001905 PARAMETER Experiment Name: At_Drought_Reproduction_P Parameter: Age (day) Value: 40
  misc_feature: MA Experiment 20001905 PARAMETER Experiment Name: At_Drought_Reproduction_P Parameter: Organism Value: A. thaliana
  misc_feature: MA Experiment 20001905 PARAMETER Experiment Name: At_Drought_Reproduction_P Parameter: Plant Line Value: WS
  misc_feature: MA Experiment 20001905 PARAMETER Experiment Name: At_Drought_Reproduction_P Parameter: Timepoint (day) Value: 10
  misc_feature: MA Experiment 20001905 PARAMETER Experiment Name: At_Drought_Reproduction_P Parameter: Tissue Value: Rosettes
  misc_feature: MA Experiment 20001905 PARAMETER Experiment Name: At_Drought_Reproduction_P Parameter: Treatment Value: Drought vs. No Drought
aataaagcttgaccggagtgtcttgtctctgctgcttcaatcgccggcgaacgatggcggtctcagctttccgtggcacgcggttaccgttatttcaccattctcagtttcccgtcgcgagaactgtgtcaggaacgtctaagaagatgatcggagccaggaatttcaagggttttgttcttacagcccagtattcgcaaactcaggaccttttcacttctcgtcttcaaagccagatagagaaattgcccaaattggttgaggatatagttcagacatcgataaacacaggtccacgaggtgtgacacgccttgtccaaggtgttcaagcctttgtaggggttggaggagagtggctaaatgatttatctaagtctacaagcgcgtctggtggattaccaagtgaattgcagcttggtctactgtctcctctatatttgaggaaactctttgaacgcatgggagctacttacattaagctgggccagtttatagcatctgcgccaactttgttcccaccagaatatgtcaaagaatttcagaactgctttgacaaagctcctcctgtgccatttgaagaaattcgtaaaatcttgcaagaggagcttgggagacccattgaaagtgtatacgaatatgttgaccctacgccaattgcatcagcctcaatagcacaagtccatggtgcaaggcttcgaggctcccaagaggatgttgtgattaaagtcttgaagcctgggatagaagatttcttagtggcagatttgaactttatctacgttgtttcccgtatatttgagttccttagtcctgagtttagccgtacttcactggttggaattgtcaaagatattcgtgagtcaatgcttgaagaagtagatttcaataaggaggctcaaaacattgagtcatttaagagatatcttgaaaccatggggttgacagggcaagctactgctccaagagtatataagtactgcagcagccggcgggtacttacaatggagaggctatatggagttcctctgactgatctggactctataagatcacttgtttccagtcccgaaaacagccttattaccgcgcttaatgtgtggtttggaagcttacttgcttgtgaaagcttccatgctgatgtacatgcaggaaacttatggctgttgcgtgatggccggattgggtttcttgattttggcattgttggtcggatatcccccaaaacatgggctgctatggaagtatttttagcgtctattgcaactgaagaatatgaatccatggcctcagctttgattcaaatgggcgccacaaacagagatgttgatggcaaagcttttgcaaaagacttggaaaagatgttctcatctatccaggaactagatacagagatagtagtggctacagctcgtggaacaaattcagacactactgctgttgctgctaacgtagttatggatgagagacagatgaatgctcttttcctcgacctggtgcgtgttagcgaatcatatggtcttaagttcccgagagagtttgcacttctgttgaagcaacttctgtacttcgatcgatacacaagactattagccccaaacctgaacatgctgcaggatcagcggatctctatcgcgtccaacaagaggacgaatggatacaaggacagcttcaactaagtttatgcaaatatacttcactaaacctattcaaactttttatttatttacaagtggtaatgttatagtagattatcaagccaagaacgatgatgaattcaatcttgttacaaacatatcatgactatatacaacagatgaactatatcttcttctatttttttgt

SEQ ID NO: 45400 - protein, 540 aa, Arabidopsis thaliana
  peptide (1)..(540): Ceres Seq. ID no. 12600478
  misc_feature (183)..(306): Pfam Name: ABC1 family Pfam Description: ABC1 family
  misc_feature (480)..(525): Homolog of NCBI NO: 31791831 NR Description: CONSERVED HYPOTHETICAL PROTEIN
  misc_feature (129)..(435): Homolog of NCBI NO: 31791831 NR Description: CONSERVED HYPOTHETICAL PROTEIN
  misc_feature (480)..(525): Homolog of NCBI NO: 15607787 NR Description: hypothetical protein Rv0647c [Mycobacterium
  misc_feature (480)..(525): Homolog of NCBI NO: 3024894 NR Description: Hypothetical protein Rv0647c
  misc_feature (129)..(435): Homolog of NCBI NO: 15607787 NR Description: hypothetical protein Rv0647c [Mycobacterium
  misc_feature (129)..(435): Homolog of NCBI NO: 3024894 NR Description: Hypothetical protein Rv0647c
  misc_feature (95)..(522): Homolog of NCBI NO: 24215277 NR Description: ABC1 family protein kinase
  misc_feature (21)..(531): Homolog of NCBI NO: 23617237 NR Description: hypothetical protein~similar to Arabidopsis
  misc_feature (32)..(540): Homolog of NCBI NO: 9759261 NR Description: contains similarity to unknown
  misc_feature (1)..(540): Homolog of NCBI NO: 18414821 NR Description: putative protein
MAVSAFRGTRLPLFHHSQFPVARTVSGTSKKMIGARNFKGFVLTAQYSQTQDLFTSRLQSQIEKLPKLVEDIVQTSINTGPRGVTRLVQGVQAFVGVGGEWLNDLSKSTSASGGLPSELQLGLLSPLYLRKLFERMGATYIKLGQFIASAPTLFPPEYVKEFQNCFDKAPPVPFEEIRKILQEELGRPIESVYEYVDPTPIASASIAQVHGARLRGSQEDVVIKVLKPGIEDFLVADLNFIYVVSRIFEFLSPEFSRTSLVGIVKDIRESMLEEVDFNKEAQNIESFKRYLETMGLTGQATAPRVYKYCSSRRVLTMERLYGVPLTDLDSIRSLVSSPENSLITALNVWFGSLLACESFHADVHAGNLWLLRDGRIGFLDFGIVGRISPKTWAAMEVFLASIATEEYESMASALIQMGATNRDVDGKAFAKDLEKMFSSIQELDTEIVVATARGTNSDTTAVAANVVMDERQMNALFLDLVRVSESYGLKFPREFALLLKQLLYFDRYTRLLAPNLNMLQDQRISIASNKRTNGYKDSFN

SEQ ID NO: 45401 - protein, 509 aa, Arabidopsis thaliana
  peptide (1)..(509): Ceres Seq. ID no. 12600479
  misc_feature (152)..(275): Pfam Name: ABC1 family Pfam Description: ABC1 family
  misc_feature (449)..(494): Homolog of NCBI NO: 31791831 NR Description: CONSERVED HYPOTHETICAL PROTEIN
  misc_feature (98)..(404): Homolog of NCBI NO: 31791831 NR Description: CONSERVED HYPOTHETICAL PROTEIN
  misc_feature (449)..(494): Homolog of NCBI NO: 15607787 NR Description: hypothetical protein Rv0647c [Mycobacterium
  misc_feature (449)..(494): Homolog of NCBI NO: 3024894 NR Description: Hypothetical protein Rv0647c
  misc_feature (98)..(404): Homolog of NCBI NO: 15607787 NR Description: hypothetical protein Rv0647c [Mycobacterium
  misc_feature (98)..(404): Homolog of NCBI NO: 3024894 NR Description: Hypothetical protein Rv0647c
  misc_feature (64)..(491): Homolog of NCBI NO: 24215277 NR Description: ABC1 family protein kinase
  misc_feature (1)..(500): Homolog of NCBI NO: 23617237 NR Description: hypothetical protein~similar to Arabidopsis
  misc_feature (1)..(509): Homolog of NCBI NO: 9759261 NR Description: contains similarity to unknown
  misc_feature (1)..(509): Homolog of NCBI NO: 18414821 NR Description: putative protein
MIGARNFKGFVLTAQYSQTQDLFTSRLQSQIEKLPKLVEDIVQTSINTGPRGVTRLVQGVQAFVGVGGEWLNDLSKSTSASGGLPSELQLGLLSPLYLRKLFERMGATYIKLGQFIASAPTLFPPEYVKEFQNCFDKAPPVPFEEIRKILQEELGRPIESVYEYVDPTPIASASIAQVHGARLRGSQEDVVIKVLKPGIEDFLVADLNFIYVVSRIFEFLSPEFSRTSLVGIVKDIRESMLEEVDFNKEAQNIESFKRYLETMGLTGQATAPRVYKYCSSRRVLTMERLYGVPLTDLDSIRSLVSSPENSLITALNVWFGSLLACESFHADVHAGNLWLLRDGRIGFLDFGIVGRISPKTWAAMEVFLASIATEEYESMASALIQMGATNRDVDGKAFAKDLEKMFSSIQELDTEIVVATARGTNSDTTAVAANVVMDERQMNALFLDLVRVSESYGLKFPREFALLLKQLLYFDRYTRLLAPNLNMLQDQRISIASNKRTNGYKDSFN

SEQ ID NO: 45402 - protein, 405 aa, Arabidopsis thaliana
  peptide (1)..(405): Ceres Seq. ID no. 12600480
  misc_feature (48)..(171): Pfam Name: ABC1 family Pfam Description: ABC1 family
  misc_feature (345)..(390): Homolog of NCBI NO: 31791831 NR Description: CONSERVED HYPOTHETICAL PROTEIN
  misc_feature (1)..(300): Homolog of NCBI NO: 31791831 NR Description: CONSERVED HYPOTHETICAL PROTEIN
  misc_feature (345)..(390): Homolog of NCBI NO: 15607787 NR Description: hypothetical protein Rv0647c [Mycobacterium
  misc_feature (345)..(390): Homolog of NCBI NO: 3024894 NR Description: Hypothetical protein Rv0647c
  misc_feature (1)..(300): Homolog of NCBI NO: 15607787 NR Description: hypothetical protein Rv0647c [Mycobacterium
  misc_feature (1)..(300): Homolog of NCBI NO: 3024894 NR Description: Hypothetical protein Rv0647c
  misc_feature (1)..(387): Homolog of NCBI NO: 24215277 NR Description: ABC1 family protein kinase
  misc_feature (1)..(396): Homolog of NCBI NO: 23617237 NR Description: hypothetical protein~similar to Arabidopsis
  misc_feature (1)..(405): Homolog of NCBI NO: 9759261 NR Description: contains similarity to unknown
  misc_feature (1)..(405): Homolog of NCBI NO: 18414821 NR Description: putative protein
MGATYIKLGQFIASAPTLFPPEYVKEFQNCFDKAPPVPFEEIRKILQEELGRPIESVYEYVDPTPIASASIAQVHGARLRGSQEDVVIKVLKPGIEDFLVADLNFIYVVSRIFEFLSPEFSRTSLVGIVKDIRESMLEEVDFNKEAQNIESFKRYLETMGLTGQATAPRVYKYCSSRRVLTMERLYGVPLTDLDSIRSLVSSPENSLITALNVWFGSLLACESFHADVHAGNLWLLRDGRIGFLDFGIVGRISPKTWAAMEVFLASIATEEYESMASALIQMGATNRDVDGKAFAKDLEKMFSSIQELDTEIVVATARGTNSDTTAVAANVVMDERQMNALFLDLVRVSESYGLKFPREFALLLKQLLYFDRYTRLLAPNLNMLQDQRISIASNKRTNGYKDSFN

SEQ ID NO: 45403 - DNA, 1768 bp, Arabidopsis thaliana
  misc_feature (1)..(1768): Ceres Seq. ID no. 12639286
  misc_feature: MA Experiment ID: 20000169 Result: Down-regulated in Transcription
  misc_feature: MA Experiment 20000169 PARAMETER Experiment Name: At_100uM_ABA_P Parameter: Age (day) Value: 14
  misc_feature: MA Experiment 20000169 PARAMETER Experiment Name: At_100uM_ABA_P Parameter: Organism Value: A. thaliana
  misc_feature: MA Experiment 20000169 PARAMETER Experiment Name: At_100uM_ABA_P Parameter: Plant Line Value: WS
  misc_feature: MA Experiment 20000169 PARAMETER Experiment Name: At_100uM_ABA_P Parameter: Timepoint (hr) Value: 6
  misc_feature: MA Experiment 20000169 PARAMETER Experiment Name: At_100uM_ABA_P Parameter: Tissue Value: Aerial
  misc_feature: MA Experiment 20000169 PARAMETER Experiment Name: At_100uM_ABA_P Parameter: Treatment Value: 100uM ABA vs. No Treatment
  misc_feature: MA Experiment ID: 20000173 Result: Down-regulated in Transcription
  misc_feature: MA Experiment 20000173 PARAMETER Experiment Name: At_42deg_Heat_P Parameter: Age (day) Value: 14
  misc_feature: MA Experiment 20000173 PARAMETER Experiment Name: At_42deg_Heat_P Parameter: Organism Value: A. thaliana
  misc_feature: MA Experiment 20000173 PARAMETER Experiment Name: At_42deg_Heat_P Parameter: Plant Line Value: WS
  misc_feature: MA Experiment 20000173 PARAMETER Experiment Name: At_42deg_Heat_P Parameter: Temperature (deg C) Value: 42 vs. 22
  misc_feature: MA Experiment 20000173 PARAMETER Experiment Name: At_42deg_Heat_P Parameter: Timepoint (hr) Value: 6
  misc_feature: MA Experiment 20000173 PARAMETER Experiment Name: At_42deg_Heat_P Parameter: Tissue Value: Aerial
  misc_feature: MA Experiment ID: 20000227 Result: Up-regulated in Transcription
  misc_feature: MA Experiment 20000227 PARAMETER Experiment Name: At_Root-Tips-vs-Tops_P Parameter: Tissue Value: Root Tips vs. Root Tops
  misc_feature: MA Experiment ID: 20000234 Result: Up-regulated in Transcription
  misc_feature: MA Experiment 20000234 PARAMETER Experiment Name: At_Siliques_P Parameter: Age (day) Value: 21
  misc_feature: MA Experiment 20000234 PARAMETER Experiment Name: At_Siliques_P Parameter: Organism Value: A. thaliana
  misc_feature: MA Experiment 20000234 PARAMETER Experiment Name: At_Siliques_P Parameter: Plant Line Value: WS
  misc_feature: MA Experiment 20000234 PARAMETER Experiment Name: At_Siliques_P Parameter: Tissue Value: Less Than 5mm Siliques vs. Whole Plant
  misc_feature: MA Experiment ID: 20000264 Result: Up-regulated in Transcription
  misc_feature: MA Experiment 20000264 PARAMETER Experiment Name: At_Open_Flower_P Parameter: Age (day) Value: 21
  misc_feature: MA Experiment 20000264 PARAMETER Experiment Name: At_Open_Flower_P Parameter: Plant Line Value: WS
  misc_feature: MA Experiment 20000264 PARAMETER Experiment Name: At_Open_Flower_P Parameter: Tissue Value: Open Flower vs. Whole Plant
  misc_feature: MA Experiment ID: 20000265 Result: Up-regulated in Transcription
  misc_feature: MA Experiment 20000265 PARAMETER Experiment Name: At_Open_Flower_P Parameter: Age (day) Value: 21
  misc_feature: MA Experiment 20000265 PARAMETER Experiment Name: At_Open_Flower_P Parameter: Plant Line Value: WS
  misc_feature: MA Experiment 20000265 PARAMETER Experiment Name: At_Open_Flower_P Parameter: Tissue Value: Closed Flower vs. Whole Plant
  misc_feature: MA Experiment ID: 20000286 Result: Up-regulated in Transcription
  misc_feature: MA Experiment 20000286 PARAMETER Experiment Name: At_Open_Flower_P Parameter: Age (day) Value: 21
  misc_feature: MA Experiment 20000286 PARAMETER Experiment Name: At_Open_Flower_P Parameter: Plant Line Value: WS
  misc_feature: MA Experiment 20000286 PARAMETER Experiment Name: At_Open_Flower_P Parameter: Tissue Value: Half Open vs. Whole Plant
  misc_feature: MA Experiment ID: 20000437 Result: Down-regulated in Transcription
  misc_feature: MA Experiment 20000437 PARAMETER Experiment Name: At_Drought_P Parameter: Age (day) Value: 8
  misc_feature: MA Experiment 20000437 PARAMETER Experiment Name: At_Drought_P Parameter: Organism Value: A. thaliana
  misc_feature: MA Experiment 20000437 PARAMETER Experiment Name: At_Drought_P Parameter: Plant Line Value: WS
  misc_feature: MA Experiment 20000437 PARAMETER Experiment Name: At_Drought_P Parameter: Timepoint (hr) Value: 24
  misc_feature: MA Experiment 20000437 PARAMETER Experiment Name: At_Drought_P Parameter: Tissue Value: Whole Plant
  misc_feature: MA Experiment 20000437 PARAMETER Experiment Name: At_Drought_P Parameter: Treatment Value: Drought vs. No Drought
  misc_feature: MA Experiment ID: 20000455 Result: Down-regulated in Transcription
  misc_feature: MA Experiment 20000455 PARAMETER Experiment Name: At_100uM_ABA_P Parameter: Age (day) Value: 16
  misc_feature: MA Experiment 20000455 PARAMETER Experiment Name: At_100uM_ABA_P Parameter: Organism Value: A. thaliana
  misc_feature: MA Experiment 20000455 PARAMETER Experiment Name: At_100uM_ABA_P Parameter: Plant Line Value: WS
  misc_feature: MA Experiment 20000455 PARAMETER Experiment Name: At_100uM_ABA_P Parameter: Timepoint (hr) Value: 48
  misc_feature: MA Experiment 20000455 PARAMETER Experiment Name: At_100uM_ABA_P Parameter: Tissue Value: Aerial
  misc_feature: MA Experiment 20000455 PARAMETER Experiment Name: At_100uM_ABA_P Parameter: Treatment Value: 100uM ABA vs. No Treatment
  misc_feature: MA Experiment ID: 20001450 Result: Down-regulated in Transcription
  misc_feature: MA Experiment 20001450 PARAMETER Experiment Name: At_Far-red-induction_P Parameter: Age (day) Value: 7
  misc_feature: MA Experiment 20001450 PARAMETER Experiment Name: At_Far-red-induction_P Parameter: Light Value: Far-red vs. White
  misc_feature: MA Experiment 20001450 PARAMETER Experiment Name: At_Far-red-induction_P Parameter: Organism Value: A. thaliana
  misc_feature: MA Experiment 20001450 PARAMETER Experiment Name: At_Far-red-induction_P Parameter: Plant Line Value: Columbia
  misc_feature: MA Experiment 20001450 PARAMETER Experiment Name: At_Far-red-induction_P Parameter: Timepoint (hr) Value: 8
  misc_feature: MA Experiment 20001450 PARAMETER Experiment Name: At_Far-red-induction_P Parameter: Tissue Value: Whole Plant
  misc_feature: MA Experiment ID: 20001904 Result: Down-regulated in Transcription
  misc_feature: MA Experiment 20001904 PARAMETER Experiment Name: At_Drought_Reproduction_P Parameter: Age (day) Value: 37
  misc_feature: MA Experiment 20001904 PARAMETER Experiment Name: At_Drought_Reproduction_P Parameter: Organism Value: A. thaliana
  misc_feature: MA Experiment 20001904 PARAMETER Experiment Name: At_Drought_Reproduction_P Parameter: Plant Line Value: WS
  misc_feature: MA Experiment 20001904 PARAMETER Experiment Name: At_Drought_Reproduction_P Parameter: Timepoint (day) Value: 7
  misc_feature: MA Experiment 20001904 PARAMETER Experiment Name: At_Drought_Reproduction_P Parameter: Tissue Value: Rosettes
  misc_feature: MA Experiment 20001904 PARAMETER Experiment Name: At_Drought_Reproduction_P Parameter: Treatment Value: Drought vs. No Drought
atgcagactccaaaacctaggccgggatcgttggaggtgcctcagaagaaatctcctgcatcaactcctaaaactgctcggaagctcaagacttcagaatccgaccctgtctcgtctcctaacacgaaaatcaggacaccgaaaactcaaagcccaaaagtagttgctgatcgccgttctccaagaacccctgtaaatgagattcagaagaaacggacaggaaaaacacccgaattggcatctcagatatctcagcttcaagaggagctaaagaaggcaaaggaacagctaagtgcttcagaagctctgaagaaggaagctcaagatcaagcagaggaaacaaagcagcagttaatggagattaacgcctctgaggattccaggatcgatgagcttcgcaagctctctcaagaacgagacaaagcgtggcagtctgaactcgaagcaatgcagagacagcatgccatggattccgctgctctatcatctaccatgaacgaggtccagaaactgaaagcacagctgtctgaatctgaaaatgttgagaacttaaggatggaacttaacgagacgttgtcacttgtcgagaagctcagaggtgagctgtttgatgcaaaggaaggggaagctcaggcgcatgaaattgtgtcgggaactgaaaagcaattagagatagccaacttgacgcttgagatgttacgttcagatggtatgaagatgtctgaagcttgtaattcactaacaactgagctagagcagtctaaatctgaggtaaggtcactagagcaacttgtgagacagcttgaggaagaagatgaagcccgaggaaatgctaacggggactcatcatcagtggaagagctcaaggaagagataaatgttgcaaggcaagagattagccagttgaaatctgcagtggaagtaacagagagaaggtaccatgaagagtatatccagagcacgttgcagatcagaactgcttatgaacaagtcgatgaagtaaaatccggatatgcacagagagaggctgagttgggggaagaactgaagaaaaccaaagctgaaagagattctttgcatgaacggttgatggataaggaagctaagctcaggatactcgtcgatgaaaacgagatactgaactcgaaaatcaaagaaaaagaagaagtatacttaaacttggagaacagcttgaaccagaacgagcctgaggataccggtgaactcaagaagctagaatccgatgtgatggagttgagagcaaatctaatggacaaggagatggagctacagagcgtaatgtcgcaatacgagagtctcaggagcgaaatggagacaatgcagagtgagaagaacaaggctatcgacgaggccttagcaaagctcgggagtctgacagaggaagcagataagagcgggaagagagccgaaaatgcgacagaacagctaggggcggcacaagtcaccaacaccgaactagaagctgagctgaggagactcaaggttcagtgtgatcaatggaggaaagcagctgaagccgcagctactatgctctctggtggtaacaacaacaataacagtaacgggaagtacgtggagagaacaggatcgttagagagtccgttgaggaggagaaacgtcaacatgtcgccttatatgggtgaaactgatgatgaattgtcatcaccaaagaagaagaatggaagtatgctgaagaaaattggtgtgttactgaagaaaagtcagaaatgatccattgaagttcagg

SEQ ID NO: 45404 - protein, 583 aa, Arabidopsis thaliana
  peptide (1)..(583): Ceres Seq. ID no. 12639287
  misc_feature (28)..(496): Pfam Name: Myosin tail Pfam Description: Myosin tail
  misc_feature (28)..(496): Pfam Name: Myosin tail Pfam Description: Myosin tail
  misc_feature (89)..(471): Homolog of NCBI NO: 22331765 NR Description: putative protein
  misc_feature (89)..(471): Homolog of NCBI NO: 17978993 NR Description: AT3g53350/F4P12_50 [Arabidopsis thaliana]
  misc_feature (68)..(446): Homolog of NCBI NO: 34908020 NR Description: P0460C04.20 [Oryza sativa (japonica
  misc_feature (1)..(316): Homolog of NCBI NO: 11357801 NR Description: hypothetical protein F4P12.50 - Arabidopsis
  misc_feature (1)..(316): Homolog of NCBI NO: 17978993 NR Description: AT3g53350/F4P12_50 [Arabidopsis thaliana]
  misc_feature (89)..(471): Homolog of NCBI NO: 22331765 NR Description: putative protein
  misc_feature (68)..(446): Homolog of NCBI NO: 34908020 NR Description: P0460C04.20 [Oryza sativa (japonica
  misc_feature (1)..(316): Homolog of NCBI NO: 17978993 NR Description: AT3g53350/F4P12_50 [Arabidopsis thaliana]
  misc_feature (1)..(583): Homolog of NCBI NO: 15228082 NR Description: putative myosin heavy chain; protein id:
  misc_feature (3)..(583): Homolog of NCBI NO: 18076679 NR Description: P70 protein [Nicotiana tabacum]
  misc_feature (1)..(567): Homolog of NCBI NO: 8885572 NR Description: myosin heavy chain-like [Arabidopsis thaliana]
  misc_feature (7)..(567): Homolog of NCBI NO: 30697347 NR Description: expressed protein [Arabidopsis thaliana]
  misc_feature (1)..(316): Homolog of NCBI NO: 22331765 NR Description: putative protein
  misc_feature (1)..(316): Homolog of NCBI NO: 11357801 NR Description: hypothetical protein F4P12.50 - Arabidopsis
  misc_feature (89)..(471): Homolog of NCBI NO: 17978993 NR Description: AT3g53350/F4P12_50 [Arabidopsis thaliana]
  misc_feature (1)..(316): Homolog of NCBI NO: 22331765 NR Description: putative protein
  misc_feature (7)..(567): Homolog of NCBI NO: 30697347 NR Description: expressed protein [Arabidopsis thaliana]
  misc_feature (1)..(567): Homolog of NCBI NO: 8885572 NR Description: myosin heavy chain-like [Arabidopsis thaliana]
  misc_feature (3)..(583): Homolog of NCBI NO: 18076679 NR Description: P70 protein [Nicotiana tabacum]
  misc_feature (1)..(583): Homolog of NCBI NO: 15228082 NR Description: putative myosin heavy chain; protein id:
MQTPKPRPGSLEVPQKKSPASTPKTARKLKTSESDPVSSPNTKIRTPKTQSPKVVADRRSPRTPVNEIQKKRTGKTPELASQISQLQEELKKAKEQLSASEALKKEAQDQAEETKQQLMEINASEDSRIDELRKLSQERDKAWQSELEAMQRQHAMDSAALSSTMNEVQKLKAQLSESENVENLRMELNETLSLVEKLRGELFDAKEGEAQAHEIVSGTEKQLEIANLTLEMLRSDGMKMSEACNSLTTELEQSKSEVRSLEQLVRQLEEEDEARGNANGDSSSVEELKEEINVARQEISQLKSAVEVTERRYHEEYIQSTLQIRTAYEQVDEVKSGYAQREAELGEELKKTKAERDSLHERLMDKEAKLRILVDENEILNSKIKEKEEVYLNLENSLNQNEPEDTGELKKLESDVMELRANLMDKEMELQSVMSQYESLRSEMETMQSEKNKAIDEALAKLGSLTEEADKSGKRAENATEQLGAAQVTNTELEAELRRLKVQCDQWRKAAEAAATMLSGGNNNNNSNGKYVERTGSLESPLRRRNVNMSPYMGETDDELSSPKKKNGSMLKKIGVLLKKSQK

SEQ ID NO: 45405 - protein, 465 aa, Arabidopsis thaliana
  peptide (1)..(465): Ceres Seq. ID no. 12639288
  misc_feature (1)..(378): Pfam Name: Myosin tail Pfam Description: Myosin tail
  misc_feature (1)..(378): Pfam Name: Myosin tail Pfam Description: Myosin tail
  misc_feature (1)..(353): Homolog of NCBI NO: 22331765 NR Description: putative protein
  misc_feature (1)..(353): Homolog of NCBI NO: 17978993 NR Description: AT3g53350/F4P12_50 [Arabidopsis thaliana]
  misc_feature (1)..(328): Homolog of NCBI NO: 34908020 NR Description: P0460C04.20 [Oryza sativa (japonica
  misc_feature (1)..(198): Homolog of NCBI NO: 11357801 NR Description: hypothetical protein F4P12.50 - Arabidopsis
  misc_feature (1)..(198): Homolog of NCBI NO: 17978993 NR Description: AT3g53350/F4P12_50 [Arabidopsis thaliana]
  misc_feature (1)..(353): Homolog of NCBI NO: 22331765 NR Description: putative protein
  misc_feature (1)..(328): Homolog of NCBI NO: 34908020 NR Description: P0460C04.20 [Oryza sativa (japonica
  misc_feature (1)..(198): Homolog of NCBI NO: 17978993 NR Description: AT3g53350/F4P12_50 [Arabidopsis thaliana]
  misc_feature (1)..(465): Homolog of NCBI NO: 15228082 NR Description: putative myosin heavy chain; protein id:
  misc_feature (1)..(465): Homolog of NCBI NO: 18076679 NR Description: P70 protein [Nicotiana tabacum]
  misc_feature (1)..(449): Homolog of NCBI NO: 8885572 NR Description: myosin heavy chain-like [Arabidopsis thaliana]
  misc_feature (1)..(449): Homolog of NCBI NO: 30697347 NR Description: expressed protein [Arabidopsis thaliana]
  misc_feature (1)..(198): Homolog of NCBI NO: 22331765 NR Description: putative protein
  misc_feature (1)..(198): Homolog of NCBI NO: 11357801 NR Description: hypothetical protein F4P12.50 - Arabidopsis
  misc_feature (1)..(353): Homolog of NCBI NO: 17978993 NR Description: AT3g53350/F4P12_50 [Arabidopsis thaliana]
  misc_feature (1)..(198): Homolog of NCBI NO: 22331765 NR Description: putative protein
  misc_feature (1)..(449): Homolog of NCBI NO: 30697347 NR Description: expressed protein [Arabidopsis thaliana]
  misc_feature (1)..(449): Homolog of NCBI NO: 8885572 NR Description: myosin heavy chain-like [Arabidopsis thaliana]
  misc_feature (1)..(465): Homolog of NCBI NO: 18076679 NR Description: P70 protein [Nicotiana tabacum]
  misc_feature (1)..(465): Homolog of NCBI NO: 15228082 NR Description: putative myosin heavy chain; protein id:
MEINASEDSRIDELRKLSQERDKAWQSELEAMQRQHAMDSAALSSTMNEVQKLKAQLSESENVENLRMELNETLSLVEKLRGELFDAKEGEAQAHEIVSGTEKQLEIANLTLEMLRSDGMKMSEACNSLTTELEQSKSEVRSLEQLVRQLEEEDEARGNANGDSSSVEELKEEINVARQEISQLKSAVEVTERRYHEEYIQSTLQIRTAYEQVDEVKSGYAQREAELGEELKKTKAERDSLHERLMDKEAKLRILVDENEILNSKIKEKEEVYLNLENSLNQNEPEDTGELKKLESDVMELRANLMDKEMELQSVMSQYESLRSEMETMQSEKNKAIDEALAKLGSLTEEADKSGKRAENATEQLGAAQVTNTELEAELRRLKVQCDQWRKAAEAAATMLSGGNNNNNSNGKYVERTGSLESPLRRRNVNMSPYMGETDDELSSPKKKNGSMLKKIGVLLKKSQK

SEQ ID NO: 45406 - protein, 434 aa, Arabidopsis thaliana
  peptide (1)..(434): Ceres Seq. ID no. 12639289
  misc_feature (1)..(347): Pfam Name: Myosin tail Pfam Description: Myosin tail
  misc_feature (1)..(347): Pfam Name: Myosin tail Pfam Description: Myosin tail
  misc_feature (1)..(322): Homolog of NCBI NO: 22331765 NR Description: putative protein
  misc_feature (1)..(322): Homolog of NCBI NO: 17978993 NR Description: AT3g53350/F4P12_50 [Arabidopsis thaliana]
  misc_feature (1)..(297): Homolog of NCBI NO: 34908020 NR Description: P0460C04.20 [Oryza sativa (japonica
  misc_feature (1)..(167): Homolog of NCBI NO: 11357801 NR Description: hypothetical protein F4P12.50 - Arabidopsis
  misc_feature (1)..(167): Homolog of NCBI NO: 17978993 NR Description: AT3g53350/F4P12_50 [Arabidopsis thaliana]
  misc_feature (1)..(322): Homolog of NCBI NO: 22331765 NR Description: putative protein
  misc_feature (1)..(297): Homolog of NCBI NO: 34908020 NR Description: P0460C04.20 [Oryza sativa (japonica
  misc_feature (1)..(167): Homolog of NCBI NO: 17978993 NR Description: AT3g53350/F4P12_50 [Arabidopsis thaliana]
  misc_feature (1)..(434): Homolog of NCBI NO: 15228082 NR Description: putative myosin heavy chain; protein id:
  misc_feature (1)..(434): Homolog of NCBI NO: 18076679 NR Description: P70 protein [Nicotiana tabacum]
  misc_feature (1)..(418): Homolog of NCBI NO: 8885572 NR Description: myosin heavy chain-like [Arabidopsis thaliana]
  misc_feature (1)..(418): Homolog of NCBI NO: 30697347 NR Description: expressed protein [Arabidopsis thaliana]
  misc_feature (1)..(167): Homolog of NCBI NO: 22331765 NR Description: putative protein
  misc_feature (1)..(167): Homolog of NCBI NO: 11357801 NR Description: hypothetical protein F4P12.50 - Arabidopsis
  misc_feature (1)..(322): Homolog of NCBI NO: 17978993 NR Description: AT3g53350/F4P12_50 [Arabidopsis thaliana]
  misc_feature (1)..(167): Homolog of NCBI NO: 22331765 NR Description: putative protein
  misc_feature (1)..(418): Homolog of NCBI NO: 30697347 NR Description: expressed protein [Arabidopsis thaliana]
  misc_feature (1)..(418): Homolog of NCBI NO: 8885572 NR Description: myosin heavy chain-like [Arabidopsis thaliana]
  misc_feature (1)..(434): Homolog of NCBI NO: 18076679 NR Description: P70 protein [Nicotiana tabacum]
  misc_feature (1)..(434): Homolog of NCBI NO: 15228082 NR Description: putative myosin heavy chain; protein id:
MQRQHAMDSAALSSTMNEVQKLKAQLSESENVENLRMELNETLSLVEKLRGELFDAKEGEAQAHEIVSGTEKQLEIANLTLEMLRSDGMKMSEACNSLTTELEQSKSEVRSLEQLVRQLEEEDEARGNANGDSSSVEELKEEINVARQEISQLKSAVEVTERRYHEEYIQSTLQIRTAYEQVDEVKSGYAQREAELGEELKKTKAERDSLHERLMDKEAKLRILVDENEILNSKIKEKEEVYLNLENSLNQNEPEDTGELKKLESDVMELRANLMDKEMELQSVMSQYESLRSEMETMQSEKNKAIDEALAKLGSLTEEADKSGKRAENATEQLGAAQVTNTELEAELRRLKVQCDQWRKAAEAAATMLSGGNNNNNSNGKYVERTGSLESPLRRRNVNMSPYMGETDDELSSPKKKNGSMLKKIGVLLKKSQK

SEQ ID NO: 45407 - DNA, 1375 bp, Arabidopsis thaliana
  misc_feature (1)..(1375): Ceres Seq. ID no. 12561316
  misc_feature: MA Experiment ID: 20000169 Result: Up-regulated in Transcription
  misc_feature: MA Experiment 20000169 PARAMETER Experiment Name: At_100uM_ABA_P Parameter: Age (day) Value: 14
  misc_feature: MA Experiment 20000169 PARAMETER Experiment Name: At_100uM_ABA_P Parameter: Organism Value: A. thaliana
  misc_feature: MA Experiment 20000169 PARAMETER Experiment Name: At_100uM_ABA_P Parameter: Plant Line Value: WS
  misc_feature: MA Experiment 20000169 PARAMETER Experiment Name: At_100uM_ABA_P Parameter: Timepoint (hr) Value: 6
  misc_feature: MA Experiment 20000169 PARAMETER Experiment Name: At_100uM_ABA_P Parameter: Tissue Value: Aerial
  misc_feature: MA Experiment 20000169 PARAMETER Experiment Name: At_100uM_ABA_P Parameter: Treatment Value: 100uM ABA vs. No Treatment
  misc_feature: MA Experiment ID: 20000184 Result: Down-regulated in Transcription
  misc_feature: MA Experiment 20000184 PARAMETER Experiment Name: At_Shoots__P Parameter: Age (day) Value: 7
  misc_feature: MA Experiment 20000184 PARAMETER Experiment Name: At_Shoots__P Parameter: Tissue Value: Shoots vs. Whole Plant
  misc_feature: MA Experiment ID: 20000185 Result: Up-regulated in Transcription
  misc_feature: MA Experiment 20000185 PARAMETER Experiment Name: At_Roots__P Parameter: Age (day) Value: 7 vs. 21
  misc_feature: MA Experiment 20000185 PARAMETER Experiment Name: At_Roots__P Parameter: Organism Value: A. thaliana
  misc_feature: MA Experiment 20000185 PARAMETER Experiment Name: At_Roots__P Parameter: Tissue Value: Roots vs. Whole Plant
  misc_feature: MA Experiment ID: 20000227 Result: Down-regulated in Transcription
  misc_feature: MA Experiment 20000227 PARAMETER Experiment Name: At_Root-Tips-vs-Tops_P Parameter: Tissue Value: Root Tips vs. Root Tops
  misc_feature: MA Experiment ID: 20000234 Result: Down-regulated in Transcription
  misc_feature: MA Experiment 20000234 PARAMETER Experiment Name: At_Siliques_P Parameter: Age (day) Value: 21
  misc_feature: MA Experiment 20000234 PARAMETER Experiment Name: At_Siliques_P Parameter: Organism Value: A. thaliana
  misc_feature: MA Experiment 20000234 PARAMETER Experiment Name: At_Siliques_P Parameter: Plant Line Value: WS
  misc_feature: MA Experiment 20000234 PARAMETER Experiment Name: At_Siliques_P Parameter: Tissue Value: Less Than 5mm Siliques vs. Whole Plant
  misc_feature: MA Experiment ID: 20000265 Result: Up-regulated in Transcription
  misc_feature: MA Experiment 20000265 PARAMETER Experiment Name: At_Open_Flower_P Parameter: Age (day) Value: 21
  misc_feature: MA Experiment 20000265 PARAMETER Experiment Name: At_Open_Flower_P Parameter: Plant Line Value: WS
  misc_feature: MA Experiment 20000265 PARAMETER Experiment Name: At_Open_Flower_P Parameter: Tissue Value: Closed Flower vs. Whole Plant
  misc_feature: MA Experiment ID: 20000269 Result: Down-regulated in Transcription
  misc_feature: MA Experiment 20000269 PARAMETER Experiment Name: At_1mM_KNO3_L-vs-H_Roots_P Parameter: Age (day) Value: 7,10,12
  misc_feature: MA Experiment 20000269 PARAMETER Experiment Name: At_1mM_KNO3_L-vs-H_Roots_P Parameter: Organism Value: A. thaliana
  misc_feature: MA Experiment 20000269 PARAMETER Experiment Name: At_1mM_KNO3_L-vs-H_Roots_P Parameter: Plant Line Value: WS
  misc_feature: MA Experiment 20000269 PARAMETER Experiment Name: At_1mM_KNO3_L-vs-H_Roots_P Parameter: Timepoint (day) Value: 7,10,12
  misc_feature: MA Experiment 20000269 PARAMETER Experiment Name: At_1mM_KNO3_L-vs-H_Roots_P Parameter: Tissue Value: Roots
  misc_feature: MA Experiment 20000269 PARAMETER Experiment Name: At_1mM_KNO3_L-vs-H_Roots_P Parameter: Treatment Value: 1mM KNO3 vs. 50mM KNO3
  misc_feature: MA Experiment ID: 20000286 Result: Up-regulated in Transcription
  misc_feature: MA Experiment 20000286 PARAMETER Experiment Name: At_Open_Flower_P Parameter: Age (day) Value: 21
  misc_feature: MA Experiment 20000286 PARAMETER Experiment Name: At_Open_Flower_P Parameter: Plant Line Value: WS
  misc_feature: MA Experiment 20000286 PARAMETER Experiment Name: At_Open_Flower_P Parameter: Tissue Value: Half Open vs. Whole Plant
  misc_feature: MA Experiment ID: 20000438 Result: Down-regulated in Transcription
  misc_feature: MA Experiment 20000438 PARAMETER Experiment Name: At_Shoots__P Parameter: Age (day) Value: 14
  misc_feature: MA Experiment 20000438 PARAMETER Experiment Name: At_Shoots__P Parameter: Tissue Value: Shoots vs. Whole Plant
  misc_feature: MA Experiment ID: 20000439 Result: Up-regulated in Transcription
  misc_feature: MA Experiment 20000439 PARAMETER Experiment Name: At_Roots__P Parameter: Age (day) Value: 14 vs. 21
  misc_feature: MA Experiment 20000439 PARAMETER Experiment Name: At_Roots__P Parameter: Organism Value: A. thaliana
  misc_feature: MA Experiment 20000439 PARAMETER Experiment Name: At_Roots__P Parameter: Tissue Value: Roots vs. Whole Plant
  misc_feature: MA Experiment ID: 20000451 Result: Down-regulated in Transcription
  misc_feature: MA Experiment 20000451 PARAMETER Experiment Name: At_CS6879_Shoots-Roots_P Parameter: Age (day) Value: 14
  misc_feature: MA Experiment 20000451 PARAMETER Experiment Name: At_CS6879_Shoots-Roots_P Parameter: Organism Value: A. thaliana
  misc_feature: MA Experiment 20000451 PARAMETER Experiment Name: At_CS6879_Shoots-Roots_P Parameter: Plant Line Value: CS6879 vs. WS
  misc_feature: MA Experiment 20000451 PARAMETER Experiment Name: At_CS6879_Shoots-Roots_P Parameter: Tissue Value: Roots
  misc_feature: MA Experiment ID: 20000453 Result: Up-regulated in Transcription
  misc_feature: MA Experiment 20000453 PARAMETER Experiment Name: At_100uM_ABA_P Parameter: Age (day) Value: 15
  misc_feature: MA Experiment 20000453 PARAMETER Experiment Name: At_100uM_ABA_P Parameter: Organism Value: A. thaliana
  misc_feature: MA Experiment 20000453 PARAMETER Experiment Name: At_100uM_ABA_P Parameter: Plant Line Value: WS
  misc_feature: MA Experiment 20000453 PARAMETER Experiment Name: At_100uM_ABA_P Parameter: Timepoint (hr) Value: 24
  misc_feature: MA Experiment 20000453 PARAMETER Experiment Name: At_100uM_ABA_P Parameter: Tissue Value: Aerial
  misc_feature: MA Experiment 20000453 PARAMETER Experiment Name: At_100uM_ABA_P Parameter: Treatment Value: 100uM ABA vs. No Treatment
  misc_feature: MA Experiment ID: 20000574 Result: Up-regulated in Transcription
  misc_feature: MA Experiment 20000574 PARAMETER Experiment Name: At_100uM_ABA_Mutants__P Parameter: Organism Value: A. thaliana
  misc_feature: MA Experiment 20000574 PARAMETER Experiment Name: At_100uM_ABA_Mutants__P Parameter: Plant Line Value: CS23 vs. Ler wt
  misc_feature: MA Experiment 20000574 PARAMETER Experiment Name: At_100uM_ABA_Mutants__P Parameter: Timepoint (hr) Value: N/A
  misc_feature: MA Experiment 20000574 PARAMETER Experiment Name: At_100uM_ABA_Mutants__P Parameter: Tissue Value: Whole Plant
  misc_feature: MA Experiment 20000574 PARAMETER Experiment Name: At_100uM_ABA_Mutants__P Parameter: Treatment Value: None
  misc_feature: MA Experiment ID: 20000794 Result: Up-regulated in Transcription
  misc_feature: MA Experiment 20000794 PARAMETER Experiment Name: At_Petals_P Parameter: Age (day) Value: 23-25 days
  misc_feature: MA Experiment 20000794 PARAMETER Experiment Name: At_Petals_P Parameter: Plant Line Value: WS
  misc_feature: MA Experiment 20000794 PARAMETER Experiment Name: At_Petals_P Parameter: Tissue Value: Petals vs. Whole plant
  misc_feature: MA Experiment ID: 20001555 Result: Up-regulated in Transcription
  misc_feature: MA Experiment 20001555 PARAMETER Experiment Name: At_Drought_Soil_Dry_P Parameter: Age (day) Value: 24
  misc_feature: MA Experiment 20001555 PARAMETER Experiment Name: At_Drought_Soil_Dry_P Parameter: Organism Value: A. thaliana
  misc_feature: MA Experiment 20001555 PARAMETER Experiment Name: At_Drought_Soil_Dry_P Parameter: Plant Line Value: WS
  misc_feature: MA Experiment 20001555 PARAMETER Experiment Name: At_Drought_Soil_Dry_P Parameter: Post Timepoint (hr) Value: None
  misc_feature: MA Experiment 20001555 PARAMETER Experiment Name: At_Drought_Soil_Dry_P Parameter: Post-Treatment Value: None
  misc_feature: MA Experiment 20001555 PARAMETER Experiment Name: At_Drought_Soil_Dry_P Parameter: Timepoint (day) Value: 10
  misc_feature: MA Experiment 20001555 PARAMETER Experiment Name: At_Drought_Soil_Dry_P Parameter: Treatment Value: Drought vs. No Drought
  misc_feature: MA Experiment ID: 20001560 Result: Up-regulated in Transcription
  misc_feature: MA Experiment 20001560 PARAMETER Experiment Name: At_Drought_Soil_Dry_P Parameter: Age (day) Value: 28
  misc_feature: MA Experiment 20001560 PARAMETER Experiment Name: At_Drought_Soil_Dry_P Parameter: Organism Value: A. thaliana
  misc_feature: MA Experiment 20001560 PARAMETER Experiment Name: At_Drought_Soil_Dry_P Parameter: Plant Line Value: WS
  misc_feature: MA Experiment 20001560 PARAMETER Experiment Name: At_Drought_Soil_Dry_P Parameter: Post Timepoint (hr) Value: None
  misc_feature: MA Experiment 20001560 PARAMETER Experiment Name: At_Drought_Soil_Dry_P Parameter: Post-Treatment Value: None
  misc_feature: MA Experiment 20001560 PARAMETER Experiment Name: At_Drought_Soil_Dry_P Parameter: Timepoint (day) Value: 14
  misc_feature: MA Experiment 20001560 PARAMETER Experiment Name: At_Drought_Soil_Dry_P Parameter: Treatment Value: Drought vs. No Drought
  misc_feature: MA Experiment ID: 20001757 Result: Down-regulated in Transcription
  misc_feature: MA Experiment 20001757 PARAMETER Experiment Name: At_50mM_NH4NO3_L-to-H_P Parameter: Timepoint (hr) Value: 6
  misc_feature: MA Experiment 20001757 PARAMETER Experiment Name: At_50mM_NH4NO3_L-to-H_P Parameter: Tissue Value: Leaf
  misc_feature: MA Experiment 20001757 PARAMETER Experiment Name: At_50mM_NH4NO3_L-to-H_P Parameter: Treatment Value: 50mM NH4NO3 vs 100mM Mannitol
  misc_feature: MA Experiment ID: 20001904 Result: Up-regulated in Transcription
  misc_feature: MA Experiment 20001904 PARAMETER Experiment Name: At_Drought_Reproduction_P Parameter: Age (day) Value: 37
  misc_feature: MA Experiment 20001904 PARAMETER Experiment Name: At_Drought_Reproduction_P Parameter: Organism Value: A. thaliana
  misc_feature: MA Experiment 20001904 PARAMETER Experiment Name: At_Drought_Reproduction_P Parameter: Plant Line Value: WS
  misc_feature: MA Experiment 20001904 PARAMETER Experiment Name: At_Drought_Reproduction_P Parameter: Timepoint (day) Value: 7
  misc_feature: MA Experiment 20001904 PARAMETER Experiment Name: At_Drought_Reproduction_P Parameter: Tissue Value: Rosettes
  misc_feature: MA Experiment 20001904 PARAMETER Experiment Name: At_Drought_Reproduction_P Parameter: Treatment Value: Drought vs. No Drought
  misc_feature: MA Experiment ID: 20001906 Result: Up-regulated in Transcription
  misc_feature: MA Experiment 20001906 PARAMETER Experiment Name: At_Drought_Reproduction_P Parameter: Age (day) Value: 35
  misc_feature: MA Experiment 20001906 PARAMETER Experiment Name: At_Drought_Reproduction_P Parameter: Organism Value: A. thaliana
  misc_feature: MA Experiment 20001906 PARAMETER Experiment Name: At_Drought_Reproduction_P Parameter: Plant Line Value: WS
  misc_feature: MA Experiment 20001906 PARAMETER Experiment Name: At_Drought_Reproduction_P Parameter: Timepoint (day) Value: 5
  misc_feature: MA Experiment 20001906 PARAMETER Experiment Name: At_Drought_Reproduction_P Parameter: Tissue Value: Siliques
  misc_feature: MA Experiment 20001906 PARAMETER Experiment Name: At_Drought_Reproduction_P Parameter: Treatment Value: Drought vs. No Drought
  misc_feature: MA Experiment ID: 20001911 Result: Up-regulated in Transcription
  misc_feature: MA Experiment 20001911 PARAMETER Experiment Name: At_Drought_Reproduction_P Parameter: Age (day) Value: 40
  misc_feature: MA Experiment 20001911 PARAMETER Experiment Name: At_Drought_Reproduction_P Parameter: Organism Value: A. thaliana
  misc_feature: MA Experiment 20001911 PARAMETER Experiment Name: At_Drought_Reproduction_P Parameter: Plant Line Value: WS
  misc_feature: MA Experiment 20001911 PARAMETER Experiment Name: At_Drought_Reproduction_P Parameter: Timepoint (day) Value: 10
  misc_feature: MA Experiment 20001911 PARAMETER Experiment Name: At_Drought_Reproduction_P Parameter: Tissue Value: Flowers
  misc_feature: MA Experiment 20001911 PARAMETER Experiment Name: At_Drought_Reproduction_P Parameter: Treatment Value: Drought vs. No Drought
aaagaaaaacattcgacattacagaaaagaaaaaactataagaaaatcttaattaataaaataatatattcaggagggcgagagagagagagagggatgatgaaggaagaacaatgggcaccagtgatagtaatgttaatatcaagtgttgcaatgggatcagtgaacgctctcgttaagaaagcacttgatgttggtgttaaccatatgatctttggtgcttatagaatggctatttctgctctaatcttggttccgttttcttatatttgggagaggaaaacaaggccacaactaacgttcatgcttttgtgcgaacatttcatcagcggattacttggggcaagtttgatgcaatttttctttttacttgggctttcgtacacgtcagcaactgtttcgatggctctagttagcatgttacctgctatcacctttgcgttagcccttattttccggatagagaatgcgcaaaacctaaagagcaaagcaggcgtgctcaaagtaatgggaaccctaatttgcataatgggagcaatgttgttgacattttacaaaggcccagagttatcaaaccctcattctcatccacaagctcgtcacaacaacaacaataacaatggtcacgaccaaacaaagaaatggcttctaggctgtctttatttagtcattgggacagtgttgttgtctctatggatgttgtttcaagggaaattaagctttaagtatcctggaaataaatactcaagcacttgtctcatgtcagtcttcgcatcatttcaatgtgctattttgagtctttataaaagtagagacgtcaaagattggatcattgaagataaattcgtcattttggtcaccctttacgctggaatagtgggacaagcgatgtcgacagtggtaacgtcatggtccataaaaatgacaggagcagttttcgtctcaacattcagccccgtcagcctcgtcgccgctacgttattcgatttcctcatcttacactctcctttataccttggcagcatacttggatcagtagtgactataactggcctctacgtttttctttggggaaggaagaatgagacagatcagtctgtttcgaagactttgaacagttcccagttttctcagaataaggataacgaagaccatacaatagcaaatcataaggatactaatttgcccgtttgatatatatatatatcatatttatagaggtagctagatatttgctatcataatcgtgatagtactgtcattgatcagctctatattataagacttatgttcttctgtattgccaactatagctcactgtatgtttgtaaccagttggattggtttaattggaaataaaagtagttggagatgt

SEQ ID NO: 45408 - protein, 397 aa, Arabidopsis thaliana
  peptide (1)..(397): Ceres Seq. ID no. 12561317
  misc_feature (50)..(184): Pfam Name: Integral membrane protein DUF6 Pfam Description: Integral membrane protein DUF6
  misc_feature (37)..(383): Homolog of NCBI NO: 34897816 NR Description: P0514G12.28 [Oryza sativa (japonica
  misc_feature (38)..(384): Homolog of NCBI NO: 15234182 NR Description: hypothetical protein
  misc_feature (118)..(387): Homolog of NCBI NO: 30682241 NR Description: nodulin MtN21 family protein [Arabidopsis
  misc_feature (38)..(390): Homolog of NCBI NO: 15234185 NR Description: unknown protein; protein id: At4g01450.1
  misc_feature (115)..(383): Homolog of NCBI NO: 25406714 NR Description: protein T25K16.7 [imported] - Arabidopsis
  misc_feature (28)..(364): Homolog of NCBI NO: 15220389 NR Description: hypothetical protein; protein id: At1g11460.1
  misc_feature (31)..(383): Homolog of NCBI NO: 18378792 NR Description: expressed protein
  misc_feature (34)..(103): Homolog of NCBI NO: 7486354 NR Description: hypothetical protein F3D13.4 - Arabidopsis
  misc_feature (115)..(397): Homolog of NCBI NO: 7486354 NR Description: hypothetical protein F3D13.4 - Arabidopsis
  misc_feature (33)..(397): Homolog of NCBI NO: 15234179 NR Description: unknown protein
KEKHSTLQKRKNYKKILINKIIYSGGRERERGMMKEEQWAPVIVMLISSVAMGSVNALVKKALDVGVNHMIFGAYRMAISALILVPFSYIWERKTRPQLTFMLLCEHFISGLLGASLMQFFFLLGLSYTSATVSMALVSMLPAITFALALIFRIENAQNLKSKAGVLKVMGTLICIMGAMLLTFYKGPELSNPHSHPQARHNNNNNNGHDQTKKWLLGCLYLVIGTVLLSLWMLFQGKLSFKYPGNKYSSTCLMSVFASFQCAILSLYKSRDVKDWIIEDKFVILVTLYAGIVGQAMSTVVTSWSIKMTGAVFVSTFSPVSLVAATLFDFLILHSPLYLGSILGSVVTITGLYVFLWGRKNETDQSVSKTLNSSQFSQNKDNEDHTIANHKDTNLPV

SEQ ID NO: 45409 - protein, 365 aa, Arabidopsis thaliana
  peptide (1)..(365): Ceres Seq. ID no. 12561318
  misc_feature (18)..(152): Pfam Name: Integral membrane protein DUF6 Pfam Description: Integral membrane protein DUF6
  misc_feature (5)..(351): Homolog of NCBI NO: 34897816 NR Description: P0514G12.28 [Oryza sativa (japonica
  misc_feature (6)..(352): Homolog of NCBI NO: 15234182 NR Description: hypothetical protein
  misc_feature (86)..(355): Homolog of NCBI NO: 30682241 NR Description: nodulin MtN21 family protein [Arabidopsis
  misc_feature (6)..(358): Homolog of NCBI NO: 15234185 NR Description: unknown protein; protein id: At4g01450.1
  misc_feature (83)..(351): Homolog of NCBI NO: 25406714 NR Description: protein T25K16.7 [imported] - Arabidopsis
  misc_feature (1)..(332): Homolog of NCBI NO: 15220389 NR Description: hypothetical protein; protein id: At1g11460.1
  misc_feature (1)..(351): Homolog of NCBI NO: 18378792 NR Description: expressed protein
  misc_feature (2)..(71): Homolog of NCBI NO: 7486354 NR Description: hypothetical protein F3D13.4 - Arabidopsis
  misc_feature (83)..(365): Homolog of NCBI NO: 7486354 NR Description: hypothetical protein F3D13.4 - Arabidopsis
  misc_feature (1)..(365): Homolog of NCBI NO: 15234179 NR Description: unknown protein
MMKEEQWAPVIVMLISSVAMGSVNALVKKALDVGVNHMIFGAYRMAISALILVPFSYIWERKTRPQLTFMLLCEHFISGLLGASLMQFFFLLGLSYTSATVSMALVSMLPAITFALALIFRIENAQNLKSKAGVLKVMGTLICIMGAMLLTFYKGPELSNPHSHPQARHNNNNNNGHDQTKKWLLGCLYLVIGTVLLSLWMLFQGKLSFKYPGNKYSSTCLMSVFASFQCAILSLYKSRDVKDWIIEDKFVILVTLYAGIVGQAMSTVVTSWSIKMTGAVFVSTFSPVSLVAATLFDFLILHSPLYLGSILGSVVTITGLYVFLWGRKNETDQSVSKTLNSSQFSQNKDNEDHTIANHKDTNLPV

SEQ ID NO: 45410 - protein, 364 aa, Arabidopsis thaliana
  peptide (1)..(364): Ceres Seq. ID no. 12561319
  misc_feature (17)..(151): Pfam Name: Integral membrane protein DUF6 Pfam Description: Integral membrane protein DUF6
  misc_feature (4)..(350): Homolog of NCBI NO: 34897816 NR Description: P0514G12.28 [Oryza sativa (japonica
  misc_feature (5)..(351): Homolog of NCBI NO: 15234182 NR Description: hypothetical protein
  misc_feature (85)..(354): Homolog of NCBI NO: 30682241 NR Description: nodulin MtN21 family protein [Arabidopsis
  misc_feature (5)..(357): Homolog of NCBI NO: 15234185 NR Description: unknown protein; protein id: At4g01450.1
  misc_feature (82)..(350): Homolog of NCBI NO: 25406714 NR Description: protein T25K16.7 [imported] - Arabidopsis
  misc_feature (1)..(331): Homolog of NCBI NO: 15220389 NR Description: hypothetical protein; protein id: At1g11460.1
  misc_feature (1)..(350): Homolog of NCBI NO: 18378792 NR Description: expressed protein
  misc_feature (1)..(70): Homolog of NCBI NO: 7486354 NR Description: hypothetical protein F3D13.4 - Arabidopsis
  misc_feature (82)..(364): Homolog of NCBI NO: 7486354 NR Description: hypothetical protein F3D13.4 - Arabidopsis
  misc_feature (1)..(364): Homolog of NCBI NO: 15234179 NR Description: unknown protein
MKEEQWAPVIVMLISSVAMGSVNALVKKALDVGVNHMIFGAYRMAISALILVPFSYIWERKTRPQLTFMLLCEHFISGLLGASLMQFFFLLGLSYTSATVSMALVSMLPAITFALALIFRIENAQNLKSKAGVLKVMGTLICIMGAMLLTFYKGPELSNPHSHPQARHNNNNNNGHDQTKKWLLGCLYLVIGTVLLSLWMLFQGKLSFKYPGNKYSSTCLMSVFASFQCAILSLYKSRDVKDWIIEDKFVILVTLYAGIVGQAMSTVVTSWSIKMTGAVFVSTFSPVSLVAATLFDFLILHSPLYLGSILGSVVTITGLYVFLWGRKNETDQSVSKTLNSSQFSQNKDNEDHTIANHKDTNLPV

SEQ ID NO: 45411 - DNA, 1776 bp, Arabidopsis thaliana
  misc_feature (1)..(1776): Ceres Seq. ID no. 12600395
  misc_feature: MA Experiment ID: 20000495 Result: Down-regulated in Transcription
  misc_feature: MA Experiment 20000495 PARAMETER Experiment Name: At_Guard_Cells_P Parameter: Harvest Date Value: 8/2/2002
  misc_feature: MA Experiment 20000495 PARAMETER Experiment Name: At_Guard_Cells_P Parameter: Organism Value: A. thaliana
  misc_feature: MA Experiment 20000495 PARAMETER Experiment Name: At_Guard_Cells_P Parameter: Tissue Value: Guard Cells vs. Leaves
gatagccccattgtcgtgggttcccactagcagctttcttgtcttcctccattttcttttccttcattctactaaaacagaggtttttgcctcttcctctcttgtttcactctttagggtacacacaaattcactcttttttcttctttgtttgggaggggaaaagttacagttttttcctctgttttggatcaaaatttcgtttttttggttgtgttaagaaagcaacagagagagagagaaagattgaaactttggatgtgaatttagggttttgtgaattggggaaaaagcaatccagagatggctcaacagagacaatttcagatggaaggtggtaataataatacaacagataccaagttgacgaaaatctttgttggaggattagcttgggagactcagagagatacaatgagacgttactttgaacagtttggtgaaatcgttgaagctgttgtcattactgataagaacactggaagatctaaaggatatggatttgtcacgtttaaggaagctgaagcagcgatgagagcttgtcagaacatgaatcctgtgattgatggaagaagagctaattgcaatcttgcttgtcttggtgctcaaaaacctcgtcctcctacttctcctcgacatggaacaggtagattcagatcaccaggatcaggagttggattagttgctccttctcctcagtttcgaggctcttcttcttcctctgcttttgttcatcaacaacaacaacaacacactgctcaattcccatttccttactctacttacgggttttctggttattctcaagagggaatgtacccaatgaactactacaatcatcatctctatggaggacaacagttttcaccatatatgggacatccatcagcaggatcaacaggaatgttccatggtttttatccctactatcctcaatacaatgcagcacaaagtagcaatcaagctcaagctcaagttcaagctcaacatcaccaaggtttcagctttcaatacactgctcctcctgctcctcctctgctgcaatatccttacttgcctcaccagccacacttcagttctcagcagcaatttagctctcagcaacctcctcctccaatcctctccctcccaacctctctggctctatctttaccttcatcatcatcaccgtcctcttcaacttccacctcagctgcaacaacagcaacaaaaacagtagttataactacagcaacaaagaaagcagaaactgaagctagcagcaaagatggtaatgaagcaatgacaacatcaaccatcaagatagagggttgattcagaactactacaatagccagaagaagggacaaacttcattgtacactaactcatcatcaaatctctccaacaacgttctagaaacattcattcatccatcgtttttaggattctagaatcttaattagtacttaggaggaggaagaagaagaagaaaccatcatcacattctttctttttttttgttgttgtttcaaattgcattttaggtaaaagaatcaagagaaagcattggtggctttcttttagattcttaagaaaacttggattggtgcagaaagcatcatcagattattacattcatttggggaattttatttttcaggttcaaaagaaatgttttatgtcttcttttgaacctaaacaggatttttaagcttcggataagcttaaaatcatttcttttacatttgtaattcttgaaattgttataattcaatcacattgcttcttcttact

SEQ ID NO: 45412 - protein, 336 aa, Arabidopsis thaliana
  peptide (1)..(336): Ceres Seq. ID no. 12600396
  misc_feature (24)..(84): Pfam Name: RNA recognition motif. (a.k.a. RRM, RBD, or RNP domain) Pfam Description: RNA recognition motif. (a.k.a. RRM, RBD, or RNP
  misc_feature (24)..(84): Pfam Name: RNA recognition motif. (a.k.a. RRM, RBD, or RNP domain) Pfam Description: RNA recognition motif. (a.k.a. RRM, RBD, or RNP
  misc_feature (13)..(250): Homolog of NCBI NO: 22330665 NR Description: RRM-containing protein; protein id: At1g76460.1
  misc_feature (18)..(249): Homolog of NCBI NO: 25518109 NR Description: T16E15.6 protein - Arabidopsis thaliana
  misc_feature (9)..(255): Homolog of NCBI NO: 18395177 NR Description: RRM-containing protein
  misc_feature (13)..(274): Homolog of NCBI NO: 23505939 NR Description: At1g20880/F9H16_14 [Arabidopsis thaliana]
  misc_feature (13)..(274): Homolog of NCBI NO: 15010636 NR Description: At1g20880/F9H16_14 [Arabidopsis thaliana]
  misc_feature (13)..(250): Homolog of NCBI NO: 22330665 NR Description: RRM-containing protein; protein id: At1g76460.1
  misc_feature (9)..(255): Homolog of NCBI NO: 18395177 NR Description: RRM-containing protein
  misc_feature (13)..(274): Homolog of NCBI NO: 15010636 NR Description: At1g20880/F9H16_14 [Arabidopsis thaliana]
  misc_feature (1)..(187): Homolog of NCBI NO: 15226439 NR Description: RRM-containing protein
  misc_feature (18)..(242): Homolog of NCBI NO: 34907334 NR Description: P0698A10.29 [Oryza sativa (japonica
  misc_feature (18)..(240): Homolog of NCBI NO: 14532532 NR Description: At1g33470/F10C21_14 [Arabidopsis thaliana]
  misc_feature (18)..(242): Homolog of NCBI NO: 34905758 NR Description: similar to RNA-binding protein
  misc_feature (13)..(274): Homolog of NCBI NO: 18394923 NR Description: RRM-containing protein
  misc_feature (13)..(274): Homolog of NCBI NO: 23505939 NR Description: At1g20880/F9H16_14 [Arabidopsis thaliana]
  misc_feature (18)..(249): Homolog of NCBI NO: 25518109 NR Description: T16E15.6 protein - Arabidopsis thaliana
  misc_feature (13)..(274): Homolog of NCBI NO: 18394923 NR Description: RRM-containing protein
  misc_feature (18)..(242): Homolog of NCBI NO: 34905758 NR Description: similar to RNA-binding protein
  misc_feature (18)..(240): Homolog of NCBI NO: 14532532 NR Description: At1g33470/F10C21_14 [Arabidopsis thaliana]
  misc_feature (18)..(242): Homolog of NCBI NO: 34907334 NR Description: P0698A10.29 [Oryza sativa (japonica
  misc_feature (1)..(187): Homolog of NCBI NO: 15226439 NR Description: RRM-containing protein
MAQQRQFQMEGGNNNTTDTKLTKIFVGGLAWETQRDTMRRYFEQFGEIVEAVVITDKNTGRSKGYGFVTFKEAEAAMRACQNMNPVIDGRRANCNLACLGAQKPRPPTSPRHGTGRFRSPGSGVGLVAPSPQFRGSSSSSAFVHQQQQQHTAQFPFPYSTYGFSGYSQEGMYPMNYYNHHLYGGQQFSPYMGHPSAGSTGMFHGFYPYYPQYNAAQSSNQAQAQVQAQHHQGFSFQYTAPPAPPLLQYPYLPHQPHFSSQQQFSSQQPPPPILSLPTSLALSLPSSSSPSSSTSTSAATTATKTVVITTATKKAETEASSKDGNEAMTTSTIKIEG

SEQ ID NO: 45413 - protein, 328 aa, Arabidopsis thaliana
  peptide (1)..(328): Ceres Seq. ID no. 12600397
  misc_feature (16)..(76): Pfam Name: RNA recognition motif. (a.k.a. RRM, RBD, or RNP domain) Pfam Description: RNA recognition motif. (a.k.a. RRM, RBD, or RNP
  misc_feature (16)..(76): Pfam Name: RNA recognition motif. (a.k.a. RRM, RBD, or RNP domain) Pfam Description: RNA recognition motif. (a.k.a. RRM, RBD, or RNP
  misc_feature (5)..(242): Homolog of NCBI NO: 22330665 NR Description: RRM-containing protein; protein id: At1g76460.1
  misc_feature (10)..(241): Homolog of NCBI NO: 25518109 NR Description: T16E15.6 protein - Arabidopsis thaliana
  misc_feature (1)..(247): Homolog of NCBI NO: 18395177 NR Description: RRM-containing protein
  misc_feature (5)..(266): Homolog of NCBI NO: 23505939 NR Description: At1g20880/F9H16_14 [Arabidopsis thaliana]
  misc_feature (5)..(266): Homolog of NCBI NO: 15010636 NR Description: At1g20880/F9H16_14 [Arabidopsis thaliana]
  misc_feature (5)..(242): Homolog of NCBI NO: 22330665 NR Description: RRM-containing protein; protein id: At1g76460.1
  misc_feature (1)..(247): Homolog of NCBI NO: 18395177 NR Description: RRM-containing protein
  misc_feature (5)..(266): Homolog of NCBI NO: 15010636 NR Description: At1g20880/F9H16_14 [Arabidopsis thaliana]
  misc_feature (1)..(179): Homolog of NCBI NO: 15226439 NR Description: RRM-containing protein
  misc_feature (10)..(234): Homolog of NCBI NO: 34907334 NR Description: P0698A10.29 [Oryza sativa (japonica
  misc_feature (10)..(232): Homolog of NCBI NO: 14532532 NR Description: At1g33470/F10C21_14 [Arabidopsis thaliana]
  misc_feature (10)..(234): Homolog of NCBI NO: 34905758 NR Description: similar to RNA-binding protein
  misc_feature (5)..(266): Homolog of NCBI NO: 18394923 NR Description: RRM-containing protein
  misc_feature (5)..(266): Homolog of NCBI NO: 23505939 NR Description: At1g20880/F9H16_14 [Arabidopsis thaliana]
  misc_feature (10)..(241): Homolog of NCBI NO: 25518109 NR Description: T16E15.6 protein - Arabidopsis thaliana
  misc_feature (5)..(266): Homolog of NCBI NO: 18394923 NR Description: RRM-containing protein
  misc_feature (10)..(234): Homolog of NCBI NO: 34905758 NR Description: similar to RNA-binding protein
  misc_feature (10)..(232): Homolog of NCBI NO: 14532532 NR Description: At1g33470/F10C21_14 [Arabidopsis thaliana]
  misc_feature (10)..(234): Homolog of NCBI NO: 34907334 NR Description: P0698A10.29 [Oryza sativa (japonica
  misc_feature (1)..(179): Homolog of NCBI NO: 15226439 NR Description: RRM-containing protein
MEGGNNNTTDTKLTKIFVGGLAWETQRDTMRRYFEQFGEIVEAVVITDKNTGRSKGYGFVTFKEAEAAMRACQNMNPVIDGRRANCNLACLGAQKPRPPTSPRHGTGRFRSPGSGVGLVAPSPQFRGSSSSSAFVHQQQQQHTAQFPFPYSTYGFSGYSQEGMYPMNYYNHHLYGGQQFSPYMGHPSAGSTGMFHGFYPYYPQYNAAQSSNQAQAQVQAQHHQGFSFQYTAPPAPPLLQYPYLPHQPHFSSQQQFSSQQPPPPILSLPTSLALSLPSSSSPSSSTSTSAATTATKTVVITTATKKAETEASSKDGNEAMTTSTIKIEG

SEQ ID NO: 45414 - protein, 299 aa, Arabidopsis thaliana
  peptide (1)..(299): Ceres Seq. ID no. 12600398
  misc_feature (1)..(47): Pfam Name: RNA recognition motif. (a.k.a. RRM, RBD, or RNP domain) Pfam Description: RNA recognition motif. (a.k.a. RRM, RBD, or RNP
  misc_feature (1)..(47): Pfam Name: RNA recognition motif. (a.k.a. RRM, RBD, or RNP domain) Pfam Description: RNA recognition motif. (a.k.a. RRM, RBD, or RNP
  misc_feature (1)..(213): Homolog of NCBI NO: 22330665 NR Description: RRM-containing protein; protein id: At1g76460.1
  misc_feature (1)..(212): Homolog of NCBI NO: 25518109 NR Description: T16E15.6 protein - Arabidopsis thaliana
  misc_feature (1)..(218): Homolog of NCBI NO: 18395177 NR Description: RRM-containing protein
  misc_feature (1)..(237): Homolog of NCBI NO: 23505939 NR Description: At1g20880/F9H16_14 [Arabidopsis thaliana]
  misc_feature (1)..(237): Homolog of NCBI NO: 15010636 NR Description: At1g20880/F9H16_14 [Arabidopsis thaliana]
  misc_feature (1)..(213): Homolog of NCBI NO: 22330665 NR Description: RRM-containing protein; protein id: At1g76460.1
  misc_feature (1)..(218): Homolog of NCBI NO: 18395177 NR Description: RRM-containing protein
  misc_feature (1)..(237): Homolog of NCBI NO: 15010636 NR Description: At1g20880/F9H16_14 [Arabidopsis thaliana]
  misc_feature (1)..(150): Homolog of NCBI NO: 15226439 NR Description: RRM-containing protein
  misc_feature (1)..(205): Homolog of NCBI NO: 34907334 NR Description: P0698A10.29 [Oryza sativa (japonica
  misc_feature (1)..(203): Homolog of NCBI NO: 14532532 NR Description: At1g33470/F10C21_14 [Arabidopsis thaliana]
  misc_feature (1)..(205): Homolog of NCBI NO: 34905758 NR Description: similar to RNA-binding protein
  misc_feature (1)..(237): Homolog of NCBI NO: 18394923 NR Description: RRM-containing protein
  misc_feature (1)..(237): Homolog of NCBI NO: 23505939 NR Description: At1g20880/F9H16_14 [Arabidopsis thaliana]
  misc_feature (1)..(212): Homolog of NCBI NO: 25518109 NR Description: T16E15.6 protein - Arabidopsis thaliana
  misc_feature (1)..(237): Homolog of NCBI NO: 18394923 NR Description: RRM-containing protein
  misc_feature (1)..(205): Homolog of NCBI NO: 34905758 NR Description: similar to RNA-binding protein
  misc_feature (1)..(203): Homolog of NCBI NO: 14532532 NR Description: At1g33470/F10C21_14 [Arabidopsis thaliana]
  misc_feature (1)..(205): Homolog of NCBI NO: 34907334 NR Description: P0698A10.29 [Oryza sativa (japonica
  misc_feature (1)..(150): Homolog of NCBI NO: 15226439 NR Description: RRM-containing protein
MRRYFEQFGEIVEAVVITDKNTGRSKGYGFVTFKEAEAAMRACQNMNPVIDGRRANCNLACLGAQKPRPPTSPRHGTGRFRSPGSGVGLVAPSPQFRGSSSSSAFVHQQQQQHTAQFPFPYSTYGFSGYSQEGMYPMNYYNHHLYGGQQFSPYMGHPSAGSTGMFHGFYPYYPQYNAAQSSNQAQAQVQAQHHQGFSFQYTAPPAPPLLQYPYLPHQPHFSSQQQFSSQQPPPPILSLPTSLALSLPSSSSPSSSTSTSAATTATKTVVITTATKKAETEASSKDGNEAMTTSTIKIEG

SEQ ID NO: 45415 - DNA, 3798 bp, Arabidopsis thaliana
  misc_feature (1)..(3798): Ceres Seq. ID no. 13618884
  misc_feature: MA Experiment ID: 20000307 Result: Up-regulated in Transcription
  misc_feature: MA Experiment 20000307 PARAMETER Experiment Name: At_Germinating_Seeds_Sub_P Parameter: Age (hr) Value: 24 vs. 0
  misc_feature: MA Experiment 20000307 PARAMETER Experiment Name: At_Germinating_Seeds_Sub_P Parameter: Organism Value: A. thaliana
  misc_feature: MA Experiment 20000307 PARAMETER Experiment Name: At_Germinating_Seeds_Sub_P Parameter: Plant Line Value: WS
  misc_feature: MA Experiment 20000307 PARAMETER Experiment Name: At_Germinating_Seeds_Sub_P Parameter: Tissue Value: Germinating Seeds
ggataaaataggcaaaagcagatttgaagaagaagcagcttgagatatcaaatagagagagagagtgacagaggagtgtgtgaacatccttttttagtagatttgggttttcgagatgccgtattgaatcggctacgaatttcccaattttgaattttgtgaatctctctctttctctgtgtgtcggtggctgcgatggaggccagtgccggcttggttgctggatcctaccggagaaacgagctcgttcggatccgacatgaatctgatggcgggaccaaacctttgaagaatatgaatggccagatatgtcagatctgtggtgatgatgttggactcgctgaaactggagatgtctttgtcgcgtgtaatgaatgtgccttccctgtgtgtcggccttgctatgagtacgagaggaaagatggaactcagtgttgccctcaatgcaagactagattcagacgacacagggggagtcctcgtgttgaaggagatgaagatgaggatgatgttgatgatatcgagaatgagttcaattacgcccagggagctaacaaggcgagacaccaacgccatggcgaagagttttcttcttcctctagacatgaatctcaaccaattcctcttctcacccatggccatacggtttctggagagattcgcacgcctgatacacaatctgtgcgaactacatcaggtcctttgggtccttctgacaggaatgctatttcatctccatatattgatccacggcaacctgtccctgtaagaatcgtggacccgtcaaaagacttgaactcttatgggcttggtaatgttgactggaaagaaagagttgaaggctggaagctgaagcaggagaaaaatatgttacagatgactggtaaataccatgaagggaaaggaggagaaattgaagggactggttccaatggcgaagaactccaaatggctgatgatacacgtcttcctatgagtcgtgtggtgcctatcccatcttctcgcctaaccccttatcgggttgtgattattctccggcttatcatcttgtgtttcttcttgcaatatcgtacaactcaccctgtgaaaaatgcatatcctttgtggttgacctcggttatctgtgagatctggtttgcattttcttggcttcttgatcagtttcccaaatggtaccccattaacagggagacttatcttgaccgtctcgctataagatatgatcgagacggtgaaccatcacagctcgttcctgttgatgtgtttgttagtacagtggacccattgaaagagcctccccttgttacagcaaacacagttctctcgattctttctgtggactacccggtagataaagtagcctgttatgtttcagatgatggttcagctatgcttacctttgaatccctttctgaaaccgctgagtttgcaaagaaatgggtaccattttgcaagaaattcaacattgaacctagggcccctgaattctattttgcccagaagatagattacttgaaggacaagatccaaccgtcttttgttaaagagcgacgagctatgaagagagagtatgaagagtttaaagtgaggataaatgctcttgttgccaaagcacagaaaatccctgaagaaggctggacaatgcaggatggtactccctggcctggtaacaacactagagatcatcctggaatgatacaggtgttcttaggccatagtgggggtctggataccgatggaaatgagctgcctagactcatctatgtttctcgtgaaaagcggcctggatttcaacaccacaaaaaggctggagctatgaatgcattgatccgtgtatctgctgttcttaccaatggagcatatcttttgaacgtggattgtgatcattactttaataacagtaaggctattaaagaagctatgtgtttcatgatggacccggctattggaaagaagtgctgctatgtccagttccctcaacgttttgacggtattgatttgcacgatcgatatgccaacaggaatatagtctttttcgatattaacatgaaggggttggatggtatccagggtccagtatatgtgggtactggttgttgttttaataggcaggctctatatgggtatgatcctgttttgacggaagaagatttagaaccaaatattattgtcaagagctgttgcgggtcaaggaagaaaggtaaaagtagcaagaagtataactacgaaaagaggagaggcatcaacagaagtgactccaatgctccacttttcaatatggaggacatcgatgagggttttgaaggttatgatgatgagaggtctattctaatgtcccagaggagtgtagagaagcgttttggtcagtcgccggtatttattgcggcaaccttcatggaacaaggcggcattccaccaacaaccaatcccgctactcttctgaaggaggctattcatgttataagctgtggttacgaagacaagactgaatggggcaaagagattggttggatctatggttccgtgacggaagatattcttactgggttcaagatgcatgcccggggttggatatcgatctactgcaatcctccacgccctgcgttcaagggatctgcaccaatcaatctttctgatcgtttgaaccaagttcttcgatgggctttgggatctatcgagattcttcttagcagacattgtcctatctggtatggttaccatggaaggttgagacttttggagaggatcgcttatatcaacaccatcgtctatcctattacatccatccctcttattgcgtattgtattcttcccgctttttgtctcatcaccgacagattcatcatacccgagataagcaactacgcgagtatttggttcattctactcttcatctcaattgctgtgactggaatcctggagctgagatggagcggtgtgagcattgaggattggtggaggaacgagcagttctgggtcattggtggcacatccgcccatctttttgctgtcttccaaggtctacttaaggttcttgctggtatcgacaccaacttcaccgttacatctaaagccacagacgaagatggggattttgcagaactctacatcttcaaatggacagctcttctcattccaccaaccaccgtcctacttgtgaacctcataggcattgtggctggtgtctcttatgctgtaaacagtggctaccagtcgtggggtccgcttttcgggaagctcttcttcgccttatgggttattgcccatctctaccctttcttgaaaggtctgttgggaagacaaaaccgaacaccaaccatcgtcattgtctggtctgttcttctcgcctccatcttctcgttgctttgggtcaggatcaatccctttgtggacgccaatcccaatgccaacaacttcaatggcaaaggaggtgtcttttagaccctatttatatacttgtgtgtgcatatatcaaaaacgcgcaatgggaattccaaatcatctaaacccatcaaaccccagtgaaccgggcagttaaggtgattccatgtccaagattagctttctccgagtagccagagaaggtgaaattgttcgtaacactattgtaatgattttccagtggggaagaagatgtggacccaaatgatacatagtctacaaaaagaatttgttattctttcttatatttattttatttaaagcttgttagactcacacttatgtaatgttggaacttgttgtcctaaaaagggattggagttttctttttatctaagaatctgaagtttatatgcc

SEQ ID NO: 45416 - protein, 1081 aa, Arabidopsis thaliana
  peptide (1)..(1081): Ceres Seq. ID no. 13618885
  misc_feature (746)..(1069): Homolog of NCBI NO: 13925884 NR Description: cellulose synthase D-like protein [Nicotiana
  misc_feature (35)..(105): Homolog of NCBI NO: 15217853 NR Description: cellulose synthase family [Arabidopsis thaliana]
  misc_feature (242)..(469): Homolog of NCBI NO: 15217853 NR Description: cellulose synthase family [Arabidopsis thaliana]
  misc_feature (518)..(1063): Homolog of NCBI NO: 15217853 NR Description: cellulose synthase family [Arabidopsis thaliana]
  misc_feature (230)..(469): Homolog of NCBI NO: 15237873 NR Description: cellulose synthase family [Arabidopsis thaliana]
  misc_feature (475)..(1075): Homolog of NCBI NO: 15237873 NR Description: cellulose synthase family [Arabidopsis thaliana]
  misc_feature (225)..(469): Homolog of NCBI NO: 27372782 NR Description: cellulose synthase-like protein D4 [Populus
  misc_feature (475)..(1063): Homolog of NCBI NO: 27372782 NR Description: cellulose synthase-like protein D4 [Populus
  misc_feature (230)..(469): Homolog of NCBI NO: 15228448 NR Description: cellulose synthase family [Arabidopsis thaliana]
  misc_feature (450)..(1063): Homolog of NCBI NO: 15228448 NR Description: cellulose synthase family [Arabidopsis thaliana]
  misc_feature (746)..(1069): Homolog of NCBI NO: 13925884 NR Description: cellulose synthase D-like protein [Nicotiana
  misc_feature (35)..(105): Homolog of NCBI NO: 15217853 NR Description: cellulose synthase family [Arabidopsis thaliana]
  misc_feature (242)..(469): Homolog of NCBI NO: 15217853 NR Description: cellulose synthase family [Arabidopsis thaliana]
  misc_feature (518)..(1063): Homolog of NCBI NO: 15217853 NR Description: cellulose synthase family [Arabidopsis thaliana]
  misc_feature (230)..(469): Homolog of NCBI NO: 15237873 NR Description: cellulose synthase family [Arabidopsis thaliana]
  misc_feature (475)..(1075): Homolog of NCBI NO: 15237873 NR Description: cellulose synthase family [Arabidopsis thaliana]
  misc_feature (225)..(469): Homolog of NCBI NO: 27372782 NR Description: cellulose synthase-like protein D4 [Populus
  misc_feature (475)..(1063): Homolog of NCBI NO: 27372782 NR Description: cellulose synthase-like protein D4 [Populus
  misc_feature (230)..(469): Homolog of NCBI NO: 15228448 NR Description: cellulose synthase family [Arabidopsis thaliana]
  misc_feature (450)..(1063): Homolog of NCBI NO: 15228448 NR Description: cellulose synthase family [Arabidopsis thaliana]
  misc_feature (746)..(1069): Homolog of NCBI NO: 13925884 NR Description: cellulose synthase D-like protein [Nicotiana
  misc_feature (35)..(105): Homolog of NCBI NO: 15217853 NR Description: cellulose synthase family [Arabidopsis thaliana]
  misc_feature (242)..(469): Homolog of NCBI NO: 15217853 NR Description: cellulose synthase family [Arabidopsis thaliana]
  misc_feature (518)..(1063): Homolog of NCBI NO: 15217853 NR Description: cellulose synthase family [Arabidopsis thaliana]
  misc_feature (230)..(469): Homolog of NCBI NO: 15237873 NR Description: cellulose synthase family [Arabidopsis thaliana]
  misc_feature (475)..(1075): Homolog of NCBI NO: 15237873 NR Description: cellulose synthase family [Arabidopsis thaliana]
  misc_feature (225)..(469): Homolog of NCBI NO: 27372782 NR Description: cellulose synthase-like protein D4 [Populus
  misc_feature (475)..(1063): Homolog of NCBI NO: 27372782 NR Description: cellulose synthase-like protein D4 [Populus
  misc_feature (230)..(469): Homolog of NCBI NO: 15228448 NR Description: cellulose synthase family [Arabidopsis thaliana]
  misc_feature (450)..(1063): Homolog of NCBI NO: 15228448 NR Description: cellulose synthase family [Arabidopsis thaliana]
MEASAGLVAGSYRRNELVRIRHESDGGTKPLKNMNGQICQICGDDVGLAETGDVFVACNECAFPVCRPCYEYERKDGTQCCPQCKTRFRRHRGSPRVEGDEDEDDVDDIENEFNYAQGANKARHQRHGEEFSSSSRHESQPIPLLTHGHTVSGEIRTPDTQSVRTTSGPLGPSDRNAISSPYIDPRQPVPVRIVDPSKDLNSYGLGNVDWKERVEGWKLKQEKNMLQMTGKYHEGKGGEIEGTGSNGEELQMADDTRLPMSRVVPIPSSRLTPYRVVIILRLIILCFFLQYRTTHPVKNAYPLWLTSVICEIWFAFSWLLDQFPKWYPINRETYLDRLAIRYDRDGEPSQLVPVDVFVSTVDPLKEPPLVTANTVLSILSVDYPVDKVACYVSDDGSAMLTFESLSETAEFAKKWVPFCKKFNIEPRAPEFYFAQKIDYLKDKIQPSFVKERRAMKREYEEFKVRINALVAKAQKIPEEGWTMQDGTPWPGNNTRDHPGMIQVFLGHSGGLDTDGNELPRLIYVSREKRPGFQHHKKAGAMNALIRVSAVLTNGAYLLNVDCDHYFNNSKAIKEAMCFMMDPAIGKKCCYVQFPQRFDGIDLHDRYANRNIVFFDINMKGLDGIQGPVYVGTGCCFNRQALYGYDPVLTEEDLEPNIIVKSCCGSRKKGKSSKKYNYEKRRGINRSDSNAPLFNMEDIDEGFEGYDDERSILMSQRSVEKRFGQSPVFIAATFMEQGGIPPTTNPATLLKEAIHVISCGYEDKTEWGKEIGWIYGSVTEDILTGFKMHARGWISIYCNPPRPAFKGSAPINLSDRLNQVLRWALGSIEILLSRHCPIWYGYHGRLRLLERIAYINTIVYPITSIPLIAYCILPAFCLITDRFIIPEISNYASIWFILLFISIAVTGILELRWSGVSIEDWWRNEQFWVIGGTSAHLFAVFQGLLKVLAGIDTNFTVTSKATDEDGDFAELYIFKWTALLIPPTTVLLVNLIGIVAGVSYAVNSGYQSWGPLFGKLFFALWVIAHLYPFLKGLLGRQNRTPTIVIVWSVLLASIFSLLWVRINPFVDANPNANNFNGKGGVF

SEQ ID NO: 45417 - protein, 1048 aa, Arabidopsis thaliana
  peptide (1)..(1048): Ceres Seq. ID no. 13618886
  misc_feature (713)..(1036): Homolog of NCBI NO: 13925884 NR Description: cellulose synthase D-like protein [Nicotiana
  misc_feature (2)..(72): Homolog of NCBI NO: 15217853 NR Description: cellulose synthase family [Arabidopsis thaliana]
  misc_feature (209)..(436): Homolog of NCBI NO: 15217853 NR Description: cellulose synthase family [Arabidopsis thaliana]
  misc_feature (485)..(1030): Homolog of NCBI NO: 15217853 NR Description: cellulose synthase family [Arabidopsis thaliana]
  misc_feature (197)..(436): Homolog of NCBI NO: 15237873 NR Description: cellulose synthase family [Arabidopsis thaliana]
  misc_feature (442)..(1042): Homolog of NCBI NO: 15237873 NR Description: cellulose synthase family [Arabidopsis thaliana]
  misc_feature (192)..(436): Homolog of NCBI NO: 27372782 NR Description: cellulose synthase-like protein D4 [Populus
  misc_feature (442)..(1030): Homolog of NCBI NO: 27372782 NR Description: cellulose synthase-like protein D4 [Populus
  misc_feature (197)..(436): Homolog of NCBI NO: 15228448 NR Description: cellulose synthase family [Arabidopsis thaliana]
  misc_feature (417)..(1030): Homolog of NCBI NO: 15228448 NR Description: cellulose synthase family [Arabidopsis thaliana]
  misc_feature (713)..(1036): Homolog of NCBI NO: 13925884 NR Description: cellulose synthase D-like protein [Nicotiana
  misc_feature (2)..(72): Homolog of NCBI NO: 15217853 NR Description: cellulose synthase family [Arabidopsis thaliana]
  misc_feature (209)..(436): Homolog of NCBI NO: 15217853 NR Description: cellulose synthase family [Arabidopsis thaliana]
  misc_feature (485)..(1030): Homolog of NCBI NO: 15217853 NR Description: cellulose synthase family [Arabidopsis thaliana]
  misc_feature (197)..(436): Homolog of NCBI NO: 15237873 NR Description: cellulose synthase family [Arabidopsis thaliana]
  misc_feature (442)..(1042): Homolog of NCBI NO: 15237873 NR Description: cellulose synthase family [Arabidopsis thaliana]
  misc_feature (192)..(436): Homolog of NCBI NO: 27372782 NR Description: cellulose synthase-like protein D4 [Populus
  misc_feature (442)..(1030): Homolog of NCBI NO: 27372782 NR Description: cellulose synthase-like protein D4 [Populus
  misc_feature (197)..(436): Homolog of NCBI NO: 15228448 NR Description: cellulose synthase family [Arabidopsis thaliana]
  misc_feature (417)..(1030): Homolog of NCBI NO: 15228448 NR Description: cellulose synthase family [Arabidopsis thaliana]
  misc_feature (713)..(1036): Homolog of NCBI NO: 13925884 NR Description: cellulose synthase D-like protein [Nicotiana
  misc_feature (2)..(72): Homolog of NCBI NO: 15217853 NR Description: cellulose synthase family [Arabidopsis thaliana]
  misc_feature (209)..(436): Homolog of NCBI NO: 15217853 NR Description: cellulose synthase family [Arabidopsis thaliana]
  misc_feature (485)..(1030): Homolog of NCBI NO: 15217853 NR Description: cellulose synthase family [Arabidopsis thaliana]
  misc_feature (197)..(436): Homolog of NCBI NO: 15237873 NR Description: cellulose synthase family [Arabidopsis thaliana]
  misc_feature (442)..(1042): Homolog of NCBI NO: 15237873 NR Description: cellulose synthase family [Arabidopsis thaliana]
  misc_feature (192)..(436): Homolog of NCBI NO: 27372782 NR Description: cellulose synthase-like protein D4 [Populus
  misc_feature (442)..(1030): Homolog of NCBI NO: 27372782 NR Description: cellulose synthase-like protein D4 [Populus
  misc_feature (197)..(436): Homolog of NCBI NO: 15228448 NR Description: cellulose synthase family [Arabidopsis thaliana]
  misc_feature (417)..(1030): Homolog of NCBI NO: 15228448 NR Description: cellulose synthase family [Arabidopsis thaliana]
MNGQICQICGDDVGLAETGDVFVACNECAFPVCRPCYEYERKDGTQCCPQCKTRFRRHRGSPRVEGDEDEDDVDDIENEFNYAQGANKARHQRHGEEFSSSSRHESQPIPLLTHGHTVSGEIRTPDTQSVRTTSGPLGPSDRNAISSPYIDPRQPVPVRIVDPSKDLNSYGLGNVDWKERVEGWKLKQEKNMLQMTGKYHEGKGGEIEGTGSNGEELQMADDTRLPMSRVVPIPSSRLTPYRVVIILRLIILCFFLQYRTTHPVKNAYPLWLTSVICEIWFAFSWLLDQFPKWYPINRETYLDRLAIRYDRDGEPSQLVPVDVFVSTVDPLKEPPLVTANTVLSILSVDYPVDKVACYVSDDGSAMLTFESLSETAEFAKKWVPFCKKFNIEPRAPEFYFAQKIDYLKDKIQPSFVKERRAMKREYEEFKVRINALVAKAQKIPEEGWTMQDGTPWPGNNTRDHPGMIQVFLGHSGGLDTDGNELPRLIYVSREKRPGFQHHKKAGAMNALIRVSAVLTNGAYLLNVDCDHYFNNSKAIKEAMCFMMDPAIGKKCCYVQFPQRFDGIDLHDRYANRNIVFFDINMKGLDGIQGPVYVGTGCCFNRQALYGYDPVLTEEDLEPNIIVKSCCGSRKKGKSSKKYNYEKRRGINRSDSNAPLFNMEDIDEGFEGYDDERSILMSQRSVEKRFGQSPVFIAATFMEQGGIPPTTNPATLLKEAIHVISCGYEDKTEWGKEIGWIYGSVTEDILTGFKMHARGWISIYCNPPRPAFKGSAPINLSDRLNQVLRWALGSIEILLSRHCPIWYGYHGRLRLLERIAYINTIVYPITSIPLIAYCILPAFCLITDRFIIPEISNYASIWFILLFISIAVTGILELRWSGVSIEDWWRNEQFWVIGGTSAHLFAVFQGLLKVLAGIDTNFTVTSKATDEDGDFAELYIFKWTALLIPPTTVLLVNLIGIVAGVSYAVNSGYQSWGPLFGKLFFALWVIAHLYPFLKGLLGRQNRTPTIVIVWSVLLASIFSLLWVRINPFVDANPNANNFNGKGGVF

SEQ ID NO: 45418 - protein, 857 aa, Arabidopsis thaliana
  peptide (1)..(857): Ceres Seq. ID no. 13618887
  misc_feature (1)..(245): Homolog of NCBI NO: 13925884 NR Description: cellulose synthase D-like protein [Nicotiana
  misc_feature (522)..(845): Homolog of NCBI NO: 13925884 NR Description: cellulose synthase D-like protein [Nicotiana
  misc_feature (18)..(245): Homolog of NCBI NO: 15217853 NR Description: cellulose synthase family [Arabidopsis thaliana]
  misc_feature (294)..(839): Homolog of NCBI NO: 15217853 NR Description: cellulose synthase family [Arabidopsis thaliana]
  misc_feature (6)..(245): Homolog of NCBI NO: 15237873 NR Description: cellulose synthase family [Arabidopsis thaliana]
  misc_feature (251)..(851): Homolog of NCBI NO: 15237873 NR Description: cellulose synthase family [Arabidopsis thaliana]
  misc_feature (1)..(245): Homolog of NCBI NO: 27372782 NR Description: cellulose synthase-like protein D4 [Populus
  misc_feature (251)..(839): Homolog of NCBI NO: 27372782 NR Description: cellulose synthase-like protein D4 [Populus
  misc_feature (6)..(245): Homolog of NCBI NO: 15228448 NR Description: cellulose synthase family [Arabidopsis thaliana]
  misc_feature (226)..(839): Homolog of NCBI NO: 15228448 NR Description: cellulose synthase family [Arabidopsis thaliana]
  misc_feature (1)..(245): Homolog of NCBI NO: 13925884 NR Description: cellulose synthase D-like protein [Nicotiana
  misc_feature (522)..(845): Homolog of NCBI NO: 13925884 NR Description: cellulose synthase D-like protein [Nicotiana
  misc_feature (18)..(245): Homolog of NCBI NO: 15217853 NR Description: cellulose synthase family [Arabidopsis thaliana]
  misc_feature (294)..(839): Homolog of NCBI NO: 15217853 NR Description: cellulose synthase family [Arabidopsis thaliana]
  misc_feature (6)..(245): Homolog of NCBI NO: 15237873 NR Description: cellulose synthase family [Arabidopsis thaliana]
  misc_feature (251)..(851): Homolog of NCBI NO: 15237873 NR Description: cellulose synthase family [Arabidopsis thaliana]
  misc_feature (1)..(245): Homolog of NCBI NO: 27372782 NR Description: cellulose synthase-like protein D4 [Populus
  misc_feature (251)..(839): Homolog of NCBI NO: 27372782 NR Description: cellulose synthase-like protein D4 [Populus
  misc_feature (6)..(245): Homolog of NCBI NO: 15228448 NR Description: cellulose synthase family [Arabidopsis thaliana]
  misc_feature (226)..(839): Homolog of NCBI NO: 15228448 NR Description: cellulose synthase family [Arabidopsis thaliana]
  misc_feature (1)..(245): Homolog of NCBI NO: 13925884 NR Description: cellulose synthase D-like protein [Nicotiana
  misc_feature (522)..(845): Homolog of NCBI NO: 13925884 NR Description: cellulose synthase D-like protein [Nicotiana
  misc_feature (18)..(245): Homolog of NCBI NO: 15217853 NR Description: cellulose synthase family [Arabidopsis thaliana]
  misc_feature (294)..(839): Homolog of NCBI NO: 15217853 NR Description: cellulose synthase family [Arabidopsis thaliana]
  misc_feature (6)..(245): Homolog of NCBI NO: 15237873 NR Description: cellulose synthase family [Arabidopsis thaliana]
  misc_feature (251)..(851): Homolog of NCBI NO: 15237873 NR Description: cellulose synthase family [Arabidopsis thaliana]
  misc_feature (1)..(245): Homolog of NCBI NO: 27372782 NR Description: cellulose synthase-like protein D4 [Populus
  misc_feature (251)..(839): Homolog of NCBI NO: 27372782 NR Description: cellulose synthase-like protein D4 [Populus
  misc_feature (6)..(245): Homolog of NCBI NO: 15228448 NR Description: cellulose synthase family [Arabidopsis thaliana]
  misc_feature (226)..(839): Homolog of NCBI NO: 15228448 NR Description: cellulose synthase family [Arabidopsis thaliana]
MLQMTGKYHEGKGGEIEGTGSNGEELQMADDTRLPMSRVVPIPSSRLTPYRVVIILRLIILCFFLQYRTTHPVKNAYPLWLTSVICEIWFAFSWLLDQFPKWYPINRETYLDRLAIRYDRDGEPSQLVPVDVFVSTVDPLKEPPLVTANTVLSILSVDYPVDKVACYVSDDGSAMLTFESLSETAEFAKKWVPFCKKFNIEPRAPEFYFAQKIDYLKDKIQPSFVKERRAMKREYEEFKVRINALVAKAQKIPEEGWTMQDGTPWPGNNTRDHPGMIQVFLGHSGGLDTDGNELPRLIYVSREKRPGFQHHKKAGAMNALIRVSAVLTNGAYLLNVDCDHYFNNSKAIKEAMCFMMDPAIGKKCCYVQFPQRFDGIDLHDRYANRNIVFFDINMKGLDGIQGPVYVGTGCCFNRQALYGYDPVLTEEDLEPNIIVKSCCGSRKKGKSSKKYNYEKRRGINRSDSNAPLFNMEDIDEGFEGYDDERSILMSQRSVEKRFGQSPVFIAATFMEQGGIPPTTNPATLLKEAIHVISCGYEDKTEWGKEIGWIYGSVTEDILTGFKMHARGWISIYCNPPRPAFKGSAPINLSDRLNQVLRWALGSIEILLSRHCPIWYGYHGRLRLLERIAYINTIVYPITSIPLIAYCILPAFCLITDRFIIPEISNYASIWFILLFISIAVTGILELRWSGVSIEDWWRNEQFWVIGGTSAHLFAVFQGLLKVLAGIDTNFTVTSKATDEDGDFAELYIFKWTALLIPPTTVLLVNLIGIVAGVSYAVNSGYQSWGPLFGKLFFALWVIAHLYPFLKGLLGRQNRTPTIVIVWSVLLASIFSLLWVRINPFVDANPNANNFNGKGGVF

SEQ ID NO: 45419 - DNA, 2687 bp, Arabidopsis thaliana
  misc_feature (1)..(2687): Ceres Seq. ID no. 12600411
  misc_feature: MA Experiment ID: 108433 Result: Down-regulated in Transcription
  misc_feature: MA Experiment 108433 PARAMETER Experiment Name: At_rhl_Mutant2_cDNA_P Parameter: Age (day) Value: 7
  misc_feature: MA Experiment 108433 PARAMETER Experiment Name: At_rhl_Mutant2_cDNA_P Parameter: Organism Value: A. thaliana
  misc_feature: MA Experiment 108433 PARAMETER Experiment Name: At_rhl_Mutant2_cDNA_P Parameter: Plant Line Value: rhl Mutant vs. wt landsburg
  misc_feature: MA Experiment 108433 PARAMETER Experiment Name: At_rhl_Mutant2_cDNA_P Parameter: Tissue Value: Roots
  misc_feature: MA Experiment ID: 108434 Result: Up-regulated in Transcription
  misc_feature: MA Experiment 108434 PARAMETER Experiment Name: At_Root_Tips_cDNA_P Parameter: Tissue Value: Root Tips
  misc_feature: MA Experiment ID: 108435 Result: Up-regulated in Transcription
  misc_feature: MA Experiment 108435 PARAMETER Experiment Name: At_stm_Mutants_cDNA_P Parameter: Plant Line Value: wt Landsburg vs stm
  misc_feature: MA Experiment 108435 PARAMETER Experiment Name: At_stm_Mutants_cDNA_P Parameter: Tissue Value: Shoot Apical Meristem Region
  misc_feature: MA Experiment ID: 108461 Result: Up-regulated in Transcription
  misc_feature: MA Experiment 108461 PARAMETER Experiment Name: At_Germinating_Seeds_cDNA_P Parameter: Age (day) Value: 1 vs. 0
  misc_feature: MA Experiment 108461 PARAMETER Experiment Name: At_Germinating_Seeds_cDNA_P Parameter: Tissue Value: Germinating Seeds
  misc_feature: MA Experiment ID: 108462 Result: Up-regulated in Transcription
  misc_feature: MA Experiment 108462 PARAMETER Experiment Name: At_Germinating_Seeds_cDNA_P Parameter: Age (day) Value: 2 vs. 0
  misc_feature: MA Experiment 108462 PARAMETER Experiment Name: At_Germinating_Seeds_cDNA_P Parameter: Tissue Value: Germinating Seeds
  misc_feature: MA Experiment ID: 20000070 Result: Down-regulated in Transcription
  misc_feature: MA Experiment 20000070 PARAMETER Experiment Name: At_100uM_ABA_Mutants_cDNA_P Parameter: Plant Line Value: CS24
  misc_feature: MA Experiment 20000070 PARAMETER Experiment Name: At_100uM_ABA_Mutants_cDNA_P Parameter: Timepoint (hr) Value: 6
  misc_feature: MA Experiment 20000070 PARAMETER Experiment Name: At_100uM_ABA_Mutants_cDNA_P Parameter: Tissue Value: Aerial
  misc_feature: MA Experiment 20000070 PARAMETER Experiment Name: At_100uM_ABA_Mutants_cDNA_P Parameter: Treatment Value: 100uM ABA vs. No Treatment
  misc_feature: MA Experiment ID: 20000071 Result: Down-regulated in Transcription
  misc_feature: MA Experiment 20000071 PARAMETER Experiment Name: At_100uM_ABA_Mutants_cDNA_P Parameter: Plant Line Value: CS8104
  misc_feature: MA Experiment 20000071 PARAMETER Experiment Name: At_100uM_ABA_Mutants_cDNA_P Parameter: Timepoint (hr) Value: 6
  misc_feature: MA Experiment 20000071 PARAMETER Experiment Name: At_100uM_ABA_Mutants_cDNA_P Parameter: Tissue Value: Aerial
  misc_feature: MA Experiment 20000071 PARAMETER Experiment Name: At_100uM_ABA_Mutants_cDNA_P Parameter: Treatment Value: 100uM ABA vs. No Treatment
  misc_feature: MA Experiment ID: 20000117 Result: Down-regulated in Transcription
  misc_feature: MA Experiment 20000117 PARAMETER Experiment Name: At_100uM_ABA_Mutants_cDNA_P Parameter: Plant Line Value: Columbia
  misc_feature: MA Experiment 20000117 PARAMETER Experiment Name: At_100uM_ABA_Mutants_cDNA_P Parameter: Timepoint (hr) Value: 6
  misc_feature: MA Experiment 20000117 PARAMETER Experiment Name: At_100uM_ABA_Mutants_cDNA_P Parameter: Tissue Value: Aerial
  misc_feature: MA Experiment 20000117 PARAMETER Experiment Name: At_100uM_ABA_Mutants_cDNA_P Parameter: Treatment Value: 100uM ABA vs. No Treatment
  misc_feature: MA Experiment ID: 20000169 Result: Down-regulated in Transcription
  misc_feature: MA Experiment 20000169 PARAMETER Experiment Name: At_100uM_ABA_P Parameter: Age (day) Value: 14
  misc_feature: MA Experiment 20000169 PARAMETER Experiment Name: At_100uM_ABA_P Parameter: Organism Value: A. thaliana
  misc_feature: MA Experiment 20000169 PARAMETER Experiment Name: At_100uM_ABA_P Parameter: Plant Line Value: WS
  misc_feature: MA Experiment 20000169 PARAMETER Experiment Name: At_100uM_ABA_P Parameter: Timepoint (hr) Value: 6
  misc_feature: MA Experiment 20000169 PARAMETER Experiment Name: At_100uM_ABA_P Parameter: Tissue Value: Aerial
  misc_feature: MA Experiment 20000169 PARAMETER Experiment Name: At_100uM_ABA_P Parameter: Treatment Value: 100uM ABA vs. No Treatment
  misc_feature: MA Experiment ID: 20000180 Result: Up-regulated in Transcription
  misc_feature: MA Experiment 20000180 PARAMETER Experiment Name: At_Germinating_Seeds_P Parameter: Age (hr) Value: 24 vs. 0
  misc_feature: MA Experiment 20000180 PARAMETER Experiment Name: At_Germinating_Seeds_P Parameter: Tissue Value: Germinating Seeds
  misc_feature: MA Experiment ID: 20000184 Result: Up-regulated in Transcription
  misc_feature: MA Experiment 20000184 PARAMETER Experiment Name: At_Shoots__P Parameter: Age (day) Value: 7
  misc_feature: MA Experiment 20000184 PARAMETER Experiment Name: At_Shoots__P Parameter: Tissue Value: Shoots vs. Whole Plant
  misc_feature: MA Experiment ID: 20000227 Result: Up-regulated in Transcription
  misc_feature: MA Experiment 20000227 PARAMETER Experiment Name: At_Root-Tips-vs-Tops_P Parameter: Tissue Value: Root Tips vs. Root Tops
  misc_feature: MA Experiment ID: 20000234 Result: Up-regulated in Transcription
  misc_feature: MA Experiment 20000234 PARAMETER Experiment Name: At_Siliques_P Parameter: Age (day) Value: 21
  misc_feature: MA Experiment 20000234 PARAMETER Experiment Name: At_Siliques_P Parameter: Organism Value: A. thaliana
  misc_feature: MA Experiment 20000234 PARAMETER Experiment Name: At_Siliques_P Parameter: Plant Line Value: WS
  misc_feature: MA Experiment 20000234 PARAMETER Experiment Name: At_Siliques_P Parameter: Tissue Value: Less Than 5mm Siliques vs. Whole Plant
  misc_feature: MA Experiment ID: 20000235 Result: Up-regulated in Transcription
  misc_feature: MA Experiment 20000235 PARAMETER Experiment Name: At_Siliques_P Parameter: Age (day) Value: 21
  misc_feature: MA Experiment 20000235 PARAMETER Experiment Name: At_Siliques_P Parameter: Organism Value: A. thaliana
  misc_feature: MA Experiment 20000235 PARAMETER Experiment Name: At_Siliques_P Parameter: Plant Line Value: WS
  misc_feature: MA Experiment 20000235 PARAMETER Experiment Name: At_Siliques_P Parameter: Tissue Value: 5-10mm Siliques vs. Whole Plant
  misc_feature: MA Experiment ID: 20000264 Result: Up-regulated in Transcription
  misc_feature: MA Experiment 20000264 PARAMETER Experiment Name: At_Open_Flower_P Parameter: Age (day) Value: 21
  misc_feature: MA Experiment 20000264 PARAMETER Experiment Name: At_Open_Flower_P Parameter: Plant Line Value: WS
  misc_feature: MA Experiment 20000264 PARAMETER Experiment Name: At_Open_Flower_P Parameter: Tissue Value: Open Flower vs. Whole Plant
  misc_feature: MA Experiment ID: 20000265 Result: Up-regulated in Transcription
  misc_feature: MA Experiment 20000265 PARAMETER Experiment Name: At_Open_Flower_P Parameter: Age (day) Value: 21
  misc_feature: MA Experiment 20000265 PARAMETER Experiment Name: At_Open_Flower_P Parameter: Plant Line Value: WS
  misc_feature: MA Experiment 20000265 PARAMETER Experiment Name: At_Open_Flower_P Parameter: Tissue Value: Closed Flower vs. Whole Plant
  misc_feature: MA Experiment ID: 20000286 Result: Up-regulated in Transcription
  misc_feature: MA Experiment 20000286 PARAMETER Experiment Name: At_Open_Flower_P Parameter: Age (day) Value: 21
  misc_feature: MA Experiment 20000286 PARAMETER Experiment Name: At_Open_Flower_P Parameter: Plant Line Value: WS
  misc_feature: MA Experiment 20000286 PARAMETER Experiment Name: At_Open_Flower_P Parameter: Tissue Value: Half Open vs. Whole Plant
  misc_feature: MA Experiment ID: 20000436 Result: Down-regulated in Transcription
  misc_feature: MA Experiment 20000436 PARAMETER Experiment Name: At_Drought_P Parameter: Age (day) Value: 7
  misc_feature: MA Experiment 20000436 PARAMETER Experiment Name: At_Drought_P Parameter: Organism Value: A. thaliana
  misc_feature: MA Experiment 20000436 PARAMETER Experiment Name: At_Drought_P Parameter: Plant Line Value: WS
  misc_feature: MA Experiment 20000436 PARAMETER Experiment Name: At_Drought_P Parameter: Timepoint (hr) Value: 12
  misc_feature: MA Experiment 20000436 PARAMETER Experiment Name: At_Drought_P Parameter: Tissue Value: Whole Plant
  misc_feature: MA Experiment 20000436 PARAMETER Experiment Name: At_Drought_P Parameter: Treatment Value: Drought vs. No Drought
  misc_feature: MA Experiment ID: 20000437 Result: Down-regulated in Transcription
  misc_feature: MA Experiment 20000437 PARAMETER Experiment Name: At_Drought_P Parameter: Age (day) Value: 8
  misc_feature: MA Experiment 20000437 PARAMETER Experiment Name: At_Drought_P Parameter: Organism Value: A. thaliana
  misc_feature: MA Experiment 20000437 PARAMETER Experiment Name: At_Drought_P Parameter: Plant Line Value: WS
  misc_feature: MA Experiment 20000437 PARAMETER Experiment Name: At_Drought_P Parameter: Timepoint (hr) Value: 24
  misc_feature: MA Experiment 20000437 PARAMETER Experiment Name: At_Drought_P Parameter: Tissue Value: Whole Plant
  misc_feature: MA Experiment 20000437 PARAMETER Experiment Name: At_Drought_P Parameter: Treatment Value: Drought vs. No Drought
  misc_feature: MA Experiment ID: 20000445 Result: Down-regulated in Transcription
  misc_feature: MA Experiment 20000445 PARAMETER Experiment Name: At_100uM_NAA__P Parameter: Age (day) Value: 14
  misc_feature: MA Experiment 20000445 PARAMETER Experiment Name: At_100uM_NAA__P Parameter: Organism Value: A. thaliana
  misc_feature: MA Experiment 20000445 PARAMETER Experiment Name: At_100uM_NAA__P Parameter: Plant Line Value: WS
  misc_feature: MA Experiment 20000445 PARAMETER Experiment Name: At_100uM_NAA__P Parameter: Timepoint (hr) Value: 6
  misc_feature: MA Experiment 20000445 PARAMETER Experiment Name: At_100uM_NAA__P Parameter: Tissue Value: Aerial
  misc_feature: MA Experiment 20000445 PARAMETER Experiment Name: At_100uM_NAA__P Parameter: Treatment Value: 100uM NAA vs. No Treatment
  misc_feature: MA Experiment ID: 20000453 Result: Down-regulated in Transcription
  misc_feature: MA Experiment 20000453 PARAMETER Experiment Name: At_100uM_ABA_P Parameter: Age (day) Value: 15
  misc_feature: MA Experiment 20000453 PARAMETER Experiment Name: At_100uM_ABA_P Parameter: Organism Value: A. thaliana
  misc_feature: MA Experiment 20000453 PARAMETER Experiment Name: At_100uM_ABA_P Parameter: Plant Line Value: WS
  misc_feature: MA Experiment 20000453 PARAMETER Experiment Name: At_100uM_ABA_P Parameter: Timepoint (hr) Value: 24
  misc_feature: MA Experiment 20000453 PARAMETER Experiment Name: At_100uM_ABA_P Parameter: Tissue Value: Aerial
  misc_feature: MA Experiment 20000453 PARAMETER Experiment Name: At_100uM_ABA_P Parameter: Treatment Value: 100uM ABA vs. No Treatment
  misc_feature: MA Experiment ID: 20000495 Result: Up-regulated in Transcription
  misc_feature: MA Experiment 20000495 PARAMETER Experiment Name: At_Guard_Cells_P Parameter: Harvest Date Value: 8/2/2002
  misc_feature: MA Experiment 20000495 PARAMETER Experiment Name: At_Guard_Cells_P Parameter: Organism Value: A. thaliana
  misc_feature: MA Experiment 20000495 PARAMETER Experiment Name: At_Guard_Cells_P Parameter: Tissue Value: Guard Cells vs. Leaves
  misc_feature: MA Experiment ID: 20001555 Result: Down-regulated in Transcription
  misc_feature: MA Experiment 20001555 PARAMETER Experiment Name: At_Drought_Soil_Dry_P Parameter: Age (day) Value: 24
  misc_feature: MA Experiment 20001555 PARAMETER Experiment Name: At_Drought_Soil_Dry_P Parameter: Organism Value: A. thaliana
  misc_feature: MA Experiment 20001555 PARAMETER Experiment Name: At_Drought_Soil_Dry_P Parameter: Plant Line Value: WS
  misc_feature: MA Experiment 20001555 PARAMETER Experiment Name: At_Drought_Soil_Dry_P Parameter: Post Timepoint (hr) Value: None
  misc_feature: MA Experiment 20001555 PARAMETER Experiment Name: At_Drought_Soil_Dry_P Parameter: Post-Treatment Value: None
  misc_feature: MA Experiment 20001555 PARAMETER Experiment Name: At_Drought_Soil_Dry_P Parameter: Timepoint (day) Value: 10
  misc_feature: MA Experiment 20001555 PARAMETER Experiment Name: At_Drought_Soil_Dry_P Parameter: Treatment Value: Drought vs. No Drought
  misc_feature: MA Experiment ID: 20001556 Result: Down-regulated in Transcription
  misc_feature: MA Experiment 20001556 PARAMETER Experiment Name: At_Drought_Soil_Dry_P Parameter: Age (day) Value: 26
  misc_feature: MA Experiment 20001556 PARAMETER Experiment Name: At_Drought_Soil_Dry_P Parameter: Organism Value: A. thaliana
  misc_feature: MA Experiment 20001556 PARAMETER Experiment Name: At_Drought_Soil_Dry_P Parameter: Plant Line Value: WS
  misc_feature: MA Experiment 20001556 PARAMETER Experiment Name: At_Drought_Soil_Dry_P Parameter: Post Timepoint (hr) Value: None
  misc_feature: MA Experiment 20001556 PARAMETER Experiment Name: At_Drought_Soil_Dry_P Parameter: Post-Treatment Value: None
  misc_feature: MA Experiment 20001556 PARAMETER Experiment Name: At_Drought_Soil_Dry_P Parameter: Timepoint (day) Value: 12
  misc_feature: MA Experiment 20001556 PARAMETER Experiment Name: At_Drought_Soil_Dry_P Parameter: Treatment Value: Drought vs. No Drought
aaagagagaaaagaaacgttgtagagaaaaaaaggagcagaagaaaacggaggtttttgtttaatttccggatcgtccaaaagtttctcttttttttctcttccttcattgtttcgctgttcctgcgattctgaaactcctcaagctttccattcagaatcgtagcaatggcttttcctctttgattttgtttttgatccgtctctctctctctctctcattgcgtttaaggggtcgctttttttcctcttcatcctcgccgccggcttatggccaactcgccaccaccttcgtcgcgaaatcctccgaagttgttggtggattgttggtcgtttccgtttcttctctctatggttcctactccctcataatttaaggatctgtatcggaataaccgaaacgatctccggtttcggatttgaatattttgggggaaattaaaagaatggggaaaggttggttcatggtagagaaagctagaagatgcttaaggacggtgttcttcatggttgcgatgcttgtctcgctgttagtttcttcgttgcctgtgcttgtagccatcggcgacgttttggttccgacctttttgctttcaagctttacctgtttgacgtgttacggcttcaaggagcatctgagtcgatacgctttcaagagctctttgactgatattcctctcgtctccctcgtcagatctttccttgtcatctgtgtctactctctatccgatgctcctgcactttcgcatggcccttaccttggaactgtatcgctgtgttctgttgtttctgttgttcttctatcagtaaaagcttgcgtttttactgcaaattctcaacttaacgaccaagcctcgtcctctccgtcaaggcaaagactccatctgaaaaagtcttgggggatgccagttttgttcctttcatctgttgtttttgctcttggtcatatggttgttgcttatagaacaagttgcagagctaggaggaaactcttgtatcacagagttgaccctgaagctgttctttcttgcaaaagtgtcttctctggttaccagaaagtcccacgttctccaattcctttggtaggaaaggcctccaaggttgatggcgaggcaagacgaaagctgcatccttcagtatccaacgatgacggagagctacctgcgagattgcttgctgatcttgacagcttattcattacagtcagagggctcactgtgcattacaagatttgcacacctgcttctcctcgccactctatctcctcctcagttgaagccaactctatgcttaatatgccagaggcgatggtgggaaggttgaagcttgacaggaatatattgagcatggtcacgagaaacaagctcaaccatcaccaccataggagctacagcagtctgtttaacaattcttcttccttgcacgaccctctccttgatggtcttcctacttctcctcgtcttttcaaagatattcaggaagaatcgtgccgagaggatggcatcaatgtgtccaattttggtgccacggaacagcaagatgttggtggaaacggccaatttggtgtagtgttggtccatggatttggcggaggagtgttttcttggagacatgtgatgagttctcttgcccatcaacttggctgtgttgtcactgcatttgataggcctggttggggattaaccgccagacctcataaaaaggatttggaagaaagagagatgccaaacccttacactctggataatcaggtagacatgcttcttgccttttgccacgaaatgggatttgcttctgtagtcttggttggccatgatgatggaggtttgcttgctctcaaggctgcacaaagattgctagaaacaaaagatcccatcaaagtcaaaggagtggttttgcttaatgtaagcttgacgagggaagtagtgccagcttttgcaagaatacttctgcacacatcactaggaaagaaacaccttgttcgtccgcttttacgcactgaaatagctcaggtggtgaatcgcagagcttggtatgatcctgccaagatgacaaccgatgtcttaaggctatacaaggcaccacttcatgtggaaggctgggatgaggcacttcacgagataggcagactctcatccgagatggtgcttccaactcaaaatgcattgtcacttctcaaggcagtggaaaacttaccagtattagtcgttgctggagccgaagacgcacttgttcccctcaagtcctcccaagtcatggcttcaaaactcgaaaactctaggctagtagcaatctcaggatgcggacatctgccacatgaggagtgtcccaaggcacttcttgcagccatgtgcccattcataagcagacttgtatttagtgaggactgagtgactgagtgatcactgtacttagtgaggagtgagtgactgagtgatcacttctagttgtcttcttagctcacaatcgattagtgtttgcgagttttttttgtctgccccaaaaggaaagaagttggggtgattgaggtcttagtaagtctgtattcattataagcagagttattgtaacattctctgtttttctcatcagagtttttaatggtttggaataattctgtttattttccacttaagagaagagtggctaaatctttgtaaaattttgcggtagaatacgcgcagtttg

SEQ ID NO: 45420 - protein, 647 aa, Arabidopsis thaliana
  peptide (1)..(647): Ceres Seq. ID no. 12600412
  misc_feature (400)..(637): Pfam Name: alpha/beta hydrolase fold Pfam Description: alpha/beta hydrolase fold
  misc_feature (371)..(466): Homolog of NCBI NO: 6630546 NR Description: putative alpha/beta hydrolase [Arabidopsis
  misc_feature (479)..(639): Homolog of NCBI NO: 6630546 NR Description: putative alpha/beta hydrolase [Arabidopsis
  misc_feature (13)..(194): Homolog of NCBI NO: 30694336 NR Description: expressed protein [Arabidopsis thaliana]
  misc_feature (13)..(205): Homolog of NCBI NO: 30694339 NR Description: expressed protein [Arabidopsis thaliana]
  misc_feature (1)..(205): Homolog of NCBI NO: 30688139 NR Description: expressed protein [Arabidopsis thaliana]
  misc_feature (18)..(342): Homolog of NCBI NO: 25405595 NR Description: unknown protein, 18223-15857 [imported] -
  misc_feature (146)..(643): Homolog of NCBI NO: 25405595 NR Description: unknown protein, 18223-15857 [imported] -
  misc_feature (146)..(643): Homolog of NCBI NO: 22330208 NR Description: unknown protein
  misc_feature (21)..(647): Homolog of NCBI NO: 34911750 NR Description: P0038D11.18 [Oryza sativa (japonica
  misc_feature (1)..(647): Homolog of NCBI NO: 15218212 NR Description: unknown protein
MGKGWFMVEKARRCLRTVFFMVAMLVSLLVSSLPVLVAIGDVLVPTFLLSSFTCLTCYGFKEHLSRYAFKSSLTDIPLVSLVRSFLVICVYSLSDAPALSHGPYLGTVSLCSVVSVVLLSVKACVFTANSQLNDQASSSPSRQRLHLKKSWGMPVLFLSSVVFALGHMVVAYRTSCRARRKLLYHRVDPEAVLSCKSVFSGYQKVPRSPIPLVGKASKVDGEARRKLHPSVSNDDGELPARLLADLDSLFITVRGLTVHYKICTPASPRHSISSSVEANSMLNMPEAMVGRLKLDRNILSMVTRNKLNHHHHRSYSSLFNNSSSLHDPLLDGLPTSPRLFKDIQEESCREDGINVSNFGATEQQDVGGNGQFGVVLVHGFGGGVFSWRHVMSSLAHQLGCVVTAFDRPGWGLTARPHKKDLEEREMPNPYTLDNQVDMLLAFCHEMGFASVVLVGHDDGGLLALKAAQRLLETKDPIKVKGVVLLNVSLTREVVPAFARILLHTSLGKKHLVRPLLRTEIAQVVNRRAWYDPAKMTTDVLRLYKAPLHVEGWDEALHEIGRLSSEMVLPTQNALSLLKAVENLPVLVVAGAEDALVPLKSSQVMASKLENSRLVAISGCGHLPHEECPKALLAAMCPFISRLVFSED

SEQ ID NO: 45421 - protein, 641 aa, Arabidopsis thaliana
  peptide (1)..(641): Ceres Seq. ID no. 12600413
  misc_feature (394)..(631): Pfam Name: alpha/beta hydrolase fold Pfam Description: alpha/beta hydrolase fold
  misc_feature (365)..(460): Homolog of NCBI NO: 6630546 NR Description: putative alpha/beta hydrolase [Arabidopsis
  misc_feature (473)..(633): Homolog of NCBI NO: 6630546 NR Description: putative alpha/beta hydrolase [Arabidopsis
  misc_feature (7)..(188): Homolog of NCBI NO: 30694336 NR Description: expressed protein [Arabidopsis thaliana]
  misc_feature (7)..(199): Homolog of NCBI NO: 30694339 NR Description: expressed protein [Arabidopsis thaliana]
  misc_feature (1)..(199): Homolog of NCBI NO: 30688139 NR Description: expressed protein [Arabidopsis thaliana]
  misc_feature (12)..(336): Homolog of NCBI NO: 25405595 NR Description: unknown protein, 18223-15857 [imported] -
  misc_feature (140)..(637): Homolog of NCBI NO: 25405595 NR Description: unknown protein, 18223-15857 [imported] -
  misc_feature (140)..(637): Homolog of NCBI NO: 22330208 NR Description: unknown protein
  misc_feature (15)..(641): Homolog of NCBI NO: 34911750 NR Description: P0038D11.18 [Oryza sativa (japonica
  misc_feature (1)..(641): Homolog of NCBI NO: 15218212 NR Description: unknown protein
MVEKARRCLRTVFFMVAMLVSLLVSSLPVLVAIGDVLVPTFLLSSFTCLTCYGFKEHLSRYAFKSSLTDIPLVSLVRSFLVICVYSLSDAPALSHGPYLGTVSLCSVVSVVLLSVKACVFTANSQLNDQASSSPSRQRLHLKKSWGMPVLFLSSVVFALGHMVVAYRTSCRARRKLLYHRVDPEAVLSCKSVFSGYQKVPRSPIPLVGKASKVDGEARRKLHPSVSNDDGELPARLLADLDSLFITVRGLTVHYKICTPASPRHSISSSVEANSMLNMPEAMVGRLKLDRNILSMVTRNKLNHHHHRSYSSLFNNSSSLHDPLLDGLPTSPRLFKDIQEESCREDGINVSNFGATEQQDVGGNGQFGVVLVHGFGGGVFSWRHVMSSLAHQLGCVVTAFDRPGWGLTARPHKKDLEEREMPNPYTLDNQVDMLLAFCHEMGFASVVLVGHDDGGLLALKAAQRLLETKDPIKVKGVVLLNVSLTREVVPAFARILLHTSLGKKHLVRPLLRTEIAQVVNRRAWYDPAKMTTDVLRLYKAPLHVEGWDEALHEIGRLSSEMVLPTQNALSLLKAVENLPVLVVAGAEDALVPLKSSQVMASKLENSRLVAISGCGHLPHEECPKALLAAMCPFISRLVFSED

SEQ ID NO: 45422 - protein, 627 aa, Arabidopsis thaliana
  peptide (1)..(627): Ceres Seq. ID no. 12600414
  misc_feature (380)..(617): Pfam Name: alpha/beta hydrolase fold Pfam Description: alpha/beta hydrolase fold
  misc_feature (351)..(446): Homolog of NCBI NO: 6630546 NR Description: putative alpha/beta hydrolase [Arabidopsis
  misc_feature (459)..(619): Homolog of NCBI NO: 6630546 NR Description: putative alpha/beta hydrolase [Arabidopsis
  misc_feature (1)..(174): Homolog of NCBI NO: 30694336 NR Description: expressed protein [Arabidopsis thaliana]
  misc_feature (1)..(185): Homolog of NCBI NO: 30694339 NR Description: expressed protein [Arabidopsis thaliana]
  misc_feature (1)..(185): Homolog of NCBI NO: 30688139 NR Description: expressed protein [Arabidopsis thaliana]
  misc_feature (1)..(322): Homolog of NCBI NO: 25405595 NR Description: unknown protein, 18223-15857 [imported] -
  misc_feature (126)..(623): Homolog of NCBI NO: 25405595 NR Description: unknown protein, 18223-15857 [imported] -
  misc_feature (126)..(623): Homolog of NCBI NO: 22330208 NR Description: unknown protein
  misc_feature (1)..(627): Homolog of NCBI NO: 34911750 NR Description: P0038D11.18 [Oryza sativa (japonica
  misc_feature (1)..(627): Homolog of NCBI NO: 15218212 NR Description: unknown protein
MVAMLVSLLVSSLPVLVAIGDVLVPTFLLSSFTCLTCYGFKEHLSRYAFKSSLTDIPLVSLVRSFLVICVYSLSDAPALSHGPYLGTVSLCSVVSVVLLSVKACVFTANSQLNDQASSSPSRQRLHLKKSWGMPVLFLSSVVFALGHMVVAYRTSCRARRKLLYHRVDPEAVLSCKSVFSGYQKVPRSPIPLVGKASKVDGEARRKLHPSVSNDDGELPARLLADLDSLFITVRGLTVHYKICTPASPRHSISSSVEANSMLNMPEAMVGRLKLDRNILSMVTRNKLNHHHHRSYSSLFNNSSSLHDPLLDGLPTSPRLFKDIQEESCREDGINVSNFGATEQQDVGGNGQFGVVLVHGFGGGVFSWRHVMSSLAHQLGCVVTAFDRPGWGLTARPHKKDLEEREMPNPYTLDNQVDMLLAFCHEMGFASVVLVGHDDGGLLALKAAQRLLETKDPIKVKGVVLLNVSLTREVVPAFARILLHTSLGKKHLVRPLLRTEIAQVVNRRAWYDPAKMTTDVLRLYKAPLHVEGWDEALHEIGRLSSEMVLPTQNALSLLKAVENLPVLVVAGAEDALVPLKSSQVMASKLENSRLVAISGCGHLPHEECPKALLAAMCPFISRLVFSED

SEQ ID NO: 45423 - DNA, 2079 bp, Arabidopsis thaliana
  misc_feature (1)..(2079): Ceres Seq. ID no. 12603831
  misc_feature: MA Experiment ID: 20000179 Result: Up-regulated in Transcription
  misc_feature: MA Experiment 20000179 PARAMETER Experiment Name: At_Germinating_Seeds_P Parameter: Age (hr) Value: 6 vs. 0
  misc_feature: MA Experiment 20000179 PARAMETER Experiment Name: At_Germinating_Seeds_P Parameter: Tissue Value: Germinating Seeds
  misc_feature: MA Experiment ID: 20000185 Result: Up-regulated in Transcription
  misc_feature: MA Experiment 20000185 PARAMETER Experiment Name: At_Roots__P Parameter: Age (day) Value: 7 vs. 21
  misc_feature: MA Experiment 20000185 PARAMETER Experiment Name: At_Roots__P Parameter: Organism Value: A. thaliana
  misc_feature: MA Experiment 20000185 PARAMETER Experiment Name: At_Roots__P Parameter: Tissue Value: Roots vs. Whole Plant
  misc_feature: MA Experiment ID: 20000286 Result: Up-regulated in Transcription
  misc_feature: MA Experiment 20000286 PARAMETER Experiment Name: At_Open_Flower_P Parameter: Age (day) Value: 21
  misc_feature: MA Experiment 20000286 PARAMETER Experiment Name: At_Open_Flower_P Parameter: Plant Line Value: WS
  misc_feature: MA Experiment 20000286 PARAMETER Experiment Name: At_Open_Flower_P Parameter: Tissue Value: Half Open vs. Whole Plant
  misc_feature: MA Experiment ID: 20000439 Result: Up-regulated in Transcription
  misc_feature: MA Experiment 20000439 PARAMETER Experiment Name: At_Roots__P Parameter: Age (day) Value: 14 vs. 21
  misc_feature: MA Experiment 20000439 PARAMETER Experiment Name: At_Roots__P Parameter: Organism Value: A. thaliana
  misc_feature: MA Experiment 20000439 PARAMETER Experiment Name: At_Roots__P Parameter: Tissue Value: Roots vs. Whole Plant
  misc_feature: MA Experiment ID: 20000794 Result: Up-regulated in Transcription
  misc_feature: MA Experiment 20000794 PARAMETER Experiment Name: At_Petals_P Parameter: Age (day) Value: 23-25 days
  misc_feature: MA Experiment 20000794 PARAMETER Experiment Name: At_Petals_P Parameter: Plant Line Value: WS
  misc_feature: MA Experiment 20000794 PARAMETER Experiment Name: At_Petals_P Parameter: Tissue Value: Petals vs. Whole plant
  misc_feature: MA Experiment ID: 20001450 Result: Down-regulated in Transcription
  misc_feature: MA Experiment 20001450 PARAMETER Experiment Name: At_Far-red-induction_P Parameter: Age (day) Value: 7
  misc_feature: MA Experiment 20001450 PARAMETER Experiment Name: At_Far-red-induction_P Parameter: Light Value: Far-red vs. White
  misc_feature: MA Experiment 20001450 PARAMETER Experiment Name: At_Far-red-induction_P Parameter: Organism Value: A. thaliana
  misc_feature: MA Experiment 20001450 PARAMETER Experiment Name: At_Far-red-induction_P Parameter: Plant Line Value: Columbia
  misc_feature: MA Experiment 20001450 PARAMETER Experiment Name: At_Far-red-induction_P Parameter: Timepoint (hr) Value: 8
  misc_feature: MA Experiment 20001450 PARAMETER Experiment Name: At_Far-red-induction_P Parameter: Tissue Value: Whole Plant
  misc_feature: MA Experiment ID: 20001451 Result: Down-regulated in Transcription
  misc_feature: MA Experiment 20001451 PARAMETER Experiment Name: At_Far-red-induction_P Parameter: Age (day) Value: 7
  misc_feature: MA Experiment 20001451 PARAMETER Experiment Name: At_Far-red-induction_P Parameter: Light Value: Far-red vs. White
  misc_feature: MA Experiment 20001451 PARAMETER Experiment Name: At_Far-red-induction_P Parameter: Organism Value: A. thaliana
  misc_feature: MA Experiment 20001451 PARAMETER Experiment Name: At_Far-red-induction_P Parameter: Plant Line Value: Columbia
  misc_feature: MA Experiment 20001451 PARAMETER Experiment Name: At_Far-red-induction_P Parameter: Timepoint (hr) Value: 24
  misc_feature: MA Experiment 20001451 PARAMETER Experiment Name: At_Far-red-induction_P Parameter: Tissue Value: Whole Plant
acgatacaatctggtacatgtaaggcagcattttgccatttctgaaaaacctaaacacaaaactatcttcatcatcatcatcaaatcccagctttcttccaagtgatccttcactctctatactgcgatttaccgttcttctgactcttgttgcgaattcggatcggctgacgcagctccgattgcacaacaatggcttctcgtatcatcaatcattccaaaaagttgaaacatgtttccgctttactgcggcgtgaccatgctgtggcagtccgctgtttctccaacagtacccacccctctctcgttggaagagaagatatcttcaaggcccgcctgaattattcctctgtagagagaatttcaaaatgtggtactggcaatgtaacaatgcttagtggtatttcaacaacgagcacaaaactaagcagcccaatggcaggaccaaaactatttaaagaatttataagctcccagatgcgatcagtgagaggattttcatccagttcagatcttcctcctcatcaagagattggaatgccttctctttcgccaacaatgactgagggtaacattgccaggtggctgaagaaagaaggtgataaagttgctcctggtgaagtgctttgtgaagttgaaactgacaaagcaacagtcgaaatggaatgcatggaagagggttttctcgccaagatagtaaaggaggagggggcaaaagaaattcaagttggggaggtgattgctatcacagttgaagatgaagatgatattcaaaagtttaaagattacacaccctcatccgatactggtcccgctgcgcctgaagcaaaaccagctccttccctaccaaaggaagagaaggtagagaagccagccagtgctcctgaagccaagatctctaagccaagctcagctccttcagaagatcgtatttttgccagtcctcttgcaagaaagttggctgaagataataatgtacctctctcaagcattaaaggcacaggtcctgaaggacggatagtgaaggctgatgtcgaagatttcttagcttcaggcagtaaagaaactactgccaaaccttccaagcaagtggattcaaaggttccagctcttgactatgttgacatccctcacactcagatacgaaaggtcacagcctcacgtttggcattctcaaagcaaactattcctcactactacttgaccgtggatacatgtgttgacaaaatgatgggtcttaggagtcaactcaattcatttcaagaggcttccggtgggaaaaggatatctgtaaatgatcttgttattaaggctgctgcactggctcttcgaaaagttcctcagtgcaatagttcatggacagatgaatacatccgccaatttaaaaatgtgaacatcaatgtcgctgtacaaacagaaaatgggctctacgttcctgtggtcaaggacgcggacaagaaaggactgtctacaattggagaagaggttcgattcttggctcaaaaagcaaaagaaaacagcttgaagccggaagattatgagggaggaacattcacagtctccaacctggggggaccttttggcatcaaacagttctgtgccgtcatcaatccacctcaagcagccattctagcaatcggatctgctgaaaagagagttgttcccggtactggtccagaccaatacaacgttgcttcatacatgtctgtaacactaagctgtgaccaccgcgtaatagatggtgcaattggagccgagtggctgaaagcattcaagggctacatcgagaccccagaatctatgttgctctaaaattcagacgcacacacacatcaaaagctaaactcataagagtcttctgacctcaaatttctttcccacaacatattctaccagatttgatcagcagtaggcaatggcctttaaagttgagtgttttgctattctttaaatcattgagttgacagatttttgtctcaaaataaaatcaggaatccaacaatttcactgtgcacttgttttttggcttaatgcttgttcatcatgggttggcaaaataaaacccatttacttaatttt

SEQ ID NO: 45424 - protein, 539 aa, Arabidopsis thaliana
  peptide (1)..(539): Ceres Seq. ID no. 12603832
  misc_feature (306)..(539): Pfam Name: 2-oxoacid dehydrogenases acyltransferase Pfam Description: 2-oxoacid dehydrogenases acyltransferase
  misc_feature (2)..(539): Homolog of NCBI NO: 34902684 NR Description: contains ESTs
  misc_feature (2)..(539): Homolog of NCBI NO: 33354212 NR Description: unknown protein [Oryza sativa (japonica
  misc_feature (2)..(539): Homolog of NCBI NO: 5669871 NR Description: dihydrolipoamide S-acetyltransferase [Zea mays]
  misc_feature (108)..(539): Homolog of NCBI NO: 25286447 NR Description: hypothetical protein F20D21.4 [imported] -
  misc_feature (2)..(539): Homolog of NCBI NO: 22531144 NR Description: dihydrolipoamide S-acetyltransferase, putative
  misc_feature (2)..(539): Homolog of NCBI NO: 18404837 NR Description: dihydrolipoamide S-acetyltransferase, putative
  misc_feature (2)..(539): Homolog of NCBI NO: 14161722 NR Description: mono-lipoyl E2 [Arabidopsis thaliana]
  misc_feature (1)..(539): Homolog of NCBI NO: 11994364 NR Description: dihydrolipoamide acetyltransferase [Arabidopsis
  misc_feature (1)..(539): Homolog of NCBI NO: 20260138 NR Description: dihydrolipoamide acetyltransferase [Arabidopsis
  misc_feature (1)..(539): Homolog of NCBI NO: 18400212 NR Description: putative acetyltransferase
MASRIINHSKKLKHVSALLRRDHAVAVRCFSNSTHPSLVGREDIFKARLNYSSVERISKCGTGNVTMLSGISTTSTKLSSPMAGPKLFKEFISSQMRSVRGFSSSSDLPPHQEIGMPSLSPTMTEGNIARWLKKEGDKVAPGEVLCEVETDKATVEMECMEEGFLAKIVKEEGAKEIQVGEVIAITVEDEDDIQKFKDYTPSSDTGPAAPEAKPAPSLPKEEKVEKPASAPEAKISKPSSAPSEDRIFASPLARKLAEDNNVPLSSIKGTGPEGRIVKADVEDFLASGSKETTAKPSKQVDSKVPALDYVDIPHTQIRKVTASRLAFSKQTIPHYYLTVDTCVDKMMGLRSQLNSFQEASGGKRISVNDLVIKAAALALRKVPQCNSSWTDEYIRQFKNVNINVAVQTENGLYVPVVKDADKKGLSTIGEEVRFLAQKAKENSLKPEDYEGGTFTVSNLGGPFGIKQFCAVINPPQAAILAIGSAEKRVVPGTGPDQYNVASYMSVTLSCDHRVIDGAIGAEWLKAFKGYIETPESMLL

SEQ ID NO: 45425 - protein, 473 aa, Arabidopsis thaliana
  peptide (1)..(473): Ceres Seq. ID no. 12603833
  misc_feature (240)..(473): Pfam Name: 2-oxoacid dehydrogenases acyltransferase Pfam Description: 2-oxoacid dehydrogenases acyltransferase
  misc_feature (1)..(473): Homolog of NCBI NO: 34902684 NR Description: contains ESTs
  misc_feature (1)..(473): Homolog of NCBI NO: 33354212 NR Description: unknown protein [Oryza sativa (japonica
  misc_feature (1)..(473): Homolog of NCBI NO: 5669871 NR Description: dihydrolipoamide S-acetyltransferase [Zea mays]
  misc_feature (42)..(473): Homolog of NCBI NO: 25286447 NR Description: hypothetical protein F20D21.4 [imported] -
  misc_feature (1)..(473): Homolog of NCBI NO: 22531144 NR Description: dihydrolipoamide S-acetyltransferase, putative
  misc_feature (1)..(473): Homolog of NCBI NO: 18404837 NR Description: dihydrolipoamide S-acetyltransferase, putative
  misc_feature (1)..(473): Homolog of NCBI NO: 14161722 NR Description: mono-lipoyl E2 [Arabidopsis thaliana]
  misc_feature (1)..(473): Homolog of NCBI NO: 11994364 NR Description: dihydrolipoamide acetyltransferase [Arabidopsis
  misc_feature (1)..(473): Homolog of NCBI NO: 20260138 NR Description: dihydrolipoamide acetyltransferase [Arabidopsis
  misc_feature (1)..(473): Homolog of NCBI NO: 18400212 NR Description: putative acetyltransferase
MLSGISTTSTKLSSPMAGPKLFKEFISSQMRSVRGFSSSSDLPPHQEIGMPSLSPTMTEGNIARWLKKEGDKVAPGEVLCEVETDKATVEMECMEEGFLAKIVKEEGAKEIQVGEVIAITVEDEDDIQKFKDYTPSSDTGPAAPEAKPAPSLPKEEKVEKPASAPEAKISKPSSAPSEDRIFASPLARKLAEDNNVPLSSIKGTGPEGRIVKADVEDFLASGSKETTAKPSKQVDSKVPALDYVDIPHTQIRKVTASRLAFSKQTIPHYYLTVDTCVDKMMGLRSQLNSFQEASGGKRISVNDLVIKAAALALRKVPQCNSSWTDEYIRQFKNVNINVAVQTENGLYVPVVKDADKKGLSTIGEEVRFLAQKAKENSLKPEDYEGGTFTVSNLGGPFGIKQFCAVINPPQAAILAIGSAEKRVVPGTGPDQYNVASYMSVTLSCDHRVIDGAIGAEWLKAFKGYIETPESMLL

SEQ ID NO: 45426 - protein, 458 aa, Arabidopsis thaliana
  peptide (1)..(458): Ceres Seq. ID no. 12603834
  misc_feature (225)..(458): Pfam Name: 2-oxoacid dehydrogenases acyltransferase Pfam Description: 2-oxoacid dehydrogenases acyltransferase
  misc_feature (1)..(458): Homolog of NCBI NO: 34902684 NR Description: contains ESTs
  misc_feature (1)..(458): Homolog of NCBI NO: 33354212 NR Description: unknown protein [Oryza sativa (japonica
  misc_feature (1)..(458): Homolog of NCBI NO: 5669871 NR Description: dihydrolipoamide S-acetyltransferase [Zea mays]
  misc_feature (27)..(458): Homolog of NCBI NO: 25286447 NR Description: hypothetical protein F20D21.4 [imported] -
  misc_feature (1)..(458): Homolog of NCBI NO: 22531144 NR Description: dihydrolipoamide S-acetyltransferase, putative
  misc_feature (1)..(458): Homolog of NCBI NO: 18404837 NR Description: dihydrolipoamide S-acetyltransferase, putative
  misc_feature (1)..(458): Homolog of NCBI NO: 14161722 NR Description: mono-lipoyl E2 [Arabidopsis thaliana]
  misc_feature (1)..(458): Homolog of NCBI NO: 11994364 NR Description: dihydrolipoamide acetyltransferase [Arabidopsis
  misc_feature (1)..(458): Homolog of NCBI NO: 20260138 NR Description: dihydrolipoamide acetyltransferase [Arabidopsis
  misc_feature (1)..(458): Homolog of NCBI NO: 18400212 NR Description: putative acetyltransferase
MAGPKLFKEFISSQMRSVRGFSSSSDLPPHQEIGMPSLSPTMTEGNIARWLKKEGDKVAPGEVLCEVETDKATVEMECMEEGFLAKIVKEEGAKEIQVGEVIAITVEDEDDIQKFKDYTPSSDTGPAAPEAKPAPSLPKEEKVEKPASAPEAKISKPSSAPSEDRIFASPLARKLAEDNNVPLSSIKGTGPEGRIVKADVEDFLASGSKETTAKPSKQVDSKVPALDYVDIPHTQIRKVTASRLAFSKQTIPHYYLTVDTCVDKMMGLRSQLNSFQEASGGKRISVNDLVIKAAALALRKVPQCNSSWTDEYIRQFKNVNINVAVQTENGLYVPVVKDADKKGLSTIGEEVRFLAQKAKENSLKPEDYEGGTFTVSNLGGPFGIKQFCAVINPPQAAILAIGSAEKRVVPGTGPDQYNVASYMSVTLSCDHRVIDGAIGAEWLKAFKGYIETPESMLL

SEQ ID NO: 45427 - DNA, 1586 bp, Arabidopsis thaliana
  misc_feature (1)..(1586): Ceres Seq. ID no. 13646588
  misc_feature: MA Experiment ID: 108434 Result: Down-regulated in Transcription
  misc_feature: MA Experiment 108434 PARAMETER Experiment Name: At_Root_Tips_cDNA_P Parameter: Tissue Value: Root Tips
  misc_feature: MA Experiment ID: 108488 Result: Down-regulated in Transcription
  misc_feature: MA Experiment ID: 108574 Result: Up-regulated in Transcription
  misc_feature: MA Experiment 108574 PARAMETER Experiment Name: At_Wounding__cDNA_P Parameter: Timepoint (hr) Value: 1
  misc_feature: MA Experiment 108574 PARAMETER Experiment Name: At_Wounding__cDNA_P Parameter: Tissue Value: Aerial
  misc_feature: MA Experiment 108574 PARAMETER Experiment Name: At_Wounding__cDNA_P Parameter: Treatment Value: Wounding vs. No Wounding
  misc_feature: MA Experiment ID: 108595 Result: Up-regulated in Transcription
  misc_feature: MA Experiment 108595 PARAMETER Experiment Name: At_Ler-pi_Ovule_cDNA_P Parameter: Plant Line Value: null
  misc_feature: MA Experiment ID: 20000069 Result: Up-regulated in Transcription
  misc_feature: MA Experiment 20000069 PARAMETER Experiment Name: At_100uM_ABA_Mutants_cDNA_P Parameter: Plant Line Value: CS23
  misc_feature: MA Experiment 20000069 PARAMETER Experiment Name: At_100uM_ABA_Mutants_cDNA_P Parameter: Timepoint (hr) Value: 6
  misc_feature: MA Experiment 20000069 PARAMETER Experiment Name: At_100uM_ABA_Mutants_cDNA_P Parameter: Tissue Value: Aerial
  misc_feature: MA Experiment 20000069 PARAMETER Experiment Name: At_100uM_ABA_Mutants_cDNA_P Parameter: Treatment Value: 100uM ABA vs. No Treatment
  misc_feature: MA Experiment ID: 20000185 Result: Up-regulated in Transcription
  misc_feature: MA Experiment 20000185 PARAMETER Experiment Name: At_Roots__P Parameter: Age (day) Value: 7 vs. 21
  misc_feature: MA Experiment 20000185 PARAMETER Experiment Name: At_Roots__P Parameter: Organism Value: A. thaliana
  misc_feature: MA Experiment 20000185 PARAMETER Experiment Name: At_Roots__P Parameter: Tissue Value: Roots vs. Whole Plant
  misc_feature: MA Experiment ID: 20000265 Result: Up-regulated in Transcription
  misc_feature: MA Experiment 20000265 PARAMETER Experiment Name: At_Open_Flower_P Parameter: Age (day) Value: 21
  misc_feature: MA Experiment 20000265 PARAMETER Experiment Name: At_Open_Flower_P Parameter: Plant Line Value: WS
  misc_feature: MA Experiment 20000265 PARAMETER Experiment Name: At_Open_Flower_P Parameter: Tissue Value: Closed Flower vs. Whole Plant
  misc_feature: MA Experiment ID: 20000286 Result: Up-regulated in Transcription
  misc_feature: MA Experiment 20000286 PARAMETER Experiment Name: At_Open_Flower_P Parameter: Age (day) Value: 21
  misc_feature: MA Experiment 20000286 PARAMETER Experiment Name: At_Open_Flower_P Parameter: Plant Line Value: WS
  misc_feature: MA Experiment 20000286 PARAMETER Experiment Name: At_Open_Flower_P Parameter: Tissue Value: Half Open vs. Whole Plant
  misc_feature: MA Experiment ID: 20000437 Result: Up-regulated in Transcription
  misc_feature: MA Experiment 20000437 PARAMETER Experiment Name: At_Drought_P Parameter: Age (day) Value: 8
  misc_feature: MA Experiment 20000437 PARAMETER Experiment Name: At_Drought_P Parameter: Organism Value: A. thaliana
  misc_feature: MA Experiment 20000437 PARAMETER Experiment Name: At_Drought_P Parameter: Plant Line Value: WS
  misc_feature: MA Experiment 20000437 PARAMETER Experiment Name: At_Drought_P Parameter: Timepoint (hr) Value: 24
  misc_feature: MA Experiment 20000437 PARAMETER Experiment Name: At_Drought_P Parameter: Tissue Value: Whole Plant
  misc_feature: MA Experiment 20000437 PARAMETER Experiment Name: At_Drought_P Parameter: Treatment Value: Drought vs. No Drought
  misc_feature: MA Experiment ID: 20000439 Result: Up-regulated in Transcription
  misc_feature: MA Experiment 20000439 PARAMETER Experiment Name: At_Roots__P Parameter: Age (day) Value: 14 vs. 21
  misc_feature: MA Experiment 20000439 PARAMETER Experiment Name: At_Roots__P Parameter: Organism Value: A. thaliana
  misc_feature: MA Experiment 20000439 PARAMETER Experiment Name: At_Roots__P Parameter: Tissue Value: Roots vs. Whole Plant
  misc_feature: MA Experiment ID: 20001556 Result: Up-regulated in Transcription
  misc_feature: MA Experiment 20001556 PARAMETER Experiment Name: At_Drought_Soil_Dry_P Parameter: Age (day) Value: 26
  misc_feature: MA Experiment 20001556 PARAMETER Experiment Name: At_Drought_Soil_Dry_P Parameter: Organism Value: A. thaliana
  misc_feature: MA Experiment 20001556 PARAMETER Experiment Name: At_Drought_Soil_Dry_P Parameter: Plant Line Value: WS
  misc_feature: MA Experiment 20001556 PARAMETER Experiment Name: At_Drought_Soil_Dry_P Parameter: Post Timepoint (hr) Value: None
  misc_feature: MA Experiment 20001556 PARAMETER Experiment Name: At_Drought_Soil_Dry_P Parameter: Post-Treatment Value: None
  misc_feature: MA Experiment 20001556 PARAMETER Experiment Name: At_Drought_Soil_Dry_P Parameter: Timepoint (day) Value: 12
  misc_feature: MA Experiment 20001556 PARAMETER Experiment Name: At_Drought_Soil_Dry_P Parameter: Treatment Value: Drought vs. No Drought
  misc_feature: MA Experiment ID: 20001757 Result: Down-regulated in Transcription
  misc_feature: MA Experiment 20001757 PARAMETER Experiment Name: At_50mM_NH4NO3_L-to-H_P Parameter: Timepoint (hr) Value: 6
  misc_feature: MA Experiment 20001757 PARAMETER Experiment Name: At_50mM_NH4NO3_L-to-H_P Parameter: Tissue Value: Leaf
  misc_feature: MA Experiment 20001757 PARAMETER Experiment Name: At_50mM_NH4NO3_L-to-H_P Parameter: Treatment Value: 50mM NH4NO3 vs 100mM Mannitol
  misc_feature: MA Experiment ID: 20001904 Result: Up-regulated in Transcription
  misc_feature: MA Experiment 20001904 PARAMETER Experiment Name: At_Drought_Reproduction_P Parameter: Age (day) Value: 37
  misc_feature: MA Experiment 20001904 PARAMETER Experiment Name: At_Drought_Reproduction_P Parameter: Organism Value: A. thaliana
  misc_feature: MA Experiment 20001904 PARAMETER Experiment Name: At_Drought_Reproduction_P Parameter: Plant Line Value: WS
  misc_feature: MA Experiment 20001904 PARAMETER Experiment Name: At_Drought_Reproduction_P Parameter: Timepoint (day) Value: 7
  misc_feature: MA Experiment 20001904 PARAMETER Experiment Name: At_Drought_Reproduction_P Parameter: Tissue Value: Rosettes
  misc_feature: MA Experiment 20001904 PARAMETER Experiment Name: At_Drought_Reproduction_P Parameter: Treatment Value: Drought vs. No Drought
  misc_feature: MA Experiment ID: 20001905 Result: Up-regulated in Transcription
  misc_feature: MA Experiment 20001905 PARAMETER Experiment Name: At_Drought_Reproduction_P Parameter: Age (day) Value: 40
  misc_feature: MA Experiment 20001905 PARAMETER Experiment Name: At_Drought_Reproduction_P Parameter: Organism Value: A. thaliana
  misc_feature: MA Experiment 20001905 PARAMETER Experiment Name: At_Drought_Reproduction_P Parameter: Plant Line Value: WS
  misc_feature: MA Experiment 20001905 PARAMETER Experiment Name: At_Drought_Reproduction_P Parameter: Timepoint (day) Value: 10
  misc_feature: MA Experiment 20001905 PARAMETER Experiment Name: At_Drought_Reproduction_P Parameter: Tissue Value: Rosettes
  misc_feature: MA Experiment 20001905 PARAMETER Experiment Name: At_Drought_Reproduction_P Parameter: Treatment Value: Drought vs. No Drought
actagtccccccccccccaaataaatataactcccgtatttgattctttcttcaagatatcaatcaagatcaagagtaagacagagacacaaaggcgagagctatgtcgtcgtcggtggatttcgtgacggaacaggggagatgcggcgacgatggtaacggcgccggagagacagtaaagaatggcgaaattgatcatttgctttccgaaccgtcggctccgactatttctctccctacggaatctttcctcagagcagcgacgttactcaagaaccaggttctggaggccacgtggaaaggtggtgtcgaagctcttgcctctggttcgggtccagtgctggatccgactgtgtacacaggactactcggcacagcgttcacctgcttgaagtcgtacgaggtaacgcggaaccatcaagatctgctaacttgcgcagagataatcgacacgtgtgccaacgttgcgcgtgccacaaccaggcacgtgacatttttatgtggaagaggaggagtttgtacgcttggtgcaattgtagccaattacagaggggaccaatcaaagcgtgacttcttcctcggtctttttcttgagcttgcagaagagagagagttaccagcaggaccagaggaaggaggatttgggatgtcatatgaccttctctatggaagagcgggtttcctttgggctgctctgttcctaaaccgatatctcggccaaggaactgttcctgaccatctcttatcacccattgttgcagccatcttagccggtgggcgagttggagctgcagatcatgaagcttgtcctctgttatacaggtttcacggaacgcgattttggggtgctgcgaatggattagctggaatcttgtatgtattgctgcattttccactatcggaagaggatgttaaagatgttcaagggacattgaggtatatgatgagtaataggtttccgaacagcggaaactacccgtgcagcgaagggaatccgagggataagctagtccaatgggctcatggagcaaccggcatggccattactttggctaaagcatctcaggtgtttcccaaggaaagggatttccgcgaagcagccattgaagcaggagaagtagtgtggaagagtggcttggtgaagaaggtaggtttagccgatggagttgctggtaatgcctacgctttcttatccctttatcgcttaaccggagatgttgtatatgaagagagagcaaaagcgtttgcgagttacttgtgccgtgatgcgatagagctcgtgaatatgacaagccaagaaacagaacatgattattcgcttttccggggactagctggaccagtatgcctctggttcgatcttgtgtcaccggtagattctaagtttcctggttatgagatataatttaaaacaggtaatagataaaccgtaggttctattatgactatctctttgtgaaaggatcttaggttctccggtttattccactttctataatctattgaagtaacttgagatttgggagaaaaaaaaaaaaaaaaaaactcgagggggggcccggtacccaattcgccctatagtgatg

SEQ ID NO: 45428 - protein, 433 aa, Arabidopsis thaliana
  peptide (1)..(433): Ceres Seq. ID no. 13646589
  misc_feature (56)..(433): Pfam Name: Lanthionine synthetase C-like protein Pfam Description: Lanthionine synthetase C-like protein
  misc_feature (56)..(433): Pfam Name: Lanthionine synthetase C-like protein Pfam Description: Lanthionine synthetase C-like protein
  misc_feature (81)..(433): Homolog of NCBI NO: 8923911 NR Description: LanC lantibiotic synthetase component C-like 2
  misc_feature (81)..(433): Homolog of NCBI NO: 19526936 NR Description: RIKEN cDNA 1700003F10 [Mus musculus]
  misc_feature (69)..(433): Homolog of NCBI NO: 25411993 NR Description: hypothetical protein At2g20770 [imported] -
  misc_feature (56)..(433): Homolog of NCBI NO: 30681129 NR Description: expressed protein [Arabidopsis thaliana]
  misc_feature (79)..(433): Homolog of NCBI NO: 37535720 NR Description: putative lanthionine synthetase
  misc_feature (81)..(433): Homolog of NCBI NO: 8923911 NR Description: LanC lantibiotic synthetase component C-like 2
  misc_feature (69)..(433): Homolog of NCBI NO: 25411993 NR Description: hypothetical protein At2g20770 [imported] -
  misc_feature (79)..(433): Homolog of NCBI NO: 37535720 NR Description: putative lanthionine synthetase
  misc_feature (1)..(433): Homolog of NCBI NO: 15238395 NR Description: G protein-coupled receptor-related protein
  misc_feature (1)..(433): Homolog of NCBI NO: 15451140 NR Description: G protein-coupled receptor-like protein
  misc_feature (2)..(433): Homolog of NCBI NO: 8489877 NR Description: putative 7-transmembrane G-protein-coupled
  misc_feature (42)..(433): Homolog of NCBI NO: 21742091 NR Description: OSJNBa0074L08.13 [Oryza sativa (japonica
  misc_feature (79)..(433): Homolog of NCBI NO: 15219126 NR Description: G protein-coupled receptor -related [Arabidopsis
  misc_feature (56)..(433): Homolog of NCBI NO: 30681129 NR Description: expressed protein [Arabidopsis thaliana]
  misc_feature (81)..(433): Homolog of NCBI NO: 19526936 NR Description: RIKEN cDNA 1700003F10 [Mus musculus]
  misc_feature (79)..(433): Homolog of NCBI NO: 15219126 NR Description: G protein-coupled receptor -related [Arabidopsis
  misc_feature (42)..(433): Homolog of NCBI NO: 21742091 NR Description: OSJNBa0074L08.13 [Oryza sativa (japonica
  misc_feature (2)..(433): Homolog of NCBI NO: 8489877 NR Description: putative 7-transmembrane G-protein-coupled
  misc_feature (1)..(433): Homolog of NCBI NO: 15451140 NR Description: G protein-coupled receptor-like protein
  misc_feature (1)..(433): Homolog of NCBI NO: 15238395 NR Description: G protein-coupled receptor-related protein
MSSSVDFVTEQGRCGDDGNGAGETVKNGEIDHLLSEPSAPTISLPTESFLRAATLLKNQVLEATWKGGVEALASGSGPVLDPTVYTGLLGTAFTCLKSYEVTRNHQDLLTCAEIIDTCANVARATTRHVTFLCGRGGVCTLGAIVANYRGDQSKRDFFLGLFLELAEERELPAGPEEGGFGMSYDLLYGRAGFLWAALFLNRYLGQGTVPDHLLSPIVAAILAGGRVGAADHEACPLLYRFHGTRFWGAANGLAGILYVLLHFPLSEEDVKDVQGTLRYMMSNRFPNSGNYPCSEGNPRDKLVQWAHGATGMAITLAKASQVFPKERDFREAAIEAGEVVWKSGLVKKVGLADGVAGNAYAFLSLYRLTGDVVYEERAKAFASYLCRDAIELVNMTSQETEHDYSLFRGLAGPVCLWFDLVSPVDSKFPGYEI

SEQ ID NO: 45429 - protein, 252 aa, Arabidopsis thaliana
  peptide (1)..(252): Ceres Seq. ID no. 13646590
  misc_feature (1)..(252): Pfam Name: Lanthionine synthetase C-like protein Pfam Description: Lanthionine synthetase C-like protein
  misc_feature (1)..(252): Pfam Name: Lanthionine synthetase C-like protein Pfam Description: Lanthionine synthetase C-like protein
  misc_feature (1)..(252): Homolog of NCBI NO: 8923911 NR Description: LanC lantibiotic synthetase component C-like 2
  misc_feature (1)..(252): Homolog of NCBI NO: 19526936 NR Description: RIKEN cDNA 1700003F10 [Mus musculus]
  misc_feature (1)..(252): Homolog of NCBI NO: 25411993 NR Description: hypothetical protein At2g20770 [imported] -
  misc_feature (1)..(252): Homolog of NCBI NO: 30681129 NR Description: expressed protein [Arabidopsis thaliana]
  misc_feature (1)..(252): Homolog of NCBI NO: 37535720 NR Description: putative lanthionine synthetase
  misc_feature (1)..(252): Homolog of NCBI NO: 8923911 NR Description: LanC lantibiotic synthetase component C-like 2
  misc_feature (1)..(252): Homolog of NCBI NO: 25411993 NR Description: hypothetical protein At2g20770 [imported] -
  misc_feature (1)..(252): Homolog of NCBI NO: 37535720 NR Description: putative lanthionine synthetase
  misc_feature (1)..(252): Homolog of NCBI NO: 15238395 NR Description: G protein-coupled receptor-related protein
  misc_feature (1)..(252): Homolog of NCBI NO: 15451140 NR Description: G protein-coupled receptor-like protein
  misc_feature (1)..(252): Homolog of NCBI NO: 8489877 NR Description: putative 7-transmembrane G-protein-coupled
  misc_feature (1)..(252): Homolog of NCBI NO: 21742091 NR Description: OSJNBa0074L08.13 [Oryza sativa (japonica
  misc_feature (1)..(252): Homolog of NCBI NO: 15219126 NR Description: G protein-coupled receptor -related [Arabidopsis
  misc_feature (1)..(252): Homolog of NCBI NO: 30681129 NR Description: expressed protein [Arabidopsis thaliana]
  misc_feature (1)..(252): Homolog of NCBI NO: 19526936 NR Description: RIKEN cDNA 1700003F10 [Mus musculus]
  misc_feature (1)..(252): Homolog of NCBI NO: 15219126 NR Description: G protein-coupled receptor -related [Arabidopsis
  misc_feature (1)..(252): Homolog of NCBI NO: 21742091 NR Description: OSJNBa0074L08.13 [Oryza sativa (japonica
  misc_feature (1)..(252): Homolog of NCBI NO: 8489877 NR Description: putative 7-transmembrane G-protein-coupled
  misc_feature (1)..(252): Homolog of NCBI NO: 15451140 NR Description: G protein-coupled receptor-like protein
  misc_feature (1)..(252): Homolog of NCBI NO: 15238395 NR Description: G protein-coupled receptor-related protein
MSYDLLYGRAGFLWAALFLNRYLGQGTVPDHLLSPIVAAILAGGRVGAADHEACPLLYRFHGTRFWGAANGLAGILYVLLHFPLSEEDVKDVQGTLRYMMSNRFPNSGNYPCSEGNPRDKLVQWAHGATGMAITLAKASQVFPKERDFREAAIEAGEVVWKSGLVKKVGLADGVAGNAYAFLSLYRLTGDVVYEERAKAFASYLCRDAIELVNMTSQETEHDYSLFRGLAGPVCLWFDLVSPVDSKFPGYEI

SEQ ID NO: 45430 - DNA, 2301 bp, Arabidopsis thaliana; identical to SEQ ID NO: 45244
  misc_feature (1)..(2301): Ceres Seq. ID no. 12560567
  misc_feature: MA Experiment ID: 20000171 Result: Down-regulated in Transcription
  misc_feature: MA Experiment 20000171 PARAMETER Experiment Name: At_42deg_Heat_P Parameter: Age (day) Value: 14
  misc_feature: MA Experiment 20000171 PARAMETER Experiment Name: At_42deg_Heat_P Parameter: Organism Value: A. thaliana
  misc_feature: MA Experiment 20000171 PARAMETER Experiment Name: At_42deg_Heat_P Parameter: Plant Line Value: WS
  misc_feature: MA Experiment 20000171 PARAMETER Experiment Name: At_42deg_Heat_P Parameter: Temperature (deg C) Value: 42 vs. 22
  misc_feature: MA Experiment 20000171 PARAMETER Experiment Name: At_42deg_Heat_P Parameter: Timepoint (hr) Value: 1
  misc_feature: MA Experiment 20000171 PARAMETER Experiment Name: At_42deg_Heat_P Parameter: Tissue Value: Aerial
  misc_feature: MA Experiment ID: 20000173 Result: Down-regulated in Transcription
  misc_feature: MA Experiment 20000173 PARAMETER Experiment Name: At_42deg_Heat_P Parameter: Age (day) Value: 14
  misc_feature: MA Experiment 20000173 PARAMETER Experiment Name: At_42deg_Heat_P Parameter: Organism Value: A. thaliana
  misc_feature: MA Experiment 20000173 PARAMETER Experiment Name: At_42deg_Heat_P Parameter: Plant Line Value: WS
  misc_feature: MA Experiment 20000173 PARAMETER Experiment Name: At_42deg_Heat_P Parameter: Temperature (deg C) Value: 42 vs. 22
  misc_feature: MA Experiment 20000173 PARAMETER Experiment Name: At_42deg_Heat_P Parameter: Timepoint (hr) Value: 6
  misc_feature: MA Experiment 20000173 PARAMETER Experiment Name: At_42deg_Heat_P Parameter: Tissue Value: Aerial
  misc_feature: MA Experiment ID: 20000439 Result: Up-regulated in Transcription
  misc_feature: MA Experiment 20000439 PARAMETER Experiment Name: At_Roots__P Parameter: Age (day) Value: 14 vs. 21
  misc_feature: MA Experiment 20000439 PARAMETER Experiment Name: At_Roots__P Parameter: Organism Value: A. thaliana
  misc_feature: MA Experiment 20000439 PARAMETER Experiment Name: At_Roots__P Parameter: Tissue Value: Roots vs. Whole Plant
  misc_feature: MA Experiment ID: 20000495 Result: Up-regulated in Transcription
  misc_feature: MA Experiment 20000495 PARAMETER Experiment Name: At_Guard_Cells_P Parameter: Harvest Date Value: 8/2/2002
  misc_feature: MA Experiment 20000495 PARAMETER Experiment Name: At_Guard_Cells_P Parameter: Organism Value: A. thaliana
  misc_feature: MA Experiment 20000495 PARAMETER Experiment Name: At_Guard_Cells_P Parameter: Tissue Value: Guard Cells vs. Leaves
  misc_feature: MA Experiment ID: 20001248 Result: Up-regulated in Transcription
  misc_feature: MA Experiment 20001248 PARAMETER Experiment Name: At_Far-red-induction_P Parameter: Age (day) Value: 7
  misc_feature: MA Experiment 20001248 PARAMETER Experiment Name: At_Far-red-induction_P Parameter: Light Value: Far-red vs. White
  misc_feature: MA Experiment 20001248 PARAMETER Experiment Name: At_Far-red-induction_P Parameter: Organism Value: A. thaliana
  misc_feature: MA Experiment 20001248 PARAMETER Experiment Name: At_Far-red-induction_P Parameter: Plant Line Value: Columbia
  misc_feature: MA Experiment 20001248 PARAMETER Experiment Name: At_Far-red-induction_P Parameter: Timepoint (hr) Value: 4
  misc_feature: MA Experiment 20001248 PARAMETER Experiment Name: At_Far-red-induction_P Parameter: Tissue Value: Whole Plant
  misc_feature: MA Experiment ID: 20001450 Result: Up-regulated in Transcription
  misc_feature: MA Experiment 20001450 PARAMETER Experiment Name: At_Far-red-induction_P Parameter: Age (day) Value: 7
  misc_feature: MA Experiment 20001450 PARAMETER Experiment Name: At_Far-red-induction_P Parameter: Light Value: Far-red vs. White
  misc_feature: MA Experiment 20001450 PARAMETER Experiment Name: At_Far-red-induction_P Parameter: Organism Value: A. thaliana
  misc_feature: MA Experiment 20001450 PARAMETER Experiment Name: At_Far-red-induction_P Parameter: Plant Line Value: Columbia
  misc_feature: MA Experiment 20001450 PARAMETER Experiment Name: At_Far-red-induction_P Parameter: Timepoint (hr) Value: 8
  misc_feature: MA Experiment 20001450 PARAMETER Experiment Name: At_Far-red-induction_P Parameter: Tissue Value: Whole Plant

SEQ ID NO: 45431 - protein, 613 aa, Arabidopsis thaliana; identical to SEQ ID NO: 45245
  peptide (1)..(613): Ceres Seq. ID no. 12560568
  misc_feature (158)..(307): Pfam Name: GAF domain Pfam Description: GAF domain
  misc_feature (158)..(307): Pfam Name: GAF domain Pfam Description: GAF domain
  misc_feature (1)..(586): Homolog of NCBI NO: 18252341 NR Description: putative ethylene receptor [Pyrus communis]
  misc_feature (1)..(595): Homolog of NCBI NO: 18539222 NR Description: ethylene receptor [Delphinium 'MagicFountains
  misc_feature (1)..(600): Homolog of NCBI NO: 4092526 NR Description: putative ethylene receptor [Citrus sinensis]
  misc_feature (1)..(595): Homolog of NCBI NO: 4164161 NR Description: ethylene response sensor [Passiflora edulis]
  misc_feature (1)..(610): Homolog of NCBI NO: 22036194 NR Description: ethylene-responsive sensor [Prunus persica]
  misc_feature (1)..(586): Homolog of NCBI NO: 18252341 NR Description: putative ethylene receptor [Pyrus communis]
  misc_feature (1)..(600): Homolog of NCBI NO: 4092526 NR Description: putative ethylene receptor [Citrus sinensis]
  misc_feature (1)..(610): Homolog of NCBI NO: 22036194 NR Description: ethylene-responsive sensor [Prunus persica]
  misc_feature (1)..(613): Homolog of NCBI NO: 7488578 NR Description: probable ethylene receptor, ERS-type - wild
  misc_feature (1)..(595): Homolog of NCBI NO: 11935116 NR Description: ethylene receptor [Carica papaya]
  misc_feature (1)..(594): Homolog of NCBI NO: 2745902 NR Description: ERS-like ethylene receptor [Pisum sativum]
  misc_feature (1)..(594): Homolog of NCBI NO: 7488803 NR Description: ethylene receptor - garden pea
  misc_feature (1)..(594): Homolog of NCBI NO: 4138853 NR Description: ethylene response sensor [Vigna radiata]
  misc_feature (1)..(595): Homolog of NCBI NO: 4164161 NR Description: ethylene response sensor [Passiflora edulis]
  misc_feature (1)..(595): Homolog of NCBI NO: 18539222 NR Description: ethylene receptor [Delphinium 'MagicFountains
  misc_feature (1)..(594): Homolog of NCBI NO: 4138853 NR Description: ethylene response sensor [Vigna radiata]
  misc_feature (1)..(594): Homolog of NCBI NO: 7488803 NR Description: ethylene receptor - garden pea
  misc_feature (1)..(594): Homolog of NCBI NO: 2745902 NR Description: ERS-like ethylene receptor [Pisum sativum]
  misc_feature (1)..(595): Homolog of NCBI NO: 11935116 NR Description: ethylene receptor [Carica papaya]
  misc_feature (1)..(613): Homolog of NCBI NO: 7488578 NR Description: probable ethylene receptor, ERS-type - wild

SEQ ID NO: 45432 - protein, 558 aa, Arabidopsis thaliana; identical to SEQ ID NO: 45246
  peptide (1)..(558): Ceres Seq. ID no. 12560569
  misc_feature (103)..(252): Pfam Name: GAF domain Pfam Description: GAF domain
  misc_feature (103)..(252): Pfam Name: GAF domain Pfam Description: GAF domain
  misc_feature (1)..(531): Homolog of NCBI NO: 18252341 NR Description: putative ethylene receptor [Pyrus communis]
  misc_feature (1)..(540): Homolog of NCBI NO: 18539222 NR Description: ethylene receptor [Delphinium 'MagicFountains
  misc_feature (1)..(545): Homolog of NCBI NO: 4092526 NR Description: putative ethylene receptor [Citrus sinensis]
  misc_feature (1)..(540): Homolog of NCBI NO: 4164161 NR Description: ethylene response sensor [Passiflora edulis]
  misc_feature (1)..(555): Homolog of NCBI NO: 22036194 NR Description: ethylene-responsive sensor [Prunus persica]
  misc_feature (1)..(531): Homolog of NCBI NO: 18252341 NR Description: putative ethylene receptor [Pyrus communis]
  misc_feature (1)..(545): Homolog of NCBI NO: 4092526 NR Description: putative ethylene receptor [Citrus sinensis]
  misc_feature (1)..(555): Homolog of NCBI NO: 22036194 NR Description: ethylene-responsive sensor [Prunus persica]
  misc_feature (1)..(558): Homolog of NCBI NO: 7488578 NR Description: probable ethylene receptor, ERS-type - wild
  misc_feature (1)..(540): Homolog of NCBI NO: 11935116 NR Description: ethylene receptor [Carica papaya]
  misc_feature (1)..(539): Homolog of NCBI NO: 2745902 NR Description: ERS-like ethylene receptor [Pisum sativum]
  misc_feature (1)..(539): Homolog of NCBI NO: 7488803 NR Description: ethylene receptor - garden pea
  misc_feature (1)..(539): Homolog of NCBI NO: 4138853 NR Description: ethylene response sensor [Vigna radiata]
  misc_feature (1)..(540): Homolog of NCBI NO: 4164161 NR Description: ethylene response sensor [Passiflora edulis]
  misc_feature (1)..(540): Homolog of NCBI NO: 18539222 NR Description: ethylene receptor [Delphinium 'MagicFountains
  misc_feature (1)..(539): Homolog of NCBI NO: 4138853 NR Description: ethylene response sensor [Vigna radiata]
  misc_feature (1)..(539): Homolog of NCBI NO: 7488803 NR Description: ethylene receptor - garden pea
  misc_feature (1)..(539): Homolog of NCBI NO: 2745902 NR Description: ERS-like ethylene receptor [Pisum sativum]
  misc_feature (1)..(540): Homolog of NCBI NO: 11935116 NR Description: ethylene receptor [Carica papaya]
  misc_feature (1)..(558): Homolog of NCBI NO: 7488578 NR Description: probable ethylene receptor, ERS-type - wild

SEQ ID NO: 45433 - protein, 539 aa, Arabidopsis thaliana; identical to SEQ ID NO: 45247
  peptide (1)..(539): Ceres Seq. ID no. 12560570
  misc_feature (84)..(233): Pfam Name: GAF domain Pfam Description: GAF domain
  misc_feature (84)..(233): Pfam Name: GAF domain Pfam Description: GAF domain
  misc_feature (1)..(512): Homolog of NCBI NO: 18252341 NR Description: putative ethylene receptor [Pyrus communis]
  misc_feature (1)..(521): Homolog of NCBI NO: 18539222 NR Description: ethylene receptor [Delphinium 'MagicFountains
  misc_feature (1)..(526): Homolog of NCBI NO: 4092526 NR Description: putative ethylene receptor [Citrus sinensis]
  misc_feature (1)..(521): Homolog of NCBI NO: 4164161 NR Description: ethylene response sensor [Passiflora edulis]
  misc_feature (1)..(536): Homolog of NCBI NO: 22036194 NR Description: ethylene-responsive sensor [Prunus persica]
  misc_feature (1)..(512): Homolog of NCBI NO: 18252341 NR Description: putative ethylene receptor [Pyrus communis]
  misc_feature (1)..(526): Homolog of NCBI NO: 4092526 NR Description: putative ethylene receptor [Citrus sinensis]
  misc_feature (1)..(536): Homolog of NCBI NO: 22036194 NR Description: ethylene-responsive sensor [Prunus persica]
  misc_feature (1)..(539): Homolog of NCBI NO: 7488578 NR Description: probable ethylene receptor, ERS-type - wild
  misc_feature (1)..(521): Homolog of NCBI NO: 11935116 NR Description: ethylene receptor [Carica papaya]
  misc_feature (1)..(520): Homolog of NCBI NO: 2745902 NR Description: ERS-like ethylene receptor [Pisum sativum]
  misc_feature (1)..(520): Homolog of NCBI NO: 7488803 NR Description: ethylene receptor - garden pea
  misc_feature (1)..(520): Homolog of NCBI NO: 4138853 NR Description: ethylene response sensor [Vigna radiata]
  misc_feature (1)..(521): Homolog of NCBI NO: 4164161 NR Description: ethylene response sensor [Passiflora edulis]
  misc_feature (1)..(521): Homolog of NCBI NO: 18539222 NR Description: ethylene receptor [Delphinium 'MagicFountains
  misc_feature (1)..(520): Homolog of NCBI NO: 4138853 NR Description: ethylene response sensor [Vigna radiata]
  misc_feature (1)..(520): Homolog of NCBI NO: 7488803 NR Description: ethylene receptor - garden pea
  misc_feature (1)..(520): Homolog of NCBI NO: 2745902 NR Description: ERS-like ethylene receptor [Pisum sativum]
  misc_feature (1)..(521): Homolog of NCBI NO: 11935116 NR Description: ethylene receptor [Carica papaya]
  misc_feature (1)..(539): Homolog of NCBI NO: 7488578 NR Description: probable ethylene receptor, ERS-type - wild

SEQ ID NO: 45434 - DNA, 2274 bp, Arabidopsis thaliana; identical to SEQ ID NO: 25855
  misc_feature (1)..(2274): Ceres Seq. ID no. 13591529
  misc_feature: MA Experiment ID: 20000327 Result: Up-regulated in Transcription
  misc_feature: MA Experiment 20000327 PARAMETER Experiment Name: At_42deg_Heat_Sub_P Parameter: Age (day) Value: 14
  misc_feature: MA Experiment 20000327 PARAMETER Experiment Name: At_42deg_Heat_Sub_P Parameter: Organism Value: A. thaliana
  misc_feature: MA Experiment 20000327 PARAMETER Experiment Name: At_42deg_Heat_Sub_P Parameter: Plant Line Value: WS
  misc_feature: MA Experiment 20000327 PARAMETER Experiment Name: At_42deg_Heat_Sub_P Parameter: Temperature (deg C) Value: 42 vs. 22
  misc_feature: MA Experiment 20000327 PARAMETER Experiment Name: At_42deg_Heat_Sub_P Parameter: Timepoint (hr) Value: 1
  misc_feature: MA Experiment 20000327 PARAMETER Experiment Name: At_42deg_Heat_Sub_P Parameter: Tissue Value: Aerial
  misc_feature: MA Experiment ID: 20000328 Result: Up-regulated in Transcription
  misc_feature: MA Experiment 20000328 PARAMETER Experiment Name: At_42deg_Heat_Sub_P Parameter: Age (day) Value: 14
  misc_feature: MA Experiment 20000328 PARAMETER Experiment Name: At_42deg_Heat_Sub_P Parameter: Organism Value: A. thaliana
  misc_feature: MA Experiment 20000328 PARAMETER Experiment Name: At_42deg_Heat_Sub_P Parameter: Plant Line Value: WS
  misc_feature: MA Experiment 20000328 PARAMETER Experiment Name: At_42deg_Heat_Sub_P Parameter: Temperature (deg C) Value: 42 vs. 22
  misc_feature: MA Experiment 20000328 PARAMETER Experiment Name: At_42deg_Heat_Sub_P Parameter: Timepoint (hr) Value: 6
  misc_feature: MA Experiment 20000328 PARAMETER Experiment Name: At_42deg_Heat_Sub_P Parameter: Tissue Value: Aerial

SEQ ID NO: 45435 - protein, 690 aa, Arabidopsis thaliana; identical to SEQ ID NO: 25856
  peptide (1)..(690): Ceres Seq. ID no. 13591530
  misc_feature (55)..(676): Homolog of NCBI NO: 14423732 NR Description: Heat shock 70 kDa protein
  misc_feature (56)..(677): Homolog of NCBI NO: 21263753 NR Description: Heat shock cognate 71 kDa protein (Hsc70.1)
  misc_feature (220)..(690): Homolog of NCBI NO: 168424 NR Description: polypeptide chain-binding protein
  misc_feature (36)..(690): Homolog of NCBI NO: 23480384 NR Description: heat shock protein [Plasmodium yoelii yoelii]
  misc_feature (2)..(690): Homolog of NCBI NO: 29539338 NR Description: Heat shock 70 kDa protein [Cyanidioschyzon
  misc_feature (58)..(690): Homolog of NCBI NO: 1037176 NR Description: immunoglobulin heavy chain binding protein
  misc_feature (14)..(685): Homolog of NCBI NO: 13897312 NR Description: luminal binding protein, BiP [Scherffelia dubia]
  misc_feature (55)..(676): Homolog of NCBI NO: 14423732 NR Description: Heat shock 70 kDa protein
  misc_feature (56)..(677): Homolog of NCBI NO: 21263753 NR Description: Heat shock cognate 71 kDa protein (Hsc70.1)
  misc_feature (220)..(690): Homolog of NCBI NO: 168424 NR Description: polypeptide chain-binding protein
  misc_feature (36)..(690): Homolog of NCBI NO: 23480384 NR Description: heat shock protein [Plasmodium yoelii yoelii]
  misc_feature (2)..(690): Homolog of NCBI NO: 29539338 NR Description: Heat shock 70 kDa protein [Cyanidioschyzon
  misc_feature (58)..(690): Homolog of NCBI NO: 1037176 NR Description: immunoglobulin heavy chain binding protein
  misc_feature (14)..(685): Homolog of NCBI NO: 13897312 NR Description: luminal binding protein, BiP [Scherffelia dubia]

SEQ ID NO: 45436 - protein, 669 aa, Arabidopsis thaliana; identical to SEQ ID NO: 25857
  peptide (1)..(669): Ceres Seq. ID no. 13591531
  misc_feature (34)..(655): Homolog of NCBI NO: 14423732 NR Description: Heat shock 70 kDa protein
  misc_feature (35)..(656): Homolog of NCBI NO: 21263753 NR Description: Heat shock cognate 71 kDa protein (Hsc70.1)
  misc_feature (199)..(669): Homolog of NCBI NO: 168424 NR Description: polypeptide chain-binding protein
  misc_feature (15)..(669): Homolog of NCBI NO: 23480384 NR Description: heat shock protein [Plasmodium yoelii yoelii]
  misc_feature (1)..(669): Homolog of NCBI NO: 29539338 NR Description: Heat shock 70 kDa protein [Cyanidioschyzon
  misc_feature (37)..(669): Homolog of NCBI NO: 1037176 NR Description: immunoglobulin heavy chain binding protein
  misc_feature (1)..(664): Homolog of NCBI NO: 13897312 NR Description: luminal binding protein, BiP [Scherffelia dubia]
  misc_feature (34)..(655): Homolog of NCBI NO: 14423732 NR Description: Heat shock 70 kDa protein
  misc_feature (35)..(656): Homolog of NCBI NO: 21263753 NR Description: Heat shock cognate 71 kDa protein (Hsc70.1)
  misc_feature (199)..(669): Homolog of NCBI NO: 168424 NR Description: polypeptide chain-binding protein
  misc_feature (15)..(669): Homolog of NCBI NO: 23480384 NR Description: heat shock protein [Plasmodium yoelii yoelii]
  misc_feature (1)..(669): Homolog of NCBI NO: 29539338 NR Description: Heat shock 70 kDa protein [Cyanidioschyzon
  misc_feature (37)..(669): Homolog of NCBI NO: 1037176 NR Description: immunoglobulin heavy chain binding protein
  misc_feature (1)..(664): Homolog of NCBI NO: 13897312 NR Description: luminal binding protein, BiP [Scherffelia dubia]

SEQ ID NO: 45437 - protein, 516 aa, Arabidopsis thaliana; identical to SEQ ID NO: 25858
  peptide (1)..(516): Ceres Seq. ID no. 13591532
  misc_feature (1)..(502): Homolog of NCBI NO: 14423732 NR Description: Heat shock 70 kDa protein
  misc_feature (1)..(503): Homolog of NCBI NO: 21263753 NR Description: Heat shock cognate 71 kDa protein (Hsc70.1)
  misc_feature (46)..(516): Homolog of NCBI NO: 168424 NR Description: polypeptide chain-binding protein
  misc_feature (1)..(516): Homolog of NCBI NO: 23480384 NR Description: heat shock protein [Plasmodium yoelii yoelii]
  misc_feature (1)..(516): Homolog of NCBI NO: 29539338 NR Description: Heat shock 70 kDa protein [Cyanidioschyzon
  misc_feature (1)..(516): Homolog of NCBI NO: 1037176 NR Description: immunoglobulin heavy chain binding protein
  misc_feature (1)..(511): Homolog of NCBI NO: 13897312 NR Description: luminal binding protein, BiP [Scherffelia dubia]
  misc_feature (1)..(502): Homolog of NCBI NO: 14423732 NR Description: Heat shock 70 kDa protein
  misc_feature (1)..(503): Homolog of NCBI NO: 21263753 NR Description: Heat shock cognate 71 kDa protein (Hsc70.1)
  misc_feature (46)..(516): Homolog of NCBI NO: 168424 NR Description: polypeptide chain-binding protein
  misc_feature (1)..(516): Homolog of NCBI NO: 23480384 NR Description: heat shock protein [Plasmodium yoelii yoelii]
  misc_feature (1)..(516): Homolog of NCBI NO: 29539338 NR Description: Heat shock 70 kDa protein [Cyanidioschyzon
  misc_feature (1)..(516): Homolog of NCBI NO: 1037176 NR Description: immunoglobulin heavy chain binding protein
  misc_feature (1)..(511): Homolog of NCBI NO: 13897312 NR Description: luminal binding protein, BiP [Scherffelia dubia]

SEQ ID NO: 45438 - DNA, 1197 bp, Arabidopsis thaliana
  misc_feature (1)..(1197): Ceres Seq. ID no. 12606693
  misc_feature: MA Experiment ID: 108434 Result: Down-regulated in Transcription
  misc_feature: MA Experiment 108434 PARAMETER Experiment Name: At_Root_Tips_cDNA_P Parameter: Tissue Value: Root Tips
  misc_feature: MA Experiment ID: 108435 Result: Down-regulated in Transcription
  misc_feature: MA Experiment 108435 PARAMETER Experiment Name: At_stm_Mutants_cDNA_P Parameter: Plant Line Value: wt Landsburg vs stm
  misc_feature: MA Experiment 108435 PARAMETER Experiment Name: At_stm_Mutants_cDNA_P Parameter: Tissue Value: Shoot Apical Meristem Region
  misc_feature: MA Experiment ID: 108461 Result: Up-regulated in Transcription
  misc_feature: MA Experiment 108461 PARAMETER Experiment Name: At_Germinating_Seeds_cDNA_P Parameter: Age (day) Value: 1 vs. 0
  misc_feature: MA Experiment 108461 PARAMETER Experiment Name: At_Germinating_Seeds_cDNA_P Parameter: Tissue Value: Germinating Seeds
  misc_feature: MA Experiment ID: 108462 Result: Up-regulated in Transcription
  misc_feature: MA Experiment 108462 PARAMETER Experiment Name: At_Germinating_Seeds_cDNA_P Parameter: Age (day) Value: 2 vs. 0
  misc_feature: MA Experiment 108462 PARAMETER Experiment Name: At_Germinating_Seeds_cDNA_P Parameter: Tissue Value: Germinating Seeds
  misc_feature: MA Experiment ID: 108463 Result: Up-regulated in Transcription
  misc_feature: MA Experiment 108463 PARAMETER Experiment Name: At_Germinating_Seeds_cDNA_P Parameter: Age (day) Value: 3 vs. 0
  misc_feature: MA Experiment 108463 PARAMETER Experiment Name: At_Germinating_Seeds_cDNA_P Parameter: Tissue Value: Germinating Seeds
  misc_feature: MA Experiment ID: 108464 Result: Up-regulated in Transcription
  misc_feature: MA Experiment 108464 PARAMETER Experiment Name: At_Germinating_Seeds_cDNA_P Parameter: Age (day) Value: 4 vs. 0
  misc_feature: MA Experiment 108464 PARAMETER Experiment Name: At_Germinating_Seeds_cDNA_P Parameter: Tissue Value: Germinating Seeds
  misc_feature: MA Experiment ID: 108473 Result: Down-regulated in Transcription
  misc_feature: MA Experiment 108473 PARAMETER Experiment Name: At_Drought_Flowers_cDNA_P Parameter: Timepoint (hr) Value: 7 d
  misc_feature: MA Experiment 108473 PARAMETER Experiment Name: At_Drought_Flowers_cDNA_P Parameter: Tissue Value: Flower
  misc_feature: MA Experiment 108473 PARAMETER Experiment Name: At_Drought_Flowers_cDNA_P Parameter: Treatment Value: Drought vs. No Drought
  misc_feature: MA Experiment ID: 108561 Result: Down-regulated in Transcription
  misc_feature: MA Experiment 108561 PARAMETER Experiment Name: At_100uM_ABA_cDNA_P Parameter: Timepoint (hr) Value: 6
  misc_feature: MA Experiment 108561 PARAMETER Experiment Name: At_100uM_ABA_cDNA_P Parameter: Tissue Value: Aerial
  misc_feature: MA Experiment 108561 PARAMETER Experiment Name: At_100uM_ABA_cDNA_P Parameter: Treatment Value: 100uM ABA vs. No Treatment
  misc_feature: MA Experiment ID: 108572 Result: Down-regulated in Transcription
  misc_feature: MA Experiment 108572 PARAMETER Experiment Name: At_Drought_cDNA_P Parameter: Timepoint (hr) Value: 1
  misc_feature: MA Experiment 108572 PARAMETER Experiment Name: At_Drought_cDNA_P Parameter: Tissue Value: Aerial
  misc_feature: MA Experiment 108572 PARAMETER Experiment Name: At_Drought_cDNA_P Parameter: Treatment Value: Drought vs. No Drought
  misc_feature: MA Experiment ID: 108573 Result: Down-regulated in Transcription
  misc_feature: MA Experiment 108573 PARAMETER Experiment Name: At_Drought_cDNA_P Parameter: Timepoint (hr) Value: 6
  misc_feature: MA Experiment 108573 PARAMETER Experiment Name: At_Drought_cDNA_P Parameter: Tissue Value: Aerial
  misc_feature: MA Experiment 108573 PARAMETER Experiment Name: At_Drought_cDNA_P Parameter: Treatment Value: Drought vs. No Drought
  misc_feature: MA Experiment ID: 108577 Result: Down-regulated in Transcription
  misc_feature: MA Experiment 108577 PARAMETER Experiment Name: At_42deg_Heat_cDNA_P Parameter: Temperature (deg C) Value: 42 vs. 22
  misc_feature: MA Experiment 108577 PARAMETER Experiment Name: At_42deg_Heat_cDNA_P Parameter: Timepoint (hr) Value: 6
  misc_feature: MA Experiment 108577 PARAMETER Experiment Name: At_42deg_Heat_cDNA_P Parameter: Tissue Value: Aerial
  misc_feature: MA Experiment ID: 108579 Result: Up-regulated in Transcription
  misc_feature: MA Experiment 108579 PARAMETER Experiment Name: At_4deg_Cold_cDNA_P Parameter: Temperature (deg C) Value: 4 vs. 22
  misc_feature: MA Experiment 108579 PARAMETER Experiment Name: At_4deg_Cold_cDNA_P Parameter: Timepoint (hr) Value: 6
  misc_feature: MA Experiment 108579 PARAMETER Experiment Name: At_4deg_Cold_cDNA_P Parameter: Tissue Value: Aerial
  misc_feature: MA Experiment ID: 108595 Result: Down-regulated in Transcription
  misc_feature: MA Experiment 108595 PARAMETER Experiment Name: At_Ler-pi_Ovule_cDNA_P Parameter: Plant Line Value: null
  misc_feature: MA Experiment ID: 108668 Result: Down-regulated in Transcription
  misc_feature: MA Experiment 108668 PARAMETER Experiment Name: At_2mM_SA_cDNA_P Parameter: Plant Line Value: WS
  misc_feature: MA Experiment 108668 PARAMETER Experiment Name: At_2mM_SA_cDNA_P Parameter: Timepoint (hr) Value: 6
  misc_feature: MA Experiment 108668 PARAMETER Experiment Name: At_2mM_SA_cDNA_P Parameter: Treatment Value: 2mM SA vs. No Treatment
  misc_feature: MA Experiment ID: 20000069 Result: Down-regulated in Transcription
  misc_feature: MA Experiment 20000069 PARAMETER Experiment Name: At_100uM_ABA_Mutants_cDNA_P Parameter: Plant Line Value: CS23
  misc_feature: MA Experiment 20000069 PARAMETER Experiment Name: At_100uM_ABA_Mutants_cDNA_P Parameter: Timepoint (hr) Value: 6
  misc_feature: MA Experiment 20000069 PARAMETER Experiment Name: At_100uM_ABA_Mutants_cDNA_P Parameter: Tissue Value: Aerial
  misc_feature: MA Experiment 20000069 PARAMETER Experiment Name: At_100uM_ABA_Mutants_cDNA_P Parameter: Treatment Value: 100uM ABA vs. No Treatment
  misc_feature: MA Experiment ID: 20000070 Result: Down-regulated in Transcription
  misc_feature: MA Experiment 20000070 PARAMETER Experiment Name: At_100uM_ABA_Mutants_cDNA_P Parameter: Plant Line Value: CS24
  misc_feature: MA Experiment 20000070 PARAMETER Experiment Name: At_100uM_ABA_Mutants_cDNA_P Parameter: Timepoint (hr) Value: 6
  misc_feature: MA Experiment 20000070 PARAMETER Experiment Name: At_100uM_ABA_Mutants_cDNA_P Parameter: Tissue Value: Aerial
  misc_feature: MA Experiment 20000070 PARAMETER Experiment Name: At_100uM_ABA_Mutants_cDNA_P Parameter: Treatment Value: 100uM ABA vs. No Treatment
  misc_feature: MA Experiment ID: 20000071 Result: Down-regulated in Transcription
  misc_feature: MA Experiment 20000071 PARAMETER Experiment Name: At_100uM_ABA_Mutants_cDNA_P Parameter: Plant Line Value: CS8104
  misc_feature: MA Experiment 20000071 PARAMETER Experiment Name: At_100uM_ABA_Mutants_cDNA_P Parameter: Timepoint (hr) Value: 6
  misc_feature: MA Experiment 20000071 PARAMETER Experiment Name: At_100uM_ABA_Mutants_cDNA_P Parameter: Tissue Value: Aerial
  misc_feature: MA Experiment 20000071 PARAMETER Experiment Name: At_100uM_ABA_Mutants_cDNA_P Parameter: Treatment Value: 100uM ABA vs. No Treatment
  misc_feature: MA Experiment ID: 20000072 Result: Down-regulated in Transcription
  misc_feature: MA Experiment 20000072 PARAMETER Experiment Name: At_100uM_ABA_Mutants_cDNA_P Parameter: Plant Line Value: CS8105
  misc_feature: MA Experiment 20000072 PARAMETER Experiment Name: At_100uM_ABA_Mutants_cDNA_P Parameter: Timepoint (hr) Value: 6
  misc_feature: MA Experiment 20000072 PARAMETER Experiment Name: At_100uM_ABA_Mutants_cDNA_P Parameter: Tissue Value: Aerial
  misc_feature: MA Experiment 20000072 PARAMETER Experiment Name: At_100uM_ABA_Mutants_cDNA_P Parameter: Treatment Value: 100uM ABA vs. No Treatment
  misc_feature: MA Experiment ID: 20000086 Result: Down-regulated in Transcription
  misc_feature: MA Experiment 20000086 PARAMETER Experiment Name: At_100uM_ABA_Mutants_cDNA_P Parameter: Plant Line Value: CS22
  misc_feature: MA Experiment 20000086 PARAMETER Experiment Name: At_100uM_ABA_Mutants_cDNA_P Parameter: Timepoint (hr) Value: 6
  misc_feature: MA Experiment 20000086 PARAMETER Experiment Name: At_100uM_ABA_Mutants_cDNA_P Parameter: Tissue Value: Aerial
  misc_feature: MA Experiment 20000086 PARAMETER Experiment Name: At_100uM_ABA_Mutants_cDNA_P Parameter: Treatment Value: 100uM ABA vs. No Treatment
  misc_feature: MA Experiment ID: 20000087 Result: Down-regulated in Transcription
  misc_feature: MA Experiment 20000087 PARAMETER Experiment Name: At_100uM_ABA_Mutants_cDNA_P Parameter: Plant Line Value: WS
  misc_feature: MA Experiment 20000087 PARAMETER Experiment Name: At_100uM_ABA_Mutants_cDNA_P Parameter: Timepoint (hr) Value: 6
  misc_feature: MA Experiment 20000087 PARAMETER Experiment Name: At_100uM_ABA_Mutants_cDNA_P Parameter: Tissue Value: Aerial
  misc_feature: MA Experiment 20000087 PARAMETER Experiment Name: At_100uM_ABA_Mutants_cDNA_P Parameter: Treatment Value: 100uM ABA vs. No Treatment
  misc_feature: MA Experiment ID: 20000088 Result: Down-regulated in Transcription
  misc_feature: MA Experiment 20000088 PARAMETER Experiment Name: At_100uM_ABA_Mutants_cDNA_P Parameter: Plant Line Value: Landsberg
  misc_feature: MA Experiment 20000088 PARAMETER Experiment Name: At_100uM_ABA_Mutants_cDNA_P Parameter: Timepoint (hr) Value: 6
  misc_feature: MA Experiment 20000088 PARAMETER Experiment Name: At_100uM_ABA_Mutants_cDNA_P Parameter: Tissue Value: Aerial
  misc_feature: MA Experiment 20000088 PARAMETER Experiment Name: At_100uM_ABA_Mutants_cDNA_P Parameter: Treatment Value: 100uM ABA vs. No Treatment
  misc_feature: MA Experiment ID: 20000090 Result: Down-regulated in Transcription
  misc_feature: MA Experiment ID: 20000111 Result: Down-regulated in Transcription
  misc_feature: MA Experiment 20000111 PARAMETER Experiment Name: At_42deg_Heat_cDNA_P Parameter: Temperature (deg C) Value: 42 vs. 22
  misc_feature: MA Experiment 20000111 PARAMETER Experiment Name: At_42deg_Heat_cDNA_P Parameter: Timepoint (hr) Value: 6
  misc_feature: MA Experiment 20000111 PARAMETER Experiment Name: At_42deg_Heat_cDNA_P Parameter: Tissue Value: Aerial
  misc_feature: MA Experiment ID: 20000113 Result: Down-regulated in Transcription
  misc_feature: MA Experiment 20000113 PARAMETER Experiment Name: At_42deg_Heat_cDNA_P Parameter: Temperature (deg C) Value: 42 vs. 22
  misc_feature: MA Experiment 20000113 PARAMETER Experiment Name: At_42deg_Heat_cDNA_P Parameter: Timepoint (hr) Value: 8
  misc_feature: MA Experiment 20000113 PARAMETER Experiment Name: At_42deg_Heat_cDNA_P Parameter: Tissue Value: Aerial
  misc_feature: MA Experiment ID: 20000117 Result: Down-regulated in Transcription
  misc_feature: MA Experiment 20000117 PARAMETER Experiment Name: At_100uM_ABA_Mutants_cDNA_P Parameter: Plant Line Value: Columbia
  misc_feature: MA Experiment 20000117 PARAMETER Experiment Name: At_100uM_ABA_Mutants_cDNA_P Parameter: Timepoint (hr) Value: 6
  misc_feature: MA Experiment 20000117 PARAMETER Experiment Name: At_100uM_ABA_Mutants_cDNA_P Parameter: Tissue Value: Aerial
  misc_feature: MA Experiment 20000117 PARAMETER Experiment Name: At_100uM_ABA_Mutants_cDNA_P Parameter: Treatment Value: 100uM ABA vs. No Treatment
  misc_feature: MA Experiment ID: 20000144 Result: Down-regulated in Transcription
  misc_feature: MA Experiment 20000144 PARAMETER Experiment Name: At_42deg_Heat_cDNA_P Parameter: Temperature (deg C) Value: 42 vs. 22
  misc_feature: MA Experiment 20000144 PARAMETER Experiment Name: At_42deg_Heat_cDNA_P Parameter: Timepoint (hr) Value: 1
  misc_feature: MA Experiment 20000144 PARAMETER Experiment Name: At_42deg_Heat_cDNA_P Parameter: Tissue Value: Aerial
  misc_feature: MA Experiment ID: 20000169 Result: Down-regulated in Transcription
  misc_feature: MA Experiment 20000169 PARAMETER Experiment Name: At_100uM_ABA_P Parameter: Age (day) Value: 14
  misc_feature: MA Experiment 20000169 PARAMETER Experiment Name: At_100uM_ABA_P Parameter: Organism Value: A. thaliana
  misc_feature: MA Experiment 20000169 PARAMETER Experiment Name: At_100uM_ABA_P Parameter: Plant Line Value: WS
  misc_feature: MA Experiment 20000169 PARAMETER Experiment Name: At_100uM_ABA_P Parameter: Timepoint (hr) Value: 6
  misc_feature: MA Experiment 20000169 PARAMETER Experiment Name: At_100uM_ABA_P Parameter: Tissue Value: Aerial
  misc_feature: MA Experiment 20000169 PARAMETER Experiment Name: At_100uM_ABA_P Parameter: Treatment Value: 100uM ABA vs. No Treatment
  misc_feature: MA Experiment ID: 20000180 Result: Up-regulated in Transcription
  misc_feature: MA Experiment 20000180 PARAMETER Experiment Name: At_Germinating_Seeds_P Parameter: Age (hr) Value: 24 vs. 0
  misc_feature: MA Experiment 20000180 PARAMETER Experiment Name: At_Germinating_Seeds_P Parameter: Tissue Value: Germinating Seeds
  misc_feature: MA Experiment ID: 20000182 Result: Down-regulated in Transcription
  misc_feature: MA Experiment 20000182 PARAMETER Experiment Name: At_2mM_SA_P Parameter: Age (day) Value: 14
  misc_feature: MA Experiment 20000182 PARAMETER Experiment Name: At_2mM_SA_P Parameter: Organism Value: A. thaliana
  misc_feature: MA Experiment 20000182 PARAMETER Experiment Name: At_2mM_SA_P Parameter: Plant Line Value: WS
  misc_feature: MA Experiment 20000182 PARAMETER Experiment Name: At_2mM_SA_P Parameter: Timepoint (hr) Value: 6
  misc_feature: MA Experiment 20000182 PARAMETER Experiment Name: At_2mM_SA_P Parameter: Tissue Value: Aerial
  misc_feature: MA Experiment 20000182 PARAMETER Experiment Name: At_2mM_SA_P Parameter: Treatment Value: 2mM SA vs. No Treatment
  misc_feature: MA Experiment ID: 20000184 Result: Up-regulated in Transcription
  misc_feature: MA Experiment 20000184 PARAMETER Experiment Name: At_Shoots__P Parameter: Age (day) Value: 7
  misc_feature: MA Experiment 20000184 PARAMETER Experiment Name: At_Shoots__P Parameter: Tissue Value: Shoots vs. Whole Plant
  misc_feature: MA Experiment ID: 20000185 Result: Down-regulated in Transcription
  misc_feature: MA Experiment 20000185 PARAMETER Experiment Name: At_Roots__P Parameter: Age (day) Value: 7 vs. 21
  misc_feature: MA Experiment 20000185 PARAMETER Experiment Name: At_Roots__P Parameter: Organism Value: A. thaliana
  misc_feature: MA Experiment 20000185 PARAMETER Experiment Name: At_Roots__P Parameter: Tissue Value: Roots vs. Whole Plant
  misc_feature: MA Experiment ID: 20000214 Result: Up-regulated in Transcription
  misc_feature: MA Experiment 20000214 PARAMETER Experiment Name: At_4deg_Cold_P Parameter: Timepoint (hr) Value: 6
  misc_feature: MA Experiment ID: 20000234 Result: Up-regulated in Transcription
  misc_feature: MA Experiment 20000234 PARAMETER Experiment Name: At_Siliques_P Parameter: Age (day) Value: 21
  misc_feature: MA Experiment 20000234 PARAMETER Experiment Name: At_Siliques_P Parameter: Organism Value: A. thaliana
  misc_feature: MA Experiment 20000234 PARAMETER Experiment Name: At_Siliques_P Parameter: Plant Line Value: WS
  misc_feature: MA Experiment 20000234 PARAMETER Experiment Name: At_Siliques_P Parameter: Tissue Value: Less Than 5mm Siliques vs. Whole Plant
  misc_feature: MA Experiment ID: 20000267 Result: Down-regulated in Transcription
  misc_feature: MA Experiment 20000267 PARAMETER Experiment Name: At_Drought_P Parameter: Age (day) Value: 7
  misc_feature: MA Experiment 20000267 PARAMETER Experiment Name: At_Drought_P Parameter: Organism Value: A. thaliana
  misc_feature: MA Experiment 20000267 PARAMETER Experiment Name: At_Drought_P Parameter: Plant Line Value: WS
  misc_feature: MA Experiment 20000267 PARAMETER Experiment Name: At_Drought_P Parameter: Timepoint (hr) Value: 6
  misc_feature: MA Experiment 20000267 PARAMETER Experiment Name: At_Drought_P Parameter: Tissue Value: Whole Plant
  misc_feature: MA Experiment 20000267 PARAMETER Experiment Name: At_Drought_P Parameter: Treatment Value: Drought vs. No Drought
  misc_feature: MA Experiment ID: 20000268 Result: Down-regulated in Transcription
  misc_feature: MA Experiment 20000268 PARAMETER Experiment Name: At_100mM_NaCl__P Parameter: Age (day) Value: 14
  misc_feature: MA Experiment 20000268 PARAMETER Experiment Name: At_100mM_NaCl__P Parameter: Organism Value: A. thaliana
  misc_feature: MA Experiment 20000268 PARAMETER Experiment Name: At_100mM_NaCl__P Parameter: Plant Line Value: WS
  misc_feature: MA Experiment 20000268 PARAMETER Experiment Name: At_100mM_NaCl__P Parameter: Timepoint (hr) Value: 6
  misc_feature: MA Experiment 20000268 PARAMETER Experiment Name: At_100mM_NaCl__P Parameter: Tissue Value: Whole Plant
  misc_feature: MA Experiment 20000268 PARAMETER Experiment Name: At_100mM_NaCl__P Parameter: Treatment Value: 100mM NaCl vs. No Treatment
  misc_feature: MA Experiment ID: 20000286 Result: Up-regulated in Transcription
  misc_feature: MA Experiment 20000286 PARAMETER Experiment Name: At_Open_Flower_P Parameter: Age (day) Value: 21
  misc_feature: MA Experiment 20000286 PARAMETER Experiment Name: At_Open_Flower_P Parameter: Plant Line Value: WS
  misc_feature: MA Experiment 20000286 PARAMETER Experiment Name: At_Open_Flower_P Parameter: Tissue Value: Half Open vs. Whole Plant
  misc_feature: MA Experiment ID: 20000436 Result: Down-regulated in Transcription
  misc_feature: MA Experiment 20000436 PARAMETER Experiment Name: At_Drought_P Parameter: Age (day) Value: 7
  misc_feature: MA Experiment 20000436 PARAMETER Experiment Name: At_Drought_P Parameter: Organism Value: A. thaliana
  misc_feature: MA Experiment 20000436 PARAMETER Experiment Name: At_Drought_P Parameter: Plant Line Value: WS
  misc_feature: MA Experiment 20000436 PARAMETER Experiment Name: At_Drought_P Parameter: Timepoint (hr) Value: 12
  misc_feature: MA Experiment 20000436 PARAMETER Experiment Name: At_Drought_P Parameter: Tissue Value: Whole Plant
  misc_feature: MA Experiment 20000436 PARAMETER Experiment Name: At_Drought_P Parameter: Treatment Value: Drought vs. No Drought
  misc_feature: MA Experiment ID: 20000438 Result: Up-regulated in Transcription
  misc_feature: MA Experiment 20000438 PARAMETER Experiment Name: At_Shoots__P Parameter: Age (day) Value: 14
  misc_feature: MA Experiment 20000438 PARAMETER Experiment Name: At_Shoots__P Parameter: Tissue Value: Shoots vs. Whole Plant
  misc_feature: MA Experiment ID: 20000439 Result: Down-regulated in Transcription
  misc_feature: MA Experiment 20000439 PARAMETER Experiment Name: At_Roots__P Parameter: Age (day) Value: 14 vs. 21
  misc_feature: MA Experiment 20000439 PARAMETER Experiment Name: At_Roots__P Parameter: Organism Value: A. thaliana
  misc_feature: MA Experiment 20000439 PARAMETER Experiment Name: At_Roots__P Parameter: Tissue Value: Roots vs. Whole Plant
  misc_feature: MA Experiment ID: 20000451 Result: Up-regulated in Transcription
  misc_feature: MA Experiment 20000451 PARAMETER Experiment Name: At_CS6879_Shoots-Roots_P Parameter: Age (day) Value: 14
  misc_feature: MA Experiment 20000451 PARAMETER Experiment Name: At_CS6879_Shoots-Roots_P Parameter: Organism Value: A. thaliana
  misc_feature: MA Experiment 20000451 PARAMETER Experiment Name: At_CS6879_Shoots-Roots_P Parameter: Plant Line Value: CS6879 vs. WS
  misc_feature: MA Experiment 20000451 PARAMETER Experiment Name: At_CS6879_Shoots-Roots_P Parameter: Tissue Value: Roots
  misc_feature: MA Experiment ID: 20001247 Result: Up-regulated in Transcription
  misc_feature: MA Experiment 20001247 PARAMETER Experiment Name: At_Far-red-induction_P Parameter: Age (day) Value: 7
  misc_feature: MA Experiment 20001247 PARAMETER Experiment Name: At_Far-red-induction_P Parameter: Light Value: Far-red vs. White
  misc_feature: MA Experiment 20001247 PARAMETER Experiment Name: At_Far-red-induction_P Parameter: Organism Value: A. thaliana
  misc_feature: MA Experiment 20001247 PARAMETER Experiment Name: At_Far-red-induction_P Parameter: Plant Line Value: Columbia
  misc_feature: MA Experiment 20001247 PARAMETER Experiment Name: At_Far-red-induction_P Parameter: Timepoint (hr) Value: 1
  misc_feature: MA Experiment 20001247 PARAMETER Experiment Name: At_Far-red-induction_P Parameter: Tissue Value: Whole Plant
  misc_feature: MA Experiment ID: 20001554 Result: Down-regulated in Transcription
  misc_feature: MA Experiment 20001554 PARAMETER Experiment Name: At_Drought_Soil_Dry_P Parameter: Age (day) Value: 21
  misc_feature: MA Experiment 20001554 PARAMETER Experiment Name: At_Drought_Soil_Dry_P Parameter: Organism Value: A. thaliana
  misc_feature: MA Experiment 20001554 PARAMETER Experiment Name: At_Drought_Soil_Dry_P Parameter: Plant Line Value: WS
  misc_feature: MA Experiment 20001554 PARAMETER Experiment Name: At_Drought_Soil_Dry_P Parameter: Post Timepoint (hr) Value: None
  misc_feature: MA Experiment 20001554 PARAMETER Experiment Name: At_Drought_Soil_Dry_P Parameter: Post-Treatment Value: None
  misc_feature: MA Experiment 20001554 PARAMETER Experiment Name: At_Drought_Soil_Dry_P Parameter: Timepoint (day) Value: 7
  misc_feature: MA Experiment 20001554 PARAMETER Experiment Name: At_Drought_Soil_Dry_P Parameter: Treatment Value: Drought vs. No Drought
  misc_feature: MA Experiment ID: 20001555 Result: Down-regulated in Transcription
  misc_feature: MA Experiment 20001555 PARAMETER Experiment Name: At_Drought_Soil_Dry_P Parameter: Age (day) Value: 24
  misc_feature: MA Experiment 20001555 PARAMETER Experiment Name: At_Drought_Soil_Dry_P Parameter: Organism Value: A. thaliana
  misc_feature: MA Experiment 20001555 PARAMETER Experiment Name: At_Drought_Soil_Dry_P Parameter: Plant Line Value: WS
  misc_feature: MA Experiment 20001555 PARAMETER Experiment Name: At_Drought_Soil_Dry_P Parameter: Post Timepoint (hr) Value: None
  misc_feature: MA Experiment 20001555 PARAMETER Experiment Name: At_Drought_Soil_Dry_P Parameter: Post-Treatment Value: None
  misc_feature: MA Experiment 20001555 PARAMETER Experiment Name: At_Drought_Soil_Dry_P Parameter: Timepoint (day) Value: 10
  misc_feature: MA Experiment 20001555 PARAMETER Experiment Name: At_Drought_Soil_Dry_P Parameter: Treatment Value: Drought vs. No Drought
  misc_feature: MA Experiment ID: 20001556 Result: Down-regulated in Transcription
  misc_feature: MA Experiment 20001556 PARAMETER Experiment Name: At_Drought_Soil_Dry_P Parameter: Age (day) Value: 26
  misc_feature: MA Experiment 20001556 PARAMETER Experiment Name: At_Drought_Soil_Dry_P Parameter: Organism Value: A. thaliana
  misc_feature: MA Experiment 20001556 PARAMETER Experiment Name: At_Drought_Soil_Dry_P Parameter: Plant Line Value: WS
  misc_feature: MA Experiment 20001556 PARAMETER Experiment Name: At_Drought_Soil_Dry_P Parameter: Post Timepoint (hr) Value: None
  misc_feature: MA Experiment 20001556 PARAMETER Experiment Name: At_Drought_Soil_Dry_P Parameter: Post-Treatment Value: None
  misc_feature: MA Experiment 20001556 PARAMETER Experiment Name: At_Drought_Soil_Dry_P Parameter: Timepoint (day) Value: 12
  misc_feature: MA Experiment 20001556 PARAMETER Experiment Name: At_Drought_Soil_Dry_P Parameter: Treatment Value: Drought vs. No Drought
  misc_feature: MA Experiment ID: 20001557 Result: Up-regulated in Transcription
  misc_feature: MA Experiment 20001557 PARAMETER Experiment Name: At_Drought_Soil_Dry_P Parameter: Age (day) Value: 27
  misc_feature: MA Experiment 20001557 PARAMETER Experiment Name: At_Drought_Soil_Dry_P Parameter: Organism Value: A. thaliana
  misc_feature: MA Experiment 20001557 PARAMETER Experiment Name: At_Drought_Soil_Dry_P Parameter: Plant Line Value: WS
  misc_feature: MA Experiment 20001557 PARAMETER Experiment Name: At_Drought_Soil_Dry_P Parameter: Post Timepoint (hr) Value: 3
  misc_feature: MA Experiment 20001557 PARAMETER Experiment Name: At_Drought_Soil_Dry_P Parameter: Post-Treatment Value: Re-Water vs. No Drought
  misc_feature: MA Experiment 20001557 PARAMETER Experiment Name: At_Drought_Soil_Dry_P Parameter: Timepoint (day) Value: 13
  misc_feature: MA Experiment 20001557 PARAMETER Experiment Name: At_Drought_Soil_Dry_P Parameter: Treatment Value: Drought vs. No Drought
  misc_feature: MA Experiment ID: 20001558 Result: Up-regulated in Transcription
  misc_feature: MA Experiment 20001558 PARAMETER Experiment Name: At_Drought_Soil_Dry_P Parameter: Age (day) Value: 27
  misc_feature: MA Experiment 20001558 PARAMETER Experiment Name: At_Drought_Soil_Dry_P Parameter: Organism Value: A. thaliana
  misc_feature: MA Experiment 20001558 PARAMETER Experiment Name: At_Drought_Soil_Dry_P Parameter: Plant Line Value: WS
  misc_feature: MA Experiment 20001558 PARAMETER Experiment Name: At_Drought_Soil_Dry_P Parameter: Post Timepoint (hr) Value: 6
  misc_feature: MA Experiment 20001558 PARAMETER Experiment Name: At_Drought_Soil_Dry_P Parameter: Post-Treatment Value: Re-Water vs. No Drought
  misc_feature: MA Experiment 20001558 PARAMETER Experiment Name: At_Drought_Soil_Dry_P Parameter: Timepoint (day) Value: 13
  misc_feature: MA Experiment 20001558 PARAMETER Experiment Name: At_Drought_Soil_Dry_P Parameter: Treatment Value: Drought vs. No Drought
  misc_feature: MA Experiment ID: 20001560 Result: Up-regulated in Transcription
  misc_feature: MA Experiment 20001560 PARAMETER Experiment Name: At_Drought_Soil_Dry_P Parameter: Age (day) Value: 28
  misc_feature: MA Experiment 20001560 PARAMETER Experiment Name: At_Drought_Soil_Dry_P Parameter: Organism Value: A. thaliana
  misc_feature: MA Experiment 20001560 PARAMETER Experiment Name: At_Drought_Soil_Dry_P Parameter: Plant Line Value: WS
  misc_feature: MA Experiment 20001560 PARAMETER Experiment Name: At_Drought_Soil_Dry_P Parameter: Post Timepoint (hr) Value: None
  misc_feature: MA Experiment 20001560 PARAMETER Experiment Name: At_Drought_Soil_Dry_P Parameter: Post-Treatment Value: None
  misc_feature: MA Experiment 20001560 PARAMETER Experiment Name: At_Drought_Soil_Dry_P Parameter: Timepoint (day) Value: 14
  misc_feature: MA Experiment 20001560 PARAMETER Experiment Name: At_Drought_Soil_Dry_P Parameter: Treatment Value: Drought vs. No Drought
  misc_feature: MA Experiment ID: 20001904 Result: Down-regulated in Transcription
  misc_feature: MA Experiment 20001904 PARAMETER Experiment Name: At_Drought_Reproduction_P Parameter: Age (day) Value: 37
  misc_feature: MA Experiment 20001904 PARAMETER Experiment Name: At_Drought_Reproduction_P Parameter: Organism Value: A. thaliana
  misc_feature: MA Experiment 20001904 PARAMETER Experiment Name: At_Drought_Reproduction_P Parameter: Plant Line Value: WS
  misc_feature: MA Experiment 20001904 PARAMETER Experiment Name: At_Drought_Reproduction_P Parameter: Timepoint (day) Value: 7
  misc_feature: MA Experiment 20001904 PARAMETER Experiment Name: At_Drought_Reproduction_P Parameter: Tissue Value: Rosettes
  misc_feature: MA Experiment 20001904 PARAMETER Experiment Name: At_Drought_Reproduction_P Parameter: Treatment Value: Drought vs. No Drought
  misc_feature: MA Experiment ID: 20001906 Result: Down-regulated in Transcription
  misc_feature: MA Experiment 20001906 PARAMETER Experiment Name: At_Drought_Reproduction_P Parameter: Age (day) Value: 35
  misc_feature: MA Experiment 20001906 PARAMETER Experiment Name: At_Drought_Reproduction_P Parameter: Organism Value: A. thaliana
  misc_feature: MA Experiment 20001906 PARAMETER Experiment Name: At_Drought_Reproduction_P Parameter: Plant Line Value: WS
  misc_feature: MA Experiment 20001906 PARAMETER Experiment Name: At_Drought_Reproduction_P Parameter: Timepoint (day) Value: 5
  misc_feature: MA Experiment 20001906 PARAMETER Experiment Name: At_Drought_Reproduction_P Parameter: Tissue Value: Siliques
  misc_feature: MA Experiment 20001906 PARAMETER Experiment Name: At_Drought_Reproduction_P Parameter: Treatment Value: Drought vs. No Drought
  misc_feature: MA Experiment ID: 20001907 Result: Down-regulated in Transcription
  misc_feature: MA Experiment 20001907 PARAMETER Experiment Name: At_Drought_Reproduction_P Parameter: Age (day) Value: 37
  misc_feature: MA Experiment 20001907 PARAMETER Experiment Name: At_Drought_Reproduction_P Parameter: Organism Value: A. thaliana
  misc_feature: MA Experiment 20001907 PARAMETER Experiment Name: At_Drought_Reproduction_P Parameter: Plant Line Value: WS
  misc_feature: MA Experiment 20001907 PARAMETER Experiment Name: At_Drought_Reproduction_P Parameter: Timepoint (day) Value: 7
  misc_feature: MA Experiment 20001907 PARAMETER Experiment Name: At_Drought_Reproduction_P Parameter: Tissue Value: Siliques
  misc_feature: MA Experiment 20001907 PARAMETER Experiment Name: At_Drought_Reproduction_P Parameter: Treatment Value: Drought vs. No Drought
  misc_feature: MA Experiment ID: 20001908 Result: Down-regulated in Transcription
  misc_feature: MA Experiment 20001908 PARAMETER Experiment Name: At_Drought_Reproduction_P Parameter: Age (day) Value: 40
  misc_feature: MA Experiment 20001908 PARAMETER Experiment Name: At_Drought_Reproduction_P Parameter: Organism Value: A. thaliana
  misc_feature: MA Experiment 20001908 PARAMETER Experiment Name: At_Drought_Reproduction_P Parameter: Plant Line Value: WS
  misc_feature: MA Experiment 20001908 PARAMETER Experiment Name: At_Drought_Reproduction_P Parameter: Timepoint (day) Value: 10
  misc_feature: MA Experiment 20001908 PARAMETER Experiment Name: At_Drought_Reproduction_P Parameter: Tissue Value: Siliques
  misc_feature: MA Experiment 20001908 PARAMETER Experiment Name: At_Drought_Reproduction_P Parameter: Treatment Value: Drought vs. No Drought
  misc_feature: MA Experiment ID: 20001911 Result: Down-regulated in Transcription
  misc_feature: MA Experiment 20001911 PARAMETER Experiment Name: At_Drought_Reproduction_P Parameter: Age (day) Value: 40
  misc_feature: MA Experiment 20001911 PARAMETER Experiment Name: At_Drought_Reproduction_P Parameter: Organism Value: A. thaliana
  misc_feature: MA Experiment 20001911 PARAMETER Experiment Name: At_Drought_Reproduction_P Parameter: Plant Line Value: WS
  misc_feature: MA Experiment 20001911 PARAMETER Experiment Name: At_Drought_Reproduction_P Parameter: Timepoint (day) Value: 10
  misc_feature: MA Experiment 20001911 PARAMETER Experiment Name: At_Drought_Reproduction_P Parameter: Tissue Value: Flowers
  misc_feature: MA Experiment 20001911 PARAMETER Experiment Name: At_Drought_Reproduction_P Parameter: Treatment Value: Drought vs. No Drought
acaccatccactctactcaacatggactcctccaaactctcatctctctctctttgcctcttcctcatttgcattatctatctcccccaacattctctcgcatgcggctcttgcaacccacggaagggcggaaagcactcccctaaagcccctaagctaccagttcctccggtgaccgtccctaagctaccagttcctccggtgaccgtccctaagctaccagtccctccggtgaccgtccctaagctacccgttcctcctgtgaccatccctaagctacccgttccaccagtgactgtacctaagctacccgttcctcctgtgaccgtccccaagctacccgttcctccagtgaccgtccccaagctacccgttcctccagtgacagtccctaagctacccgttcccccggtaactgtacctaagctacccgttcctccagtgaccgtccctaagctaccccttcctccgatttcagggctacccatacctccagtggtaggtcccaatctgccattgccgcctttgccaattgtaggtcctattcttccaccgggaacaaccccaccagccacaggagggaaggactgtcctccaccgccagggagcgtaaagccaccatcagggggcgggaaggcgacatgtccaatagacacgctgaagttaggtgcttgcgtcgacttgttgggaggtttagtaaagatagggcttggggatccagcagttaacaaatgttgtccgttacttaaaggcctcgttgaagtcgaagccgcggcttgtctctgcactaccctcaagctcaaagctcttgacctcaatctttatgtccctgttgctcttcagcttctccttacctgtggcaaaaatccacctccgggctacacttgttccatatgataaactcactccacttataaaggatgctttggagaaaaaagtgagaagagaatggcagagctccaatctttcctgtcttggtttaccaaatatatcatatcaaatcctatccctttgattctttcctctatcgttcccttatgcttgtatcattaattaatgtgtgctttttagattaatgattcttctcttgtattaaagtatgatttgaaatcctttttttttctctatctctttttattgaatggattgaactgcgttcatgatactgtcaaaaagagagaaaaagagtacaatttt

SEQ ID NO: 45439 - protein, 298 aa, Arabidopsis thaliana
  peptide (1)..(298): Ceres Seq. ID no. 12606694
  misc_feature (215)..(296): Pfam Name: Protease inhibitor/seed storage/LTP family Pfam Description: Protease inhibitor/seed storage/LTP family
  misc_feature (40)..(296): Homolog of NCBI NO: 1709767 NR Description: 36.4 KD PROLINE-RICH PROTEIN
  misc_feature (40)..(296): Homolog of NCBI NO: 19521 NR Description: proline rich protein [Lycopersicon esculentum]
  misc_feature (47)..(296): Homolog of NCBI NO: 11994733 NR Description: contains similarity to cell wall-plasma membrane
  misc_feature (48)..(296): Homolog of NCBI NO: 7446486 NR Description: hypothetical protein - carrot
  misc_feature (45)..(296): Homolog of NCBI NO: 7446482 NR Description: probable cell wall-plasma membrane linker protein
  misc_feature (46)..(296): Homolog of NCBI NO: 1076501 NR Description: cell wall protein - alfalfa
  misc_feature (40)..(296): Homolog of NCBI NO: 7446483 NR Description: probable cell wall protein - garden pea
  misc_feature (8)..(201): Homolog of NCBI NO: 24417264 NR Description: unknown [Arabidopsis thaliana]
  misc_feature (71)..(226): Homolog of NCBI NO: 24417264 NR Description: unknown [Arabidopsis thaliana]
  misc_feature (8)..(298): Homolog of NCBI NO: 18396941 NR Description: expressed protein
TPSTLLNMDSSKLSSLSLCLFLICIIYLPQHSLACGSCNPRKGGKHSPKAPKLPVPPVTVPKLPVPPVTVPKLPVPPVTVPKLPVPPVTIPKLPVPPVTVPKLPVPPVTVPKLPVPPVTVPKLPVPPVTVPKLPVPPVTVPKLPVPPVTVPKLPLPPISGLPIPPVVGPNLPLPPLPIVGPILPPGTTPPATGGKDCPPPPGSVKPPSGGGKATCPIDTLKLGACVDLLGGLVKIGLGDPAVNKCCPLLKGLVEVEAAACLCTTLKLKALDLNLYVPVALQLLLTCGKNPPPGYTCSI

SEQ ID NO: 45440 - protein, 291 aa, Arabidopsis thaliana
  peptide (1)..(291): Ceres Seq. ID no. 12606695
  misc_feature (208)..(289): Pfam Name: Protease inhibitor/seed storage/LTP family Pfam Description: Protease inhibitor/seed storage/LTP family
  misc_feature (33)..(289): Homolog of NCBI NO: 1709767 NR Description: 36.4 KD PROLINE-RICH PROTEIN
  misc_feature (33)..(289): Homolog of NCBI NO: 19521 NR Description: proline rich protein [Lycopersicon esculentum]
  misc_feature (40)..(289): Homolog of NCBI NO: 11994733 NR Description: contains similarity to cell wall-plasma membrane
  misc_feature (41)..(289): Homolog of NCBI NO: 7446486 NR Description: hypothetical protein - carrot
  misc_feature (38)..(289): Homolog of NCBI NO: 7446482 NR Description: probable cell wall-plasma membrane linker protein
  misc_feature (39)..(289): Homolog of NCBI NO: 1076501 NR Description: cell wall protein - alfalfa
  misc_feature (33)..(289): Homolog of NCBI NO: 7446483 NR Description: probable cell wall protein - garden pea
  misc_feature (1)..(194): Homolog of NCBI NO: 24417264 NR Description: unknown [Arabidopsis thaliana]
  misc_feature (64)..(219): Homolog of NCBI NO: 24417264 NR Description: unknown [Arabidopsis thaliana]
  misc_feature (1)..(291): Homolog of NCBI NO: 18396941 NR Description: expressed protein
MDSSKLSSLSLCLFLICIIYLPQHSLACGSCNPRKGGKHSPKAPKLPVPPVTVPKLPVPPVTVPKLPVPPVTVPKLPVPPVTIPKLPVPPVTVPKLPVPPVTVPKLPVPPVTVPKLPVPPVTVPKLPVPPVTVPKLPVPPVTVPKLPLPPISGLPIPPVVGPNLPLPPLPIVGPILPPGTTPPATGGKDCPPPPGSVKPPSGGGKATCPIDTLKLGACVDLLGGLVKIGLGDPAVNKCCPLLKGLVEVEAAACLCTTLKLKALDLNLYVPVALQLLLTCGKNPPPGYTCSI

SEQ ID NO: 45441 - DNA, 2045 bp, Arabidopsis thaliana
  misc_feature (1)..(2045): Ceres Seq. ID no. 13646629
  misc_feature: MA Experiment ID: 20000315 Result: Down-regulated in Transcription
  misc_feature: MA Experiment 20000315 PARAMETER Experiment Name: At_14day_Shoots-Roots_Sub_P Parameter: Age (day) Value: 14
  misc_feature: MA Experiment 20000315 PARAMETER Experiment Name: At_14day_Shoots-Roots_Sub_P Parameter: Organism Value: A. thaliana
  misc_feature: MA Experiment 20000315 PARAMETER Experiment Name: At_14day_Shoots-Roots_Sub_P Parameter: Plant Line Value: WS
  misc_feature: MA Experiment 20000315 PARAMETER Experiment Name: At_14day_Shoots-Roots_Sub_P Parameter: Tissue Value: Shoots vs. Whole Plant
  misc_feature: MA Experiment ID: 20000355 Result: Up-regulated in Transcription
  misc_feature: MA Experiment 20000355 PARAMETER Experiment Name: At_Siliques_Sub_P Parameter: Age (day) Value: 21
  misc_feature: MA Experiment 20000355 PARAMETER Experiment Name: At_Siliques_Sub_P Parameter: Organism Value: A. thaliana
  misc_feature: MA Experiment 20000355 PARAMETER Experiment Name: At_Siliques_Sub_P Parameter: Plant Line Value: WS
  misc_feature: MA Experiment 20000355 PARAMETER Experiment Name: At_Siliques_Sub_P Parameter: Tissue Value: Less Than 5mm Siliques vs. Whole Plant
  misc_feature: MA Experiment ID: 20000440 Result: Up-regulated in Transcription
  misc_feature: MA Experiment 20000440 PARAMETER Experiment Name: At_Closed-Flower__Sub_P Parameter: Tissue Value: Closed Flower vs. Whole Plant
atcagagagttctttctcaaaaactatttacacatcaaaaataaaatcaaaataaattgttgtgatcatagagttctcttgcaccaatgagtgctccaaagtttggttatgtattactattgattgtattaatcaatattagcaataatggcgtcgatgcatttcacaaagttttcaagaaattgcaatcaaaatcgacatcattggagtcagtaagtcctcttcacagaaccgcttatcactttcaacctccccgccattggatcaacgatccgaatgctccaatgctctacaagggagtttaccatctcttctaccaatacaatcccaaaggtgcggtttggggtaacattgtgtgggctcactcggtttctaaggacttgatcaattgggaagcccttgaaccagccatttacccatccaaatggttcgacatcaacggtacatggtccggttcagctacccacgtaccgggaaaaggaccggttatcctctacaccggtatcaccgagaaccagactcagattcaaaactacgccattccacaagatctttccgacccatacctcaagacatggataaagccagacgataaccccatcgtaaaacccgataatggcgagaacggatccgctttccgtgacccgaccacggcttggttcaacaaaaaagatgggtattggagaatgcttgttggctcaaagagaaagaacagaggaattgcttatatgtacaagagccgtgacttcaaaaaatgggtcaaaagcaaacgtcctatccactcaagaaagaaaaccggtatgtgggaatgtcccgatttcttcccggtatccgtaaccgacaagaaaaacggtttggacttcagctacgacggtccaaacgccaagcatgtgttgaaggttagtttggacttgaccagatacgagtactacactcttggaacgtatgacaccaagaaggatcgttacaggccagacagttacactcctgacggttgggatggtttgagatttgattatggtaactactatgcgtcaaagacattctttgatgacaagacgaacagaagaattctttgggggtgggccaatgaatccgacaccgttcaagatgataccgtgaagggttgggccggaattcagcttatcccaagaacaatcttgcttgactctagcggtaagcaactcgtgttttggcctattgaagagattgagtcattgagaggaaagaatgtccaaatgaccaaccagaaaatggagatgggccaacgctttgaggtccaaggaatcactcctgctcaggtggatgtggatgtgacattcaacgttggaaatctagagaaggccgaaaagtttgacgaaagcttcgcaactaaaccactagagttatgtaacttgaaaggttcgaatgtgaatggtggagttggtccttttggtttgatcacgttggctacatctgacttagaagaatacactcctgttttctttagagtcttcaaagatgccgcatccaacaagcctaaggttctcatgtgctctgacgccaagccttcgagtctcaaaaaagacaccgggactgacgccaaggagaggatgtacaaaccatcgtttgctggttttgtggatgtcggtctccttgacggaaagatctctctaaggagtttgattgatcactcggttgtggagagctttggagcaaaaggaaagacagtgataacatctagagtgtatccgacaaaagcagtaggagaaaaagctcatttgtttgtctttaacaacggctcacaacctgtgaccgtagagagcctcaatgcatggaacatgcagaagcctctgaagatgaaccaaggtgcaaagtgatcacatcattctttaattttttcgttgacaaatttaattcattcgttaaaacagagagtctgtcacaatatattgtagaaaaaaggaacctattgtgtttcttttacaatcaatacaatttgtacatagtttatcactactaacaaagtattgatcttatattttattaatgaaacacgtttcctt

SEQ ID NO: 45442 - protein, 590 aa, Arabidopsis thaliana
  peptide (1)..(590): Ceres Seq. ID no. 13646630
  misc_feature (52)..(539): Pfam Name: Glycosyl hydrolases family 32 Pfam Description: Glycosyl hydrolases family 32
  misc_feature (48)..(587): Homolog of NCBI NO: 480998 NR Description: beta-fructofuranosidase (EC 3.2.1.26) isozyme I
  misc_feature (48)..(587): Homolog of NCBI NO: 480996 NR Description: beta-fructofuranosidase (EC 3.2.1.26) isozyme I
  misc_feature (48)..(590): Homolog of NCBI NO: 4105125 NR Description: cell wall invertase; beta-fructosidase; Incw4
  misc_feature (33)..(590): Homolog of NCBI NO: 5052007 NR Description: apoplastic invertase [Oryza sativa subsp. indica]
  misc_feature (8)..(579): Homolog of NCBI NO: 480566 NR Description: beta-fructofuranosidase (EC 3.2.1.26) - potato
  misc_feature (10)..(586): Homolog of NCBI NO: 124712 NR Description: BETA-FRUCTOFURANOSIDASE, INSOLUBLE ISOENZYME 1 (SUCROSE-6-PHOSPHATE HYDROLASE 1) (INVERTASE 1) (CELL WALL
  misc_feature (10)..(586): Homolog of NCBI NO: 2129916 NR Description: beta-fructofuranosidase (EC 3.2.1.26) 1
  misc_feature (9)..(589): Homolog of NCBI NO: 25289548 NR Description: probable beta-fructofuranosidase (invertase)
  misc_feature (9)..(589): Homolog of NCBI NO: 21537018 NR Description: putative beta-fructofuranosidase (invertase)
  misc_feature (9)..(589): Homolog of NCBI NO: 18404067 NR Description: glycosyl hydrolase family 32 [Arabidopsis
MSAPKFGYVLLLIVLINISNNGVDAFHKVFKKLQSKSTSLESVSPLHRTAYHFQPPRHWINDPNAPMLYKGVYHLFYQYNPKGAVWGNIVWAHSVSKDLINWEALEPAIYPSKWFDINGTWSGSATHVPGKGPVILYTGITENQTQIQNYAIPQDLSDPYLKTWIKPDDNPIVKPDNGENGSAFRDPTTAWFNKKDGYWRMLVGSKRKNRGIAYMYKSRDFKKWVKSKRPIHSRKKTGMWECPDFFPVSVTDKKNGLDFSYDGPNAKHVLKVSLDLTRYEYYTLGTYDTKKDRYRPDSYTPDGWDGLRFDYGNYYASKTFFDDKTNRRILWGWANESDTVQDDTVKGWAGIQLIPRTILLDSSGKQLVFWPIEEIESLRGKNVQMTNQKMEMGQRFEVQGITPAQVDVDVTFNVGNLEKAEKFDESFATKPLELCNLKGSNVNGGVGPFGLITLATSDLEEYTPVFFRVFKDAASNKPKVLMCSDAKPSSLKKDTGTDAKERMYKPSFAGFVDVGLLDGKISLRSLIDHSVVESFGAKGKTVITSRVYPTKAVGEKAHLFVFNNGSQPVTVESLNAWNMQKPLKMNQGAK

SEQ ID NO: 45443 - protein, 524 aa, Arabidopsis thaliana
  peptide (1)..(524): Ceres Seq. ID no. 13646631
  misc_feature (1)..(473): Pfam Name: Glycosyl hydrolases family 32 Pfam Description: Glycosyl hydrolases family 32
  misc_feature (1)..(521): Homolog of NCBI NO: 480998 NR Description: beta-fructofuranosidase (EC 3.2.1.26) isozyme I
  misc_feature (1)..(521): Homolog of NCBI NO: 480996 NR Description: beta-fructofuranosidase (EC 3.2.1.26) isozyme I
  misc_feature (1)..(524): Homolog of NCBI NO: 4105125 NR Description: cell wall invertase; beta-fructosidase; Incw4
  misc_feature (1)..(524): Homolog of NCBI NO: 5052007 NR Description: apoplastic invertase [Oryza sativa subsp. indica]
  misc_feature (1)..(513): Homolog of NCBI NO: 480566 NR Description: beta-fructofuranosidase (EC 3.2.1.26) - potato
  misc_feature (1)..(520): Homolog of NCBI NO: 124712 NR Description: BETA-FRUCTOFURANOSIDASE, INSOLUBLE ISOENZYME 1 (SUCROSE-6-PHOSPHATE HYDROLASE 1) (INVERTASE 1) (CELL WALL
  misc_feature (1)..(520): Homolog of NCBI NO: 2129916 NR Description: beta-fructofuranosidase (EC 3.2.1.26) 1
  misc_feature (1)..(523): Homolog of NCBI NO: 25289548 NR Description: probable beta-fructofuranosidase (invertase)
  misc_feature (1)..(523): Homolog of NCBI NO: 21537018 NR Description: putative beta-fructofuranosidase (invertase)
  misc_feature (1)..(523): Homolog of NCBI NO: 18404067 NR Description: glycosyl hydrolase family 32 [Arabidopsis
MLYKGVYHLFYQYNPKGAVWGNIVWAHSVSKDLINWEALEPAIYPSKWFDINGTWSGSATHVPGKGPVILYTGITENQTQIQNYAIPQDLSDPYLKTWIKPDDNPIVKPDNGENGSAFRDPTTAWFNKKDGYWRMLVGSKRKNRGIAYMYKSRDFKKWVKSKRPIHSRKKTGMWECPDFFPVSVTDKKNGLDFSYDGPNAKHVLKVSLDLTRYEYYTLGTYDTKKDRYRPDSYTPDGWDGLRFDYGNYYASKTFFDDKTNRRILWGWANESDTVQDDTVKGWAGIQLIPRTILLDSSGKQLVFWPIEEIESLRGKNVQMTNQKMEMGQRFEVQGITPAQVDVDVTFNVGNLEKAEKFDESFATKPLELCNLKGSNVNGGVGPFGLITLATSDLEEYTPVFFRVFKDAASNKPKVLMCSDAKPSSLKKDTGTDAKERMYKPSFAGFVDVGLLDGKISLRSLIDHSVVESFGAKGKTVITSRVYPTKAVGEKAHLFVFNNGSQPVTVESLNAWNMQKPLKMNQGAK

SEQ ID NO: 45444 - protein, 390 aa, Arabidopsis thaliana
  peptide (1)..(390): Ceres Seq. ID no. 13646632
  misc_feature (1)..(339): Pfam Name: Glycosyl hydrolases family 32 Pfam Description: Glycosyl hydrolases family 32
  misc_feature (1)..(387): Homolog of NCBI NO: 480998 NR Description: beta-fructofuranosidase (EC 3.2.1.26) isozyme I
  misc_feature (1)..(387): Homolog of NCBI NO: 480996 NR Description: beta-fructofuranosidase (EC 3.2.1.26) isozyme I
  misc_feature (1)..(390): Homolog of NCBI NO: 4105125 NR Description: cell wall invertase; beta-fructosidase; Incw4
  misc_feature (1)..(390): Homolog of NCBI NO: 5052007 NR Description: apoplastic invertase [Oryza sativa subsp. indica]
  misc_feature (1)..(379): Homolog of NCBI NO: 480566 NR Description: beta-fructofuranosidase (EC 3.2.1.26) - potato
  misc_feature (1)..(386): Homolog of NCBI NO: 124712 NR Description: BETA-FRUCTOFURANOSIDASE, INSOLUBLE ISOENZYME 1 (SUCROSE-6-PHOSPHATE HYDROLASE 1) (INVERTASE 1) (CELL WALL
  misc_feature (1)..(386): Homolog of NCBI NO: 2129916 NR Description: beta-fructofuranosidase (EC 3.2.1.26) 1
  misc_feature (1)..(389): Homolog of NCBI NO: 25289548 NR Description: probable beta-fructofuranosidase (invertase)
  misc_feature (1)..(389): Homolog of NCBI NO: 21537018 NR Description: putative beta-fructofuranosidase (invertase)
  misc_feature (1)..(389): Homolog of NCBI NO: 18404067 NR Description: glycosyl hydrolase family 32 [Arabidopsis
MLVGSKRKNRGIAYMYKSRDFKKWVKSKRPIHSRKKTGMWECPDFFPVSVTDKKNGLDFSYDGPNAKHVLKVSLDLTRYEYYTLGTYDTKKDRYRPDSYTPDGWDGLRFDYGNYYASKTFFDDKTNRRILWGWANESDTVQDDTVKGWAGIQLIPRTILLDSSGKQLVFWPIEEIESLRGKNVQMTNQKMEMGQRFEVQGITPAQVDVDVTFNVGNLEKAEKFDESFATKPLELCNLKGSNVNGGVGPFGLITLATSDLEEYTPVFFRVFKDAASNKPKVLMCSDAKPSSLKKDTGTDAKERMYKPSFAGFVDVGLLDGKISLRSLIDHSVVESFGAKGKTVITSRVYPTKAVGEKAHLFVFNNGSQPVTVESLNAWNMQKPLKMNQGAK

SEQ ID NO: 45445 - DNA, 1788 bp, Arabidopsis thaliana
  misc_feature (1)..(1788): Ceres Seq. ID no. 14315390
  misc_feature: MA Experiment ID: 20000179 Result: Up-regulated in Transcription
  misc_feature: MA Experiment 20000179 PARAMETER Experiment Name: At_Germinating_Seeds_P Parameter: Age (hr) Value: 6 vs. 0
  misc_feature: MA Experiment 20000179 PARAMETER Experiment Name: At_Germinating_Seeds_P Parameter: Tissue Value: Germinating Seeds
  misc_feature: MA Experiment ID: 20000184 Result: Down-regulated in Transcription
  misc_feature: MA Experiment 20000184 PARAMETER Experiment Name: At_Shoots__P Parameter: Age (day) Value: 7
  misc_feature: MA Experiment 20000184 PARAMETER Experiment Name: At_Shoots__P Parameter: Tissue Value: Shoots vs. Whole Plant
  misc_feature: MA Experiment ID: 20000213 Result: Down-regulated in Transcription
  misc_feature: MA Experiment 20000213 PARAMETER Experiment Name: At_4deg_Cold_P Parameter: Timepoint (hr) Value: 2
  misc_feature: MA Experiment ID: 20000286 Result: Down-regulated in Transcription
  misc_feature: MA Experiment 20000286 PARAMETER Experiment Name: At_Open_Flower_P Parameter: Age (day) Value: 21
  misc_feature: MA Experiment 20000286 PARAMETER Experiment Name: At_Open_Flower_P Parameter: Plant Line Value: WS
  misc_feature: MA Experiment 20000286 PARAMETER Experiment Name: At_Open_Flower_P Parameter: Tissue Value: Half Open vs. Whole Plant
  misc_feature: MA Experiment ID: 20000437 Result: Up-regulated in Transcription
  misc_feature: MA Experiment 20000437 PARAMETER Experiment Name: At_Drought_P Parameter: Age (day) Value: 8
  misc_feature: MA Experiment 20000437 PARAMETER Experiment Name: At_Drought_P Parameter: Organism Value: A. thaliana
  misc_feature: MA Experiment 20000437 PARAMETER Experiment Name: At_Drought_P Parameter: Plant Line Value: WS
  misc_feature: MA Experiment 20000437 PARAMETER Experiment Name: At_Drought_P Parameter: Timepoint (hr) Value: 24
  misc_feature: MA Experiment 20000437 PARAMETER Experiment Name: At_Drought_P Parameter: Tissue Value: Whole Plant
  misc_feature: MA Experiment 20000437 PARAMETER Experiment Name: At_Drought_P Parameter: Treatment Value: Drought vs. No Drought
  misc_feature: MA Experiment ID: 20000438 Result: Down-regulated in Transcription
  misc_feature: MA Experiment 20000438 PARAMETER Experiment Name: At_Shoots__P Parameter: Age (day) Value: 14
  misc_feature: MA Experiment 20000438 PARAMETER Experiment Name: At_Shoots__P Parameter: Tissue Value: Shoots vs. Whole Plant
  misc_feature: MA Experiment ID: 20000794 Result: Up-regulated in Transcription
  misc_feature: MA Experiment 20000794 PARAMETER Experiment Name: At_Petals_P Parameter: Age (day) Value: 23-25 days
  misc_feature: MA Experiment 20000794 PARAMETER Experiment Name: At_Petals_P Parameter: Plant Line Value: WS
  misc_feature: MA Experiment 20000794 PARAMETER Experiment Name: At_Petals_P Parameter: Tissue Value: Petals vs. Whole plant
  misc_feature: MA Experiment ID: 20001450 Result: Up-regulated in Transcription
  misc_feature: MA Experiment 20001450 PARAMETER Experiment Name: At_Far-red-induction_P Parameter: Age (day) Value: 7
  misc_feature: MA Experiment 20001450 PARAMETER Experiment Name: At_Far-red-induction_P Parameter: Light Value: Far-red vs. White
  misc_feature: MA Experiment 20001450 PARAMETER Experiment Name: At_Far-red-induction_P Parameter: Organism Value: A. thaliana
  misc_feature: MA Experiment 20001450 PARAMETER Experiment Name: At_Far-red-induction_P Parameter: Plant Line Value: Columbia
  misc_feature: MA Experiment 20001450 PARAMETER Experiment Name: At_Far-red-induction_P Parameter: Timepoint (hr) Value: 8
  misc_feature: MA Experiment 20001450 PARAMETER Experiment Name: At_Far-red-induction_P Parameter: Tissue Value: Whole Plant
  misc_feature: MA Experiment ID: 20001911 Result: Up-regulated in Transcription
  misc_feature: MA Experiment 20001911 PARAMETER Experiment Name: At_Drought_Reproduction_P Parameter: Age (day) Value: 40
  misc_feature: MA Experiment 20001911 PARAMETER Experiment Name: At_Drought_Reproduction_P Parameter: Organism Value: A. thaliana
  misc_feature: MA Experiment 20001911 PARAMETER Experiment Name: At_Drought_Reproduction_P Parameter: Plant Line Value: WS
  misc_feature: MA Experiment 20001911 PARAMETER Experiment Name: At_Drought_Reproduction_P Parameter: Timepoint (day) Value: 10
  misc_feature: MA Experiment 20001911 PARAMETER Experiment Name: At_Drought_Reproduction_P Parameter: Tissue Value: Flowers
  misc_feature: MA Experiment 20001911 PARAMETER Experiment Name: At_Drought_Reproduction_P Parameter: Treatment Value: Drought vs. No Drought
gaaacgatcattttctaggaaaacgaacgaacagaggacaaatatattagataaacagagggaaacaagaacaaaaacgtttgcttcattctctaatggcagccaccacgagacggttgctttactctgtgtccaaaagattctctaccgccggagtgcggcggagctatggcggtctgccacaatcgaattccaaatctcctccgtcttcttctcaacgattgatggaattggaatctgaattcagtgcccacaattaccatcctgttccggttgtgttttctcgcgcgaatggctcaactatatgggaccctgaaggaaagagatacattgattttcttgcagcttactctgcagttaatcagggacattgtcatcctaagatcatgaaggcattgcaggaacaagtggagaagctcactttaagttcacgagcgttttacaacgataaattcccggtatttgctgagcgtctcacaaacatgttcggttatgatatggtgcttcctatgaacacgggtgctgaaggtgtcgaaaccgctttgaaactagcaagaaaatggggtcatgaaaagaaaaatattcccaaagacgaggctatcattgtctcttgttgtggctgctttcatggacgtacattagcaattgtttccatgagttgtgacaatgatgctactcgtggattcgggccattgttgccagggaatcttaaagttgattttggtgatgcggattcacttgagaaaatcattaaagaaaagggagatagaatagcgggatttctattcgagcctattcaaggcgaagctggagttattattcctcccgacggttacttgaaagctgttagagaactctgcacaaaatacaatgttttgatgatagcggatgaagtacaaagcggtctggctagatccgggaagatgctagcttgtgattgggaagaaattcgtcctgacatggtgatacttgggaaagcattaggtggaggagtaattccagtaagtgcagtgcttgctgataaagacgtgatgcttcatataaaacctggtcaacacggaagcacatttggtggtaaccctttagctagtgctgtagctatggcttctttagacgttatcgtggaagaaaaactcgttgaaagatcagcaagtcttggagaggaactgaggattcaattgaatgaaatcaagaaacagtttccgaagtacataaaggaagtacgaggaagaggcttgtttaatgcgattgagttcaatagcgaaagcttgtccccggtttcagcttacgatatttgcttgagcttgaaggagagaggagtcttggctaaacctactcacaacactattgtccggttaactccaccactctctataagctctgatgaactccgagaaggatctgaggctcttcacgatgtcctcgagctcgatcttccaaatctgctgaaaatcaattccggtaaaactccggtttctcatataaccgagtgtgatcgctgtggaagaaacctctatgcttgaaccggtttgaaacttgattaggttctggtataattagattctttgtatcttgtgatttccataggacacagcaccggtttggtataagaaatatattaaagtataaggccgaaccggattgtaccgagcttggtagaaataactctggtttatttctggtttggcattaaataaaaccaacataaaataatatgatgcctgttttcataggtgttatacatgatatctcaacaaacaaataaatgttacataacaatatgtatgg

SEQ ID NO: 45446 - protein, 475 aa, Arabidopsis thaliana
  peptide (1)..(475): Ceres Seq. ID no. 14315391
  misc_feature (49)..(447): Pfam Name: Aminotransferase class-III Pfam Description: Aminotransferase class-III
  misc_feature (34)..(434): Homolog of NCBI NO: 31228220 NR Description: ENSANGP00000010754 [Anopheles gambiae]
  misc_feature (39)..(443): Homolog of NCBI NO: 12642955 NR Description: ornithine aminotransferase [Xenopus laevis]
  misc_feature (39)..(443): Homolog of NCBI NO: 28278102 NR Description: Similar to ornithine aminotransferase [Xenopus
  misc_feature (38)..(450): Homolog of NCBI NO: 2492863 NR Description: Ornithine aminotransferase (Ornithine--oxo-acid
  misc_feature (38)..(450): Homolog of NCBI NO: 40745819 NR Description: OAT_EMENI Ornithine aminotransferase
  misc_feature (38)..(450): Homolog of NCBI NO: 7434119 NR Description: probable ornithine-oxo-acid transaminase (EC
  misc_feature (39)..(450): Homolog of NCBI NO: 19113380 NR Description: ornithine aminotransferase (EC 2.6.1.13)
  misc_feature (3)..(474): Homolog of NCBI NO: 27527063 NR Description: ornithine aminotransferase [Medicago truncatula]
  misc_feature (1)..(473): Homolog of NCBI NO: 9957234 NR Description: ornithine aminotransferase [Vitis vinifera]
  misc_feature (1)..(475): Homolog of NCBI NO: 15237392 NR Description: ornithine--oxo-acid aminotransferase (ornithine
MAATTRRLLYSVSKRFSTAGVRRSYGGLPQSNSKSPPSSSQRLMELESEFSAHNYHPVPVVFSRANGSTIWDPEGKRYIDFLAAYSAVNQGHCHPKIMKALQEQVEKLTLSSRAFYNDKFPVFAERLTNMFGYDMVLPMNTGAEGVETALKLARKWGHEKKNIPKDEAIIVSCCGCFHGRTLAIVSMSCDNDATRGFGPLLPGNLKVDFGDADSLEKIIKEKGDRIAGFLFEPIQGEAGVIIPPDGYLKAVRELCTKYNVLMIADEVQSGLARSGKMLACDWEEIRPDMVILGKALGGGVIPVSAVLADKDVMLHIKPGQHGSTFGGNPLASAVAMASLDVIVEEKLVERSASLGEELRIQLNEIKKQFPKYIKEVRGRGLFNAIEFNSESLSPVSAYDICLSLKERGVLAKPTHNTIVRLTPPLSISSDELREGSEALHDVLELDLPNLLKINSGKTPVSHITECDRCGRNLYA

SEQ ID NO: 45447 - protein, 432 aa, Arabidopsis thaliana
  peptide (1)..(432): Ceres Seq. ID no. 14315392
  misc_feature (6)..(404): Pfam Name: Aminotransferase class-III Pfam Description: Aminotransferase class-III
  misc_feature (1)..(391): Homolog of NCBI NO: 31228220 NR Description: ENSANGP00000010754 [Anopheles gambiae]
  misc_feature (1)..(400): Homolog of NCBI NO: 12642955 NR Description: ornithine aminotransferase [Xenopus laevis]
  misc_feature (1)..(400): Homolog of NCBI NO: 28278102 NR Description: Similar to ornithine aminotransferase [Xenopus
  misc_feature (1)..(407): Homolog of NCBI NO: 2492863 NR Description: Ornithine aminotransferase (Ornithine--oxo-acid
  misc_feature (1)..(407): Homolog of NCBI NO: 40745819 NR Description: OAT_EMENI Ornithine aminotransferase
  misc_feature (1)..(407): Homolog of NCBI NO: 7434119 NR Description: probable ornithine-oxo-acid transaminase (EC
  misc_feature (1)..(407): Homolog of NCBI NO: 19113380 NR Description: ornithine aminotransferase (EC 2.6.1.13)
  misc_feature (1)..(431): Homolog of NCBI NO: 27527063 NR Description: ornithine aminotransferase [Medicago truncatula]
  misc_feature (1)..(430): Homolog of NCBI NO: 9957234 NR Description: ornithine aminotransferase [Vitis vinifera]
  misc_feature (1)..(432): Homolog of NCBI NO: 15237392 NR Description: ornithine--oxo-acid aminotransferase (ornithine
MELESEFSAHNYHPVPVVFSRANGSTIWDPEGKRYIDFLAAYSAVNQGHCHPKIMKALQEQVEKLTLSSRAFYNDKFPVFAERLTNMFGYDMVLPMNTGAEGVETALKLARKWGHEKKNIPKDEAIIVSCCGCFHGRTLAIVSMSCDNDATRGFGPLLPGNLKVDFGDADSLEKIIKEKGDRIAGFLFEPIQGEAGVIIPPDGYLKAVRELCTKYNVLMIADEVQSGLARSGKMLACDWEEIRPDMVILGKALGGGVIPVSAVLADKDVMLHIKPGQHGSTFGGNPLASAVAMASLDVIVEEKLVERSASLGEELRIQLNEIKKQFPKYIKEVRGRGLFNAIEFNSESLSPVSAYDICLSLKERGVLAKPTHNTIVRLTPPLSISSDELREGSEALHDVLELDLPNLLKINSGKTPVSHITECDRCGRNLYA

SEQ ID NO: 45448 - protein, 378 aa, Arabidopsis thaliana
  peptide (1)..(378): Ceres Seq. ID no. 14315393
  misc_feature (1)..(350): Pfam Name: Aminotransferase class-III Pfam Description: Aminotransferase class-III
  misc_feature (1)..(337): Homolog of NCBI NO: 31228220 NR Description: ENSANGP00000010754 [Anopheles gambiae]
  misc_feature (1)..(346): Homolog of NCBI NO: 12642955 NR Description: ornithine aminotransferase [Xenopus laevis]
  misc_feature (1)..(346): Homolog of NCBI NO: 28278102 NR Description: Similar to ornithine aminotransferase [Xenopus
  misc_feature (1)..(353): Homolog of NCBI NO: 2492863 NR Description: Ornithine aminotransferase (Ornithine--oxo-acid
  misc_feature (1)..(353): Homolog of NCBI NO: 40745819 NR Description: OAT_EMENI Ornithine aminotransferase
  misc_feature (1)..(353): Homolog of NCBI NO: 7434119 NR Description: probable ornithine-oxo-acid transaminase (EC
  misc_feature (1)..(353): Homolog of NCBI NO: 19113380 NR Description: ornithine aminotransferase (EC 2.6.1.13)
  misc_feature (1)..(377): Homolog of NCBI NO: 27527063 NR Description: ornithine aminotransferase [Medicago truncatula]
  misc_feature (1)..(376): Homolog of NCBI NO: 9957234 NR Description: ornithine aminotransferase [Vitis vinifera]
  misc_feature (1)..(378): Homolog of NCBI NO: 15237392 NR Description: ornithine--oxo-acid aminotransferase (ornithine
MKALQEQVEKLTLSSRAFYNDKFPVFAERLTNMFGYDMVLPMNTGAEGVETALKLARKWGHEKKNIPKDEAIIVSCCGCFHGRTLAIVSMSCDNDATRGFGPLLPGNLKVDFGDADSLEKIIKEKGDRIAGFLFEPIQGEAGVIIPPDGYLKAVRELCTKYNVLMIADEVQSGLARSGKMLACDWEEIRPDMVILGKALGGGVIPVSAVLADKDVMLHIKPGQHGSTFGGNPLASAVAMASLDVIVEEKLVERSASLGEELRIQLNEIKKQFPKYIKEVRGRGLFNAIEFNSESLSPVSAYDICLSLKERGVLAKPTHNTIVRLTPPLSISSDELREGSEALHDVLELDLPNLLKINSGKTPVSHITECDRCGRNLYA

SEQ ID NO: 45449 - DNA, 2676 bp, Arabidopsis thaliana
  misc_feature (1)..(2676): Ceres Seq. ID no. 13576299
  misc_feature: MA Experiment ID: 20000315 Result: Down-regulated in Transcription
  misc_feature: MA Experiment 20000315 PARAMETER Experiment Name: At_14day_Shoots-Roots_Sub_P Parameter: Age (day) Value: 14
  misc_feature: MA Experiment 20000315 PARAMETER Experiment Name: At_14day_Shoots-Roots_Sub_P Parameter: Organism Value: A. thaliana
  misc_feature: MA Experiment 20000315 PARAMETER Experiment Name: At_14day_Shoots-Roots_Sub_P Parameter: Plant Line Value: WS
  misc_feature: MA Experiment 20000315 PARAMETER Experiment Name: At_14day_Shoots-Roots_Sub_P Parameter: Tissue Value: Shoots vs. Whole Plant
gaagaaaccaaaaaaaaaacatcccataaataagaagatcccttaacagaaggttaaaaaaaaaagatcagagtcctttggattcttcaattgcttagtctcataaatccccaaaatctctccacccagttggatttgcagctctctcagattcatcagtttcttgatctctttgttatattcaatttcacgaagattgtatccagagcagatgggtctggaagcttctttctttctcagtgatttcgatcgttccatggaccagacgtacgatgcctgagctgcgtagcaacgcacgcagagatcgggataagaagaacccgaagcagaacccaattgctttgaaacaatcacctgttaggagaaatccgaggcggcagctgaagaagaaagtggtggtgaaggaagcgatcgttgcagctgaaaagacgacgcctttggtgaaagaggaagaagaacagattagggtttcgagtgaagataagaagatggatgagaacgacagtggtggtcaagcagctccagtgcctgatgatgaaggaaacgctcctccacttcctgaaaaggttcaggttggtaattcacccatgtacaagttagatagaaagctaggcaaaggtggttttggacaagtttatgttggtcgaaagatgggcacgagtacttctaatgctagatttggcccgggagctttggaggtggctttgaagtttgagcatagaaccagcaaaggatgtaactatgggccaccgtatgagtggcaagtttacaatgcacttggtggcagtcatggtgtgccacgagttcattttaagggtcggcagggcgatttttacgtgatggttatggatatccttgggcctagcttatgggatgtttggaatagtaccacccaggcgtaaacattcactctgagaaacatttactttattttgtagcatctgaagattttgttatatgaaccattgataaacataatttttcctgagatgagcccttcaatattggtggcactcaccatatgatttgtgtgttttatacattccaggatgtcaacagagatggttgcatgcattgcaattgaggcaatatccatattagaaaagatgcattctagaggatatgtgcatggcgatgtaaaaccagagaattttctgcttgggcctcctggaactcctgaagagaaaaaacttttccttgtagacctcggcttagcatccaaatggcgagatactgcaactggactacatgttgaatatgaccagcgtcctgatgtttttagaggaacagtacgttatgctagtgtacatgctcatcttggcagaacttgcagtcggagggatgacctggaatctcttgcttacactcttgttttccttcttcgaggccggcttccatggcaagggtaccagggagagaacaaaggtttccttgtttgcaagaagaagatggccacttccccagaaactctttgctgcttctgtccccaaccttttcgtcagtttgtcgagtatgtggtcaatttgaagtttgatgaggagcctgattatgctaaatatgtctccctttttgatggaatagtcggcccaaacccagacattaggccaataaatactgagggtgcacagaagctcatacatcaagtgggtcaaaagagggggaggctgacaatggacgaggaggatgaacaaccaacaaagaagatcagattgggcatgccagcaacacaatggatcagcatttacagtgctcacagaccaatgaaacaacgatatcattataatgttactgatacaaggcttgcacaacacattgaaaaaggaaatgaggatgggttatttatcagcagtgtggcttcttgcacggatctctgggctttgatcatggatgcaggaagtggctttacggatcaagtttaccagttatcaccaagctttctccacaaggaatggattatggaacaatgggaaaagaattactatattacagcagtggcaggagcaaatagtgggaactcattcgtggttatgtcaaaagggacccagtatttacaacaatcctacaaagtcagtgattcttttcccttcaagtggataaataaaaagtggagggaagggttttatgttacatcaatggcaactgctggaagcaaatggggaattgtaatgtctcgtggggcttctttttctgatcaggttatagaactagattttctataccctagtgaaggtatacatcgtcgatgggaaaatggctacagaattacatcagttgctgcaacttgggatcaggctgcctttgttcttagtgtgccaagaaggaagcttaccgatgagacacaggagactcttagaacctctgcttttcctagtaatcatgtcaaggaaaaatggggcaagaatctttacattgcatcgatttgttatggtcgaactgtgtcatgaagttctaaattttttgttaggatgcatctcaatttagctttaccatatatccgctaagaaaaaagaatcgttgtgatcagtgatggtatgggcttagggaaccttttagcaaggttgaatgaatgtttgccaaacttcagtgatgctgcaatgtagtgtatcgactgcaaaaacttatcctacttttcaacttggatgacttgtttgatgaaagaagttaaaatttctttag

SEQ ID NO: 45450 - protein, 464 aa, Arabidopsis thaliana
  peptide (1)..(464): Ceres Seq. ID no. 13576300
  misc_feature (1)..(196): Homolog of NCBI NO: 25287608 NR Description: probable casein kinase I [imported] - Arabidopsis
  misc_feature (1)..(464): Homolog of NCBI NO: 18139937 NR Description: serine/threonine protein kinase [Chlamydomonas
  misc_feature (1)..(463): Homolog of NCBI NO: 6006848 NR Description: unknown protein, 5' partial [Arabidopsis thaliana]
  misc_feature (1)..(463): Homolog of NCBI NO: 34394436 NR Description: putative casein kinase 1, delta isoform 1
  misc_feature (1)..(463): Homolog of NCBI NO: 15238765 NR Description: casein kinase-related protein [Arabidopsis
  misc_feature (1)..(463): Homolog of NCBI NO: 15228670 NR Description: casein kinase -related [Arabidopsis thaliana]
  misc_feature (1)..(463): Homolog of NCBI NO: 28269422 NR Description: putative serine/threonine protein kinase
  misc_feature (1)..(464): Homolog of NCBI NO: 34903604 NR Description: casein kinase-like protein
  misc_feature (1)..(464): Homolog of NCBI NO: 34909952 NR Description: putative casein kinase [Oryza sativa (japonica
  misc_feature (1)..(464): Homolog of NCBI NO: 15231321 NR Description: casein kinase -related [Arabidopsis thaliana]
MSTEMVACIAIEAISILEKMHSRGYVHGDVKPENFLLGPPGTPEEKKLFLVDLGLASKWRDTATGLHVEYDQRPDVFRGTVRYASVHAHLGRTCSRRDDLESLAYTLVFLLRGRLPWQGYQGENKGFLVCKKKMATSPETLCCFCPQPFRQFVEYVVNLKFDEEPDYAKYVSLFDGIVGPNPDIRPINTEGAQKLIHQVGQKRGRLTMDEEDEQPTKKIRLGMPATQWISIYSAHRPMKQRYHYNVTDTRLAQHIEKGNEDGLFISSVASCTDLWALIMDAGSGFTDQVYQLSPSFLHKEWIMEQWEKNYYITAVAGANSGNSFVVMSKGTQYLQQSYKVSDSFPFKWINKKWREGFYVTSMATAGSKWGIVMSRGASFSDQVIELDFLYPSEGIHRRWENGYRITSVAATWDQAAFVLSVPRRKLTDETQETLRTSAFPSNHVKEKWGKNLYIASICYGRTVS

SEQ ID NO: 45451 - protein, 460 aa, Arabidopsis thaliana
  peptide (1)..(460): Ceres Seq. ID no. 13576301
  misc_feature (1)..(192): Homolog of NCBI NO: 25287608 NR Description: probable casein kinase I [imported] - Arabidopsis
  misc_feature (1)..(460): Homolog of NCBI NO: 18139937 NR Description: serine/threonine protein kinase [Chlamydomonas
  misc_feature (1)..(459): Homolog of NCBI NO: 6006848 NR Description: unknown protein, 5' partial [Arabidopsis thaliana]
  misc_feature (1)..(459): Homolog of NCBI NO: 34394436 NR Description: putative casein kinase 1, delta isoform 1
  misc_feature (1)..(459): Homolog of NCBI NO: 15238765 NR Description: casein kinase-related protein [Arabidopsis
  misc_feature (1)..(459): Homolog of NCBI NO: 15228670 NR Description: casein kinase -related [Arabidopsis thaliana]
  misc_feature (1)..(459): Homolog of NCBI NO: 28269422 NR Description: putative serine/threonine protein kinase
  misc_feature (1)..(460): Homolog of NCBI NO: 34903604 NR Description: casein kinase-like protein
  misc_feature (1)..(460): Homolog of NCBI NO: 34909952 NR Description: putative casein kinase [Oryza sativa (japonica
  misc_feature (1)..(460): Homolog of NCBI NO: 15231321 NR Description: casein kinase -related [Arabidopsis thaliana]
MVACIAIEAISILEKMHSRGYVHGDVKPENFLLGPPGTPEEKKLFLVDLGLASKWRDTATGLHVEYDQRPDVFRGTVRYASVHAHLGRTCSRRDDLESLAYTLVFLLRGRLPWQGYQGENKGFLVCKKKMATSPETLCCFCPQPFRQFVEYVVNLKFDEEPDYAKYVSLFDGIVGPNPDIRPINTEGAQKLIHQVGQKRGRLTMDEEDEQPTKKIRLGMPATQWISIYSAHRPMKQRYHYNVTDTRLAQHIEKGNEDGLFISSVASCTDLWALIMDAGSGFTDQVYQLSPSFLHKEWIMEQWEKNYYITAVAGANSGNSFVVMSKGTQYLQQSYKVSDSFPFKWINKKWREGFYVTSMATAGSKWGIVMSRGASFSDQVIELDFLYPSEGIHRRWENGYRITSVAATWDQAAFVLSVPRRKLTDETQETLRTSAFPSNHVKEKWGKNLYIASICYGRTVS

SEQ ID NO: 45452 - protein, 445 aa, Arabidopsis thaliana
  peptide (1)..(445): Ceres Seq. ID no. 13576302
  misc_feature (1)..(177): Homolog of NCBI NO: 25287608 NR Description: probable casein kinase I [imported] - Arabidopsis
  misc_feature (1)..(445): Homolog of NCBI NO: 18139937 NR Description: serine/threonine protein kinase [Chlamydomonas
  misc_feature (1)..(444): Homolog of NCBI NO: 6006848 NR Description: unknown protein, 5' partial [Arabidopsis thaliana]
  misc_feature (1)..(444): Homolog of NCBI NO: 34394436 NR Description: putative casein kinase 1, delta isoform 1
  misc_feature (1)..(444): Homolog of NCBI NO: 15238765 NR Description: casein kinase-related protein [Arabidopsis
  misc_feature (1)..(444): Homolog of NCBI NO: 15228670 NR Description: casein kinase -related [Arabidopsis thaliana]
  misc_feature (1)..(444): Homolog of NCBI NO: 28269422 NR Description: putative serine/threonine protein kinase
  misc_feature (1)..(445): Homolog of NCBI NO: 34903604 NR Description: casein kinase-like protein
  misc_feature (1)..(445): Homolog of NCBI NO: 34909952 NR Description: putative casein kinase [Oryza sativa (japonica
  misc_feature (1)..(445): Homolog of NCBI NO: 15231321 NR Description: casein kinase -related [Arabidopsis thaliana]
MHSRGYVHGDVKPENFLLGPPGTPEEKKLFLVDLGLASKWRDTATGLHVEYDQRPDVFRGTVRYASVHAHLGRTCSRRDDLESLAYTLVFLLRGRLPWQGYQGENKGFLVCKKKMATSPETLCCFCPQPFRQFVEYVVNLKFDEEPDYAKYVSLFDGIVGPNPDIRPINTEGAQKLIHQVGQKRGRLTMDEEDEQPTKKIRLGMPATQWISIYSAHRPMKQRYHYNVTDTRLAQHIEKGNEDGLFISSVASCTDLWALIMDAGSGFTDQVYQLSPSFLHKEWIMEQWEKNYYITAVAGANSGNSFVVMSKGTQYLQQSYKVSDSFPFKWINKKWREGFYVTSMATAGSKWGIVMSRGASFSDQVIELDFLYPSEGIHRRWENGYRITSVAATWDQAAFVLSVPRRKLTDETQETLRTSAFPSNHVKEKWGKNLYIASICYGRTVS

SEQ ID NO: 45453 - DNA, 2045 bp, Arabidopsis thaliana
  misc_feature (1)..(2045): Ceres Seq. ID no. 13646591
  misc_feature: MA Experiment ID: 20000171 Result: Up-regulated in Transcription
  misc_feature: MA Experiment 20000171 PARAMETER Experiment Name: At_42deg_Heat_P Parameter: Age (day) Value: 14
  misc_feature: MA Experiment 20000171 PARAMETER Experiment Name: At_42deg_Heat_P Parameter: Organism Value: A. thaliana
  misc_feature: MA Experiment 20000171 PARAMETER Experiment Name: At_42deg_Heat_P Parameter: Plant Line Value: WS
  misc_feature: MA Experiment 20000171 PARAMETER Experiment Name: At_42deg_Heat_P Parameter: Temperature (deg C) Value: 42 vs. 22
  misc_feature: MA Experiment 20000171 PARAMETER Experiment Name: At_42deg_Heat_P Parameter: Timepoint (hr) Value: 1
  misc_feature: MA Experiment 20000171 PARAMETER Experiment Name: At_42deg_Heat_P Parameter: Tissue Value: Aerial
  misc_feature: MA Experiment ID: 20000173 Result: Up-regulated in Transcription
  misc_feature: MA Experiment 20000173 PARAMETER Experiment Name: At_42deg_Heat_P Parameter: Age (day) Value: 14
  misc_feature: MA Experiment 20000173 PARAMETER Experiment Name: At_42deg_Heat_P Parameter: Organism Value: A. thaliana
  misc_feature: MA Experiment 20000173 PARAMETER Experiment Name: At_42deg_Heat_P Parameter: Plant Line Value: WS
  misc_feature: MA Experiment 20000173 PARAMETER Experiment Name: At_42deg_Heat_P Parameter: Temperature (deg C) Value: 42 vs. 22
  misc_feature: MA Experiment 20000173 PARAMETER Experiment Name: At_42deg_Heat_P Parameter: Timepoint (hr) Value: 6
  misc_feature: MA Experiment 20000173 PARAMETER Experiment Name: At_42deg_Heat_P Parameter: Tissue Value: Aerial
  misc_feature: MA Experiment ID: 20000185 Result: Up-regulated in Transcription
  misc_feature: MA Experiment 20000185 PARAMETER Experiment Name: At_Roots__P Parameter: Age (day) Value: 7 vs. 21
  misc_feature: MA Experiment 20000185 PARAMETER Experiment Name: At_Roots__P Parameter: Organism Value: A. thaliana
  misc_feature: MA Experiment 20000185 PARAMETER Experiment Name: At_Roots__P Parameter: Tissue Value: Roots vs. Whole Plant
  misc_feature: MA Experiment ID: 20000227 Result: Up-regulated in Transcription
  misc_feature: MA Experiment 20000227 PARAMETER Experiment Name: At_Root-Tips-vs-Tops_P Parameter: Tissue Value: Root Tips vs. Root Tops
  misc_feature: MA Experiment ID: 20000234 Result: Up-regulated in Transcription
  misc_feature: MA Experiment 20000234 PARAMETER Experiment Name: At_Siliques_P Parameter: Age (day) Value: 21
  misc_feature: MA Experiment 20000234 PARAMETER Experiment Name: At_Siliques_P Parameter: Organism Value: A. thaliana
  misc_feature: MA Experiment 20000234 PARAMETER Experiment Name: At_Siliques_P Parameter: Plant Line Value: WS
  misc_feature: MA Experiment 20000234 PARAMETER Experiment Name: At_Siliques_P Parameter: Tissue Value: Less Than 5mm Siliques vs. Whole Plant
  misc_feature: MA Experiment ID: 20000264 Result: Up-regulated in Transcription
  misc_feature: MA Experiment 20000264 PARAMETER Experiment Name: At_Open_Flower_P Parameter: Age (day) Value: 21
  misc_feature: MA Experiment 20000264 PARAMETER Experiment Name: At_Open_Flower_P Parameter: Plant Line Value: WS
  misc_feature: MA Experiment 20000264 PARAMETER Experiment Name: At_Open_Flower_P Parameter: Tissue Value: Open Flower vs. Whole Plant
  misc_feature: MA Experiment ID: 20001557 Result: Up-regulated in Transcription
  misc_feature: MA Experiment 20001557 PARAMETER Experiment Name: At_Drought_Soil_Dry_P Parameter: Age (day) Value: 27
  misc_feature: MA Experiment 20001557 PARAMETER Experiment Name: At_Drought_Soil_Dry_P Parameter: Organism Value: A. thaliana
  misc_feature: MA Experiment 20001557 PARAMETER Experiment Name: At_Drought_Soil_Dry_P Parameter: Plant Line Value: WS
  misc_feature: MA Experiment 20001557 PARAMETER Experiment Name: At_Drought_Soil_Dry_P Parameter: Post Timepoint (hr) Value: 3
  misc_feature: MA Experiment 20001557 PARAMETER Experiment Name: At_Drought_Soil_Dry_P Parameter: Post-Treatment Value: Re-Water vs. No Drought
  misc_feature: MA Experiment 20001557 PARAMETER Experiment Name: At_Drought_Soil_Dry_P Parameter: Timepoint (day) Value: 13
  misc_feature: MA Experiment 20001557 PARAMETER Experiment Name: At_Drought_Soil_Dry_P Parameter: Treatment Value: Drought vs. No Drought
  misc_feature: MA Experiment ID: 20001558 Result: Up-regulated in Transcription
  misc_feature: MA Experiment 20001558 PARAMETER Experiment Name: At_Drought_Soil_Dry_P Parameter: Age (day) Value: 27
  misc_feature: MA Experiment 20001558 PARAMETER Experiment Name: At_Drought_Soil_Dry_P Parameter: Organism Value: A. thaliana
  misc_feature: MA Experiment 20001558 PARAMETER Experiment Name: At_Drought_Soil_Dry_P Parameter: Plant Line Value: WS
  misc_feature: MA Experiment 20001558 PARAMETER Experiment Name: At_Drought_Soil_Dry_P Parameter: Post Timepoint (hr) Value: 6
  misc_feature: MA Experiment 20001558 PARAMETER Experiment Name: At_Drought_Soil_Dry_P Parameter: Post-Treatment Value: Re-Water vs. No Drought
  misc_feature: MA Experiment 20001558 PARAMETER Experiment Name: At_Drought_Soil_Dry_P Parameter: Timepoint (day) Value: 13
  misc_feature: MA Experiment 20001558 PARAMETER Experiment Name: At_Drought_Soil_Dry_P Parameter: Treatment Value: Drought vs. No Drought
gggccacttttactcacagaaaaccttctctctaaacttcttcgaaaatctcacagagcttcttcttcttcgcttttagggtttttgctctattgtttcgagtgacccaacttcgaagcttatagatcgttaccttagaaaatggtgggtatgtcgatgcagccatatggtattcaatcgatgcttaaagaaggttacaggcatctctctggtctcgacgaagccgtcattaagaacattgaagcttgcaaggagctctccaccattactcgcacctctctcggtcccaatggaatgaataaaatggttatcaatcatttggacaaactgtttgtcacaaatgacgctgctactatagtgaatgagctcgagattcagcacccggctgctaaacttctggttttagctgctaaggctcagcaagaagaaatcggagatggagctaatctgacaatctcctttgctggtgaacttcttcaaaacgctgaggagcttatcaggatgggacttcatccgagtgagatcattagtggatatactaaagctgtcagcaaggctgttgaaatactggaacaactggttgagactggttctgagaccatggatgtacgtaacaaggatgaagttatttctcggatgagagcagctgttgcaagcaagcagtttgggcaagaggaaataatttgctctttagttactgacgcatgtattcaagtctgcccaaagaatccaacgaatttcaatgtggataatgttcgtgtttccaagcttttgggaggaggcttgcacaattcttgcatagtccgtggtatggtcttgaaaagtgatgctgttggtagcattaagcgaatggagaaagcgaaggttgctgtatttgctggtggcgttgataccactgcaacagagaccaaaggaactgtcctcattcatagtgctgagcagctagagaactatgcaaagacagaggaagctaaagttgaggagttgattaaagcagttgcggaatcaggagccaaagtcattgttagtggaggatcaattggagaaatggcattgcatttctgtgagcgctacaagataatggtattgaaaatcagctcaaagtttgaactgaggcgtttttgccgtacagcgggggctgtcgcccatttgaagcttagccggccaagccctgaagatcttggatatgttgattctatatcggttgaggaaattggtggtgtgacagtcacgattgcaagaaacgaggaaggtggtaactccatctccactgtggtcttgcgtggaagcacagatagcattttggacgaccttgagagagctgttgatgatggagttaacacatacaaggccatgtgcagagacagccgtattgttcccggggctgcagcgactgaaatagagttggctcaaaggttgaaggaatacgccaatgcagaaatagggttggacaaatatgccatcaccaaatacgctgagagttttgagtttgtacccaagacccttgcagataatgctggcctcaatgcgatggaaatcatagccgctctgtacactggacatggatctggaaacacaaaactaggcattgacttagaggaaggtgcttgtaaagatgtttcagagacaaaagtatgggatctttttgcaaccaagttatttgcccttaaatatgcttcagatgctgcatgcactgtacttcgtgtagaccagattataatggcgaaaccagcaggtggaccaaggagagatgcagctcaagctgcaggtgctggtgcggaggaagactaagccggagaacaaatacctcgtagtgaaactctcttcttttgtaaccttctgttcctgaaagtctgagaaaattttggtatgtctcagtttaagatttgtgatctttgtaacgcaccaccaacttaagtgttttgccttctttttctgttttgccttgttttggctcgtctcaacactcagattttccggtttagctagtgaaattattactaggatttttggcttaactctgtattaatgtcaatttggtttct

SEQ ID NO: 45454 - protein, 549 aa, Arabidopsis thaliana
  peptide (1)..(549): Ceres Seq. ID no. 13646592
  misc_feature (39)..(525): Pfam Name: TCP-1/cpn60 chaperonin family Pfam Description: TCP-1/cpn60 chaperonin family
  misc_feature (39)..(525): Pfam Name: TCP-1/cpn60 chaperonin family Pfam Description: TCP-1/cpn60 chaperonin family
  misc_feature (10)..(537): Homolog of NCBI NO: 23478707 NR Description: T-complex protein 1 [Plasmodium yoelii yoelii]
  misc_feature (10)..(535): Homolog of NCBI NO: 1136741 NR Description: KIAA0002 [Homo sapiens]
  misc_feature (10)..(535): Homolog of NCBI NO: 9988062 NR Description: T-complex protein 1, theta subunit (TCP-1-theta)
  misc_feature (10)..(535): Homolog of NCBI NO: 37362194 NR Description: chaperonin containing TCP1, subunit 8 (theta)
  misc_feature (10)..(535): Homolog of NCBI NO: 29791676 NR Description: Similar to chaperonin containing TCP1, subunit 8
  misc_feature (10)..(537): Homolog of NCBI NO: 23478707 NR Description: T-complex protein 1 [Plasmodium yoelii yoelii]
  misc_feature (10)..(535): Homolog of NCBI NO: 9988062 NR Description: T-complex protein 1, theta subunit (TCP-1-theta)
  misc_feature (10)..(535): Homolog of NCBI NO: 29791676 NR Description: Similar to chaperonin containing TCP1, subunit 8
  misc_feature (1)..(549): Homolog of NCBI NO: 18396719 NR Description: chaperonin, putative [Arabidopsis thaliana]
  misc_feature (1)..(525): Homolog of NCBI NO: 6223641 NR Description: putative T-complex protein 1, theta subunit
  misc_feature (10)..(535): Homolog of NCBI NO: 28829459 NR Description: similar to Physarum polycephalum (Slime mold).
  misc_feature (11)..(535): Homolog of NCBI NO: 17066726 NR Description: CCT chaperonin theta subunit [Physarum
  misc_feature (10)..(535): Homolog of NCBI NO: 27924345 NR Description: Similar to chaperonin containing TCP1, subunit 8
  misc_feature (10)..(535): Homolog of NCBI NO: 37362194 NR Description: chaperonin containing TCP1, subunit 8 (theta)
  misc_feature (10)..(535): Homolog of NCBI NO: 1136741 NR Description: KIAA0002 [Homo sapiens]
  misc_feature (10)..(535): Homolog of NCBI NO: 27924345 NR Description: Similar to chaperonin containing TCP1, subunit 8
  misc_feature (11)..(535): Homolog of NCBI NO: 17066726 NR Description: CCT chaperonin theta subunit [Physarum
  misc_feature (10)..(535): Homolog of NCBI NO: 28829459 NR Description: similar to Physarum polycephalum (Slime mold).
  misc_feature (1)..(525): Homolog of NCBI NO: 6223641 NR Description: putative T-complex protein 1, theta subunit
  misc_feature (1)..(549): Homolog of NCBI NO: 18396719 NR Description: chaperonin, putative [Arabidopsis thaliana]
MVGMSMQPYGIQSMLKEGYRHLSGLDEAVIKNIEACKELSTITRTSLGPNGMNKMVINHLDKLFVTNDAATIVNELEIQHPAAKLLVLAAKAQQEEIGDGANLTISFAGELLQNAEELIRMGLHPSEIISGYTKAVSKAVEILEQLVETGSETMDVRNKDEVISRMRAAVASKQFGQEEIICSLVTDACIQVCPKNPTNFNVDNVRVSKLLGGGLHNSCIVRGMVLKSDAVGSIKRMEKAKVAVFAGGVDTTATETKGTVLIHSAEQLENYAKTEEAKVEELIKAVAESGAKVIVSGGSIGEMALHFCERYKIMVLKISSKFELRRFCRTAGAVAHLKLSRPSPEDLGYVDSISVEEIGGVTVTIARNEEGGNSISTVVLRGSTDSILDDLERAVDDGVNTYKAMCRDSRIVPGAAATEIELAQRLKEYANAEIGLDKYAITKYAESFEFVPKTLADNAGLNAMEIIAALYTGHGSGNTKLGIDLEEGACKDVSETKVWDLFATKLFALKYASDAACTVLRVDQIIMAKPAGGPRRDAAQAAGAGAEED

SEQ ID NO: 45455 - protein, 546 aa, Arabidopsis thaliana
  peptide (1)..(546): Ceres Seq. ID no. 13646593
  misc_feature (36)..(522): Pfam Name: TCP-1/cpn60 chaperonin family Pfam Description: TCP-1/cpn60 chaperonin family
  misc_feature (36)..(522): Pfam Name: TCP-1/cpn60 chaperonin family Pfam Description: TCP-1/cpn60 chaperonin family
  misc_feature (7)..(534): Homolog of NCBI NO: 23478707 NR Description: T-complex protein 1 [Plasmodium yoelii yoelii]
  misc_feature (7)..(532): Homolog of NCBI NO: 1136741 NR Description: KIAA0002 [Homo sapiens]
  misc_feature (7)..(532): Homolog of NCBI NO: 9988062 NR Description: T-complex protein 1, theta subunit (TCP-1-theta)
  misc_feature (7)..(532): Homolog of NCBI NO: 37362194 NR Description: chaperonin containing TCP1, subunit 8 (theta)
  misc_feature (7)..(532): Homolog of NCBI NO: 29791676 NR Description: Similar to chaperonin containing TCP1, subunit 8
  misc_feature (7)..(534): Homolog of NCBI NO: 23478707 NR Description: T-complex protein 1 [Plasmodium yoelii yoelii]
  misc_feature (7)..(532): Homolog of NCBI NO: 9988062 NR Description: T-complex protein 1, theta subunit (TCP-1-theta)
  misc_feature (7)..(532): Homolog of NCBI NO: 29791676 NR Description: Similar to chaperonin containing TCP1, subunit 8
  misc_feature (1)..(546): Homolog of NCBI NO: 18396719 NR Description: chaperonin, putative [Arabidopsis thaliana]
  misc_feature (1)..(522): Homolog of NCBI NO: 6223641 NR Description: putative T-complex protein 1, theta subunit
  misc_feature (7)..(532): Homolog of NCBI NO: 28829459 NR Description: similar to Physarum polycephalum (Slime mold).
  misc_feature (8)..(532): Homolog of NCBI NO: 17066726 NR Description: CCT chaperonin theta subunit [Physarum
  misc_feature (7)..(532): Homolog of NCBI NO: 27924345 NR Description: Similar to chaperonin containing TCP1, subunit 8
  misc_feature (7)..(532): Homolog of NCBI NO: 37362194 NR Description: chaperonin containing TCP1, subunit 8 (theta)
  misc_feature (7)..(532): Homolog of NCBI NO: 1136741 NR Description: KIAA0002 [Homo sapiens]
  misc_feature (7)..(532): Homolog of NCBI NO: 27924345 NR Description: Similar to chaperonin containing TCP1, subunit 8
  misc_feature (8)..(532): Homolog of NCBI NO: 17066726 NR Description: CCT chaperonin theta subunit [Physarum
  misc_feature (7)..(532): Homolog of NCBI NO: 28829459 NR Description: similar to Physarum polycephalum (Slime mold).
  misc_feature (1)..(522): Homolog of NCBI NO: 6223641 NR Description: putative T-complex protein 1, theta subunit
  misc_feature (1)..(546): Homolog of NCBI NO: 18396719 NR Description: chaperonin, putative [Arabidopsis thaliana]
MSMQPYGIQSMLKEGYRHLSGLDEAVIKNIEACKELSTITRTSLGPNGMNKMVINHLDKLFVTNDAATIVNELEIQHPAAKLLVLAAKAQQEEIGDGANLTISFAGELLQNAEELIRMGLHPSEIISGYTKAVSKAVEILEQLVETGSETMDVRNKDEVISRMRAAVASKQFGQEEIICSLVTDACIQVCPKNPTNFNVDNVRVSKLLGGGLHNSCIVRGMVLKSDAVGSIKRMEKAKVAVFAGGVDTTATETKGTVLIHSAEQLENYAKTEEAKVEELIKAVAESGAKVIVSGGSIGEMALHFCERYKIMVLKISSKFELRRFCRTAGAVAHLKLSRPSPEDLGYVDSISVEEIGGVTVTIARNEEGGNSISTVVLRGSTDSILDDLERAVDDGVNTYKAMCRDSRIVPGAAATEIELAQRLKEYANAEIGLDKYAITKYAESFEFVPKTLADNAGLNAMEIIAALYTGHGSGNTKLGIDLEEGACKDVSETKVWDLFATKLFALKYASDAACTVLRVDQIIMAKPAGGPRRDAAQAAGAGAEED

SEQ ID NO: 45456 - protein, 544 aa, Arabidopsis thaliana
  peptide (1)..(544): Ceres Seq. ID no. 13646594
  misc_feature (34)..(520): Pfam Name: TCP-1/cpn60 chaperonin family Pfam Description: TCP-1/cpn60 chaperonin family
  misc_feature (34)..(520): Pfam Name: TCP-1/cpn60 chaperonin family Pfam Description: TCP-1/cpn60 chaperonin family
  misc_feature (5)..(532): Homolog of NCBI NO: 23478707 NR Description: T-complex protein 1 [Plasmodium yoelii yoelii]
  misc_feature (5)..(530): Homolog of NCBI NO: 1136741 NR Description: KIAA0002 [Homo sapiens]
  misc_feature (5)..(530): Homolog of NCBI NO: 9988062 NR Description: T-complex protein 1, theta subunit (TCP-1-theta)
  misc_feature (5)..(530): Homolog of NCBI NO: 37362194 NR Description: chaperonin containing TCP1, subunit 8 (theta)
  misc_feature (5)..(530): Homolog of NCBI NO: 29791676 NR Description: Similar to chaperonin containing TCP1, subunit 8
  misc_feature (5)..(532): Homolog of NCBI NO: 23478707 NR Description: T-complex protein 1 [Plasmodium yoelii yoelii]
  misc_feature (5)..(530): Homolog of NCBI NO: 9988062 NR Description: T-complex protein 1, theta subunit (TCP-1-theta)
  misc_feature (5)..(530): Homolog of NCBI NO: 29791676 NR Description: Similar to chaperonin containing TCP1, subunit 8
  misc_feature (1)..(544): Homolog of NCBI NO: 18396719 NR Description: chaperonin, putative [Arabidopsis thaliana]
  misc_feature (1)..(520): Homolog of NCBI NO: 6223641 NR Description: putative T-complex protein 1, theta subunit
  misc_feature (5)..(530): Homolog of NCBI NO: 28829459 NR Description: similar to Physarum polycephalum (Slime mold).
  misc_feature (6)..(530): Homolog of NCBI NO: 17066726 NR Description: CCT chaperonin theta subunit [Physarum
  misc_feature (5)..(530): Homolog of NCBI NO: 27924345 NR Description: Similar to chaperonin containing TCP1, subunit 8
  misc_feature (5)..(530): Homolog of NCBI NO: 37362194 NR Description: chaperonin containing TCP1, subunit 8 (theta)
  misc_feature (5)..(530): Homolog of NCBI NO: 1136741 NR Description: KIAA0002 [Homo sapiens]
  misc_feature (5)..(530): Homolog of NCBI NO: 27924345 NR Description: Similar to chaperonin containing TCP1, subunit 8
  misc_feature (6)..(530): Homolog of NCBI NO: 17066726 NR Description: CCT chaperonin theta subunit [Physarum
  misc_feature (5)..(530): Homolog of NCBI NO: 28829459 NR Description: similar to Physarum polycephalum (Slime mold).
  misc_feature (1)..(520): Homolog of NCBI NO: 6223641 NR Description: putative T-complex protein 1, theta subunit
  misc_feature (1)..(544): Homolog of NCBI NO: 18396719 NR Description: chaperonin, putative [Arabidopsis thaliana]
MQPYGIQSMLKEGYRHLSGLDEAVIKNIEACKELSTITRTSLGPNGMNKMVINHLDKLFVTNDAATIVNELEIQHPAAKLLVLAAKAQQEEIGDGANLTISFAGELLQNAEELIRMGLHPSEIISGYTKAVSKAVEILEQLVETGSETMDVRNKDEVISRMRAAVASKQFGQEEIICSLVTDACIQVCPKNPTNFNVDNVRVSKLLGGGLHNSCIVRGMVLKSDAVGSIKRMEKAKVAVFAGGVDTTATETKGTVLIHSAEQLENYAKTEEAKVEELIKAVAESGAKVIVSGGSIGEMALHFCERYKIMVLKISSKFELRRFCRTAGAVAHLKLSRPSPEDLGYVDSISVEEIGGVTVTIARNEEGGNSISTVVLRGSTDSILDDLERAVDDGVNTYKAMCRDSRIVPGAAATEIELAQRLKEYANAEIGLDKYAITKYAESFEFVPKTLADNAGLNAMEIIAALYTGHGSGNTKLGIDLEEGACKDVSETKVWDLFATKLFALKYASDAACTVLRVDQIIMAKPAGGPRRDAAQAAGAGAEED

SEQ ID NO: 45457 - DNA, 1996 bp, Arabidopsis thaliana; identical to SEQ ID NO: 41756
  misc_feature (1)..(1996): Ceres Seq. ID no. 12639081
  misc_feature: MA Experiment ID: 108433 Result: Up-regulated in Transcription
  misc_feature: MA Experiment 108433 PARAMETER Experiment Name: At_rhl_Mutant2_cDNA_P Parameter: Age (day) Value: 7
  misc_feature: MA Experiment 108433 PARAMETER Experiment Name: At_rhl_Mutant2_cDNA_P Parameter: Organism Value: A. thaliana
  misc_feature: MA Experiment 108433 PARAMETER Experiment Name: At_rhl_Mutant2_cDNA_P Parameter: Plant Line Value: rhl Mutant vs. wt landsburg
  misc_feature: MA Experiment 108433 PARAMETER Experiment Name: At_rhl_Mutant2_cDNA_P Parameter: Tissue Value: Roots
  misc_feature: MA Experiment ID: 108462 Result: Up-regulated in Transcription
  misc_feature: MA Experiment 108462 PARAMETER Experiment Name: At_Germinating_Seeds_cDNA_P Parameter: Age (day) Value: 2 vs. 0
  misc_feature: MA Experiment 108462 PARAMETER Experiment Name: At_Germinating_Seeds_cDNA_P Parameter: Tissue Value: Germinating Seeds
  misc_feature: MA Experiment ID: 108464 Result: Up-regulated in Transcription
  misc_feature: MA Experiment 108464 PARAMETER Experiment Name: At_Germinating_Seeds_cDNA_P Parameter: Age (day) Value: 4 vs. 0
  misc_feature: MA Experiment 108464 PARAMETER Experiment Name: At_Germinating_Seeds_cDNA_P Parameter: Tissue Value: Germinating Seeds
  misc_feature: MA Experiment ID: 108585 Result: Up-regulated in Transcription
  misc_feature: MA Experiment 108585 PARAMETER Experiment Name: At_5mM_NaNP_cDNA_P Parameter: Timepoint (hr) Value: 6
  misc_feature: MA Experiment 108585 PARAMETER Experiment Name: At_5mM_NaNP_cDNA_P Parameter: Tissue Value: Aerial
  misc_feature: MA Experiment 108585 PARAMETER Experiment Name: At_5mM_NaNP_cDNA_P Parameter: Treatment Value: null
  misc_feature: MA Experiment ID: 108668 Result: Up-regulated in Transcription
  misc_feature: MA Experiment 108668 PARAMETER Experiment Name: At_2mM_SA_cDNA_P Parameter: Plant Line Value: WS
  misc_feature: MA Experiment 108668 PARAMETER Experiment Name: At_2mM_SA_cDNA_P Parameter: Timepoint (hr) Value: 6
  misc_feature: MA Experiment 108668 PARAMETER Experiment Name: At_2mM_SA_cDNA_P Parameter: Treatment Value: 2mM SA vs. No Treatment
  misc_feature: MA Experiment ID: 20000173 Result: Down-regulated in Transcription
  misc_feature: MA Experiment 20000173 PARAMETER Experiment Name: At_42deg_Heat_P Parameter: Age (day) Value: 14
  misc_feature: MA Experiment 20000173 PARAMETER Experiment Name: At_42deg_Heat_P Parameter: Organism Value: A. thaliana
  misc_feature: MA Experiment 20000173 PARAMETER Experiment Name: At_42deg_Heat_P Parameter: Plant Line Value: WS
  misc_feature: MA Experiment 20000173 PARAMETER Experiment Name: At_42deg_Heat_P Parameter: Temperature (deg C) Value: 42 vs. 22
  misc_feature: MA Experiment 20000173 PARAMETER Experiment Name: At_42deg_Heat_P Parameter: Timepoint (hr) Value: 6
  misc_feature: MA Experiment 20000173 PARAMETER Experiment Name: At_42deg_Heat_P Parameter: Tissue Value: Aerial
  misc_feature: MA Experiment ID: 20000182 Result: Up-regulated in Transcription
  misc_feature: MA Experiment 20000182 PARAMETER Experiment Name: At_2mM_SA_P Parameter: Age (day) Value: 14
  misc_feature: MA Experiment 20000182 PARAMETER Experiment Name: At_2mM_SA_P Parameter: Organism Value: A. thaliana
  misc_feature: MA Experiment 20000182 PARAMETER Experiment Name: At_2mM_SA_P Parameter: Plant Line Value: WS
  misc_feature: MA Experiment 20000182 PARAMETER Experiment Name: At_2mM_SA_P Parameter: Timepoint (hr) Value: 6
  misc_feature: MA Experiment 20000182 PARAMETER Experiment Name: At_2mM_SA_P Parameter: Tissue Value: Aerial
  misc_feature: MA Experiment 20000182 PARAMETER Experiment Name: At_2mM_SA_P Parameter: Treatment Value: 2mM SA vs. No Treatment
  misc_feature: MA Experiment ID: 20000184 Result: Down-regulated in Transcription
  misc_feature: MA Experiment 20000184 PARAMETER Experiment Name: At_Shoots__P Parameter: Age (day) Value: 7
  misc_feature: MA Experiment 20000184 PARAMETER Experiment Name: At_Shoots__P Parameter: Tissue Value: Shoots vs. Whole Plant
  misc_feature: MA Experiment ID: 20000234 Result: Down-regulated in Transcription
  misc_feature: MA Experiment 20000234 PARAMETER Experiment Name: At_Siliques_P Parameter: Age (day) Value: 21
  misc_feature: MA Experiment 20000234 PARAMETER Experiment Name: At_Siliques_P Parameter: Organism Value: A. thaliana
  misc_feature: MA Experiment 20000234 PARAMETER Experiment Name: At_Siliques_P Parameter: Plant Line Value: WS
  misc_feature: MA Experiment 20000234 PARAMETER Experiment Name: At_Siliques_P Parameter: Tissue Value: Less Than 5mm Siliques vs. Whole Plant
  misc_feature: MA Experiment ID: 20000264 Result: Down-regulated in Transcription
  misc_feature: MA Experiment 20000264 PARAMETER Experiment Name: At_Open_Flower_P Parameter: Age (day) Value: 21
  misc_feature: MA Experiment 20000264 PARAMETER Experiment Name: At_Open_Flower_P Parameter: Plant Line Value: WS
  misc_feature: MA Experiment 20000264 PARAMETER Experiment Name: At_Open_Flower_P Parameter: Tissue Value: Open Flower vs. Whole Plant
  misc_feature: MA Experiment ID: 20000265 Result: Down-regulated in Transcription
  misc_feature: MA Experiment 20000265 PARAMETER Experiment Name: At_Open_Flower_P Parameter: Age (day) Value: 21
  misc_feature: MA Experiment 20000265 PARAMETER Experiment Name: At_Open_Flower_P Parameter: Plant Line Value: WS
  misc_feature: MA Experiment 20000265 PARAMETER Experiment Name: At_Open_Flower_P Parameter: Tissue Value: Closed Flower vs. Whole Plant
  misc_feature: MA Experiment ID: 20000286 Result: Down-regulated in Transcription
  misc_feature: MA Experiment 20000286 PARAMETER Experiment Name: At_Open_Flower_P Parameter: Age (day) Value: 21
  misc_feature: MA Experiment 20000286 PARAMETER Experiment Name: At_Open_Flower_P Parameter: Plant Line Value: WS
  misc_feature: MA Experiment 20000286 PARAMETER Experiment Name: At_Open_Flower_P Parameter: Tissue Value: Half Open vs. Whole Plant
  misc_feature: MA Experiment ID: 20000438 Result: Down-regulated in Transcription
  misc_feature: MA Experiment 20000438 PARAMETER Experiment Name: At_Shoots__P Parameter: Age (day) Value: 14
  misc_feature: MA Experiment 20000438 PARAMETER Experiment Name: At_Shoots__P Parameter: Tissue Value: Shoots vs. Whole Plant
  misc_feature: MA Experiment ID: 20000445 Result: Up-regulated in Transcription
  misc_feature: MA Experiment 20000445 PARAMETER Experiment Name: At_100uM_NAA__P Parameter: Age (day) Value: 14
  misc_feature: MA Experiment 20000445 PARAMETER Experiment Name: At_100uM_NAA__P Parameter: Organism Value: A. thaliana
  misc_feature: MA Experiment 20000445 PARAMETER Experiment Name: At_100uM_NAA__P Parameter: Plant Line Value: WS
  misc_feature: MA Experiment 20000445 PARAMETER Experiment Name: At_100uM_NAA__P Parameter: Timepoint (hr) Value: 6
  misc_feature: MA Experiment 20000445 PARAMETER Experiment Name: At_100uM_NAA__P Parameter: Tissue Value: Aerial
  misc_feature: MA Experiment 20000445 PARAMETER Experiment Name: At_100uM_NAA__P Parameter: Treatment Value: 100uM NAA vs. No Treatment
  misc_feature: MA Experiment ID: 20001557 Result: Down-regulated in Transcription
  misc_feature: MA Experiment 20001557 PARAMETER Experiment Name: At_Drought_Soil_Dry_P Parameter: Age (day) Value: 27
  misc_feature: MA Experiment 20001557 PARAMETER Experiment Name: At_Drought_Soil_Dry_P Parameter: Organism Value: A. thaliana
  misc_feature: MA Experiment 20001557 PARAMETER Experiment Name: At_Drought_Soil_Dry_P Parameter: Plant Line Value: WS
  misc_feature: MA Experiment 20001557 PARAMETER Experiment Name: At_Drought_Soil_Dry_P Parameter: Post Timepoint (hr) Value: 3
  misc_feature: MA Experiment 20001557 PARAMETER Experiment Name: At_Drought_Soil_Dry_P Parameter: Post-Treatment Value: Re-Water vs. No Drought
  misc_feature: MA Experiment 20001557 PARAMETER Experiment Name: At_Drought_Soil_Dry_P Parameter: Timepoint (day) Value: 13
  misc_feature: MA Experiment 20001557 PARAMETER Experiment Name: At_Drought_Soil_Dry_P Parameter: Treatment Value: Drought vs. No Drought
  misc_feature: MA Experiment ID: 20001560 Result: Down-regulated in Transcription
  misc_feature: MA Experiment 20001560 PARAMETER Experiment Name: At_Drought_Soil_Dry_P Parameter: Age (day) Value: 28
  misc_feature: MA Experiment 20001560 PARAMETER Experiment Name: At_Drought_Soil_Dry_P Parameter: Organism Value: A. thaliana
  misc_feature: MA Experiment 20001560 PARAMETER Experiment Name: At_Drought_Soil_Dry_P Parameter: Plant Line Value: WS
  misc_feature: MA Experiment 20001560 PARAMETER Experiment Name: At_Drought_Soil_Dry_P Parameter: Post Timepoint (hr) Value: None
  misc_feature: MA Experiment 20001560 PARAMETER Experiment Name: At_Drought_Soil_Dry_P Parameter: Post-Treatment Value: None
  misc_feature: MA Experiment 20001560 PARAMETER Experiment Name: At_Drought_Soil_Dry_P Parameter: Timepoint (day) Value: 14
  misc_feature: MA Experiment 20001560 PARAMETER Experiment Name: At_Drought_Soil_Dry_P Parameter: Treatment Value: Drought vs. No Drought

SEQ ID NO: 45458 - protein, 610 aa, Arabidopsis thaliana; identical to SEQ ID NO: 41757
  peptide (1)..(610): Ceres Seq. ID no. 12639082
  misc_feature (213)..(602): Homolog of NCBI NO: 7489412 NR Description: probable aspartic proteinase (EC 3.4.23.-) -
  misc_feature (213)..(599): Homolog of NCBI NO: 33340111 NR Description: nucellin-like protein [Oryza sativa]
  misc_feature (236)..(597): Homolog of NCBI NO: 21805926 NR Description: nucellin-like aspartic protease [Zea mays]
  misc_feature (192)..(595): Homolog of NCBI NO: 7484812 NR Description: aspartic proteinase homolog F17M5.250 -
  misc_feature (214)..(595): Homolog of NCBI NO: 26452545 NR Description: putative nucellin [Arabidopsis thaliana]
  misc_feature (214)..(595): Homolog of NCBI NO: 18418224 NR Description: nucellin -like protein
  misc_feature (213)..(595): Homolog of NCBI NO: 25350204 NR Description: nucellin-like protein, 27671-25467
  misc_feature (194)..(595): Homolog of NCBI NO: 15219354 NR Description: nucellin, putative; protein id: At1g44130.1
  misc_feature (213)..(595): Homolog of NCBI NO: 30699263 NR Description: nucellin protein, putative [Arabidopsis thaliana]
  misc_feature (213)..(604): Homolog of NCBI NO: 30699261 NR Description: nucellin protein, putative [Arabidopsis thaliana]
  misc_feature (213)..(602): Homolog of NCBI NO: 7489412 NR Description: probable aspartic proteinase (EC 3.4.23.-) -
  misc_feature (213)..(599): Homolog of NCBI NO: 33340111 NR Description: nucellin-like protein [Oryza sativa]
  misc_feature (236)..(597): Homolog of NCBI NO: 21805926 NR Description: nucellin-like aspartic protease [Zea mays]
  misc_feature (192)..(595): Homolog of NCBI NO: 7484812 NR Description: aspartic proteinase homolog F17M5.250 -
  misc_feature (214)..(595): Homolog of NCBI NO: 26452545 NR Description: putative nucellin [Arabidopsis thaliana]
  misc_feature (214)..(595): Homolog of NCBI NO: 18418224 NR Description: nucellin -like protein
  misc_feature (213)..(595): Homolog of NCBI NO: 25350204 NR Description: nucellin-like protein, 27671-25467
  misc_feature (194)..(595): Homolog of NCBI NO: 15219354 NR Description: nucellin, putative; protein id: At1g44130.1
  misc_feature (213)..(595): Homolog of NCBI NO: 30699263 NR Description: nucellin protein, putative [Arabidopsis thaliana]
  misc_feature (213)..(604): Homolog of NCBI NO: 30699261 NR Description: nucellin protein, putative [Arabidopsis thaliana]
  misc_feature (213)..(602): Homolog of NCBI NO: 7489412 NR Description: probable aspartic proteinase (EC 3.4.23.-) -
  misc_feature (213)..(599): Homolog of NCBI NO: 33340111 NR Description: nucellin-like protein [Oryza sativa]
  misc_feature (236)..(597): Homolog of NCBI NO: 21805926 NR Description: nucellin-like aspartic protease [Zea mays]
  misc_feature (192)..(595): Homolog of NCBI NO: 7484812 NR Description: aspartic proteinase homolog F17M5.250 -
  misc_feature (214)..(595): Homolog of NCBI NO: 26452545 NR Description: putative nucellin [Arabidopsis thaliana]
  misc_feature (214)..(595): Homolog of NCBI NO: 18418224 NR Description: nucellin -like protein
  misc_feature (213)..(595): Homolog of NCBI NO: 25350204 NR Description: nucellin-like protein, 27671-25467
  misc_feature (194)..(595): Homolog of NCBI NO: 15219354 NR Description: nucellin, putative; protein id: At1g44130.1
  misc_feature (213)..(595): Homolog of NCBI NO: 30699263 NR Description: nucellin protein, putative [Arabidopsis thaliana]
  misc_feature (213)..(604): Homolog of NCBI NO: 30699261 NR Description: nucellin protein, putative [Arabidopsis thaliana]

SEQ ID NO: 45459 - protein, 583 aa, Arabidopsis thaliana [sequence omitted]

SEQ ID NO: 45460 - protein, 506 aa, Arabidopsis thaliana; identical to SEQ ID NO: 41759
  peptide (1)..(506): Ceres Seq. ID no. 12639084
  misc_feature (109)..(498): Homolog of NCBI NO: 7489412 NR Description: probable aspartic proteinase (EC 3.4.23.-) -
  misc_feature (109)..(495): Homolog of NCBI NO: 33340111 NR Description: nucellin-like protein [Oryza sativa]
  misc_feature (132)..(493): Homolog of NCBI NO: 21805926 NR Description: nucellin-like aspartic protease [Zea mays]
  misc_feature (88)..(491): Homolog of NCBI NO: 7484812 NR Description: aspartic proteinase homolog F17M5.250 -
  misc_feature (110)..(491): Homolog of NCBI NO: 26452545 NR Description: putative nucellin [Arabidopsis thaliana]
  misc_feature (110)..(491): Homolog of NCBI NO: 18418224 NR Description: nucellin -like protein
  misc_feature (109)..(491): Homolog of NCBI NO: 25350204 NR Description: nucellin-like protein, 27671-25467
  misc_feature (90)..(491): Homolog of NCBI NO: 15219354 NR Description: nucellin, putative; protein id: At1g44130.1
  misc_feature (109)..(491): Homolog of NCBI NO: 30699263 NR Description: nucellin protein, putative [Arabidopsis thaliana]
  misc_feature (109)..(500): Homolog of NCBI NO: 30699261 NR Description: nucellin protein, putative [Arabidopsis thaliana]
  misc_feature (109)..(498): Homolog of NCBI NO: 7489412 NR Description: probable aspartic proteinase (EC 3.4.23.-) -
  misc_feature (109)..(495): Homolog of NCBI NO: 33340111 NR Description: nucellin-like protein [Oryza sativa]
  misc_feature (132)..(493): Homolog of NCBI NO: 21805926 NR Description: nucellin-like aspartic protease [Zea mays]
  misc_feature (88)..(491): Homolog of NCBI NO: 7484812 NR Description: aspartic proteinase homolog F17M5.250 -
  misc_feature (110)..(491): Homolog of NCBI NO: 26452545 NR Description: putative nucellin [Arabidopsis thaliana]
  misc_feature (110)..(491): Homolog of NCBI NO: 18418224 NR Description: nucellin -like protein
  misc_feature (109)..(491): Homolog of NCBI NO: 25350204 NR Description: nucellin-like protein, 27671-25467
  misc_feature (90)..(491): Homolog of NCBI NO: 15219354 NR Description: nucellin, putative; protein id: At1g44130.1
  misc_feature (109)..(491): Homolog of NCBI NO: 30699263 NR Description: nucellin protein, putative [Arabidopsis thaliana]
  misc_feature (109)..(500): Homolog of NCBI NO: 30699261 NR Description: nucellin protein, putative [Arabidopsis thaliana]
  misc_feature (109)..(498): Homolog of NCBI NO: 7489412 NR Description: probable aspartic proteinase (EC 3.4.23.-) -
  misc_feature (109)..(495): Homolog of NCBI NO: 33340111 NR Description: nucellin-like protein [Oryza sativa]
  misc_feature (132)..(493): Homolog of NCBI NO: 21805926 NR Description: nucellin-like aspartic protease [Zea mays]
  misc_feature (88)..(491): Homolog of NCBI NO: 7484812 NR Description: aspartic proteinase homolog F17M5.250 -
  misc_feature (110)..(491): Homolog of NCBI NO: 26452545 NR Description: putative nucellin [Arabidopsis thaliana]
  misc_feature (110)..(491): Homolog of NCBI NO: 18418224 NR Description: nucellin -like protein
  misc_feature (109)..(491): Homolog of NCBI NO: 25350204 NR Description: nucellin-like protein, 27671-25467
  misc_feature (90)..(491): Homolog of NCBI NO: 15219354 NR Description: nucellin, putative; protein id: At1g44130.1
  misc_feature (109)..(491): Homolog of NCBI NO: 30699263 NR Description: nucellin protein, putative [Arabidopsis thaliana]
  misc_feature (109)..(500): Homolog of NCBI NO: 30699261 NR Description: nucellin protein, putative [Arabidopsis thaliana]

SEQ ID NO: 45461 - DNA, 1821 bp, Arabidopsis thaliana
  misc_feature (1)..(1821): Ceres Seq. ID no. 12600449
  misc_feature: MA Experiment ID: 20000437 Result: Down-regulated in Transcription
  misc_feature: MA Experiment 20000437 PARAMETER Experiment Name: At_Drought_P Parameter: Age (day) Value: 8
  misc_feature: MA Experiment 20000437 PARAMETER Experiment Name: At_Drought_P Parameter: Organism Value: A. thaliana
  misc_feature: MA Experiment 20000437 PARAMETER Experiment Name: At_Drought_P Parameter: Plant Line Value: WS
  misc_feature: MA Experiment 20000437 PARAMETER Experiment Name: At_Drought_P Parameter: Timepoint (hr) Value: 24
  misc_feature: MA Experiment 20000437 PARAMETER Experiment Name: At_Drought_P Parameter: Tissue Value: Whole Plant
  misc_feature: MA Experiment 20000437 PARAMETER Experiment Name: At_Drought_P Parameter: Treatment Value: Drought vs. No Drought
  misc_feature: MA Experiment ID: 20000439 Result: Down-regulated in Transcription
  misc_feature: MA Experiment 20000439 PARAMETER Experiment Name: At_Roots__P Parameter: Age (day) Value: 14 vs. 21
  misc_feature: MA Experiment 20000439 PARAMETER Experiment Name: At_Roots__P Parameter: Organism Value: A. thaliana
  misc_feature: MA Experiment 20000439 PARAMETER Experiment Name: At_Roots__P Parameter: Tissue Value: Roots vs. Whole Plant
  misc_feature: MA Experiment ID: 20001450 Result: Down-regulated in Transcription
  misc_feature: MA Experiment 20001450 PARAMETER Experiment Name: At_Far-red-induction_P Parameter: Age (day) Value: 7
  misc_feature: MA Experiment 20001450 PARAMETER Experiment Name: At_Far-red-induction_P Parameter: Light Value: Far-red vs. White
  misc_feature: MA Experiment 20001450 PARAMETER Experiment Name: At_Far-red-induction_P Parameter: Organism Value: A. thaliana
  misc_feature: MA Experiment 20001450 PARAMETER Experiment Name: At_Far-red-induction_P Parameter: Plant Line Value: Columbia
  misc_feature: MA Experiment 20001450 PARAMETER Experiment Name: At_Far-red-induction_P Parameter: Timepoint (hr) Value: 8
  misc_feature: MA Experiment 20001450 PARAMETER Experiment Name: At_Far-red-induction_P Parameter: Tissue Value: Whole Plant
  misc_feature: MA Experiment ID: 20001557 Result: Up-regulated in Transcription
  misc_feature: MA Experiment 20001557 PARAMETER Experiment Name: At_Drought_Soil_Dry_P Parameter: Age (day) Value: 27
  misc_feature: MA Experiment 20001557 PARAMETER Experiment Name: At_Drought_Soil_Dry_P Parameter: Organism Value: A. thaliana
  misc_feature: MA Experiment 20001557 PARAMETER Experiment Name: At_Drought_Soil_Dry_P Parameter: Plant Line Value: WS
  misc_feature: MA Experiment 20001557 PARAMETER Experiment Name: At_Drought_Soil_Dry_P Parameter: Post Timepoint (hr) Value: 3
  misc_feature: MA Experiment 20001557 PARAMETER Experiment Name: At_Drought_Soil_Dry_P Parameter: Post-Treatment Value: Re-Water vs. No Drought
  misc_feature: MA Experiment 20001557 PARAMETER Experiment Name: At_Drought_Soil_Dry_P Parameter: Timepoint (day) Value: 13
  misc_feature: MA Experiment 20001557 PARAMETER Experiment Name: At_Drought_Soil_Dry_P Parameter: Treatment Value: Drought vs. No Drought
  misc_feature: MA Experiment ID: 20001757 Result: Up-regulated in Transcription
  misc_feature: MA Experiment 20001757 PARAMETER Experiment Name: At_50mM_NH4NO3_L-to-H_P Parameter: Timepoint (hr) Value: 6
  misc_feature: MA Experiment 20001757 PARAMETER Experiment Name: At_50mM_NH4NO3_L-to-H_P Parameter: Tissue Value: Leaf
  misc_feature: MA Experiment 20001757 PARAMETER Experiment Name: At_50mM_NH4NO3_L-to-H_P Parameter: Treatment Value: 50mM NH4NO3 vs 100mM Mannitol
  misc_feature: MA Experiment ID: 20001905 Result: Down-regulated in Transcription
  misc_feature: MA Experiment 20001905 PARAMETER Experiment Name: At_Drought_Reproduction_P Parameter: Age (day) Value: 40
  misc_feature: MA Experiment 20001905 PARAMETER Experiment Name: At_Drought_Reproduction_P Parameter: Organism Value: A. thaliana
  misc_feature: MA Experiment 20001905 PARAMETER Experiment Name: At_Drought_Reproduction_P Parameter: Plant Line Value: WS
  misc_feature: MA Experiment 20001905 PARAMETER Experiment Name: At_Drought_Reproduction_P Parameter: Timepoint (day) Value: 10
  misc_feature: MA Experiment 20001905 PARAMETER Experiment Name: At_Drought_Reproduction_P Parameter: Tissue Value: Rosettes
  misc_feature: MA Experiment 20001905 PARAMETER Experiment Name: At_Drought_Reproduction_P Parameter: Treatment Value: Drought vs. No Drought
  misc_feature: MA Experiment ID: 20001906 Result: Down-regulated in Transcription
  misc_feature: MA Experiment 20001906 PARAMETER Experiment Name: At_Drought_Reproduction_P Parameter: Age (day) Value: 35
  misc_feature: MA Experiment 20001906 PARAMETER Experiment Name: At_Drought_Reproduction_P Parameter: Organism Value: A. thaliana
  misc_feature: MA Experiment 20001906 PARAMETER Experiment Name: At_Drought_Reproduction_P Parameter: Plant Line Value: WS
  misc_feature: MA Experiment 20001906 PARAMETER Experiment Name: At_Drought_Reproduction_P Parameter: Timepoint (day) Value: 5
  misc_feature: MA Experiment 20001906 PARAMETER Experiment Name: At_Drought_Reproduction_P Parameter: Tissue Value: Siliques
  misc_feature: MA Experiment 20001906 PARAMETER Experiment Name: At_Drought_Reproduction_P Parameter: Treatment Value: Drought vs. No Drought
agagatagaaattgagagacgataagcaaagtagaaaacacaagtttctctcacacacattatctctttctctattaccaccactcattcataacagaaacccaccaaaaaataaaaagagagacttttcactctggggagagagctcaagttctaatggcgaacttggtcttatcagaatgtggtatacgacctctccccagaatctacacaacacccagatccaatttcctctccaacaacaacaaattcagaccatcactttcttcttcttcttacaaaacatcatcatctcctctgtcttttggtctgaattcacgagatgggttcacgaggaattgggcgttgaatgtgagcacaccattaacgacaccaatatttgaggagtctccattggaggaagataataaacagagattcgatccaggtgcgcctcctccgttcaatttagctgatattagagcagctatacctaagcattgttgggttaagaatccatggaagtctttgagttatgtcgtcagagacgtcgctatcgtctttgcattggctgctggagctgcttacctcaacaattggattgtttggcctctctattggctcgctcaaggaaccatgttttgggctctctttgttcttggtcatgactgtggacatggtagtttctcaaatgatccgaagttgaacagtgtggtcggtcatcttcttcattcctcaattctggtcccataccatggctggagaattagtcacagaactcaccaccagaaccatggacatgttgagaatgacgaatcttggcatcctatgtctgagaaaatctacaatactttggacaagccgactagattctttagatttacactgcctctcgtgatgcttgcataccctttctacttgtgggctcgaagtccggggaaaaagggttctcattaccatccagacagtgacttgttcctccctaaagagagaaaggatgtcctcacttctactgcttgttggactgcaatggctgctctgcttgtttgtctcaacttcacaatcggtccaattcaaatgctcaaactttatggaattccttactggataaatgtaatgtggttggactttgtgacttacctgcatcaccatggtcatgaagataagcttccttggtaccgtggcaaggagtggagttacctgagaggaggacttacaacattggatcgtgactacggattgatcaataacatccatcatgatattggaactcatgtgatacatcatcttttcccgcagatcccacattatcatctagtagaagcaacagaagcagctaaaccagtattagggaagtattacagggagcctgataagtctggaccgttgccattacatttactggaaattctagcgaaaagtataaaagaagatcattacgtgagcgacgaaggagaagttgtatactataaagcagatccaaatctctatggagaggtcaaagtaagagcagattgaaatgaagcaggcttgagattgaagttttttctatttcagaccagctgattttttgcttactgtatcaatttattgtgtcacccaccagagagttagtatctctgaatacgatcgatcagatggaaacaacaaatttgtttgcgatactgaagctatatataccatacattgcattatcttagatacatttaaattctagcaaaaagtataaaagaagatcattacgtgagcgacgaaggagatgttgtatatatactacaaattaagcagatccaaatctctatgtttccgatactgaagctttatactaataaaatatacatt

SEQ ID NO: 45462 - protein, 446 aa, Arabidopsis thaliana
  peptide (1)..(446): Ceres Seq. ID no. 12600450
  misc_feature (147)..(391): Pfam Name: Fatty acid desaturase Pfam Description: Fatty acid desaturase
  misc_feature (147)..(391): Pfam Name: Fatty acid desaturase Pfam Description: Fatty acid desaturase
  misc_feature (1)..(437): Homolog of NCBI NO: 1754795 NR Description: omega-3 fatty acid desaturase
  misc_feature (1)..(442): Homolog of NCBI NO: 1345970 NR Description: Omega-3 fatty acid desaturase, chloroplast
  misc_feature (1)..(439): Homolog of NCBI NO: 7433276 NR Description: omega-3 fatty acid desaturase (EC 1.14.99.-) FAD7
  misc_feature (1)..(439): Homolog of NCBI NO: 1345969 NR Description: Omega-3 fatty acid desaturase, chloroplast
  misc_feature (1)..(440): Homolog of NCBI NO: 17064784 NR Description: temperature-sensitive omega-3 fatty acid
  misc_feature (1)..(437): Homolog of NCBI NO: 1754795 NR Description: omega-3 fatty acid desaturase
  misc_feature (1)..(439): Homolog of NCBI NO: 7433276 NR Description: omega-3 fatty acid desaturase (EC 1.14.99.-) FAD7
  misc_feature (1)..(440): Homolog of NCBI NO: 17064784 NR Description: temperature-sensitive omega-3 fatty acid
  misc_feature (1)..(446): Homolog of NCBI NO: 15229692 NR Description: omega-3 fatty acid desaturase, chloroplast
  misc_feature (1)..(446): Homolog of NCBI NO: 14488094 NR Description: AT3g11170/F9F8_4 [Arabidopsis thaliana]
  misc_feature (1)..(443): Homolog of NCBI NO: 7378667 NR Description: chloroplast omega-3 fatty acid desaturase
  misc_feature (41)..(446): Homolog of NCBI NO: 1345968 NR Description: Omega-3 fatty acid desaturase, chloroplast
  misc_feature (1)..(440): Homolog of NCBI NO: 15239175 NR Description: omega-3 fatty acid desaturase, chloroplast
  misc_feature (1)..(439): Homolog of NCBI NO: 1345969 NR Description: Omega-3 fatty acid desaturase, chloroplast
  misc_feature (1)..(442): Homolog of NCBI NO: 1345970 NR Description: Omega-3 fatty acid desaturase, chloroplast
  misc_feature (1)..(440): Homolog of NCBI NO: 15239175 NR Description: omega-3 fatty acid desaturase, chloroplast
  misc_feature (41)..(446): Homolog of NCBI NO: 1345968 NR Description: Omega-3 fatty acid desaturase, chloroplast
  misc_feature (1)..(443): Homolog of NCBI NO: 7378667 NR Description: chloroplast omega-3 fatty acid desaturase
  misc_feature (1)..(446): Homolog of NCBI NO: 14488094 NR Description: AT3g11170/F9F8_4 [Arabidopsis thaliana]
  misc_feature (1)..(446): Homolog of NCBI NO: 15229692 NR Description: omega-3 fatty acid desaturase, chloroplast
MANLVLSECGIRPLPRIYTTPRSNFLSNNNKFRPSLSSSSYKTSSSPLSFGLNSRDGFTRNWALNVSTPLTTPIFEESPLEEDNKQRFDPGAPPPFNLADIRAAIPKHCWVKNPWKSLSYVVRDVAIVFALAAGAAYLNNWIVWPLYWLAQGTMFWALFVLGHDCGHGSFSNDPKLNSVVGHLLHSSILVPYHGWRISHRTHHQNHGHVENDESWHPMSEKIYNTLDKPTRFFRFTLPLVMLAYPFYLWARSPGKKGSHYHPDSDLFLPKERKDVLTSTACWTAMAALLVCLNFTIGPIQMLKLYGIPYWINVMWLDFVTYLHHHGHEDKLPWYRGKEWSYLRGGLTTLDRDYGLINNIHHDIGTHVIHHLFPQIPHYHLVEATEAAKPVLGKYYREPDKSGPLPLHLLEILAKSIKEDHYVSDEGEVVYYKADPNLYGEVKVRAD

SEQ ID NO: 45463 - protein, 293 aa, Arabidopsis thaliana
  peptide (1)..(293): Ceres Seq. ID no. 12600451
  misc_feature (1)..(238): Pfam Name: Fatty acid desaturase Pfam Description: Fatty acid desaturase
  misc_feature (1)..(238): Pfam Name: Fatty acid desaturase Pfam Description: Fatty acid desaturase
  misc_feature (1)..(284): Homolog of NCBI NO: 1754795 NR Description: omega-3 fatty acid desaturase
  misc_feature (1)..(289): Homolog of NCBI NO: 1345970 NR Description: Omega-3 fatty acid desaturase, chloroplast
  misc_feature (1)..(286): Homolog of NCBI NO: 7433276 NR Description: omega-3 fatty acid desaturase (EC 1.14.99.-) FAD7
  misc_feature (1)..(286): Homolog of NCBI NO: 1345969 NR Description: Omega-3 fatty acid desaturase, chloroplast
  misc_feature (1)..(287): Homolog of NCBI NO: 17064784 NR Description: temperature-sensitive omega-3 fatty acid
  misc_feature (1)..(284): Homolog of NCBI NO: 1754795 NR Description: omega-3 fatty acid desaturase
  misc_feature (1)..(286): Homolog of NCBI NO: 7433276 NR Description: omega-3 fatty acid desaturase (EC 1.14.99.-) FAD7
  misc_feature (1)..(287): Homolog of NCBI NO: 17064784 NR Description: temperature-sensitive omega-3 fatty acid
  misc_feature (1)..(293): Homolog of NCBI NO: 15229692 NR Description: omega-3 fatty acid desaturase, chloroplast
  misc_feature (1)..(293): Homolog of NCBI NO: 14488094 NR Description: AT3g11170/F9F8_4 [Arabidopsis thaliana]
  misc_feature (1)..(290): Homolog of NCBI NO: 7378667 NR Description: chloroplast omega-3 fatty acid desaturase
  misc_feature (1)..(293): Homolog of NCBI NO: 1345968 NR Description: Omega-3 fatty acid desaturase, chloroplast
  misc_feature (1)..(287): Homolog of NCBI NO: 15239175 NR Description: omega-3 fatty acid desaturase, chloroplast
  misc_feature (1)..(286): Homolog of NCBI NO: 1345969 NR Description: Omega-3 fatty acid desaturase, chloroplast
  misc_feature (1)..(289): Homolog of NCBI NO: 1345970 NR Description: Omega-3 fatty acid desaturase, chloroplast
  misc_feature (1)..(287): Homolog of NCBI NO: 15239175 NR Description: omega-3 fatty acid desaturase, chloroplast
  misc_feature (1)..(293): Homolog of NCBI NO: 1345968 NR Description: Omega-3 fatty acid desaturase, chloroplast
  misc_feature (1)..(290): Homolog of NCBI NO: 7378667 NR Description: chloroplast omega-3 fatty acid desaturase
  misc_feature (1)..(293): Homolog of NCBI NO: 14488094 NR Description: AT3g11170/F9F8_4 [Arabidopsis thaliana]
  misc_feature (1)..(293): Homolog of NCBI NO: 15229692 NR Description: omega-3 fatty acid desaturase, chloroplast
MFWALFVLGHDCGHGSFSNDPKLNSVVGHLLHSSILVPYHGWRISHRTHHQNHGHVENDESWHPMSEKIYNTLDKPTRFFRFTLPLVMLAYPFYLWARSPGKKGSHYHPDSDLFLPKERKDVLTSTACWTAMAALLVCLNFTIGPIQMLKLYGIPYWINVMWLDFVTYLHHHGHEDKLPWYRGKEWSYLRGGLTTLDRDYGLINNIHHDIGTHVIHHLFPQIPHYHLVEATEAAKPVLGKYYREPDKSGPLPLHLLEILAKSIKEDHYVSDEGEVVYYKADPNLYGEVKVRAD

SEQ ID NO: 45464 - protein, 229 aa, Arabidopsis thaliana
  peptide (1)..(229): Ceres Seq. ID no. 12600452
  misc_feature (1)..(174): Pfam Name: Fatty acid desaturase Pfam Description: Fatty acid desaturase
  misc_feature (1)..(174): Pfam Name: Fatty acid desaturase Pfam Description: Fatty acid desaturase
  misc_feature (1)..(220): Homolog of NCBI NO: 1754795 NR Description: omega-3 fatty acid desaturase
  misc_feature (1)..(225): Homolog of NCBI NO: 1345970 NR Description: Omega-3 fatty acid desaturase, chloroplast
  misc_feature (1)..(222): Homolog of NCBI NO: 7433276 NR Description: omega-3 fatty acid desaturase (EC 1.14.99.-) FAD7
  misc_feature (1)..(222): Homolog of NCBI NO: 1345969 NR Description: Omega-3 fatty acid desaturase, chloroplast
  misc_feature (1)..(223): Homolog of NCBI NO: 17064784 NR Description: temperature-sensitive omega-3 fatty acid
  misc_feature (1)..(220): Homolog of NCBI NO: 1754795 NR Description: omega-3 fatty acid desaturase
  misc_feature (1)..(222): Homolog of NCBI NO: 7433276 NR Description: omega-3 fatty acid desaturase (EC 1.14.99.-) FAD7
  misc_feature (1)..(223): Homolog of NCBI NO: 17064784 NR Description: temperature-sensitive omega-3 fatty acid
  misc_feature (1)..(229): Homolog of NCBI NO: 15229692 NR Description: omega-3 fatty acid desaturase, chloroplast
  misc_feature (1)..(229): Homolog of NCBI NO: 14488094 NR Description: AT3g11170/F9F8_4 [Arabidopsis thaliana]
  misc_feature (1)..(226): Homolog of NCBI NO: 7378667 NR Description: chloroplast omega-3 fatty acid desaturase
  misc_feature (1)..(229): Homolog of NCBI NO: 1345968 NR Description: Omega-3 fatty acid desaturase, chloroplast
  misc_feature (1)..(223): Homolog of NCBI NO: 15239175 NR Description: omega-3 fatty acid desaturase, chloroplast
  misc_feature (1)..(222): Homolog of NCBI NO: 1345969 NR Description: Omega-3 fatty acid desaturase, chloroplast
  misc_feature (1)..(225): Homolog of NCBI NO: 1345970 NR Description: Omega-3 fatty acid desaturase, chloroplast
  misc_feature (1)..(223): Homolog of NCBI NO: 15239175 NR Description: omega-3 fatty acid desaturase, chloroplast
  misc_feature (1)..(229): Homolog of NCBI NO: 1345968 NR Description: Omega-3 fatty acid desaturase, chloroplast
  misc_feature (1)..(226): Homolog of NCBI NO: 7378667 NR Description: chloroplast omega-3 fatty acid desaturase
  misc_feature (1)..(229): Homolog of NCBI NO: 14488094 NR Description: AT3g11170/F9F8_4 [Arabidopsis thaliana]
  misc_feature (1)..(229): Homolog of NCBI NO: 15229692 NR Description: omega-3 fatty acid desaturase, chloroplast
MSEKIYNTLDKPTRFFRFTLPLVMLAYPFYLWARSPGKKGSHYHPDSDLFLPKERKDVLTSTACWTAMAALLVCLNFTIGPIQMLKLYGIPYWINVMWLDFVTYLHHHGHEDKLPWYRGKEWSYLRGGLTTLDRDYGLINNIHHDIGTHVIHHLFPQIPHYHLVEATEAAKPVLGKYYREPDKSGPLPLHLLEILAKSIKEDHYVSDEGEVVYYKADPNLYGEVKVRAD

SEQ ID NO: 45465 - DNA, 1764 bp, Arabidopsis thaliana
  misc_feature (1)..(1764): Ceres Seq. ID no. 12561355
  misc_feature: MA Experiment ID: 20000179 Result: Up-regulated in Transcription
  misc_feature: MA Experiment 20000179 PARAMETER Experiment Name: At_Germinating_Seeds_P Parameter: Age (hr) Value: 6 vs. 0
  misc_feature: MA Experiment 20000179 PARAMETER Experiment Name: At_Germinating_Seeds_P Parameter: Tissue Value: Germinating Seeds
  misc_feature: MA Experiment ID: 20000180 Result: Up-regulated in Transcription
  misc_feature: MA Experiment 20000180 PARAMETER Experiment Name: At_Germinating_Seeds_P Parameter: Age (hr) Value: 24 vs. 0
  misc_feature: MA Experiment 20000180 PARAMETER Experiment Name: At_Germinating_Seeds_P Parameter: Tissue Value: Germinating Seeds
  misc_feature: MA Experiment ID: 20000437 Result: Down-regulated in Transcription
  misc_feature: MA Experiment 20000437 PARAMETER Experiment Name: At_Drought_P Parameter: Age (day) Value: 8
  misc_feature: MA Experiment 20000437 PARAMETER Experiment Name: At_Drought_P Parameter: Organism Value: A. thaliana
  misc_feature: MA Experiment 20000437 PARAMETER Experiment Name: At_Drought_P Parameter: Plant Line Value: WS
  misc_feature: MA Experiment 20000437 PARAMETER Experiment Name: At_Drought_P Parameter: Timepoint (hr) Value: 24
  misc_feature: MA Experiment 20000437 PARAMETER Experiment Name: At_Drought_P Parameter: Tissue Value: Whole Plant
  misc_feature: MA Experiment 20000437 PARAMETER Experiment Name: At_Drought_P Parameter: Treatment Value: Drought vs. No Drought
  misc_feature: MA Experiment ID: 20000794 Result: Down-regulated in Transcription
  misc_feature: MA Experiment 20000794 PARAMETER Experiment Name: At_Petals_P Parameter: Age (day) Value: 23-25 days
  misc_feature: MA Experiment 20000794 PARAMETER Experiment Name: At_Petals_P Parameter: Plant Line Value: WS
  misc_feature: MA Experiment 20000794 PARAMETER Experiment Name: At_Petals_P Parameter: Tissue Value: Petals vs. Whole plant
  misc_feature: MA Experiment ID: 20001904 Result: Down-regulated in Transcription
  misc_feature: MA Experiment 20001904 PARAMETER Experiment Name: At_Drought_Reproduction_P Parameter: Age (day) Value: 37
  misc_feature: MA Experiment 20001904 PARAMETER Experiment Name: At_Drought_Reproduction_P Parameter: Organism Value: A. thaliana
  misc_feature: MA Experiment 20001904 PARAMETER Experiment Name: At_Drought_Reproduction_P Parameter: Plant Line Value: WS
  misc_feature: MA Experiment 20001904 PARAMETER Experiment Name: At_Drought_Reproduction_P Parameter: Timepoint (day) Value: 7
  misc_feature: MA Experiment 20001904 PARAMETER Experiment Name: At_Drought_Reproduction_P Parameter: Tissue Value: Rosettes
  misc_feature: MA Experiment 20001904 PARAMETER Experiment Name: At_Drought_Reproduction_P Parameter: Treatment Value: Drought vs. No Drought
  misc_feature: MA Experiment ID: 20001905 Result: Down-regulated in Transcription
  misc_feature: MA Experiment 20001905 PARAMETER Experiment Name: At_Drought_Reproduction_P Parameter: Age (day) Value: 40
  misc_feature: MA Experiment 20001905 PARAMETER Experiment Name: At_Drought_Reproduction_P Parameter: Organism Value: A. thaliana
  misc_feature: MA Experiment 20001905 PARAMETER Experiment Name: At_Drought_Reproduction_P Parameter: Plant Line Value: WS
  misc_feature: MA Experiment 20001905 PARAMETER Experiment Name: At_Drought_Reproduction_P Parameter: Timepoint (day) Value: 10
  misc_feature: MA Experiment 20001905 PARAMETER Experiment Name: At_Drought_Reproduction_P Parameter: Tissue Value: Rosettes
  misc_feature: MA Experiment 20001905 PARAMETER Experiment Name: At_Drought_Reproduction_P Parameter: Treatment Value: Drought vs. No Drought
atggcagttacagatactgaaagtcctcatcttggggaaattacttgtggtaccttacttgagaagttgcaggaaatctgggatgaagttggtgagagtgatgatgaacgagacaaactgcttcttcagatagagcaagagtgtcttgacgtttacaagagaaaagtcgagcaggctgcgaaatcccgagctgagcttcttcaaaccttgtcagatgctaatgctgaactttccagcctcacaatgtctcttggagacaaaagcttagttggcattccggataagtcttcaggaacgattaaagaacaacttgctgcaatagcaccggctcttgaacaactgtggcaacagaaagaggagagagtccgagagttctctgatgtacaatcacagattcagaagatatgtggagatattgctggaggtttgagcaatgaggttcctatagtcgatgagtctgatttgtcactgaagaaattagacgatttccagagccaactccaagagctccagaaagagaagagtgacaggctgcgcaaggtgttagagtttgtgagtactgttcatgatctatgtgctgttcttggtttggatttcttaagcaccgtcaccgaagttcatccgagcttagatgaagataccagtgtccagtctaagagcattagcaatgagactctttcaaggttggctaaaaccgtcttgactcttaaagatgataagaagcaaagacttcaaaagcttcaagagctggctactcagctaattgacctgtggaatctgatggatactcctgatgaggaaagagagctttttgatcatgttacctgtaacatttcatcttcagtcgatgaggtcactgtgccaggtgctcttgcacgtgatttgattgagcaggctgaggtggaagttgataggcttgaccagctgaaagctagccgaatgaaagaaattgcgttcaagaagcaatctgagcttgaagagatatatgctcgtgcccatgtagaagttaacccggaatctgctcgtgagagaatcatgtcgctgattgattctggaaacgttgagcctactgaattattggcagacatggatagccagatatcaaaggctaaggaagaagcatttagtagaaaagatatattggaccgagtcgagaaatggatgtcagcttgtgaggaagagagctggctagaagactacaatcgggatcagaacaggtacagcgcaagcagaggtgcacacttgaatctcaagagagctgagaaagctcggattctggttagcaagattcctgccatggttgacacattagttgccaagacccgggcttgggaagaagaacacagcatgtcctttgcctacgatggtgttcctctgctagctatgctagacgagtacggtatgcttaggcaagaacgagaagaggagaaacggaggctgagggaacaaaagaaggttcaagaacagccacacgtagagcaagaatctgcctttagcaccaggccaagccctgcaagaccggtcagtgctaagaaaacggtggggccacgagctaacaacggaggagccaatggaacacataaccggcgtttatctttgaatgcaaaccagaatggaagcaggtctactgcaaaagaagcagggagaagggagactctcaacaggccggctgctcctacaaactacgttgccatttcgaaagaggaagctgcttcatctccagtttctggtgctgcagatcatcaagttccagcttcaccatga

SEQ ID NO: 45466 - protein, 587 aa, Arabidopsis thaliana
  peptide (1)..(587): Ceres Seq. ID no. 12561356
  misc_feature (36)..(586): Pfam Name: Microtubule associated protein (MAP65/ASE1 family) Pfam Description: Microtubule associated protein (MAP65/ASE1
  misc_feature (15)..(587): Homolog of NCBI NO: 21539547 NR Description: unknown protein [Arabidopsis thaliana]
  misc_feature (15)..(587): Homolog of NCBI NO: 25410943 NR Description: hypothetical protein At2g01910 [imported] -
  misc_feature (13)..(550): Homolog of NCBI NO: 15242132 NR Description: putative protein; protein id: At5g51600.1
  misc_feature (1)..(430): Homolog of NCBI NO: 7485328 NR Description: hypothetical protein F10M23.100 - Arabidopsis
  misc_feature (1)..(587): Homolog of NCBI NO: 11558254 NR Description: microtubule-associated protein MAP65-1b
  misc_feature (1)..(587): Homolog of NCBI NO: 11558256 NR Description: microtubule-associated protein MAP65-1c
  misc_feature (1)..(587): Homolog of NCBI NO: 28200790 NR Description: 65kD microtubule associated protein [Daucus
  misc_feature (1)..(587): Homolog of NCBI NO: 11558252 NR Description: microtubule-associated protein MAP65-1a
  misc_feature (1)..(587): Homolog of NCBI NO: 18416818 NR Description: putative protein
  misc_feature (1)..(587): Homolog of NCBI NO: 15240485 NR Description: putative protein; protein id: At5g55230.1
MAVTDTESPHLGEITCGTLLEKLQEIWDEVGESDDERDKLLLQIEQECLDVYKRKVEQAAKSRAELLQTLSDANAELSSLTMSLGDKSLVGIPDKSSGTIKEQLAAIAPALEQLWQQKEERVREFSDVQSQIQKICGDIAGGLSNEVPIVDESDLSLKKLDDFQSQLQELQKEKSDRLRKVLEFVSTVHDLCAVLGLDFLSTVTEVHPSLDEDTSVQSKSISNETLSRLAKTVLTLKDDKKQRLQKLQELATQLIDLWNLMDTPDEERELFDHVTCNISSSVDEVTVPGALARDLIEQAEVEVDRLDQLKASRMKEIAFKKQSELEEIYARAHVEVNPESARERIMSLIDSGNVEPTELLADMDSQISKAKEEAFSRKDILDRVEKWMSACEEESWLEDYNRDQNRYSASRGAHLNLKRAEKARILVSKIPAMVDTLVAKTRAWEEEHSMSFAYDGVPLLAMLDEYGMLRQEREEEKRRLREQKKVQEQPHVEQESAFSTRPSPARPVSAKKTVGPRANNGGANGTHNRRLSLNANQNGSRSTAKEAGRRETLNRPAAPTNYVAISKEEAASSPVSGAADHQVPASP

SEQ ID NO: 45467 - protein, 506 aa, Arabidopsis thaliana
  peptide (1)..(506): Ceres Seq. ID no. 12561357
  misc_feature (1)..(505): Pfam Name: Microtubule associated protein (MAP65/ASE1 family) Pfam Description: Microtubule associated protein (MAP65/ASE1
  misc_feature (1)..(506): Homolog of NCBI NO: 21539547 NR Description: unknown protein [Arabidopsis thaliana]
  misc_feature (1)..(506): Homolog of NCBI NO: 25410943 NR Description: hypothetical protein At2g01910 [imported] -
  misc_feature (1)..(469): Homolog of NCBI NO: 15242132 NR Description: putative protein; protein id: At5g51600.1
  misc_feature (1)..(349): Homolog of NCBI NO: 7485328 NR Description: hypothetical protein F10M23.100 - Arabidopsis
  misc_feature (1)..(506): Homolog of NCBI NO: 11558254 NR Description: microtubule-associated protein MAP65-1b
  misc_feature (1)..(506): Homolog of NCBI NO: 11558256 NR Description: microtubule-associated protein MAP65-1c
  misc_feature (1)..(506): Homolog of NCBI NO: 28200790 NR Description: 65kD microtubule associated protein [Daucus
  misc_feature (1)..(506): Homolog of NCBI NO: 11558252 NR Description: microtubule-associated protein MAP65-1a
  misc_feature (1)..(506): Homolog of NCBI NO: 18416818 NR Description: putative protein
  misc_feature (1)..(506): Homolog of NCBI NO: 15240485 NR Description: putative protein; protein id: At5g55230.1
MSLGDKSLVGIPDKSSGTIKEQLAAIAPALEQLWQQKEERVREFSDVQSQIQKICGDIAGGLSNEVPIVDESDLSLKKLDDFQSQLQELQKEKSDRLRKVLEFVSTVHDLCAVLGLDFLSTVTEVHPSLDEDTSVQSKSISNETLSRLAKTVLTLKDDKKQRLQKLQELATQLIDLWNLMDTPDEERELFDHVTCNISSSVDEVTVPGALARDLIEQAEVEVDRLDQLKASRMKEIAFKKQSELEEIYARAHVEVNPESARERIMSLIDSGNVEPTELLADMDSQISKAKEEAFSRKDILDRVEKWMSACEEESWLEDYNRDQNRYSASRGAHLNLKRAEKARILVSKIPAMVDTLVAKTRAWEEEHSMSFAYDGVPLLAMLDEYGMLRQEREEEKRRLREQKKVQEQPHVEQESAFSTRPSPARPVSAKKTVGPRANNGGANGTHNRRLSLNANQNGSRSTAKEAGRRETLNRPAAPTNYVAISKEEAASSPVSGAADHQVPASP

SEQ ID NO: 45468 - protein, 327 aa, Arabidopsis thaliana
  peptide (1)..(327): Ceres Seq. ID no. 12561358
  misc_feature (1)..(326): Pfam Name: Microtubule associated protein (MAP65/ASE1 family) Pfam Description: Microtubule associated protein (MAP65/ASE1
  misc_feature (1)..(327): Homolog of NCBI NO: 21539547 NR Description: unknown protein [Arabidopsis thaliana]
  misc_feature (1)..(327): Homolog of NCBI NO: 25410943 NR Description: hypothetical protein At2g01910 [imported] -
  misc_feature (1)..(290): Homolog of NCBI NO: 15242132 NR Description: putative protein; protein id: At5g51600.1
  misc_feature (1)..(170): Homolog of NCBI NO: 7485328 NR Description: hypothetical protein F10M23.100 - Arabidopsis
  misc_feature (1)..(327): Homolog of NCBI NO: 11558254 NR Description: microtubule-associated protein MAP65-1b
  misc_feature (1)..(327): Homolog of NCBI NO: 11558256 NR Description: microtubule-associated protein MAP65-1c
  misc_feature (1)..(327): Homolog of NCBI NO: 28200790 NR Description: 65kD microtubule associated protein [Daucus
  misc_feature (1)..(327): Homolog of NCBI NO: 11558252 NR Description: microtubule-associated protein MAP65-1a
  misc_feature (1)..(327): Homolog of NCBI NO: 18416818 NR Description: putative protein
  misc_feature (1)..(327): Homolog of NCBI NO: 15240485 NR Description: putative protein; protein id: At5g55230.1
MDTPDEERELFDHVTCNISSSVDEVTVPGALARDLIEQAEVEVDRLDQLKASRMKEIAFKKQSELEEIYARAHVEVNPESARERIMSLIDSGNVEPTELLADMDSQISKAKEEAFSRKDILDRVEKWMSACEEESWLEDYNRDQNRYSASRGAHLNLKRAEKARILVSKIPAMVDTLVAKTRAWEEEHSMSFAYDGVPLLAMLDEYGMLRQEREEEKRRLREQKKVQEQPHVEQESAFSTRPSPARPVSAKKTVGPRANNGGANGTHNRRLSLNANQNGSRSTAKEAGRRETLNRPAAPTNYVAISKEEAASSPVSGAADHQVPASP

SEQ ID NO: 45469 - DNA, 1322 bp, Arabidopsis thaliana
  misc_feature (1)..(1322): Ceres Seq. ID no. 13646612
  misc_feature: MA Experiment ID: 108434 Result: Up-regulated in Transcription
  misc_feature: MA Experiment 108434 PARAMETER Experiment Name: At_Root_Tips_cDNA_P Parameter: Tissue Value: Root Tips
  misc_feature: MA Experiment ID: 108435 Result: Down-regulated in Transcription
  misc_feature: MA Experiment 108435 PARAMETER Experiment Name: At_stm_Mutants_cDNA_P Parameter: Plant Line Value: wt Landsburg vs stm
  misc_feature: MA Experiment 108435 PARAMETER Experiment Name: At_stm_Mutants_cDNA_P Parameter: Tissue Value: Shoot Apical Meristem Region
  misc_feature: MA Experiment ID: 108463 Result: Down-regulated in Transcription
  misc_feature: MA Experiment 108463 PARAMETER Experiment Name: At_Germinating_Seeds_cDNA_P Parameter: Age (day) Value: 3 vs. 0
  misc_feature: MA Experiment 108463 PARAMETER Experiment Name: At_Germinating_Seeds_cDNA_P Parameter: Tissue Value: Germinating Seeds
  misc_feature: MA Experiment ID: 108595 Result: Down-regulated in Transcription
  misc_feature: MA Experiment 108595 PARAMETER Experiment Name: At_Ler-pi_Ovule_cDNA_P Parameter: Plant Line Value: null
  misc_feature: MA Experiment ID: 20000069 Result: Down-regulated in Transcription
  misc_feature: MA Experiment 20000069 PARAMETER Experiment Name: At_100uM_ABA_Mutants_cDNA_P Parameter: Plant Line Value: CS23
  misc_feature: MA Experiment 20000069 PARAMETER Experiment Name: At_100uM_ABA_Mutants_cDNA_P Parameter: Timepoint (hr) Value: 6
  misc_feature: MA Experiment 20000069 PARAMETER Experiment Name: At_100uM_ABA_Mutants_cDNA_P Parameter: Tissue Value: Aerial
  misc_feature: MA Experiment 20000069 PARAMETER Experiment Name: At_100uM_ABA_Mutants_cDNA_P Parameter: Treatment Value: 100uM ABA vs. No Treatment
  misc_feature: MA Experiment ID: 20000070 Result: Down-regulated in Transcription
  misc_feature: MA Experiment 20000070 PARAMETER Experiment Name: At_100uM_ABA_Mutants_cDNA_P Parameter: Plant Line Value: CS24
  misc_feature: MA Experiment 20000070 PARAMETER Experiment Name: At_100uM_ABA_Mutants_cDNA_P Parameter: Timepoint (hr) Value: 6
  misc_feature: MA Experiment 20000070 PARAMETER Experiment Name: At_100uM_ABA_Mutants_cDNA_P Parameter: Tissue Value: Aerial
  misc_feature: MA Experiment 20000070 PARAMETER Experiment Name: At_100uM_ABA_Mutants_cDNA_P Parameter: Treatment Value: 100uM ABA vs. No Treatment
  misc_feature: MA Experiment ID: 20000071 Result: Down-regulated in Transcription
  misc_feature: MA Experiment 20000071 PARAMETER Experiment Name: At_100uM_ABA_Mutants_cDNA_P Parameter: Plant Line Value: CS8104
  misc_feature: MA Experiment 20000071 PARAMETER Experiment Name: At_100uM_ABA_Mutants_cDNA_P Parameter: Timepoint (hr) Value: 6
  misc_feature: MA Experiment 20000071 PARAMETER Experiment Name: At_100uM_ABA_Mutants_cDNA_P Parameter: Tissue Value: Aerial
  misc_feature: MA Experiment 20000071 PARAMETER Experiment Name: At_100uM_ABA_Mutants_cDNA_P Parameter: Treatment Value: 100uM ABA vs. No Treatment
  misc_feature: MA Experiment ID: 20000072 Result: Down-regulated in Transcription
  misc_feature: MA Experiment 20000072 PARAMETER Experiment Name: At_100uM_ABA_Mutants_cDNA_P Parameter: Plant Line Value: CS8105
  misc_feature: MA Experiment 20000072 PARAMETER Experiment Name: At_100uM_ABA_Mutants_cDNA_P Parameter: Timepoint (hr) Value: 6
  misc_feature: MA Experiment 20000072 PARAMETER Experiment Name: At_100uM_ABA_Mutants_cDNA_P Parameter: Tissue Value: Aerial
  misc_feature: MA Experiment 20000072 PARAMETER Experiment Name: At_100uM_ABA_Mutants_cDNA_P Parameter: Treatment Value: 100uM ABA vs. No Treatment
  misc_feature: MA Experiment ID: 20000086 Result: Down-regulated in Transcription
  misc_feature: MA Experiment 20000086 PARAMETER Experiment Name: At_100uM_ABA_Mutants_cDNA_P Parameter: Plant Line Value: CS22
  misc_feature: MA Experiment 20000086 PARAMETER Experiment Name: At_100uM_ABA_Mutants_cDNA_P Parameter: Timepoint (hr) Value: 6
  misc_feature: MA Experiment 20000086 PARAMETER Experiment Name: At_100uM_ABA_Mutants_cDNA_P Parameter: Tissue Value: Aerial
  misc_feature: MA Experiment 20000086 PARAMETER Experiment Name: At_100uM_ABA_Mutants_cDNA_P Parameter: Treatment Value: 100uM ABA vs. No Treatment
  misc_feature: MA Experiment ID: 20000087 Result: Down-regulated in Transcription
  misc_feature: MA Experiment 20000087 PARAMETER Experiment Name: At_100uM_ABA_Mutants_cDNA_P Parameter: Plant Line Value: WS
  misc_feature: MA Experiment 20000087 PARAMETER Experiment Name: At_100uM_ABA_Mutants_cDNA_P Parameter: Timepoint (hr) Value: 6
  misc_feature: MA Experiment 20000087 PARAMETER Experiment Name: At_100uM_ABA_Mutants_cDNA_P Parameter: Tissue Value: Aerial
  misc_feature: MA Experiment 20000087 PARAMETER Experiment Name: At_100uM_ABA_Mutants_cDNA_P Parameter: Treatment Value: 100uM ABA vs. No Treatment
  misc_feature: MA Experiment ID: 20000088 Result: Down-regulated in Transcription
  misc_feature: MA Experiment 20000088 PARAMETER Experiment Name: At_100uM_ABA_Mutants_cDNA_P Parameter: Plant Line Value: Landsberg
  misc_feature: MA Experiment 20000088 PARAMETER Experiment Name: At_100uM_ABA_Mutants_cDNA_P Parameter: Timepoint (hr) Value: 6
  misc_feature: MA Experiment 20000088 PARAMETER Experiment Name: At_100uM_ABA_Mutants_cDNA_P Parameter: Tissue Value: Aerial
  misc_feature: MA Experiment 20000088 PARAMETER Experiment Name: At_100uM_ABA_Mutants_cDNA_P Parameter: Treatment Value: 100uM ABA vs. No Treatment
  misc_feature: MA Experiment ID: 20000117 Result: Down-regulated in Transcription
  misc_feature: MA Experiment 20000117 PARAMETER Experiment Name: At_100uM_ABA_Mutants_cDNA_P Parameter: Plant Line Value: Columbia
  misc_feature: MA Experiment 20000117 PARAMETER Experiment Name: At_100uM_ABA_Mutants_cDNA_P Parameter: Timepoint (hr) Value: 6
  misc_feature: MA Experiment 20000117 PARAMETER Experiment Name: At_100uM_ABA_Mutants_cDNA_P Parameter: Tissue Value: Aerial
  misc_feature: MA Experiment 20000117 PARAMETER Experiment Name: At_100uM_ABA_Mutants_cDNA_P Parameter: Treatment Value: 100uM ABA vs. No Treatment
  misc_feature: MA Experiment ID: 20000185 Result: Down-regulated in Transcription
  misc_feature: MA Experiment 20000185 PARAMETER Experiment Name: At_Roots__P Parameter: Age (day) Value: 7 vs. 21
  misc_feature: MA Experiment 20000185 PARAMETER Experiment Name: At_Roots__P Parameter: Organism Value: A. thaliana
  misc_feature: MA Experiment 20000185 PARAMETER Experiment Name: At_Roots__P Parameter: Tissue Value: Roots vs. Whole Plant
  misc_feature: MA Experiment ID: 20000439 Result: Down-regulated in Transcription
  misc_feature: MA Experiment 20000439 PARAMETER Experiment Name: At_Roots__P Parameter: Age (day) Value: 14 vs. 21
  misc_feature: MA Experiment 20000439 PARAMETER Experiment Name: At_Roots__P Parameter: Organism Value: A. thaliana
  misc_feature: MA Experiment 20000439 PARAMETER Experiment Name: At_Roots__P Parameter: Tissue Value: Roots vs. Whole Plant
  misc_feature: MA Experiment ID: 20000794 Result: Down-regulated in Transcription
  misc_feature: MA Experiment 20000794 PARAMETER Experiment Name: At_Petals_P Parameter: Age (day) Value: 23-25 days
  misc_feature: MA Experiment 20000794 PARAMETER Experiment Name: At_Petals_P Parameter: Plant Line Value: WS
  misc_feature: MA Experiment 20000794 PARAMETER Experiment Name: At_Petals_P Parameter: Tissue Value: Petals vs. Whole plant
  misc_feature: MA Experiment ID: 20001757 Result: Up-regulated in Transcription
  misc_feature: MA Experiment 20001757 PARAMETER Experiment Name: At_50mM_NH4NO3_L-to-H_P Parameter: Timepoint (hr) Value: 6
  misc_feature: MA Experiment 20001757 PARAMETER Experiment Name: At_50mM_NH4NO3_L-to-H_P Parameter: Tissue Value: Leaf
  misc_feature: MA Experiment 20001757 PARAMETER Experiment Name: At_50mM_NH4NO3_L-to-H_P Parameter: Treatment Value: 50mM NH4NO3 vs 100mM Mannitol
  misc_feature: MA Experiment ID: 20001906 Result: Down-regulated in Transcription
  misc_feature: MA Experiment 20001906 PARAMETER Experiment Name: At_Drought_Reproduction_P Parameter: Age (day) Value: 35
  misc_feature: MA Experiment 20001906 PARAMETER Experiment Name: At_Drought_Reproduction_P Parameter: Organism Value: A. thaliana
  misc_feature: MA Experiment 20001906 PARAMETER Experiment Name: At_Drought_Reproduction_P Parameter: Plant Line Value: WS
  misc_feature: MA Experiment 20001906 PARAMETER Experiment Name: At_Drought_Reproduction_P Parameter: Timepoint (day) Value: 5
  misc_feature: MA Experiment 20001906 PARAMETER Experiment Name: At_Drought_Reproduction_P Parameter: Tissue Value: Siliques
  misc_feature: MA Experiment 20001906 PARAMETER Experiment Name: At_Drought_Reproduction_P Parameter: Treatment Value: Drought vs. No Drought
ccccccccccgatttgaagatgatgtctcggccctccttatccttatctcgcccaccgttctaaaacccttcccttcctcttcttttctcttctccttccacttccacttcttctatctctcacaattcagcaatggcttcttctatagttacctctagcttgaagcctttagccatggccgattctacctcttctaccattttctcccatccttccatctcctctaccatctcttcctccagaattcgcagctccagtgtttccctccttaccggacgcattaacctgcccctctctttctctcgcgtctctctatctcttaaaaccaaaacccaccttaaaaaatccccctttgtctccttcgttgcccagacttcggattgggctgaagaaggtggagaaggaagcgtcgctgttgaggagaccgagaacagtttagagtcacaagatgtgagcgaaggagatgagagcgaaggagatgtgagcgaaggagatgtgagcgaaggagatgagagcgaaggagatgtgagcgaaggagctgtgagcgaaagagctgagttcccggagccatcggaagaagccaagcttttcgtcggaaatttggcttatgatgttaatagccaagctttggctatgctctttgagcaagccggtactgttgaaatcgccgaggttatatacaatagggaaactgaccagagtcgtgggtttggatttgtgacaatgagttctgtggacgaagctgagacagctgtggagaagttcaaccgttatgatcttaacggacgtctactaactgtaaacaaggcagctccaagaggatcacgtccagaacgtgcgcctcgggtatatgaacctgcattcagagtatatgtagggaatctaccatgggatgtggacaatggccgtctagaacagcttttcagtgagcatggtaaagttgtggaagctagggtggtttacgaccgtgagacaggtcgttcacgtggattcgggtttgtcacaatgtctgacgtggatgaactcaacgaagccatctctgccctcgatggacagaacttggagggtagagcaatcagagtgaatgtagcggaagagcgtcctccaaggcgtggatattaaagctgagatctagctgtgccctctctctctccctatcttgcattttgtttagacgagattcttacactcttcaacgattgtttttggctgaactctgaatgtgaaagttaagctgcttctaaagtaatttgtatcgcttgtttttgatgaaaaaaaaaaaaaaaaaaaaaaaaaaaaaactcgagggggggcccggtac

SEQ ID NO: 45470 - protein, 329 aa, Arabidopsis thaliana
  peptide (1)..(329): Ceres Seq. ID no. 15219069
  misc_feature (246)..(317): Pfam Name: RNA recognition motif. (a.k.a. RRM, RBD, or RNP domain) Pfam Description: RNA recognition motif. (a.k.a. RRM, RBD, or RNP
  misc_feature (246)..(317): Pfam Name: RNA recognition motif. (a.k.a. RRM, RBD, or RNP domain) Pfam Description: RNA recognition motif. (a.k.a. RRM, RBD, or RNP
  misc_feature (95)..(326): Homolog of NCBI NO: 15240641 NR Description: 31 kDa ribonucleoprotein, chloroplast protein RNP-T / RNA-binding protein 1/2/3 / RNA-binding protein
  misc_feature (168)..(329): Homolog of NCBI NO: 475720 NR Description: RNA-binding protein 3
  misc_feature (53)..(329): Homolog of NCBI NO: 19032260 NR Description: RNA-binding protein precursor [Persea americana]
  misc_feature (86)..(329): Homolog of NCBI NO: 99684 NR Description: DNA-binding protein - Arabidopsis thaliana
  misc_feature (66)..(329): Homolog of NCBI NO: 629557 NR Description: RNA-binding protein RNP-D precursor - Arabidopsis
  misc_feature (95)..(326): Homolog of NCBI NO: 15240641 NR Description: 31 kDa ribonucleoprotein, chloroplast protein RNP-T / RNA-binding protein 1/2/3 / RNA-binding protein
  misc_feature (53)..(329): Homolog of NCBI NO: 19032260 NR Description: RNA-binding protein precursor [Persea americana]
  misc_feature (66)..(329): Homolog of NCBI NO: 629557 NR Description: RNA-binding protein RNP-D precursor - Arabidopsis
  misc_feature (1)..(329): Homolog of NCBI NO: 15233980 NR Description: 31 kDa ribonucleoprotein, chloroplast protein RNP-T / RNA-binding protein 1/2/3 / RNA-binding protein
  misc_feature (1)..(329): Homolog of NCBI NO: 15294254 NR Description: AT4g24770/F22K18_30 [Arabidopsis thaliana]
  misc_feature (15)..(329): Homolog of NCBI NO: 475719 NR Description: RNA-binding protein 2
  misc_feature (1)..(329): Homolog of NCBI NO: 1076305 NR Description: RNA-binding protein cp31 precursor - Arabidopsis
  misc_feature (11)..(329): Homolog of NCBI NO: 681908 NR Description: cp31 [Arabidopsis thaliana]
  misc_feature (86)..(329): Homolog of NCBI NO: 99684 NR Description: DNA-binding protein - Arabidopsis thaliana
  misc_feature (168)..(329): Homolog of NCBI NO: 475720 NR Description: RNA-binding protein 3
  misc_feature (11)..(329): Homolog of NCBI NO: 681908 NR Description: cp31 [Arabidopsis thaliana]
  misc_feature (1)..(329): Homolog of NCBI NO: 1076305 NR Description: RNA-binding protein cp31 precursor - Arabidopsis
  misc_feature (15)..(329): Homolog of NCBI NO: 475719 NR Description: RNA-binding protein 2
  misc_feature (1)..(329): Homolog of NCBI NO: 15294254 NR Description: AT4g24770/F22K18_30 [Arabidopsis thaliana]
  misc_feature (1)..(329): Homolog of NCBI NO: 15233980 NR Description: 31 kDa ribonucleoprotein, chloroplast protein RNP-T / RNA-binding protein 1/2/3 / RNA-binding protein
MASSIVTSSLKPLAMADSTSSTIFSHPSISSTISSSRIRSSSVSLLTGRINLPLSFSRVSLSLKTKTHLKKSPFVSFVAQTSDWAEEGGEGSVAVEETENSLESQDVSEGDESEGDVSEGDVSEGDESEGDVSEGAVSERAEFPEPSEEAKLFVGNLAYDVNSQALAMLFEQAGTVEIAEVIYNRETDQSRGFGFVTMSSVDEAETAVEKFNRYDLNGRLLTVNKAAPRGSRPERAPRVYEPAFRVYVGNLPWDVDNGRLEQLFSEHGKVVEARVVYDRETGRSRGFGFVTMSDVDELNEAISALDGQNLEGRAIRVNVAEERPPRRGY

SEQ ID NO: 45471 - protein, 315 aa, Arabidopsis thaliana
  peptide (1)..(315): Ceres Seq. ID no. 15219070
  misc_feature (232)..(303): Pfam Name: RNA recognition motif. (a.k.a. RRM, RBD, or RNP domain) Pfam Description: RNA recognition motif. (a.k.a. RRM, RBD, or RNP
  misc_feature (232)..(303): Pfam Name: RNA recognition motif. (a.k.a. RRM, RBD, or RNP domain) Pfam Description: RNA recognition motif. (a.k.a. RRM, RBD, or RNP
  misc_feature (81)..(312): Homolog of NCBI NO: 15240641 NR Description: 31 kDa ribonucleoprotein, chloroplast protein RNP-T / RNA-binding protein 1/2/3 / RNA-binding protein
  misc_feature (154)..(315): Homolog of NCBI NO: 475720 NR Description: RNA-binding protein 3
  misc_feature (39)..(315): Homolog of NCBI NO: 19032260 NR Description: RNA-binding protein precursor [Persea americana]
  misc_feature (72)..(315): Homolog of NCBI NO: 99684 NR Description: DNA-binding protein - Arabidopsis thaliana
  misc_feature (52)..(315): Homolog of NCBI NO: 629557 NR Description: RNA-binding protein RNP-D precursor - Arabidopsis
  misc_feature (81)..(312): Homolog of NCBI NO: 15240641 NR Description: 31 kDa ribonucleoprotein, chloroplast protein RNP-T / RNA-binding protein 1/2/3 / RNA-binding protein
  misc_feature (39)..(315): Homolog of NCBI NO: 19032260 NR Description: RNA-binding protein precursor [Persea americana]
  misc_feature (52)..(315): Homolog of NCBI NO: 629557 NR Description: RNA-binding protein RNP-D precursor - Arabidopsis
  misc_feature (1)..(315): Homolog of NCBI NO: 15233980 NR Description: 31 kDa ribonucleoprotein, chloroplast protein RNP-T / RNA-binding protein 1/2/3 / RNA-binding protein
  misc_feature (1)..(315): Homolog of NCBI NO: 15294254 NR Description: AT4g24770/F22K18_30 [Arabidopsis thaliana]
  misc_feature (1)..(315): Homolog of NCBI NO: 475719 NR Description: RNA-binding protein 2
  misc_feature (1)..(315): Homolog of NCBI NO: 1076305 NR Description: RNA-binding protein cp31 precursor - Arabidopsis
  misc_feature (1)..(315): Homolog of NCBI NO: 681908 NR Description: cp31 [Arabidopsis thaliana]
  misc_feature (72)..(315): Homolog of NCBI NO: 99684 NR Description: DNA-binding protein - Arabidopsis thaliana
  misc_feature (154)..(315): Homolog of NCBI NO: 475720 NR Description: RNA-binding protein 3
  misc_feature (1)..(315): Homolog of NCBI NO: 681908 NR Description: cp31 [Arabidopsis thaliana]
  misc_feature (1)..(315): Homolog of NCBI NO: 1076305 NR Description: RNA-binding protein cp31 precursor - Arabidopsis
  misc_feature (1)..(315): Homolog of NCBI NO: 475719 NR Description: RNA-binding protein 2
  misc_feature (1)..(315): Homolog of NCBI NO: 15294254 NR Description: AT4g24770/F22K18_30 [Arabidopsis thaliana]
  misc_feature (1)..(315): Homolog of NCBI NO: 15233980 NR Description: 31 kDa ribonucleoprotein, chloroplast protein RNP-T / RNA-binding protein 1/2/3 / RNA-binding protein
MADSTSSTIFSHPSISSTISSSRIRSSSVSLLTGRINLPLSFSRVSLSLKTKTHLKKSPFVSFVAQTSDWAEEGGEGSVAVEETENSLESQDVSEGDESEGDVSEGDVSEGDESEGDVSEGAVSERAEFPEPSEEAKLFVGNLAYDVNSQALAMLFEQAGTVEIAEVIYNRETDQSRGFGFVTMSSVDEAETAVEKFNRYDLNGRLLTVNKAAPRGSRPERAPRVYEPAFRVYVGNLPWDVDNGRLEQLFSEHGKVVEARVVYDRETGRSRGFGFVTMSDVDELNEAISALDGQNLEGRAIRVNVAEERPPRRGY

SEQ ID NO: 45472 - DNA, 1812 bp, Arabidopsis thaliana
  misc_feature (1)..(1812): Ceres Seq. ID no. 13593062
  misc_feature: MA Experiment ID: 20000794 Result: Up-regulated in Transcription
  misc_feature: MA Experiment 20000794 PARAMETER Experiment Name: At_Petals_P Parameter: Age (day) Value: 23-25 days
  misc_feature: MA Experiment 20000794 PARAMETER Experiment Name: At_Petals_P Parameter: Plant Line Value: WS
  misc_feature: MA Experiment 20000794 PARAMETER Experiment Name: At_Petals_P Parameter: Tissue Value: Petals vs. Whole plant
  misc_feature: MA Experiment ID: 20001557 Result: Down-regulated in Transcription
  misc_feature: MA Experiment 20001557 PARAMETER Experiment Name: At_Drought_Soil_Dry_P Parameter: Age (day) Value: 27
  misc_feature: MA Experiment 20001557 PARAMETER Experiment Name: At_Drought_Soil_Dry_P Parameter: Organism Value: A. thaliana
  misc_feature: MA Experiment 20001557 PARAMETER Experiment Name: At_Drought_Soil_Dry_P Parameter: Plant Line Value: WS
  misc_feature: MA Experiment 20001557 PARAMETER Experiment Name: At_Drought_Soil_Dry_P Parameter: Post Timepoint (hr) Value: 3
  misc_feature: MA Experiment 20001557 PARAMETER Experiment Name: At_Drought_Soil_Dry_P Parameter: Post-Treatment Value: Re-Water vs. No Drought
  misc_feature: MA Experiment 20001557 PARAMETER Experiment Name: At_Drought_Soil_Dry_P Parameter: Timepoint (day) Value: 13
  misc_feature: MA Experiment 20001557 PARAMETER Experiment Name: At_Drought_Soil_Dry_P Parameter: Treatment Value: Drought vs. No Drought
  misc_feature: MA Experiment ID: 20001560 Result: Down-regulated in Transcription
  misc_feature: MA Experiment 20001560 PARAMETER Experiment Name: At_Drought_Soil_Dry_P Parameter: Age (day) Value: 28
  misc_feature: MA Experiment 20001560 PARAMETER Experiment Name: At_Drought_Soil_Dry_P Parameter: Organism Value: A. thaliana
  misc_feature: MA Experiment 20001560 PARAMETER Experiment Name: At_Drought_Soil_Dry_P Parameter: Plant Line Value: WS
  misc_feature: MA Experiment 20001560 PARAMETER Experiment Name: At_Drought_Soil_Dry_P Parameter: Post Timepoint (hr) Value: None
  misc_feature: MA Experiment 20001560 PARAMETER Experiment Name: At_Drought_Soil_Dry_P Parameter: Post-Treatment Value: None
  misc_feature: MA Experiment 20001560 PARAMETER Experiment Name: At_Drought_Soil_Dry_P Parameter: Timepoint (day) Value: 14
  misc_feature: MA Experiment 20001560 PARAMETER Experiment Name: At_Drought_Soil_Dry_P Parameter: Treatment Value: Drought vs. No Drought
  misc_feature: MA Experiment ID: 20001911 Result: Up-regulated in Transcription
  misc_feature: MA Experiment 20001911 PARAMETER Experiment Name: At_Drought_Reproduction_P Parameter: Age (day) Value: 40
  misc_feature: MA Experiment 20001911 PARAMETER Experiment Name: At_Drought_Reproduction_P Parameter: Organism Value: A. thaliana
  misc_feature: MA Experiment 20001911 PARAMETER Experiment Name: At_Drought_Reproduction_P Parameter: Plant Line Value: WS
  misc_feature: MA Experiment 20001911 PARAMETER Experiment Name: At_Drought_Reproduction_P Parameter: Timepoint (day) Value: 10
  misc_feature: MA Experiment 20001911 PARAMETER Experiment Name: At_Drought_Reproduction_P Parameter: Tissue Value: Flowers
  misc_feature: MA Experiment 20001911 PARAMETER Experiment Name: At_Drought_Reproduction_P Parameter: Treatment Value: Drought vs. No Drought
ggactttcatttgcttcgtctctccggttgttaccaccacacaacgccatggaagctgctcttgctgcatgcgctcttccatcgctccgaattctcaatacgaaacctcgtttcagatgttccttctccaatccaagcctacccatttctcctaattcccttatcacccgcaaatcaagtcgattcacaaccgcagtatcatcaccaccatcatcatcagccgctacgtcaacgaattctccaccggaacctgaagccctattcgaacccgggtcggataagttcgattggtacgctaattggtacccagtgatgccaatttgcgatcttgacaagaaggttcctcatgggaagaaagttatggggattgatttggttgtttggtgggataggaacgagaagcaatggaaagtgatggatgacacgtgtcctcatcgtcttgctcctttgtctgatggaaggattgatcaatgggggaggttgcaatgtgtttatcatggatggtgctttaatggttccggtgactgtaaactcattcctcaagctcctcctgatggtcctccggtccacactttcaagcaagcttgtgtagctgtttacccgagtactgtgcagcatgagatcatttggttttggccaaacagtgatccaaagtacaaaaacattattgaaaccaacaagcctccttacattccagagttagaagacccatcattcactaagttgatggggaatcgtgatattccttacgggtacgatgtcttggtggaaaacctcatggacccggctcatgttccttatgcacattatggactgatgcggtttcctaaaccaaaagagaagattgacagagaaggggggaaaccactcgaaatcaacgttaaaaaactagacaacaaagggttcttttcaaaacaagaatggggttattctaattttattgcaccatgtgtgtatcgctcttccacagaccctctaccagagcaggaacatgagtatcccgcaccagctgcttctgacaaggcggcattgtcaaagcggagattgtctttgatctttatatgtattccggtcagtccaggtcgtagtaggctgatatggacgttcccgaggaattttggtgtatttattgataagattgtccctagatgggtgtttcacattggtcaaaatacgattctagactcagatttgcacctccttcatgtagaggagcggaagatactggagagaggccctgaaaactggcaaaaagcttgctttatcccaacaaaatcagacgctaatgtggttacattcaggagatggtttaacaagtacagcgaggctcgagtcgattggagaggaaagtttgatccatttcttcttcctcctacgcctccccgagaacagctcttaggtattggtcgcatgttgagaactgcagcagctgcaagaaagcttacaaatatctcaatgcgctagaggtgatcttacaaatcgcatccgttgctatgatcggagtcatggcggtgttgaagcaaacgacaatgtcgaatgtggctagaattgcagtgcttgtggcggctgttttaagttttgcagcttcaaagtggctatcacacttcatctacaagacattccattaccatgactacaaccatgctgttgtttgaaatgtatattggtgtttgtacttcgtatatatactcatcggatgtattcagtccacatggtgttgtacataacagttatacagaaactaattcttgaatctataccgtttactaacgaaaaaaaaaaaaaaaaaaaactcgagggggggcccggtac

SEQ ID NO: 45473 - protein, 487 aa, Arabidopsis thaliana
  peptide (1)..(487): Ceres Seq. ID no. 13593063
  misc_feature (100)..(207): Pfam Name: Rieske [2Fe-2S] domain Pfam Description: Rieske [2Fe-2S] domain
  misc_feature (94)..(272): Homolog of NCBI NO: 23041088 NR Description: hypothetical protein [Trichodesmium erythraeum
  misc_feature (347)..(448): Homolog of NCBI NO: 17231846 NR Description: cell death suppressor protein Lls1 homolog
  misc_feature (94)..(272): Homolog of NCBI NO: 17231846 NR Description: cell death suppressor protein Lls1 homolog
  misc_feature (120)..(466): Homolog of NCBI NO: 30103015 NR Description: putative cell death suppressor protein
  misc_feature (21)..(465): Homolog of NCBI NO: 30102995 NR Description: putative cell death suppressor protein
  misc_feature (68)..(466): Homolog of NCBI NO: 30102998 NR Description: putative cell death suppressor protein
  misc_feature (17)..(465): Homolog of NCBI NO: 7488178 NR Description: probable Rieske iron-sulfur protein L73G19.30 -
  misc_feature (280)..(465): Homolog of NCBI NO: 30686966 NR Description: Rieske [2Fe-2S] domain-containing protein
  misc_feature (17)..(281): Homolog of NCBI NO: 30686966 NR Description: Rieske [2Fe-2S] domain-containing protein
  misc_feature (17)..(465): Homolog of NCBI NO: 18416592 NR Description: Rieske [2Fe-2S] domain-containing protein
GLSFASSLRLLPPHNAMEAALAACALPSLRILNTKPRFRCSFSNPSLPISPNSLITRKSSRFTTAVSSPPSSSAATSTNSPPEPEALFEPGSDKFDWYANWYPVMPICDLDKKVPHGKKVMGIDLVVWWDRNEKQWKVMDDTCPHRLAPLSDGRIDQWGRLQCVYHGWCFNGSGDCKLIPQAPPDGPPVHTFKQACVAVYPSTVQHEIIWFWPNSDPKYKNIIETNKPPYIPELEDPSFTKLMGNRDIPYGYDVLVENLMDPAHVPYAHYGLMRFPKPKEKIDREGGKPLEINVKKLDNKGFFSKQEWGYSNFIAPCVYRSSTDPLPEQEHEYPAPAASDKAALSKRRLSLIFICIPVSPGRSRLIWTFPRNFGVFIDKIVPRWVFHIGQNTILDSDLHLLHVEERKILERGPENWQKACFIPTKSDANVVTFRRWFNKYSEARVDWRGKFDPFLLPPTPPREQLLGIGRMLRTAAAARKLTNISMR

SEQ ID NO: 45474 - protein, 471 aa, Arabidopsis thaliana
  peptide (1)..(471): Ceres Seq. ID no. 13593064
  misc_feature (84)..(191): Pfam Name: Rieske [2Fe-2S] domain Pfam Description: Rieske [2Fe-2S] domain
  misc_feature (78)..(256): Homolog of NCBI NO: 23041088 NR Description: hypothetical protein [Trichodesmium erythraeum
  misc_feature (331)..(432): Homolog of NCBI NO: 17231846 NR Description: cell death suppressor protein Lls1 homolog
  misc_feature (78)..(256): Homolog of NCBI NO: 17231846 NR Description: cell death suppressor protein Lls1 homolog
  misc_feature (104)..(450): Homolog of NCBI NO: 30103015 NR Description: putative cell death suppressor protein
  misc_feature (5)..(449): Homolog of NCBI NO: 30102995 NR Description: putative cell death suppressor protein
  misc_feature (52)..(450): Homolog of NCBI NO: 30102998 NR Description: putative cell death suppressor protein
  misc_feature (1)..(449): Homolog of NCBI NO: 7488178 NR Description: probable Rieske iron-sulfur protein L73G19.30 -
  misc_feature (264)..(449): Homolog of NCBI NO: 30686966 NR Description: Rieske [2Fe-2S] domain-containing protein
  misc_feature (1)..(265): Homolog of NCBI NO: 30686966 NR Description: Rieske [2Fe-2S] domain-containing protein
  misc_feature (1)..(449): Homolog of NCBI NO: 18416592 NR Description: Rieske [2Fe-2S] domain-containing protein
MEAALAACALPSLRILNTKPRFRCSFSNPSLPISPNSLITRKSSRFTTAVSSPPSSSAATSTNSPPEPEALFEPGSDKFDWYANWYPVMPICDLDKKVPHGKKVMGIDLVVWWDRNEKQWKVMDDTCPHRLAPLSDGRIDQWGRLQCVYHGWCFNGSGDCKLIPQAPPDGPPVHTFKQACVAVYPSTVQHEIIWFWPNSDPKYKNIIETNKPPYIPELEDPSFTKLMGNRDIPYGYDVLVENLMDPAHVPYAHYGLMRFPKPKEKIDREGGKPLEINVKKLDNKGFFSKQEWGYSNFIAPCVYRSSTDPLPEQEHEYPAPAASDKAALSKRRLSLIFICIPVSPGRSRLIWTFPRNFGVFIDKIVPRWVFHIGQNTILDSDLHLLHVEERKILERGPENWQKACFIPTKSDANVVTFRRWFNKYSEARVDWRGKFDPFLLPPTPPREQLLGIGRMLRTAAAARKLTNISMR

SEQ ID NO: 45475 - protein, 383 aa, Arabidopsis thaliana
  peptide (1)..(383): Ceres Seq. ID no. 13593065
  misc_feature (1)..(103): Pfam Name: Rieske [2Fe-2S] domain Pfam Description: Rieske [2Fe-2S] domain
  misc_feature (1)..(168): Homolog of NCBI NO: 23041088 NR Description: hypothetical protein [Trichodesmium erythraeum
  misc_feature (243)..(344): Homolog of NCBI NO: 17231846 NR Description: cell death suppressor protein Lls1 homolog
  misc_feature (1)..(168): Homolog of NCBI NO: 17231846 NR Description: cell death suppressor protein Lls1 homolog
  misc_feature (16)..(362): Homolog of NCBI NO: 30103015 NR Description: putative cell death suppressor protein
  misc_feature (1)..(361): Homolog of NCBI NO: 30102995 NR Description: putative cell death suppressor protein
  misc_feature (1)..(362): Homolog of NCBI NO: 30102998 NR Description: putative cell death suppressor protein
  misc_feature (1)..(361): Homolog of NCBI NO: 7488178 NR Description: probable Rieske iron-sulfur protein L73G19.30 -
  misc_feature (176)..(361): Homolog of NCBI NO: 30686966 NR Description: Rieske [2Fe-2S] domain-containing protein
  misc_feature (1)..(177): Homolog of NCBI NO: 30686966 NR Description: Rieske [2Fe-2S] domain-containing protein
  misc_feature (1)..(361): Homolog of NCBI NO: 18416592 NR Description: Rieske [2Fe-2S] domain-containing protein
MPICDLDKKVPHGKKVMGIDLVVWWDRNEKQWKVMDDTCPHRLAPLSDGRIDQWGRLQCVYHGWCFNGSGDCKLIPQAPPDGPPVHTFKQACVAVYPSTVQHEIIWFWPNSDPKYKNIIETNKPPYIPELEDPSFTKLMGNRDIPYGYDVLVENLMDPAHVPYAHYGLMRFPKPKEKIDREGGKPLEINVKKLDNKGFFSKQEWGYSNFIAPCVYRSSTDPLPEQEHEYPAPAASDKAALSKRRLSLIFICIPVSPGRSRLIWTFPRNFGVFIDKIVPRWVFHIGQNTILDSDLHLLHVEERKILERGPENWQKACFIPTKSDANVVTFRRWFNKYSEARVDWRGKFDPFLLPPTPPREQLLGIGRMLRTAAAARKLTNISMR

SEQ ID NO: 45476 - DNA, 2791 bp, Arabidopsis thaliana
  misc_feature (1)..(2791): Ceres Seq. ID no. 14308948
  misc_feature: MA Experiment ID: 20000437 Result: Up-regulated in Transcription
  misc_feature: MA Experiment 20000437 PARAMETER Experiment Name: At_Drought_P Parameter: Age (day) Value: 8
  misc_feature: MA Experiment 20000437 PARAMETER Experiment Name: At_Drought_P Parameter: Organism Value: A. thaliana
  misc_feature: MA Experiment 20000437 PARAMETER Experiment Name: At_Drought_P Parameter: Plant Line Value: WS
  misc_feature: MA Experiment 20000437 PARAMETER Experiment Name: At_Drought_P Parameter: Timepoint (hr) Value: 24
  misc_feature: MA Experiment 20000437 PARAMETER Experiment Name: At_Drought_P Parameter: Tissue Value: Whole Plant
  misc_feature: MA Experiment 20000437 PARAMETER Experiment Name: At_Drought_P Parameter: Treatment Value: Drought vs. No Drought
  misc_feature: MA Experiment ID: 20000496 Result: Up-regulated in Transcription
  misc_feature: MA Experiment 20000496 PARAMETER Experiment Name: At_Guard_Cells_P Parameter: Harvest Date Value: 7/19/2002
  misc_feature: MA Experiment 20000496 PARAMETER Experiment Name: At_Guard_Cells_P Parameter: Organism Value: Canola
  misc_feature: MA Experiment 20000496 PARAMETER Experiment Name: At_Guard_Cells_P Parameter: Tissue Value: Guard Cells vs. Leaves
aaaagaaacaacactcgaaaaagttcttctttttcttccgcacatgtctgactctctcataagcgtaaatcgctctgtcaaatatctctgaccagagagacagagttgcctccacgtttcttcagacaagactcacgctcttccctttcaccacattcccttctccatttctcaatctcacttaccttctcgattcttgctccaatttcgaatcttccgagtgaaaaaagcttcaaagtttggaactttctagtgtttattaatctgggtctgctctgagtttcgtgtgtagctgcatatgagcttaaagctcgagtttttccatctgggtttggaattctagggctagtgattggagattttgggaatttaggttgattttagtaggtttgacttcaggttgcgtaatttaggttgattttgatccgatttgtggaattagggtttgtttgttcacaaagcttcaatttttggagtttaaatggatcgataacgactgtgttagaagaaagtttgctgcttcagattcgtattcgatatagaaatgagtttggttcctcctttaccgattttatcaccaccgtcgtcaaattcttcaacaactgcacctcctccgttacagactcagcccaccactccatctgctccacctccggttacaccacctccttctccgccgcaatctccgccgccggttgtatcatcatcaccaccaccaccggttgtttcgtcacctccaccgtcttcttctccaccaccgtcacctcctgtcatcacttcacctcctcccaccgttgcttcttcccctccacctcctgtggtgattgcttcccctcctccctcaactccggcgacaacaccaccagctcctccgcaaactgtctcacctccaccgcctcctgatgcttctccatcacctcccgcaccaacaacaacaaatcctcctcctaaaccttctccttcaccgccgggagaaacaccttcaccaccgggagaaacaccttcaccgcctaaaccttctccgtcaactccaactccaacaacaaccacatctcctcctcctcctccagctacctctgcttctcctccgtcttcaaatcctactgatccttctacgttagctcctcctccaactccattacctgttgttcccagagagaaaccaattgctaaaccaactggaccagcttcaaacaatggaaacaacactttgccgtctagttcaccaggtaaaagcgaagttggtactggaggtattgtagctatcggagtgattgtgggattggtttttcttagcctttttgtgatgggtgtgtggttcactcggaaacgaaagcgaaaggaccctggaacctttgttggatacacaatgcctccttccgcttattcatctcctcaaggctcagatgtagtgctcttcaactcgcgttcttcagctcctcctaaaatgagaagccattctggtagcgattacatgtatgcgtcatctgattcaggcatggttagcaaccaaagatcaaggttttcatatgatgagttatctcaagttaccagtgggttctccgagaagaatcttctcggtgaaggagggtttggctgtgtatacaaaggcgttctttctgacggaagggaagtggcagttaaacagttaaagattggtggaagccaaggggagagagagttcaaagcagaagttgaaatcatttctcgggttcatcaccgccatttggttacactagttggttattgcatctcagagcaacataggttgcttgtatatgattatgtacctaacaacactctccattatcatctacatgctccaggaagaccagttatgacttgggaaactcgggtaagggtcgctgctggtgcagctcgtggaatcgcctacttacatgaagactgtcatccccgcattattcaccgtgacataaaatcttccaacatacttcttgataacagctttgaagccttggttgcggattttggacttgcaaaaattgcacaagaactggatttaaacacacacgtctcaacgcgcgtaatgggaacctttgggtacatggctcctgaatatgcaacaagtggaaagctgtctgaaaaagcagatgtttattcgtatggggtaatactgttggagcttataactggccgtaaaccggtagatacgtctcaaccacttggtgatgagagccttgttgaatgggcaagacccttgctgggtcaagcaatcgagaacgaagaattcgacgagctagtagatccgaggctagggaaaaacttcatcccaggagagatgttcagaatggtagaagctgcggctgcatgtgtccgccactcagctgcaaaaagaccaaagatgagtcaagtggtgagagctttggacacacttgaagaagcaacggacataaccaacggaatgagaccaggacagagccaagtgtttgactcgagacaacaatctgctcagataaggatgtttcaaagaatggcttttgggagtcaagattatagttctgacttctttgatcgctcacagtcacatagtagctggggcagtcgtgaccagtccagatttgtaccttagtagtttttattgcctttgcttctttcttctttccctttaaacatgtcctcgatcttgtatattcttttgcatgatataatgtatttttgaaatatacatacatacacacataaaatttggtagtcttttgaagaaaaagaataacagatgtatttgatagatagtggtccttgctttatctaatgattgctgaaccgggtt

SEQ ID NO: 45477 - protein, 681 aa, Arabidopsis thaliana
  peptide (1)..(681): Ceres Seq. ID no. 14308949
  misc_feature (339)..(540): Pfam Name: Protein kinase domain Pfam Description: Protein kinase domain
  misc_feature (77)..(300): Homolog of NCBI NO: 13447449 NR Description: receptor protein kinase PERK1 [Brassica napus]
  misc_feature (52)..(178): Homolog of NCBI NO: 13447449 NR Description: receptor protein kinase PERK1 [Brassica napus]
  misc_feature (299)..(659): Homolog of NCBI NO: 13447449 NR Description: receptor protein kinase PERK1 [Brassica napus]
  misc_feature (1)..(677): Homolog of NCBI NO: 25518375 NR Description: hypothetical protein F5O8.10 - Arabidopsis
  misc_feature (17)..(660): Homolog of NCBI NO: 15218591 NR Description: protein kinase family [Arabidopsis thaliana]
  misc_feature (19)..(637): Homolog of NCBI NO: 15230108 NR Description: protein kinase -related [Arabidopsis thaliana]
  misc_feature (11)..(675): Homolog of NCBI NO: 15230108 NR Description: protein kinase -related [Arabidopsis thaliana]
  misc_feature (5)..(677): Homolog of NCBI NO: 15223161 NR Description: protein kinase -related [Arabidopsis thaliana]
  misc_feature (1)..(677): Homolog of NCBI NO: 15222649 NR Description: protein kinase family [Arabidopsis thaliana]
  misc_feature (5)..(675): Homolog of NCBI NO: 15221470 NR Description: protein kinase family [Arabidopsis thaliana]
MSLVPPLPILSPPSSNSSTTAPPPLQTQPTTPSAPPPVTPPPSPPQSPPPVVSSSPPPPVVSSPPPSSSPPPSPPVITSPPPTVASSPPPPVVIASPPPSTPATTPPAPPQTVSPPPPPDASPSPPAPTTTNPPPKPSPSPPGETPSPPGETPSPPKPSPSTPTPTTTTSPPPPPATSASPPSSNPTDPSTLAPPPTPLPVVPREKPIAKPTGPASNNGNNTLPSSSPGKSEVGTGGIVAIGVIVGLVFLSLFVMGVWFTRKRKRKDPGTFVGYTMPPSAYSSPQGSDVVLFNSRSSAPPKMRSHSGSDYMYASSDSGMVSNQRSRFSYDELSQVTSGFSEKNLLGEGGFGCVYKGVLSDGREVAVKQLKIGGSQGEREFKAEVEIISRVHHRHLVTLVGYCISEQHRLLVYDYVPNNTLHYHLHAPGRPVMTWETRVRVAAGAARGIAYLHEDCHPRIIHRDIKSSNILLDNSFEALVADFGLAKIAQELDLNTHVSTRVMGTFGYMAPEYATSGKLSEKADVYSYGVILLELITGRKPVDTSQPLGDESLVEWARPLLGQAIENEEFDELVDPRLGKNFIPGEMFRMVEAAAACVRHSAAKRPKMSQVVRALDTLEEATDITNGMRPGQSQVFDSRQQSAQIRMFQRMAFGSQDYSSDFFDRSQSHSSWGSRDQSRFVP

SEQ ID NO: 45478 - protein, 427 aa, Arabidopsis thaliana
  peptide (1)..(427): Ceres Seq. ID no. 14308950
  misc_feature (85)..(286): Pfam Name: Protein kinase domain Pfam Description: Protein kinase domain
  misc_feature (45)..(405): Homolog of NCBI NO: 15230130 NR Description: protein kinase -related [Arabidopsis thaliana]
  misc_feature (1)..(46): Homolog of NCBI NO: 13447449 NR Description: receptor protein kinase PERK1 [Brassica napus]
  misc_feature (45)..(405): Homolog of NCBI NO: 13447449 NR Description: receptor protein kinase PERK1 [Brassica napus]
  misc_feature (1)..(423): Homolog of NCBI NO: 25518375 NR Description: hypothetical protein F5O8.10 - Arabidopsis
  misc_feature (1)..(406): Homolog of NCBI NO: 15218591 NR Description: protein kinase family [Arabidopsis thaliana]
  misc_feature (1)..(383): Homolog of NCBI NO: 15230108 NR Description: protein kinase -related [Arabidopsis thaliana]
  misc_feature (1)..(421): Homolog of NCBI NO: 15230108 NR Description: protein kinase -related [Arabidopsis thaliana]
  misc_feature (1)..(423): Homolog of NCBI NO: 15223161 NR Description: protein kinase -related [Arabidopsis thaliana]
  misc_feature (1)..(423): Homolog of NCBI NO: 15222649 NR Description: protein kinase family [Arabidopsis thaliana]
  misc_feature (1)..(421): Homolog of NCBI NO: 15221470 NR Description: protein kinase family [Arabidopsis thaliana]
MGVWFTRKRKRKDPGTFVGYTMPPSAYSSPQGSDVVLFNSRSSAPPKMRSHSGSDYMYASSDSGMVSNQRSRFSYDELSQVTSGFSEKNLLGEGGFGCVYKGVLSDGREVAVKQLKIGGSQGEREFKAEVEIISRVHHRHLVTLVGYCISEQHRLLVYDYVPNNTLHYHLHAPGRPVMTWETRVRVAAGAARGIAYLHEDCHPRIIHRDIKSSNILLDNSFEALVADFGLAKIAQELDLNTHVSTRVMGTFGYMAPEYATSGKLSEKADVYSYGVILLELITGRKPVDTSQPLGDESLVEWARPLLGQAIENEEFDELVDPRLGKNFIPGEMFRMVEAAAACVRHSAAKRPKMSQVVRALDTLEEATDITNGMRPGQSQVFDSRQQSAQIRMFQRMAFGSQDYSSDFFDRSQSHSSWGSRDQSRFVP

SEQ ID NO: 45479 - protein, 406 aa, Arabidopsis thaliana
  peptide (1)..(406): Ceres Seq. ID no. 14308951
  misc_feature (64)..(265): Pfam Name: Protein kinase domain Pfam Description: Protein kinase domain
  misc_feature (24)..(384): Homolog of NCBI NO: 15230130 NR Description: protein kinase -related [Arabidopsis thaliana]
  misc_feature (1)..(25): Homolog of NCBI NO: 13447449 NR Description: receptor protein kinase PERK1 [Brassica napus]
  misc_feature (24)..(384): Homolog of NCBI NO: 13447449 NR Description: receptor protein kinase PERK1 [Brassica napus]
  misc_feature (1)..(402): Homolog of NCBI NO: 25518375 NR Description: hypothetical protein F5O8.10 - Arabidopsis
  misc_feature (1)..(385): Homolog of NCBI NO: 15218591 NR Description: protein kinase family [Arabidopsis thaliana]
  misc_feature (1)..(362): Homolog of NCBI NO: 15230108 NR Description: protein kinase -related [Arabidopsis thaliana]
  misc_feature (1)..(400): Homolog of NCBI NO: 15230108 NR Description: protein kinase -related [Arabidopsis thaliana]
  misc_feature (1)..(402): Homolog of NCBI NO: 15223161 NR Description: protein kinase -related [Arabidopsis thaliana]
  misc_feature (1)..(402): Homolog of NCBI NO: 15222649 NR Description: protein kinase family [Arabidopsis thaliana]
  misc_feature (1)..(400): Homolog of NCBI NO: 15221470 NR Description: protein kinase family [Arabidopsis thaliana]
MPPSAYSSPQGSDVVLFNSRSSAPPKMRSHSGSDYMYASSDSGMVSNQRSRFSYDELSQVTSGFSEKNLLGEGGFGCVYKGVLSDGREVAVKQLKIGGSQGEREFKAEVEIISRVHHRHLVTLVGYCISEQHRLLVYDYVPNNTLHYHLHAPGRPVMTWETRVRVAAGAARGIAYLHEDCHPRIIHRDIKSSNILLDNSFEALVADFGLAKIAQELDLNTHVSTRVMGTFGYMAPEYATSGKLSEKADVYSYGVILLELITGRKPVDTSQPLGDESLVEWARPLLGQAIENEEFDELVDPRLGKNFIPGEMFRMVEAAAACVRHSAAKRPKMSQVVRALDTLEEATDITNGMRPGQSQVFDSRQQSAQIRMFQRMAFGSQDYSSDFFDRSQSHSSWGSRDQSRFVP

SEQ ID NO: 45480 - DNA, 2375 bp, Arabidopsis thaliana
  misc_feature (1)..(2375): Ceres Seq. ID no. 13576307
  misc_feature: MA Experiment ID: 20000171 Result: Down-regulated in Transcription
  misc_feature: MA Experiment 20000171 PARAMETER Experiment Name: At_42deg_Heat_P Parameter: Age (day) Value: 14
  misc_feature: MA Experiment 20000171 PARAMETER Experiment Name: At_42deg_Heat_P Parameter: Organism Value: A. thaliana
  misc_feature: MA Experiment 20000171 PARAMETER Experiment Name: At_42deg_Heat_P Parameter: Plant Line Value: WS
  misc_feature: MA Experiment 20000171 PARAMETER Experiment Name: At_42deg_Heat_P Parameter: Temperature (deg C) Value: 42 vs. 22
  misc_feature: MA Experiment 20000171 PARAMETER Experiment Name: At_42deg_Heat_P Parameter: Timepoint (hr) Value: 1
  misc_feature: MA Experiment 20000171 PARAMETER Experiment Name: At_42deg_Heat_P Parameter: Tissue Value: Aerial
  misc_feature: MA Experiment ID: 20000234 Result: Up-regulated in Transcription
  misc_feature: MA Experiment 20000234 PARAMETER Experiment Name: At_Siliques_P Parameter: Age (day) Value: 21
  misc_feature: MA Experiment 20000234 PARAMETER Experiment Name: At_Siliques_P Parameter: Organism Value: A. thaliana
  misc_feature: MA Experiment 20000234 PARAMETER Experiment Name: At_Siliques_P Parameter: Plant Line Value: WS
  misc_feature: MA Experiment 20000234 PARAMETER Experiment Name: At_Siliques_P Parameter: Tissue Value: Less Than 5mm Siliques vs. Whole Plant
  misc_feature: MA Experiment ID: 20000235 Result: Up-regulated in Transcription
  misc_feature: MA Experiment 20000235 PARAMETER Experiment Name: At_Siliques_P Parameter: Age (day) Value: 21
  misc_feature: MA Experiment 20000235 PARAMETER Experiment Name: At_Siliques_P Parameter: Organism Value: A. thaliana
  misc_feature: MA Experiment 20000235 PARAMETER Experiment Name: At_Siliques_P Parameter: Plant Line Value: WS
  misc_feature: MA Experiment 20000235 PARAMETER Experiment Name: At_Siliques_P Parameter: Tissue Value: 5-10mm Siliques vs. Whole Plant
tctctctctctcctttcattttcactacttcttcgtctctctctctctctctctgtatcccttgagtgatcggagatcagatctcgagccgacgaacacgtgcgtgtaaagcaatgctgttcgcactctgctatcttcaattcctcgatttatcttgaactgcgattgtttgttgttgtttcgatttcgttgggggtaattgggtgaattagagaggtgaatgagaaattcgcctgcgattctgtctctgtcggtgatcgattgccggagcagaaccaggtcggattctagcttcgccatttggagtagtggtcgatggggccaatgcggctgatctgaatttctatttccctccccccaattcagatcgaattctagggttcttctaattcctgggtttttagtctgtgtttcaattgagtcacgatgcagcaagataatcgcaaaaagaataatctggagatggagttcttttctgactatggcgatgccaatagatttaaagttcaagaagttattggaaaaggcagttatggagttgtttgctcagctatagacactcttacgggtgagaaagtcgcgataaagaaaattcatgatatttttgagcatatttctgatgctgcgaggattctacgtgagattaaacttcttagactcctaaggcatccagatatagttgaaattaagcacattatgcttcctccttcacgaagagaattcaaagatatttatgttgtctttgagctcatggaatcggatcttcatcaagttattaaagccaatgatgatttgactagagagcattaccagtttttcctgtatcagttattgcgtgcactgaagtacattcacacagctaatgtctaccaccgagacctgaaaccaaagaacatattggcaaatgcaaactgtaaacttaagatttgtgattttggattggcaagggttgcattcaatgatacccccacaacaatcttctggactgactatgttgctaccagatggtatagagctccagagctttgtggatctttttactctaagtatacacccgcaattgacatctggagtataggctgcatttttgcggaggtgttgatgggtaaaccacttttccctggaaagaatgtggttcaccagctggatcttatgactgatctgctagggacaccttccctggacaccatctcacgggtgaggaatgagaaggcaaggaggtacttaacaagcatgaggaaaaagccacccattccgtttgcacagaaattcccaaatgcagatcctttgtctctgaagttgttggagaggcttcttgcttttgatccaaaagaccggccaactgctgaagaggcacttgctgatccatattttaagggattggcaaaagtggaaagggagccttcatgtcaacccatcacgaagatggaatttgagttcgagagaagaaaggtcactaaagaggatataagagagctaatttctagggagatacttgagtaccaccctcagctgcttaaagatcatatgaacggggctgataaagccagttttctctacccaagtgctgttgatcaatttagaagacaatttgcgcatcttgaagaaaacagtggtaaaaccggccctgtggcacctctagaaaggaaacatgcctctcttcccagatcaacggtcatacactcaaccgcagtagcacgaggaggacaaccaaaacttatgaataacacaaacacattgaaccctgaaactactcaaaacattccttttaatcatgcaacaatacaagcacaacaaagaaacctctcagcagccaaaccaagcacattcatgggcccggttgcacctttcgacaatggcagaatcagcagagatgcatatgacccgagatcattcatccggagcactaatctccccttttcacaacaatctgctgcaacagtcgccatgggaaagcagcaagagagaagaacaactatggagcctgagaagcaggcaagacaaatatctcagtataatagatatgcaccagatgtagccatcaacatagacaacaacccgtttatcatggctagaacgggaatgaacaaagccgaaaacatcagtgaccggatcataatcgacacaaatctgttacaggcaactgccggaataggagtcgcagcggcagctgcagcagctgctcctggtggttctgctcaccggaaagttggagctgttcggtacggtatgtcaaagatgtactagttctccacctaagctgggctttcatcacacagaacattgtatgtttccatcttcatgtcataaaagaaaattgtctatgacacaaaaccatatgagcaaaaaatattttttttattaattgtgatcca

SEQ ID NO: 45481 - protein, 606 aa, Arabidopsis thaliana
  peptide (1)..(606): Ceres Seq. ID no. 13576308
  misc_feature (25)..(316): Pfam Name: Protein kinase domain Pfam Description: Protein kinase domain
  misc_feature (25)..(316): Pfam Name: Protein kinase domain Pfam Description: Protein kinase domain
  misc_feature (4)..(417): Homolog of NCBI NO: 9294059 NR Description: MAP kinase [Arabidopsis thaliana]
  misc_feature (1)..(477): Homolog of NCBI NO: 17064906 NR Description: Unknown protein [Arabidopsis thaliana]
  misc_feature (1)..(477): Homolog of NCBI NO: 15239634 NR Description: mitogen-activated protein kinase (MAPK), putative
  misc_feature (13)..(600): Homolog of NCBI NO: 15220806 NR Description: mitogen-activated protein kinase (MAPK), putative
  misc_feature (13)..(489): Homolog of NCBI NO: 34910892 NR Description: putative mitogen-activated protein kinase
  misc_feature (4)..(417): Homolog of NCBI NO: 9294059 NR Description: MAP kinase [Arabidopsis thaliana]
  misc_feature (1)..(477): Homolog of NCBI NO: 15239634 NR Description: mitogen-activated protein kinase (MAPK), putative
  misc_feature (13)..(489): Homolog of NCBI NO: 34910892 NR Description: putative mitogen-activated protein kinase
  misc_feature (9)..(606): Homolog of NCBI NO: 34912932 NR Description: MAP kinase-like protein [Oryza sativa (japonica
  misc_feature (1)..(603): Homolog of NCBI NO: 4732123 NR Description: mitogen-activated protein kinase homologue
  misc_feature (8)..(603): Homolog of NCBI NO: 9294393 NR Description: mitogen-activated protein kinase [Arabidopsis
  misc_feature (13)..(603): Homolog of NCBI NO: 15231915 NR Description: mitogen-activated protein kinase (MAPK), putative
  misc_feature (13)..(489): Homolog of NCBI NO: 24412850 NR Description: putative mitogen-activated protein kinase wjumk1
  misc_feature (13)..(600): Homolog of NCBI NO: 15220806 NR Description: mitogen-activated protein kinase (MAPK), putative
  misc_feature (1)..(477): Homolog of NCBI NO: 17064906 NR Description: Unknown protein [Arabidopsis thaliana]
  misc_feature (13)..(489): Homolog of NCBI NO: 24412850 NR Description: putative mitogen-activated protein kinase wjumk1
  misc_feature (13)..(603): Homolog of NCBI NO: 15231915 NR Description: mitogen-activated protein kinase (MAPK), putative
  misc_feature (8)..(603): Homolog of NCBI NO: 9294393 NR Description: mitogen-activated protein kinase [Arabidopsis
  misc_feature (1)..(603): Homolog of NCBI NO: 4732123 NR Description: mitogen-activated protein kinase homologue
  misc_feature (9)..(606): Homolog of NCBI NO: 34912932 NR Description: MAP kinase-like protein [Oryza sativa (japonica
MQQDNRKKNNLEMEFFSDYGDANRFKVQEVIGKGSYGVVCSAIDTLTGEKVAIKKIHDIFEHISDAARILREIKLLRLLRHPDIVEIKHIMLPPSRREFKDIYVVFELMESDLHQVIKANDDLTREHYQFFLYQLLRALKYIHTANVYHRDLKPKNILANANCKLKICDFGLARVAFNDTPTTIFWTDYVATRWYRAPELCGSFYSKYTPAIDIWSIGCIFAEVLMGKPLFPGKNVVHQLDLMTDLLGTPSLDTISRVRNEKARRYLTSMRKKPPIPFAQKFPNADPLSLKLLERLLAFDPKDRPTAEEALADPYFKGLAKVEREPSCQPITKMEFEFERRKVTKEDIRELISREILEYHPQLLKDHMNGADKASFLYPSAVDQFRRQFAHLEENSGKTGPVAPLERKHASLPRSTVIHSTAVARGGQPKLMNNTNTLNPETTQNIPFNHATIQAQQRNLSAAKPSTFMGPVAPFDNGRISRDAYDPRSFIRSTNLPFSQQSAATVAMGKQQERRTTMEPEKQARQISQYNRYAPDVAINIDNNPFIMARTGMNKAENISDRIIIDTNLLQATAGIGVAAAAAAAAPGGSAHRKVGAVRYGMSKMY

SEQ ID NO: 45482 - protein, 594 aa, Arabidopsis thaliana
  peptide (1)..(594): Ceres Seq. ID no. 13576309
  misc_feature (13)..(304): Pfam Name: Protein kinase domain Pfam Description: Protein kinase domain
  misc_feature (13)..(304): Pfam Name: Protein kinase domain Pfam Description: Protein kinase domain
  misc_feature (1)..(405): Homolog of NCBI NO: 9294059 NR Description: MAP kinase [Arabidopsis thaliana]
  misc_feature (1)..(465): Homolog of NCBI NO: 17064906 NR Description: Unknown protein [Arabidopsis thaliana]
  misc_feature (1)..(465): Homolog of NCBI NO: 15239634 NR Description: mitogen-activated protein kinase (MAPK), putative
  misc_feature (1)..(588): Homolog of NCBI NO: 15220806 NR Description: mitogen-activated protein kinase (MAPK), putative
  misc_feature (1)..(477): Homolog of NCBI NO: 34910892 NR Description: putative mitogen-activated protein kinase
  misc_feature (1)..(405): Homolog of NCBI NO: 9294059 NR Description: MAP kinase [Arabidopsis thaliana]
  misc_feature (1)..(465): Homolog of NCBI NO: 15239634 NR Description: mitogen-activated protein kinase (MAPK), putative
  misc_feature (1)..(477): Homolog of NCBI NO: 34910892 NR Description: putative mitogen-activated protein kinase
  misc_feature (1)..(594): Homolog of NCBI NO: 34912932 NR Description: MAP kinase-like protein [Oryza sativa (japonica
  misc_feature (1)..(591): Homolog of NCBI NO: 4732123 NR Description: mitogen-activated protein kinase homologue
  misc_feature (1)..(591): Homolog of NCBI NO: 9294393 NR Description: mitogen-activated protein kinase [Arabidopsis
  misc_feature (1)..(591): Homolog of NCBI NO: 15231915 NR Description: mitogen-activated protein kinase (MAPK), putative
  misc_feature (1)..(477): Homolog of NCBI NO: 24412850 NR Description: putative mitogen-activated protein kinase wjumk1
  misc_feature (1)..(588): Homolog of NCBI NO: 15220806 NR Description: mitogen-activated protein kinase (MAPK), putative
  misc_feature (1)..(465): Homolog of NCBI NO: 17064906 NR Description: Unknown protein [Arabidopsis thaliana]
  misc_feature (1)..(477): Homolog of NCBI NO: 24412850 NR Description: putative mitogen-activated protein kinase wjumk1
  misc_feature (1)..(591): Homolog of NCBI NO: 15231915 NR Description: mitogen-activated protein kinase (MAPK), putative
  misc_feature (1)..(591): Homolog of NCBI NO: 9294393 NR Description: mitogen-activated protein kinase [Arabidopsis
  misc_feature (1)..(591): Homolog of NCBI NO: 4732123 NR Description: mitogen-activated protein kinase homologue
  misc_feature (1)..(594): Homolog of NCBI NO: 34912932 NR Description: MAP kinase-like protein [Oryza sativa (japonica
MEFFSDYGDANRFKVQEVIGKGSYGVVCSAIDTLTGEKVAIKKIHDIFEHISDAARILREIKLLRLLRHPDIVEIKHIMLPPSRREFKDIYVVFELMESDLHQVIKANDDLTREHYQFFLYQLLRALKYIHTANVYHRDLKPKNILANANCKLKICDFGLARVAFNDTPTTIFWTDYVATRWYRAPELCGSFYSKYTPAIDIWSIGCIFAEVLMGKPLFPGKNVVHQLDLMTDLLGTPSLDTISRVRNEKARRYLTSMRKKPPIPFAQKFPNADPLSLKLLERLLAFDPKDRPTAEEALADPYFKGLAKVEREPSCQPITKMEFEFERRKVTKEDIRELISREILEYHPQLLKDHMNGADKASFLYPSAVDQFRRQFAHLEENSGKTGPVAPLERKHASLPRSTVIHSTAVARGGQPKLMNNTNTLNPETTQNIPFNHATIQAQQRNLSAAKPSTFMGPVAPFDNGRISRDAYDPRSFIRSTNLPFSQQSAATVAMGKQQERRTTMEPEKQARQISQYNRYAPDVAINIDNNPFIMARTGMNKAENISDRIIIDTNLLQATAGIGVAAAAAAAAPGGSAHRKVGAVRYGMSKMY

SEQ ID NO: 45483 - protein, 516 aa, Arabidopsis thaliana
  peptide (1)..(516): Ceres Seq. ID no. 13576310
  misc_feature (1)..(226): Pfam Name: Protein kinase domain Pfam Description: Protein kinase domain
  misc_feature (1)..(226): Pfam Name: Protein kinase domain Pfam Description: Protein kinase domain
  misc_feature (1)..(327): Homolog of NCBI NO: 9294059 NR Description: MAP kinase [Arabidopsis thaliana]
  misc_feature (1)..(387): Homolog of NCBI NO: 17064906 NR Description: Unknown protein [Arabidopsis thaliana]
  misc_feature (1)..(387): Homolog of NCBI NO: 15239634 NR Description: mitogen-activated protein kinase (MAPK), putative
  misc_feature (1)..(510): Homolog of NCBI NO: 15220806 NR Description: mitogen-activated protein kinase (MAPK), putative
  misc_feature (1)..(399): Homolog of NCBI NO: 34910892 NR Description: putative mitogen-activated protein kinase
  misc_feature (1)..(327): Homolog of NCBI NO: 9294059 NR Description: MAP kinase [Arabidopsis thaliana]
  misc_feature (1)..(387): Homolog of NCBI NO: 15239634 NR Description: mitogen-activated protein kinase (MAPK), putative
  misc_feature (1)..(399): Homolog of NCBI NO: 34910892 NR Description: putative mitogen-activated protein kinase
  misc_feature (1)..(516): Homolog of NCBI NO: 34912932 NR Description: MAP kinase-like protein [Oryza sativa (japonica
  misc_feature (1)..(513): Homolog of NCBI NO: 4732123 NR Description: mitogen-activated protein kinase homologue
  misc_feature (1)..(513): Homolog of NCBI NO: 9294393 NR Description: mitogen-activated protein kinase [Arabidopsis
  misc_feature (1)..(513): Homolog of NCBI NO: 15231915 NR Description: mitogen-activated protein kinase (MAPK), putative
  misc_feature (1)..(399): Homolog of NCBI NO: 24412850 NR Description: putative mitogen-activated protein kinase wjumk1
  misc_feature (1)..(510): Homolog of NCBI NO: 15220806 NR Description: mitogen-activated protein kinase (MAPK), putative
  misc_feature (1)..(387): Homolog of NCBI NO: 17064906 NR Description: Unknown protein [Arabidopsis thaliana]
  misc_feature (1)..(399): Homolog of NCBI NO: 24412850 NR Description: putative mitogen-activated protein kinase wjumk1
  misc_feature (1)..(513): Homolog of NCBI NO: 15231915 NR Description: mitogen-activated protein kinase (MAPK), putative
  misc_feature (1)..(513): Homolog of NCBI NO: 9294393 NR Description: mitogen-activated protein kinase [Arabidopsis
  misc_feature (1)..(513): Homolog of NCBI NO: 4732123 NR Description: mitogen-activated protein kinase homologue
  misc_feature (1)..(516): Homolog of NCBI NO: 34912932 NR Description: MAP kinase-like protein [Oryza sativa (japonica
MLPPSRREFKDIYVVFELMESDLHQVIKANDDLTREHYQFFLYQLLRALKYIHTANVYHRDLKPKNILANANCKLKICDFGLARVAFNDTPTTIFWTDYVATRWYRAPELCGSFYSKYTPAIDIWSIGCIFAEVLMGKPLFPGKNVVHQLDLMTDLLGTPSLDTISRVRNEKARRYLTSMRKKPPIPFAQKFPNADPLSLKLLERLLAFDPKDRPTAEEALADPYFKGLAKVEREPSCQPITKMEFEFERRKVTKEDIRELISREILEYHPQLLKDHMNGADKASFLYPSAVDQFRRQFAHLEENSGKTGPVAPLERKHASLPRSTVIHSTAVARGGQPKLMNNTNTLNPETTQNIPFNHATIQAQQRNLSAAKPSTFMGPVAPFDNGRISRDAYDPRSFIRSTNLPFSQQSAATVAMGKQQERRTTMEPEKQARQISQYNRYAPDVAINIDNNPFIMARTGMNKAENISDRIIIDTNLLQATAGIGVAAAAAAAAPGGSAHRKVGAVRYGMSKMY

SEQ ID NO: 45484 - DNA, 2164 bp, Arabidopsis thaliana
  misc_feature (1)..(2164): Ceres Seq. ID no. 15178449
  misc_feature: MA Experiment ID: 20000166 Result: Up-regulated in Transcription
  misc_feature: MA Experiment 20000166 PARAMETER Experiment Name: At_100uM_ABA_P Parameter: Age (day) Value: 14
  misc_feature: MA Experiment 20000166 PARAMETER Experiment Name: At_100uM_ABA_P Parameter: Organism Value: A. thaliana
  misc_feature: MA Experiment 20000166 PARAMETER Experiment Name: At_100uM_ABA_P Parameter: Plant Line Value: WS
  misc_feature: MA Experiment 20000166 PARAMETER Experiment Name: At_100uM_ABA_P Parameter: Timepoint (hr) Value: 1
  misc_feature: MA Experiment 20000166 PARAMETER Experiment Name: At_100uM_ABA_P Parameter: Tissue Value: Aerial
  misc_feature: MA Experiment 20000166 PARAMETER Experiment Name: At_100uM_ABA_P Parameter: Treatment Value: 100uM ABA vs. No Treatment
  misc_feature: MA Experiment ID: 20000169 Result: Up-regulated in Transcription
  misc_feature: MA Experiment 20000169 PARAMETER Experiment Name: At_100uM_ABA_P Parameter: Age (day) Value: 14
  misc_feature: MA Experiment 20000169 PARAMETER Experiment Name: At_100uM_ABA_P Parameter: Organism Value: A. thaliana
  misc_feature: MA Experiment 20000169 PARAMETER Experiment Name: At_100uM_ABA_P Parameter: Plant Line Value: WS
  misc_feature: MA Experiment 20000169 PARAMETER Experiment Name: At_100uM_ABA_P Parameter: Timepoint (hr) Value: 6
  misc_feature: MA Experiment 20000169 PARAMETER Experiment Name: At_100uM_ABA_P Parameter: Tissue Value: Aerial
  misc_feature: MA Experiment 20000169 PARAMETER Experiment Name: At_100uM_ABA_P Parameter: Treatment Value: 100uM ABA vs. No Treatment
  misc_feature: MA Experiment ID: 20000182 Result: Up-regulated in Transcription
  misc_feature: MA Experiment 20000182 PARAMETER Experiment Name: At_2mM_SA_P Parameter: Age (day) Value: 14
  misc_feature: MA Experiment 20000182 PARAMETER Experiment Name: At_2mM_SA_P Parameter: Organism Value: A. thaliana
  misc_feature: MA Experiment 20000182 PARAMETER Experiment Name: At_2mM_SA_P Parameter: Plant Line Value: WS
  misc_feature: MA Experiment 20000182 PARAMETER Experiment Name: At_2mM_SA_P Parameter: Timepoint (hr) Value: 6
  misc_feature: MA Experiment 20000182 PARAMETER Experiment Name: At_2mM_SA_P Parameter: Tissue Value: Aerial
  misc_feature: MA Experiment 20000182 PARAMETER Experiment Name: At_2mM_SA_P Parameter: Treatment Value: 2mM SA vs. No Treatment
  misc_feature: MA Experiment ID: 20000264 Result: Down-regulated in Transcription
  misc_feature: MA Experiment 20000264 PARAMETER Experiment Name: At_Open_Flower_P Parameter: Age (day) Value: 21
  misc_feature: MA Experiment 20000264 PARAMETER Experiment Name: At_Open_Flower_P Parameter: Plant Line Value: WS
  misc_feature: MA Experiment 20000264 PARAMETER Experiment Name: At_Open_Flower_P Parameter: Tissue Value: Open Flower vs. Whole Plant
  misc_feature: MA Experiment ID: 20000267 Result: Up-regulated in Transcription
  misc_feature: MA Experiment 20000267 PARAMETER Experiment Name: At_Drought_P Parameter: Age (day) Value: 7
  misc_feature: MA Experiment 20000267 PARAMETER Experiment Name: At_Drought_P Parameter: Organism Value: A. thaliana
  misc_feature: MA Experiment 20000267 PARAMETER Experiment Name: At_Drought_P Parameter: Plant Line Value: WS
  misc_feature: MA Experiment 20000267 PARAMETER Experiment Name: At_Drought_P Parameter: Timepoint (hr) Value: 6
  misc_feature: MA Experiment 20000267 PARAMETER Experiment Name: At_Drought_P Parameter: Tissue Value: Whole Plant
  misc_feature: MA Experiment 20000267 PARAMETER Experiment Name: At_Drought_P Parameter: Treatment Value: Drought vs. No Drought
  misc_feature: MA Experiment ID: 20000268 Result: Up-regulated in Transcription
  misc_feature: MA Experiment 20000268 PARAMETER Experiment Name: At_100mM_NaCl__P Parameter: Age (day) Value: 14
  misc_feature: MA Experiment 20000268 PARAMETER Experiment Name: At_100mM_NaCl__P Parameter: Organism Value: A. thaliana
  misc_feature: MA Experiment 20000268 PARAMETER Experiment Name: At_100mM_NaCl__P Parameter: Plant Line Value: WS
  misc_feature: MA Experiment 20000268 PARAMETER Experiment Name: At_100mM_NaCl__P Parameter: Timepoint (hr) Value: 6
  misc_feature: MA Experiment 20000268 PARAMETER Experiment Name: At_100mM_NaCl__P Parameter: Tissue Value: Whole Plant
  misc_feature: MA Experiment 20000268 PARAMETER Experiment Name: At_100mM_NaCl__P Parameter: Treatment Value: 100mM NaCl vs. No Treatment
  misc_feature: MA Experiment ID: 20000436 Result: Up-regulated in Transcription
  misc_feature: MA Experiment 20000436 PARAMETER Experiment Name: At_Drought_P Parameter: Age (day) Value: 7
  misc_feature: MA Experiment 20000436 PARAMETER Experiment Name: At_Drought_P Parameter: Organism Value: A. thaliana
  misc_feature: MA Experiment 20000436 PARAMETER Experiment Name: At_Drought_P Parameter: Plant Line Value: WS
  misc_feature: MA Experiment 20000436 PARAMETER Experiment Name: At_Drought_P Parameter: Timepoint (hr) Value: 12
  misc_feature: MA Experiment 20000436 PARAMETER Experiment Name: At_Drought_P Parameter: Tissue Value: Whole Plant
  misc_feature: MA Experiment 20000436 PARAMETER Experiment Name: At_Drought_P Parameter: Treatment Value: Drought vs. No Drought
  misc_feature: MA Experiment ID: 20000437 Result: Up-regulated in Transcription
  misc_feature: MA Experiment 20000437 PARAMETER Experiment Name: At_Drought_P Parameter: Age (day) Value: 8
  misc_feature: MA Experiment 20000437 PARAMETER Experiment Name: At_Drought_P Parameter: Organism Value: A. thaliana
  misc_feature: MA Experiment 20000437 PARAMETER Experiment Name: At_Drought_P Parameter: Plant Line Value: WS
  misc_feature: MA Experiment 20000437 PARAMETER Experiment Name: At_Drought_P Parameter: Timepoint (hr) Value: 24
  misc_feature: MA Experiment 20000437 PARAMETER Experiment Name: At_Drought_P Parameter: Tissue Value: Whole Plant
  misc_feature: MA Experiment 20000437 PARAMETER Experiment Name: At_Drought_P Parameter: Treatment Value: Drought vs. No Drought
  misc_feature: MA Experiment ID: 20000438 Result: Down-regulated in Transcription
  misc_feature: MA Experiment 20000438 PARAMETER Experiment Name: At_Shoots__P Parameter: Age (day) Value: 14
  misc_feature: MA Experiment 20000438 PARAMETER Experiment Name: At_Shoots__P Parameter: Tissue Value: Shoots vs. Whole Plant
  misc_feature: MA Experiment ID: 20000453 Result: Up-regulated in Transcription
  misc_feature: MA Experiment 20000453 PARAMETER Experiment Name: At_100uM_ABA_P Parameter: Age (day) Value: 15
  misc_feature: MA Experiment 20000453 PARAMETER Experiment Name: At_100uM_ABA_P Parameter: Organism Value: A. thaliana
  misc_feature: MA Experiment 20000453 PARAMETER Experiment Name: At_100uM_ABA_P Parameter: Plant Line Value: WS
  misc_feature: MA Experiment 20000453 PARAMETER Experiment Name: At_100uM_ABA_P Parameter: Timepoint (hr) Value: 24
  misc_feature: MA Experiment 20000453 PARAMETER Experiment Name: At_100uM_ABA_P Parameter: Tissue Value: Aerial
  misc_feature: MA Experiment 20000453 PARAMETER Experiment Name: At_100uM_ABA_P Parameter: Treatment Value: 100uM ABA vs. No Treatment
  misc_feature: MA Experiment ID: 20000455 Result: Up-regulated in Transcription
  misc_feature: MA Experiment 20000455 PARAMETER Experiment Name: At_100uM_ABA_P Parameter: Age (day) Value: 16
  misc_feature: MA Experiment 20000455 PARAMETER Experiment Name: At_100uM_ABA_P Parameter: Organism Value: A. thaliana
  misc_feature: MA Experiment 20000455 PARAMETER Experiment Name: At_100uM_ABA_P Parameter: Plant Line Value: WS
  misc_feature: MA Experiment 20000455 PARAMETER Experiment Name: At_100uM_ABA_P Parameter: Timepoint (hr) Value: 48
  misc_feature: MA Experiment 20000455 PARAMETER Experiment Name: At_100uM_ABA_P Parameter: Tissue Value: Aerial
  misc_feature: MA Experiment 20000455 PARAMETER Experiment Name: At_100uM_ABA_P Parameter: Treatment Value: 100uM ABA vs. No Treatment
  misc_feature: MA Experiment ID: 20000576 Result: Up-regulated in Transcription
  misc_feature: MA Experiment 20000576 PARAMETER Experiment Name: At_100uM_ABA_Mutants__P Parameter: Organism Value: A. thaliana
  misc_feature: MA Experiment 20000576 PARAMETER Experiment Name: At_100uM_ABA_Mutants__P Parameter: Plant Line Value: CS23
  misc_feature: MA Experiment 20000576 PARAMETER Experiment Name: At_100uM_ABA_Mutants__P Parameter: Timepoint (hr) Value: 6
  misc_feature: MA Experiment 20000576 PARAMETER Experiment Name: At_100uM_ABA_Mutants__P Parameter: Tissue Value: Whole Plant
  misc_feature: MA Experiment 20000576 PARAMETER Experiment Name: At_100uM_ABA_Mutants__P Parameter: Treatment Value: 1uM ABA vs. No Treatment
  misc_feature: MA Experiment ID: 20001451 Result: Up-regulated in Transcription
  misc_feature: MA Experiment 20001451 PARAMETER Experiment Name: At_Far-red-induction_P Parameter: Age (day) Value: 7
  misc_feature: MA Experiment 20001451 PARAMETER Experiment Name: At_Far-red-induction_P Parameter: Light Value: Far-red vs. White
  misc_feature: MA Experiment 20001451 PARAMETER Experiment Name: At_Far-red-induction_P Parameter: Organism Value: A. thaliana
  misc_feature: MA Experiment 20001451 PARAMETER Experiment Name: At_Far-red-induction_P Parameter: Plant Line Value: Columbia
  misc_feature: MA Experiment 20001451 PARAMETER Experiment Name: At_Far-red-induction_P Parameter: Timepoint (hr) Value: 24
  misc_feature: MA Experiment 20001451 PARAMETER Experiment Name: At_Far-red-induction_P Parameter: Tissue Value: Whole Plant
  misc_feature: MA Experiment ID: 20001554 Result: Up-regulated in Transcription
  misc_feature: MA Experiment 20001554 PARAMETER Experiment Name: At_Drought_Soil_Dry_P Parameter: Age (day) Value: 21
  misc_feature: MA Experiment 20001554 PARAMETER Experiment Name: At_Drought_Soil_Dry_P Parameter: Organism Value: A. thaliana
  misc_feature: MA Experiment 20001554 PARAMETER Experiment Name: At_Drought_Soil_Dry_P Parameter: Plant Line Value: WS
  misc_feature: MA Experiment 20001554 PARAMETER Experiment Name: At_Drought_Soil_Dry_P Parameter: Post Timepoint (hr) Value: None
  misc_feature: MA Experiment 20001554 PARAMETER Experiment Name: At_Drought_Soil_Dry_P Parameter: Post-Treatment Value: None
  misc_feature: MA Experiment 20001554 PARAMETER Experiment Name: At_Drought_Soil_Dry_P Parameter: Timepoint (day) Value: 7
  misc_feature: MA Experiment 20001554 PARAMETER Experiment Name: At_Drought_Soil_Dry_P Parameter: Treatment Value: Drought vs. No Drought
  misc_feature: MA Experiment ID: 20001555 Result: Up-regulated in Transcription
  misc_feature: MA Experiment 20001555 PARAMETER Experiment Name: At_Drought_Soil_Dry_P Parameter: Age (day) Value: 24
  misc_feature: MA Experiment 20001555 PARAMETER Experiment Name: At_Drought_Soil_Dry_P Parameter: Organism Value: A. thaliana
  misc_feature: MA Experiment 20001555 PARAMETER Experiment Name: At_Drought_Soil_Dry_P Parameter: Plant Line Value: WS
  misc_feature: MA Experiment 20001555 PARAMETER Experiment Name: At_Drought_Soil_Dry_P Parameter: Post Timepoint (hr) Value: None
  misc_feature: MA Experiment 20001555 PARAMETER Experiment Name: At_Drought_Soil_Dry_P Parameter: Post-Treatment Value: None
  misc_feature: MA Experiment 20001555 PARAMETER Experiment Name: At_Drought_Soil_Dry_P Parameter: Timepoint (day) Value: 10
  misc_feature: MA Experiment 20001555 PARAMETER Experiment Name: At_Drought_Soil_Dry_P Parameter: Treatment Value: Drought vs. No Drought
  misc_feature: MA Experiment ID: 20001556 Result: Up-regulated in Transcription
  misc_feature: MA Experiment 20001556 PARAMETER Experiment Name: At_Drought_Soil_Dry_P Parameter: Age (day) Value: 26
  misc_feature: MA Experiment 20001556 PARAMETER Experiment Name: At_Drought_Soil_Dry_P Parameter: Organism Value: A. thaliana
  misc_feature: MA Experiment 20001556 PARAMETER Experiment Name: At_Drought_Soil_Dry_P Parameter: Plant Line Value: WS
  misc_feature: MA Experiment 20001556 PARAMETER Experiment Name: At_Drought_Soil_Dry_P Parameter: Post Timepoint (hr) Value: None
  misc_feature: MA Experiment 20001556 PARAMETER Experiment Name: At_Drought_Soil_Dry_P Parameter: Post-Treatment Value: None
  misc_feature: MA Experiment 20001556 PARAMETER Experiment Name: At_Drought_Soil_Dry_P Parameter: Timepoint (day) Value: 12
  misc_feature: MA Experiment 20001556 PARAMETER Experiment Name: At_Drought_Soil_Dry_P Parameter: Treatment Value: Drought vs. No Drought
  misc_feature: MA Experiment ID: 20001557 Result: Up-regulated in Transcription
  misc_feature: MA Experiment 20001557 PARAMETER Experiment Name: At_Drought_Soil_Dry_P Parameter: Age (day) Value: 27
  misc_feature: MA Experiment 20001557 PARAMETER Experiment Name: At_Drought_Soil_Dry_P Parameter: Organism Value: A. thaliana
  misc_feature: MA Experiment 20001557 PARAMETER Experiment Name: At_Drought_Soil_Dry_P Parameter: Plant Line Value: WS
  misc_feature: MA Experiment 20001557 PARAMETER Experiment Name: At_Drought_Soil_Dry_P Parameter: Post Timepoint (hr) Value: 3
  misc_feature: MA Experiment 20001557 PARAMETER Experiment Name: At_Drought_Soil_Dry_P Parameter: Post-Treatment Value: Re-Water vs. No Drought
  misc_feature: MA Experiment 20001557 PARAMETER Experiment Name: At_Drought_Soil_Dry_P Parameter: Timepoint (day) Value: 13
  misc_feature: MA Experiment 20001557 PARAMETER Experiment Name: At_Drought_Soil_Dry_P Parameter: Treatment Value: Drought vs. No Drought
  misc_feature: MA Experiment ID: 20001559 Result: Up-regulated in Transcription
  misc_feature: MA Experiment 20001559 PARAMETER Experiment Name: At_Drought_Soil_Dry_P Parameter: Age (day) Value: 28
  misc_feature: MA Experiment 20001559 PARAMETER Experiment Name: At_Drought_Soil_Dry_P Parameter: Organism Value: A. thaliana
  misc_feature: MA Experiment 20001559 PARAMETER Experiment Name: At_Drought_Soil_Dry_P Parameter: Plant Line Value: WS
  misc_feature: MA Experiment 20001559 PARAMETER Experiment Name: At_Drought_Soil_Dry_P Parameter: Post Timepoint (hr) Value: 29
  misc_feature: MA Experiment 20001559 PARAMETER Experiment Name: At_Drought_Soil_Dry_P Parameter: Post-Treatment Value: Re-Water vs. No Drought
  misc_feature: MA Experiment 20001559 PARAMETER Experiment Name: At_Drought_Soil_Dry_P Parameter: Timepoint (day) Value: 14
  misc_feature: MA Experiment 20001559 PARAMETER Experiment Name: At_Drought_Soil_Dry_P Parameter: Treatment Value: Drought vs. No Drought
  misc_feature: MA Experiment ID: 20001560 Result: Up-regulated in Transcription
  misc_feature: MA Experiment 20001560 PARAMETER Experiment Name: At_Drought_Soil_Dry_P Parameter: Age (day) Value: 28
  misc_feature: MA Experiment 20001560 PARAMETER Experiment Name: At_Drought_Soil_Dry_P Parameter: Organism Value: A. thaliana
  misc_feature: MA Experiment 20001560 PARAMETER Experiment Name: At_Drought_Soil_Dry_P Parameter: Plant Line Value: WS
  misc_feature: MA Experiment 20001560 PARAMETER Experiment Name: At_Drought_Soil_Dry_P Parameter: Post Timepoint (hr) Value: None
  misc_feature: MA Experiment 20001560 PARAMETER Experiment Name: At_Drought_Soil_Dry_P Parameter: Post-Treatment Value: None
  misc_feature: MA Experiment 20001560 PARAMETER Experiment Name: At_Drought_Soil_Dry_P Parameter: Timepoint (day) Value: 14
  misc_feature: MA Experiment 20001560 PARAMETER Experiment Name: At_Drought_Soil_Dry_P Parameter: Treatment Value: Drought vs. No Drought
  misc_feature: MA Experiment ID: 20001757 Result: Down-regulated in Transcription
  misc_feature: MA Experiment 20001757 PARAMETER Experiment Name: At_50mM_NH4NO3_L-to-H_P Parameter: Timepoint (hr) Value: 6
  misc_feature: MA Experiment 20001757 PARAMETER Experiment Name: At_50mM_NH4NO3_L-to-H_P Parameter: Tissue Value: Leaf
  misc_feature: MA Experiment 20001757 PARAMETER Experiment Name: At_50mM_NH4NO3_L-to-H_P Parameter: Treatment Value: 50mM NH4NO3 vs 100mM Mannitol
  misc_feature: MA Experiment ID: 20001771 Result: Up-regulated in Transcription
  misc_feature: MA Experiment 20001771 PARAMETER Experiment Name: At_Far-red-enriched-adult_P Parameter: Age (day) Value: 28
  misc_feature: MA Experiment 20001771 PARAMETER Experiment Name: At_Far-red-enriched-adult_P Parameter: Light Value: Far-red enriched vs. White
  misc_feature: MA Experiment 20001771 PARAMETER Experiment Name: At_Far-red-enriched-adult_P Parameter: Organism Value: A. thaliana
  misc_feature: MA Experiment 20001771 PARAMETER Experiment Name: At_Far-red-enriched-adult_P Parameter: Plant Line Value: Columbia
  misc_feature: MA Experiment 20001771 PARAMETER Experiment Name: At_Far-red-enriched-adult_P Parameter: Timepoint (hr) Value: 16
  misc_feature: MA Experiment 20001771 PARAMETER Experiment Name: At_Far-red-enriched-adult_P Parameter: Tissue Value: Aerial
  misc_feature: MA Experiment ID: 20001904 Result: Up-regulated in Transcription
  misc_feature: MA Experiment 20001904 PARAMETER Experiment Name: At_Drought_Reproduction_P Parameter: Age (day) Value: 37
  misc_feature: MA Experiment 20001904 PARAMETER Experiment Name: At_Drought_Reproduction_P Parameter: Organism Value: A. thaliana
  misc_feature: MA Experiment 20001904 PARAMETER Experiment Name: At_Drought_Reproduction_P Parameter: Plant Line Value: WS
  misc_feature: MA Experiment 20001904 PARAMETER Experiment Name: At_Drought_Reproduction_P Parameter: Timepoint (day) Value: 7
  misc_feature: MA Experiment 20001904 PARAMETER Experiment Name: At_Drought_Reproduction_P Parameter: Tissue Value: Rosettes
  misc_feature: MA Experiment 20001904 PARAMETER Experiment Name: At_Drought_Reproduction_P Parameter: Treatment Value: Drought vs. No Drought
  misc_feature: MA Experiment ID: 20001905 Result: Up-regulated in Transcription
  misc_feature: MA Experiment 20001905 PARAMETER Experiment Name: At_Drought_Reproduction_P Parameter: Age (day) Value: 40
  misc_feature: MA Experiment 20001905 PARAMETER Experiment Name: At_Drought_Reproduction_P Parameter: Organism Value: A. thaliana
  misc_feature: MA Experiment 20001905 PARAMETER Experiment Name: At_Drought_Reproduction_P Parameter: Plant Line Value: WS
  misc_feature: MA Experiment 20001905 PARAMETER Experiment Name: At_Drought_Reproduction_P Parameter: Timepoint (day) Value: 10
  misc_feature: MA Experiment 20001905 PARAMETER Experiment Name: At_Drought_Reproduction_P Parameter: Tissue Value: Rosettes
  misc_feature: MA Experiment 20001905 PARAMETER Experiment Name: At_Drought_Reproduction_P Parameter: Treatment Value: Drought vs. No Drought
  misc_feature: MA Experiment ID: 20001906 Result: Up-regulated in Transcription
  misc_feature: MA Experiment 20001906 PARAMETER Experiment Name: At_Drought_Reproduction_P Parameter: Age (day) Value: 35
  misc_feature: MA Experiment 20001906 PARAMETER Experiment Name: At_Drought_Reproduction_P Parameter: Organism Value: A. thaliana
  misc_feature: MA Experiment 20001906 PARAMETER Experiment Name: At_Drought_Reproduction_P Parameter: Plant Line Value: WS
  misc_feature: MA Experiment 20001906 PARAMETER Experiment Name: At_Drought_Reproduction_P Parameter: Timepoint (day) Value: 5
  misc_feature: MA Experiment 20001906 PARAMETER Experiment Name: At_Drought_Reproduction_P Parameter: Tissue Value: Siliques
  misc_feature: MA Experiment 20001906 PARAMETER Experiment Name: At_Drought_Reproduction_P Parameter: Treatment Value: Drought vs. No Drought
  misc_feature: MA Experiment ID: 20001907 Result: Up-regulated in Transcription
  misc_feature: MA Experiment 20001907 PARAMETER Experiment Name: At_Drought_Reproduction_P Parameter: Age (day) Value: 37
  misc_feature: MA Experiment 20001907 PARAMETER Experiment Name: At_Drought_Reproduction_P Parameter: Organism Value: A. thaliana
  misc_feature: MA Experiment 20001907 PARAMETER Experiment Name: At_Drought_Reproduction_P Parameter: Plant Line Value: WS
  misc_feature: MA Experiment 20001907 PARAMETER Experiment Name: At_Drought_Reproduction_P Parameter: Timepoint (day) Value: 7
  misc_feature: MA Experiment 20001907 PARAMETER Experiment Name: At_Drought_Reproduction_P Parameter: Tissue Value: Siliques
  misc_feature: MA Experiment 20001907 PARAMETER Experiment Name: At_Drought_Reproduction_P Parameter: Treatment Value: Drought vs. No Drought
  misc_feature: MA Experiment ID: 20001908 Result: Up-regulated in Transcription
  misc_feature: MA Experiment 20001908 PARAMETER Experiment Name: At_Drought_Reproduction_P Parameter: Age (day) Value: 40
  misc_feature: MA Experiment 20001908 PARAMETER Experiment Name: At_Drought_Reproduction_P Parameter: Organism Value: A. thaliana
  misc_feature: MA Experiment 20001908 PARAMETER Experiment Name: At_Drought_Reproduction_P Parameter: Plant Line Value: WS
  misc_feature: MA Experiment 20001908 PARAMETER Experiment Name: At_Drought_Reproduction_P Parameter: Timepoint (day) Value: 10
  misc_feature: MA Experiment 20001908 PARAMETER Experiment Name: At_Drought_Reproduction_P Parameter: Tissue Value: Siliques
  misc_feature: MA Experiment 20001908 PARAMETER Experiment Name: At_Drought_Reproduction_P Parameter: Treatment Value: Drought vs. No Drought
  misc_feature: MA Experiment ID: 20001911 Result: Up-regulated in Transcription
  misc_feature: MA Experiment 20001911 PARAMETER Experiment Name: At_Drought_Reproduction_P Parameter: Age (day) Value: 40
  misc_feature: MA Experiment 20001911 PARAMETER Experiment Name: At_Drought_Reproduction_P Parameter: Organism Value: A. thaliana
  misc_feature: MA Experiment 20001911 PARAMETER Experiment Name: At_Drought_Reproduction_P Parameter: Plant Line Value: WS
  misc_feature: MA Experiment 20001911 PARAMETER Experiment Name: At_Drought_Reproduction_P Parameter: Timepoint (day) Value: 10
  misc_feature: MA Experiment 20001911 PARAMETER Experiment Name: At_Drought_Reproduction_P Parameter: Tissue Value: Flowers
  misc_feature: MA Experiment 20001911 PARAMETER Experiment Name: At_Drought_Reproduction_P Parameter: Treatment Value: Drought vs. No Drought
tcactagtccccccccccccccgataaagcttccatggctaatcttgtttaagcttctcttcttcttctctctcctgtgtctcgttcactagttttttttcgggggagagtgatggagtgtgtttgttgaatagttttgacgatcacatggctgagatttgttacgagaacgagactatgatgattgaaacgacggcgacggtggtgaagaaggcaacgacgacaacgaggagacgagaacggagctcgtctcaagcagcgagaagaaggagaatggagatccggaggtttaagtttgtttccggcgaacaagaacctgtcttcgtcgacggtgacttacagaggcggaggagaagagaatccaccgtcgcagcctccacctccaccgtgttttacgaaacggcgaaggaagttgtcgtcctatgcgagtctcttagttcaacggttgtggcattgcctgatcctgaagcttatcctaaatacggcgtcgcttcagtctgtggaagaagacgtgaaatggaagacgccgtcgctgtgcatccgtttttttcccgtcatcagacggaatattcatccaccggatttcactattgcggcgtttacgatggccatggctgttcccatgtagcgatgaaatgtagagaaagactacacgagctagtacgtgaagagtttgaagctgatgctgactgggaaaagtcaatggcgcgtagcttcacgcgcatggacatggaggttgttgcgttgaacgccgatggtgcggcaaaatgccggtgcgagcttcagaggccggactgcgacgcggtgggatctaccgcagttgtgtctgtcctcacgccggagaaaatcatcgtggcgaattgcggtgactcacgtgccgttctctgtcgtaacggcaaagccattgctttatcctccgatcataaggttttgttcgttttttgataatctctcttgtttcgtttattcatcgttaaatgtttatccgttagatctacggttatggtttactcactgtaatggaaacgagaatttcgttacgtgttgcgttcgaaacttacctatcaatattgtttaatgcatttttaattattatttcatttattggaaattagaatcttctttaatgtgcatgcaacacctggacgacgaatcgacgattaagaatgtttaatgactttttactttttagatagaggatctgataaagtttatgagtttttagattctttaatccttcgtgtcactgttatcaatgactatattattctctctctctctcttgtttaaatttgttgtaacagccagaccgtccggacgagctagaccggattcaagcagcgggtggtcgtgttatctactgggatggcccacgtgtccttggagtacttgcaatgtcacgagccattggtcagttaattgattacacttgacgaaaacactctgtccctatcctaatgtttgtacaaagtttttccgtactttcaataatgatgattattaactctcgtttcgccgcggatttttttcgttttttttttcaggagataattacttgaagccgtatgtaatcagcagaccggaggtaaccgtgacggaccgggccaacggagacgatttcctcattctcgcaagtgacggtctttgggacgttatttcaaacgaaactgcatgtagcgtcgttcgaatgtgtttgagaggaaaagtcaatggtcaagtatcatcatcaccggaaagggaaatgacaggtgtcggcgccgggaatgtggtggttggaggaggagatttgccagataaagcgtgtgaggaggcgtcgctgttgctgacgaggcttgcgttggctagacaaagttcggacaacgtaagtgttgtggtggttgatctaagacgagacacgtaattgtatttgtctctctcgtaatgtttgttgttttttgtcctgagtcatcgacttttgggctttttcttttaacctttttttgctcttcggtgtaagacaacgaagggtttttaatttagcttgactatgggttatgtcagtcactgtgttgaatcgcggtttagatctacaaagattttcaccagtagtgaaaatggtaaaaagccgtgaaaggtgaaagacttgagttcaatttaattttaaatttaagagaatcagttgatc

SEQ ID NO: 45485 - protein, 265 aa, Arabidopsis thaliana
  peptide (1)..(265): Ceres Seq. ID no. 15178450
  misc_feature (110)..(260): Pfam Name: Protein phosphatase 2C Pfam Description: Protein phosphatase 2C
  misc_feature (33)..(260): Homolog of NCBI NO: 15229745 NR Description: protein phosphatase 2C (PP2C), putative
  misc_feature (111)..(260): Homolog of NCBI NO: 10432448 NR Description: protein phosphatase 2C [Nicotiana tabacum]
  misc_feature (110)..(260): Homolog of NCBI NO: 33309516 NR Description: protein phosphatase 2C [Prunus avium]
  misc_feature (93)..(260): Homolog of NCBI NO: 7768151 NR Description: protein phpsphatase 2C (PP2C) [Fagus sylvatica]
  misc_feature (110)..(260): Homolog of NCBI NO: 15227078 NR Description: protein phosphatase 2C (PP2C), putative
  misc_feature (12)..(260): Homolog of NCBI NO: 10432446 NR Description: protein phosphatase 2C [Nicotiana tabacum]
  misc_feature (1)..(260): Homolog of NCBI NO: 21537020 NR Description: protein phosphatase 2C, putative [Arabidopsis
  misc_feature (1)..(260): Homolog of NCBI NO: 15222398 NR Description: protein phosphatase 2C (PP2C), putative
  misc_feature (1)..(260): Homolog of NCBI NO: 16226419 NR Description: AT5g59220/mnc17_110 [Arabidopsis thaliana]
  misc_feature (1)..(260): Homolog of NCBI NO: 15237839 NR Description: protein phosphatase 2C (PP2C), putative
MAEICYENETMMIETTATVVKKATTTTRRRERSSSQAARRRRMEIRRFKFVSGEQEPVFVDGDLQRRRRRESTVAASTSTVFYETAKEVVVLCESLSSTVVALPDPEAYPKYGVASVCGRRREMEDAVAVHPFFSRHQTEYSSTGFHYCGVYDGHGCSHVAMKCRERLHELVREEFEADADWEKSMARSFTRMDMEVVALNADGAAKCRCELQRPDCDAVGSTAVVSVLTPEKIIVANCGDSRAVLCRNGKAIALSSDHKVLFVF

SEQ ID NO: 45486 - protein, 255 aa, Arabidopsis thaliana
  peptide (1)..(255): Ceres Seq. ID no. 15178451
  misc_feature (100)..(250): Pfam Name: Protein phosphatase 2C Pfam Description: Protein phosphatase 2C
  misc_feature (23)..(250): Homolog of NCBI NO: 15229745 NR Description: protein phosphatase 2C (PP2C), putative
  misc_feature (101)..(250): Homolog of NCBI NO: 10432448 NR Description: protein phosphatase 2C [Nicotiana tabacum]
  misc_feature (100)..(250): Homolog of NCBI NO: 33309516 NR Description: protein phosphatase 2C [Prunus avium]
  misc_feature (83)..(250): Homolog of NCBI NO: 7768151 NR Description: protein phpsphatase 2C (PP2C) [Fagus sylvatica]
  misc_feature (100)..(250): Homolog of NCBI NO: 15227078 NR Description: protein phosphatase 2C (PP2C), putative
  misc_feature (2)..(250): Homolog of NCBI NO: 10432446 NR Description: protein phosphatase 2C [Nicotiana tabacum]
  misc_feature (1)..(250): Homolog of NCBI NO: 21537020 NR Description: protein phosphatase 2C, putative [Arabidopsis
  misc_feature (1)..(250): Homolog of NCBI NO: 15222398 NR Description: protein phosphatase 2C (PP2C), putative
  misc_feature (1)..(250): Homolog of NCBI NO: 16226419 NR Description: AT5g59220/mnc17_110 [Arabidopsis thaliana]
  misc_feature (1)..(250): Homolog of NCBI NO: 15237839 NR Description: protein phosphatase 2C (PP2C), putative
MMIETTATVVKKATTTTRRRERSSSQAARRRRMEIRRFKFVSGEQEPVFVDGDLQRRRRRESTVAASTSTVFYETAKEVVVLCESLSSTVVALPDPEAYPKYGVASVCGRRREMEDAVAVHPFFSRHQTEYSSTGFHYCGVYDGHGCSHVAMKCRERLHELVREEFEADADWEKSMARSFTRMDMEVVALNADGAAKCRCELQRPDCDAVGSTAVVSVLTPEKIIVANCGDSRAVLCRNGKAIALSSDHKVLFVF

SEQ ID NO: 45487 - protein, 254 aa, Arabidopsis thaliana
  peptide (1)..(254): Ceres Seq. ID no. 15178452
  misc_feature (99)..(249): Pfam Name: Protein phosphatase 2C Pfam Description: Protein phosphatase 2C
  misc_feature (22)..(249): Homolog of NCBI NO: 15229745 NR Description: protein phosphatase 2C (PP2C), putative
  misc_feature (100)..(249): Homolog of NCBI NO: 10432448 NR Description: protein phosphatase 2C [Nicotiana tabacum]
  misc_feature (99)..(249): Homolog of NCBI NO: 33309516 NR Description: protein phosphatase 2C [Prunus avium]
  misc_feature (82)..(249): Homolog of NCBI NO: 7768151 NR Description: protein phpsphatase 2C (PP2C) [Fagus sylvatica]
  misc_feature (99)..(249): Homolog of NCBI NO: 15227078 NR Description: protein phosphatase 2C (PP2C), putative
  misc_feature (1)..(249): Homolog of NCBI NO: 10432446 NR Description: protein phosphatase 2C [Nicotiana tabacum]
  misc_feature (1)..(249): Homolog of NCBI NO: 21537020 NR Description: protein phosphatase 2C, putative [Arabidopsis
  misc_feature (1)..(249): Homolog of NCBI NO: 15222398 NR Description: protein phosphatase 2C (PP2C), putative
  misc_feature (1)..(249): Homolog of NCBI NO: 16226419 NR Description: AT5g59220/mnc17_110 [Arabidopsis thaliana]
  misc_feature (1)..(249): Homolog of NCBI NO: 15237839 NR Description: protein phosphatase 2C (PP2C), putative
MIETTATVVKKATTTTRRRERSSSQAARRRRMEIRRFKFVSGEQEPVFVDGDLQRRRRRESTVAASTSTVFYETAKEVVVLCESLSSTVVALPDPEAYPKYGVASVCGRRREMEDAVAVHPFFSRHQTEYSSTGFHYCGVYDGHGCSHVAMKCRERLHELVREEFEADADWEKSMARSFTRMDMEVVALNADGAAKCRCELQRPDCDAVGSTAVVSVLTPEKIIVANCGDSRAVLCRNGKAIALSSDHKVLFVF

SEQ ID NO: 45488 - DNA, 2118 bp, Arabidopsis thaliana
  misc_feature (1)..(2118): Ceres Seq. ID no. 13646450
  misc_feature: MA Experiment ID: 20000179 Result: Down-regulated in Transcription
  misc_feature: MA Experiment 20000179 PARAMETER Experiment Name: At_Germinating_Seeds_P Parameter: Age (hr) Value: 6 vs. 0
  misc_feature: MA Experiment 20000179 PARAMETER Experiment Name: At_Germinating_Seeds_P Parameter: Tissue Value: Germinating Seeds
  misc_feature: MA Experiment ID: 20000234 Result: Down-regulated in Transcription
  misc_feature: MA Experiment 20000234 PARAMETER Experiment Name: At_Siliques_P Parameter: Age (day) Value: 21
  misc_feature: MA Experiment 20000234 PARAMETER Experiment Name: At_Siliques_P Parameter: Organism Value: A. thaliana
  misc_feature: MA Experiment 20000234 PARAMETER Experiment Name: At_Siliques_P Parameter: Plant Line Value: WS
  misc_feature: MA Experiment 20000234 PARAMETER Experiment Name: At_Siliques_P Parameter: Tissue Value: Less Than 5mm Siliques vs. Whole Plant
  misc_feature: MA Experiment ID: 20000265 Result: Down-regulated in Transcription
  misc_feature: MA Experiment 20000265 PARAMETER Experiment Name: At_Open_Flower_P Parameter: Age (day) Value: 21
  misc_feature: MA Experiment 20000265 PARAMETER Experiment Name: At_Open_Flower_P Parameter: Plant Line Value: WS
  misc_feature: MA Experiment 20000265 PARAMETER Experiment Name: At_Open_Flower_P Parameter: Tissue Value: Closed Flower vs. Whole Plant
  misc_feature: MA Experiment ID: 20000437 Result: Up-regulated in Transcription
  misc_feature: MA Experiment 20000437 PARAMETER Experiment Name: At_Drought_P Parameter: Age (day) Value: 8
  misc_feature: MA Experiment 20000437 PARAMETER Experiment Name: At_Drought_P Parameter: Organism Value: A. thaliana
  misc_feature: MA Experiment 20000437 PARAMETER Experiment Name: At_Drought_P Parameter: Plant Line Value: WS
  misc_feature: MA Experiment 20000437 PARAMETER Experiment Name: At_Drought_P Parameter: Timepoint (hr) Value: 24
  misc_feature: MA Experiment 20000437 PARAMETER Experiment Name: At_Drought_P Parameter: Tissue Value: Whole Plant
  misc_feature: MA Experiment 20000437 PARAMETER Experiment Name: At_Drought_P Parameter: Treatment Value: Drought vs. No Drought
  misc_feature: MA Experiment ID: 20001905 Result: Up-regulated in Transcription
  misc_feature: MA Experiment 20001905 PARAMETER Experiment Name: At_Drought_Reproduction_P Parameter: Age (day) Value: 40
  misc_feature: MA Experiment 20001905 PARAMETER Experiment Name: At_Drought_Reproduction_P Parameter: Organism Value: A. thaliana
  misc_feature: MA Experiment 20001905 PARAMETER Experiment Name: At_Drought_Reproduction_P Parameter: Plant Line Value: WS
  misc_feature: MA Experiment 20001905 PARAMETER Experiment Name: At_Drought_Reproduction_P Parameter: Timepoint (day) Value: 10
  misc_feature: MA Experiment 20001905 PARAMETER Experiment Name: At_Drought_Reproduction_P Parameter: Tissue Value: Rosettes
  misc_feature: MA Experiment 20001905 PARAMETER Experiment Name: At_Drought_Reproduction_P Parameter: Treatment Value: Drought vs. No Drought
aaaatctctcactttcctaaacagagagaccccttatgagttttctcctcctcctcctcctcttccttcctcatcccagaaatttccgatttaactttcacatctccctctctcttacaactctctatccgtagtttcagtttcgtcctagaatttcttttcttgtctgttccagatgaaattgtgagttctccgagttatatgcatccgttagaatcaaagcggtaatcaaaagcagaatttagaggattgaaaaagatggttttggggtgtttccctttgaaaagcaagaagaaacgtggctctgtttctatgaagcggttggatcttgaagaaagcaagccaactgctttacctgagccaccaaagattccaagtcgtaatttacaatcagctcctccgagtttcagaactcgtgtgaagccaattcaatctaacaacggtggaaccggagagatgagtagccgagcaagagtcatgtctgctccgtcaagcatccacggtgcagcggaacgggatttgcttgctggtgtttaccacgacgagcaagatgaacaaccaagagatccacgtacttctactaaagaatctagccctcaaccacttccgttaccgtcaccaagaactggttcttcattgaagaattggggaagctttaagtcgtttaacggaagcagcggtcggttatcatcatccgcagctgtatctggacctttacctttgccacctagcgggtcagttaggagcttttcatatgatgaagtaatggctgcgtgtaacgctttttcttcagaccgatgtgtcatggaaggtctttcatctgttatgtacatggcttcctttggtgatgaggcttcgacctcaggtttaaagaaggttgacgcaactgttgtacgacttcacgtaattactcagagtattagggagttcattaatgaagtcaacacattggcgtcgctgcaacaccagaacctttgtaagctggtaggctatcatgctcgtgacggttctgacacaagaatgttggtgtacgagaggcttgctctgggcagcttggaccgtttactgcatgggagatcagatgggcctcctcttgattggaacactagaatgaagattgcactatgcgcagctcagggtctaaccttcttgcacgaagaaggcccttttcaggcaatgtacaatgaattttcgacggcaaatatccaagtcgataaagatttcagcgccaagctatcaggatacggttgtgcaggccatgcgcctgagacagagacatctaatagttcggcacttgctaatctctctgtcgagactctagagagagggcttttgaccccgaagagcaatgtgtggagctatggaatagttcttcttgagatgttaacgggtcggaaaaatatggacgggtcttacccgaaagaagagaggaacttagtgaaatggagcagagcttttctagcagatgattgcaggctctcgcttataatggatcctcagcttaaaggtcggtttccggcaaaagcggctaggagcatagcagatatagcacagaaatgtctgcaggtggagccttcagagcgtccaaccatgagaaacatcgtggatcaactcaagatcatacaggacatgaagtactcgtgtaggttcccattgagagaacccgcaccggtcgtggcaaggaaacatatgggaagatcaagcagtctcaacacgattatttggaccccggcatcagtgccaccaaggtcgagtttttcaccgtcacctccaccacgacgaccgtctgtctcacccacaaggggacggacgctcgtgtttcccccagtgtttccgccgcgagcgtgttcatctttggaggaaatggctcgggaagaggttcgaagatcgtcttcagccagtggtaggagaactagcctcgaagggttttgatttgttcatatctctcttctttcttctttttcctatttgtttttaatttttggcgttgatttgttttttggattccaaatataaaaaattgtttttttctttttcttttgttgtttatgaatccggacgtcgatagagagggtttgtgatgttttgtacataataatcaacatttcttctttcaca

SEQ ID NO: 45489 - protein, 557 aa, Arabidopsis thaliana
  peptide (1)..(557): Ceres Seq. ID no. 13646451
  misc_feature (123)..(504): Homolog of NCBI NO: 34906046 NR Description: putative serine/threonine-specific protein kinase
  misc_feature (155)..(459): Homolog of NCBI NO: 28804505 NR Description: serine/threonine protein kinase [Aster tripolium]
  misc_feature (119)..(496): Homolog of NCBI NO: 19071648 NR Description: putative protein tyrosine-serine-threonine kinase
  misc_feature (109)..(489): Homolog of NCBI NO: 34897424 NR Description: putative protein kinase [Oryza sativa (japonica
  misc_feature (121)..(513): Homolog of NCBI NO: 37534182 NR Description: putative serine /threonine kinase similar to NAK
  misc_feature (144)..(459): Homolog of NCBI NO: 15242204 NR Description: serine/threonine specific protein kinase -related
  misc_feature (126)..(517): Homolog of NCBI NO: 34912198 NR Description: putative protein kinase [Oryza sativa (japonica
  misc_feature (2)..(557): Homolog of NCBI NO: 34907816 NR Description: similar to protein kinase AtSIK
  misc_feature (1)..(557): Homolog of NCBI NO: 14581445 NR Description: protein kinase AtSIK [Arabidopsis thaliana]
  misc_feature (1)..(557): Homolog of NCBI NO: 15231963 NR Description: protein kinase family [Arabidopsis thaliana]
  misc_feature (123)..(504): Homolog of NCBI NO: 34906046 NR Description: putative serine/threonine-specific protein kinase
  misc_feature (155)..(459): Homolog of NCBI NO: 28804505 NR Description: serine/threonine protein kinase [Aster tripolium]
  misc_feature (119)..(496): Homolog of NCBI NO: 19071648 NR Description: putative protein tyrosine-serine-threonine kinase
  misc_feature (109)..(489): Homolog of NCBI NO: 34897424 NR Description: putative protein kinase [Oryza sativa (japonica
  misc_feature (121)..(513): Homolog of NCBI NO: 37534182 NR Description: putative serine /threonine kinase similar to NAK
  misc_feature (144)..(459): Homolog of NCBI NO: 15242204 NR Description: serine/threonine specific protein kinase -related
  misc_feature (126)..(517): Homolog of NCBI NO: 34912198 NR Description: putative protein kinase [Oryza sativa (japonica
  misc_feature (2)..(557): Homolog of NCBI NO: 34907816 NR Description: similar to protein kinase AtSIK
  misc_feature (1)..(557): Homolog of NCBI NO: 14581445 NR Description: protein kinase AtSIK [Arabidopsis thaliana]
  misc_feature (1)..(557): Homolog of NCBI NO: 15231963 NR Description: protein kinase family [Arabidopsis thaliana]
MVLGCFPLKSKKKRGSVSMKRLDLEESKPTALPEPPKIPSRNLQSAPPSFRTRVKPIQSNNGGTGEMSSRARVMSAPSSIHGAAERDLLAGVYHDEQDEQPRDPRTSTKESSPQPLPLPSPRTGSSLKNWGSFKSFNGSSGRLSSSAAVSGPLPLPPSGSVRSFSYDEVMAACNAFSSDRCVMEGLSSVMYMASFGDEASTSGLKKVDATVVRLHVITQSIREFINEVNTLASLQHQNLCKLVGYHARDGSDTRMLVYERLALGSLDRLLHGRSDGPPLDWNTRMKIALCAAQGLTFLHEEGPFQAMYNEFSTANIQVDKDFSAKLSGYGCAGHAPETETSNSSALANLSVETLERGLLTPKSNVWSYGIVLLEMLTGRKNMDGSYPKEERNLVKWSRAFLADDCRLSLIMDPQLKGRFPAKAARSIADIAQKCLQVEPSERPTMRNIVDQLKIIQDMKYSCRFPLREPAPVVARKHMGRSSSLNTIIWTPASVPPRSSFSPSPPPRRPSVSPTRGRTLVFPPVFPPRACSSLEEMAREEVRRSSSASGRRTSLEGF

SEQ ID NO: 45490 - protein, 539 aa, Arabidopsis thaliana
  peptide (1)..(539): Ceres Seq. ID no. 13646452
  misc_feature (105)..(486): Homolog of NCBI NO: 34906046 NR Description: putative serine/threonine-specific protein kinase
  misc_feature (137)..(441): Homolog of NCBI NO: 28804505 NR Description: serine/threonine protein kinase [Aster tripolium]
  misc_feature (101)..(478): Homolog of NCBI NO: 19071648 NR Description: putative protein tyrosine-serine-threonine kinase
  misc_feature (91)..(471): Homolog of NCBI NO: 34897424 NR Description: putative protein kinase [Oryza sativa (japonica
  misc_feature (103)..(495): Homolog of NCBI NO: 37534182 NR Description: putative serine /threonine kinase similar to NAK
  misc_feature (126)..(441): Homolog of NCBI NO: 15242204 NR Description: serine/threonine specific protein kinase -related
  misc_feature (108)..(499): Homolog of NCBI NO: 34912198 NR Description: putative protein kinase [Oryza sativa (japonica
  misc_feature (1)..(539): Homolog of NCBI NO: 34907816 NR Description: similar to protein kinase AtSIK
  misc_feature (1)..(539): Homolog of NCBI NO: 14581445 NR Description: protein kinase AtSIK [Arabidopsis thaliana]
  misc_feature (1)..(539): Homolog of NCBI NO: 15231963 NR Description: protein kinase family [Arabidopsis thaliana]
  misc_feature (105)..(486): Homolog of NCBI NO: 34906046 NR Description: putative serine/threonine-specific protein kinase
  misc_feature (137)..(441): Homolog of NCBI NO: 28804505 NR Description: serine/threonine protein kinase [Aster tripolium]
  misc_feature (101)..(478): Homolog of NCBI NO: 19071648 NR Description: putative protein tyrosine-serine-threonine kinase
  misc_feature (91)..(471): Homolog of NCBI NO: 34897424 NR Description: putative protein kinase [Oryza sativa (japonica
  misc_feature (103)..(495): Homolog of NCBI NO: 37534182 NR Description: putative serine /threonine kinase similar to NAK
  misc_feature (126)..(441): Homolog of NCBI NO: 15242204 NR Description: serine/threonine specific protein kinase -related
  misc_feature (108)..(499): Homolog of NCBI NO: 34912198 NR Description: putative protein kinase [Oryza sativa (japonica
  misc_feature (1)..(539): Homolog of NCBI NO: 34907816 NR Description: similar to protein kinase AtSIK
  misc_feature (1)..(539): Homolog of NCBI NO: 14581445 NR Description: protein kinase AtSIK [Arabidopsis thaliana]
  misc_feature (1)..(539): Homolog of NCBI NO: 15231963 NR Description: protein kinase family [Arabidopsis thaliana]
MKRLDLEESKPTALPEPPKIPSRNLQSAPPSFRTRVKPIQSNNGGTGEMSSRARVMSAPSSIHGAAERDLLAGVYHDEQDEQPRDPRTSTKESSPQPLPLPSPRTGSSLKNWGSFKSFNGSSGRLSSSAAVSGPLPLPPSGSVRSFSYDEVMAACNAFSSDRCVMEGLSSVMYMASFGDEASTSGLKKVDATVVRLHVITQSIREFINEVNTLASLQHQNLCKLVGYHARDGSDTRMLVYERLALGSLDRLLHGRSDGPPLDWNTRMKIALCAAQGLTFLHEEGPFQAMYNEFSTANIQVDKDFSAKLSGYGCAGHAPETETSNSSALANLSVETLERGLLTPKSNVWSYGIVLLEMLTGRKNMDGSYPKEERNLVKWSRAFLADDCRLSLIMDPQLKGRFPAKAARSIADIAQKCLQVEPSERPTMRNIVDQLKIIQDMKYSCRFPLREPAPVVARKHMGRSSSLNTIIWTPASVPPRSSFSPSPPPRRPSVSPTRGRTLVFPPVFPPRACSSLEEMAREEVRRSSSASGRRTSLEGF

SEQ ID NO: 45491 - protein, 491 aa, Arabidopsis thaliana
  peptide (1)..(491): Ceres Seq. ID no. 13646453
  misc_feature (57)..(438): Homolog of NCBI NO: 34906046 NR Description: putative serine/threonine-specific protein kinase
  misc_feature (89)..(393): Homolog of NCBI NO: 28804505 NR Description: serine/threonine protein kinase [Aster tripolium]
  misc_feature (53)..(430): Homolog of NCBI NO: 19071648 NR Description: putative protein tyrosine-serine-threonine kinase
  misc_feature (43)..(423): Homolog of NCBI NO: 34897424 NR Description: putative protein kinase [Oryza sativa (japonica
  misc_feature (55)..(447): Homolog of NCBI NO: 37534182 NR Description: putative serine /threonine kinase similar to NAK
  misc_feature (78)..(393): Homolog of NCBI NO: 15242204 NR Description: serine/threonine specific protein kinase -related
  misc_feature (60)..(451): Homolog of NCBI NO: 34912198 NR Description: putative protein kinase [Oryza sativa (japonica
  misc_feature (1)..(491): Homolog of NCBI NO: 34907816 NR Description: similar to protein kinase AtSIK
  misc_feature (1)..(491): Homolog of NCBI NO: 14581445 NR Description: protein kinase AtSIK [Arabidopsis thaliana]
  misc_feature (1)..(491): Homolog of NCBI NO: 15231963 NR Description: protein kinase family [Arabidopsis thaliana]
  misc_feature (57)..(438): Homolog of NCBI NO: 34906046 NR Description: putative serine/threonine-specific protein kinase
  misc_feature (89)..(393): Homolog of NCBI NO: 28804505 NR Description: serine/threonine protein kinase [Aster tripolium]
  misc_feature (53)..(430): Homolog of NCBI NO: 19071648 NR Description: putative protein tyrosine-serine-threonine kinase
  misc_feature (43)..(423): Homolog of NCBI NO: 34897424 NR Description: putative protein kinase [Oryza sativa (japonica
  misc_feature (55)..(447): Homolog of NCBI NO: 37534182 NR Description: putative serine /threonine kinase similar to NAK
  misc_feature (78)..(393): Homolog of NCBI NO: 15242204 NR Description: serine/threonine specific protein kinase -related
  misc_feature (60)..(451): Homolog of NCBI NO: 34912198 NR Description: putative protein kinase [Oryza sativa (japonica
  misc_feature (1)..(491): Homolog of NCBI NO: 34907816 NR Description: similar to protein kinase AtSIK
  misc_feature (1)..(491): Homolog of NCBI NO: 14581445 NR Description: protein kinase AtSIK [Arabidopsis thaliana]
  misc_feature (1)..(491): Homolog of NCBI NO: 15231963 NR Description: protein kinase family [Arabidopsis thaliana]
MSSRARVMSAPSSIHGAAERDLLAGVYHDEQDEQPRDPRTSTKESSPQPLPLPSPRTGSSLKNWGSFKSFNGSSGRLSSSAAVSGPLPLPPSGSVRSFSYDEVMAACNAFSSDRCVMEGLSSVMYMASFGDEASTSGLKKVDATVVRLHVITQSIREFINEVNTLASLQHQNLCKLVGYHARDGSDTRMLVYERLALGSLDRLLHGRSDGPPLDWNTRMKIALCAAQGLTFLHEEGPFQAMYNEFSTANIQVDKDFSAKLSGYGCAGHAPETETSNSSALANLSVETLERGLLTPKSNVWSYGIVLLEMLTGRKNMDGSYPKEERNLVKWSRAFLADDCRLSLIMDPQLKGRFPAKAARSIADIAQKCLQVEPSERPTMRNIVDQLKIIQDMKYSCRFPLREPAPVVARKHMGRSSSLNTIIWTPASVPPRSSFSPSPPPRRPSVSPTRGRTLVFPPVFPPRACSSLEEMAREEVRRSSSASGRRTSLEGF

SEQ ID NO: 45492 - DNA, 1359 bp, Arabidopsis thaliana
  misc_feature (1)..(1359): Ceres Seq. ID no. 13646643
  misc_feature: MA Experiment ID: 20000328 Result: Down-regulated in Transcription
  misc_feature: MA Experiment 20000328 PARAMETER Experiment Name: At_42deg_Heat_Sub_P Parameter: Age (day) Value: 14
  misc_feature: MA Experiment 20000328 PARAMETER Experiment Name: At_42deg_Heat_Sub_P Parameter: Organism Value: A. thaliana
  misc_feature: MA Experiment 20000328 PARAMETER Experiment Name: At_42deg_Heat_Sub_P Parameter: Plant Line Value: WS
  misc_feature: MA Experiment 20000328 PARAMETER Experiment Name: At_42deg_Heat_Sub_P Parameter: Temperature (deg C) Value: 42 vs. 22
  misc_feature: MA Experiment 20000328 PARAMETER Experiment Name: At_42deg_Heat_Sub_P Parameter: Timepoint (hr) Value: 6
  misc_feature: MA Experiment 20000328 PARAMETER Experiment Name: At_42deg_Heat_Sub_P Parameter: Tissue Value: Aerial
cccccgaacagaatctgaagatcgaaggacagtgaaatcgaagaattgaagcacaagcttctccatctctgcaatctctctatccatctctcgtcatcgcatgtttcgcttcccaattcggaagaaagagagacgacgcgtctgaagcatatctccgtaatcggggtgaagaaaaacgcggcgagaagaagaggcagattttcgttttgggagggtagacaaatctggcgaaagtggagggcctaagggcgaggccgtggcttaagccaggagcttgtataaatggagatcaatatgactacgacggttcggaagacgaccattccaggccttggtggcgccgtcgtctcagatccttgtatatggcagccatgtcctttactccgtccacttttcgaatcgctatctcgttgctccttcttgttgctatcgtctccgccgtcatttttctcccggtcgaacagaaattgaaggacttcttgttatggattaaggaagatcttggaccttttggtccacttgcattggctttggcttatattcctctcacaattgtggcggttcctgcttctgtactcacgctaggtggtggttacctttttggcctgccagtaggatttgtagccgactctcttggagctacattaggtgcaacagcggcatttctgcttggtagaacgattggtaaatcttatgtcacttcaaaaataaagcattacccaaagtttcaagctgtttccgttgcaattcaaaaatctggcttcaagatagtcttgctgctacgcgttgtccccatactgcccttcaatatgttgaattacctcctatctgtaactcctgttcgcttaggggaatacatgctggccacttggttgggaatgatgcccattacatttgcgctagtatatgttggaactactctgaaagatctttctgatattacacatggatggcatgaggtgtcagtatttcgttgggtaattatgatggttggcgtagctctagctgtaattctgataatatgcataacaagagtggcgaaatcatccttggacaaagcattggctgagaatggtactgaattagatgggaagaagaatgacgacgcttccgtactcccgatcgcagagccaccaccggatctacaagagcctctcgttatcagaatcgacccatccaatacttgaataatatagacaagaagaaacctcttgagtttgtaaatttcgcgaaattttcttaccgagtgagttattagaaacgttttgtatagcatcataataccatacttcacagtttaattcgtttgttctttagttaaaaaaaaaaaaaaaaaaaactcgagggggggcccggtac

SEQ ID NO: 45493 - protein, 274 aa, Arabidopsis thaliana
  peptide (1)..(274): Ceres Seq. ID no. 13646644
  misc_feature (13)..(250): Homolog of NCBI NO: 32476849 NR Description: conserved hypothetical protein [Pirellula sp.]
  misc_feature (36)..(234): Homolog of NCBI NO: 23128177 NR Description: hypothetical protein [Nostoc punctiforme]
  misc_feature (9)..(251): Homolog of NCBI NO: 23128176 NR Description: hypothetical protein [Nostoc punctiforme]
  misc_feature (1)..(245): Homolog of NCBI NO: 17229699 NR Description: hypothetical protein [Nostoc sp. PCC 7120]
  misc_feature (29)..(235): Homolog of NCBI NO: 23042280 NR Description: hypothetical protein [Trichodesmium erythraeum
  misc_feature (4)..(270): Homolog of NCBI NO: 30687125 NR Description: expressed protein [Arabidopsis thaliana]
  misc_feature (3)..(273): Homolog of NCBI NO: 23617115 NR Description: contains EST AU173803(R3795)~integral membrane
  misc_feature (4)..(274): Homolog of NCBI NO: 25406732 NR Description: protein F15K9.14 [imported] - Arabidopsis
  misc_feature (1)..(274): Homolog of NCBI NO: 30678508 NR Description: expressed protein [Arabidopsis thaliana]
  misc_feature (1)..(274): Homolog of NCBI NO: 40823094 NR Description: At1g03260 [Arabidopsis thaliana]
MAAMSFTPSTFRIAISLLLLVAIVSAVIFLPVEQKLKDFLLWIKEDLGPFGPLALALAYIPLTIVAVPASVLTLGGGYLFGLPVGFVADSLGATLGATAAFLLGRTIGKSYVTSKIKHYPKFQAVSVAIQKSGFKIVLLLRVVPILPFNMLNYLLSVTPVRLGEYMLATWLGMMPITFALVYVGTTLKDLSDITHGWHEVSVFRWVIMMVGVALAVILIICITRVAKSSLDKALAENGTELDGKKNDDASVLPIAEPPPDLQEPLVIRIDPSNT

SEQ ID NO: 45494 - protein, 271 aa, Arabidopsis thaliana
  peptide (1)..(271): Ceres Seq. ID no. 13646645
  misc_feature (10)..(247): Homolog of NCBI NO: 32476849 NR Description: conserved hypothetical protein [Pirellula sp.]
  misc_feature (33)..(231): Homolog of NCBI NO: 23128177 NR Description: hypothetical protein [Nostoc punctiforme]
  misc_feature (6)..(248): Homolog of NCBI NO: 23128176 NR Description: hypothetical protein [Nostoc punctiforme]
  misc_feature (1)..(242): Homolog of NCBI NO: 17229699 NR Description: hypothetical protein [Nostoc sp. PCC 7120]
  misc_feature (26)..(232): Homolog of NCBI NO: 23042280 NR Description: hypothetical protein [Trichodesmium erythraeum
  misc_feature (1)..(267): Homolog of NCBI NO: 30687125 NR Description: expressed protein [Arabidopsis thaliana]
  misc_feature (1)..(270): Homolog of NCBI NO: 23617115 NR Description: contains EST AU173803(R3795)~integral membrane
  misc_feature (1)..(271): Homolog of NCBI NO: 25406732 NR Description: protein F15K9.14 [imported] - Arabidopsis
  misc_feature (1)..(271): Homolog of NCBI NO: 30678508 NR Description: expressed protein [Arabidopsis thaliana]
  misc_feature (1)..(271): Homolog of NCBI NO: 40823094 NR Description: At1g03260 [Arabidopsis thaliana]
MSFTPSTFRIAISLLLLVAIVSAVIFLPVEQKLKDFLLWIKEDLGPFGPLALALAYIPLTIVAVPASVLTLGGGYLFGLPVGFVADSLGATLGATAAFLLGRTIGKSYVTSKIKHYPKFQAVSVAIQKSGFKIVLLLRVVPILPFNMLNYLLSVTPVRLGEYMLATWLGMMPITFALVYVGTTLKDLSDITHGWHEVSVFRWVIMMVGVALAVILIICITRVAKSSLDKALAENGTELDGKKNDDASVLPIAEPPPDLQEPLVIRIDPSNT

SEQ ID NO: 45495 - DNA, 1873 bp, Arabidopsis thaliana
  misc_feature (1)..(1873): Ceres Seq. ID no. 13591649
tctctctctctctctcggttctcttcttcactgagctcaaagcgattacctcccatgggaaaaatctctgaagtgattatttagcactactttttctttgtctccttctgaatccattttttatggatcttggagttcgtgtttctggtcatgaaaccgtttcttctccgggtcaaactgaactcggatctggtttcagtaacaagcaagaaagatccggtttcgatggtgaagattgctggagaagttcaaagctctcacgaacatcaactgatggattctcttcttcccctgcctctgctaaaacgctgtcgtttcatcaaggcatccctttactgagatctaccactattaatgatcctcgtaaaggacaagaacacatgcttagcttctcttctgcttcaggcaaatcagatgtctcaccttatcttcagtactgtagaaactcaggatatggtttaggaggaatgatgaacacaagcaacatgcatggaaacttgttgacaggagtaaaaggacctttttcattgactcagtgggcagagctagagcaacaggcgttgatctataagtatatcacagccaatgtccctgttccatctagtttacttctctctctcaagaaatcttttttcccttatggttccttgcctcctaattcttttggatggggctcttttcatctgggcttttccggtggtaacatggatcccgagccagggagatgtcgccggacagatggaaagaaatggcggtgctcgagggacgctgttcccgatcaaaagtactgtgaacgacatattaacagaggccgccatcgttcaagaaagcctgtggaaggccaaaatggccacaatactaatgctgccgccgctgcttctgctgctgccgcttctaccgctgctgctgtgtccaaagcggcagcggggacttcagctgttgcgatgcgtggatcagataataacaatagccttgccgctgctgttggaacacaacatcataccaataatcaatctacagattctttggctaacagagttcaaaattctcgaggggcttcggtttttcctgccacgatgaacttacagtcgaaggaaactcatccgaaacaaagcaataatccctttgaattcggactcatctcttctgattcgttacttaatccgtcgcataaacaagcctcgtatgcaacctcttccaaaggctttggatcgtatcttgacttcggcaaccaagccaagcacgcggggaatcacaacaatgtcgattcttggcccgaagagctgaaatcggattggactcagctctcaatgtcaatccctatggctccatcttcccctgttcaagataaacttgcactctcacctttaaggttatcgcgtgagtttgaccccgcgatccacatgggattaggcgtcaacaccgagtttcttgaccccgggaaaaagacgaataactggataccaatctcctggggtaataacaactccatgggaggtccactcggcgaggtactaaacagcacgaccaatagtcccaagtttggttcctctccaacaggcgtcttgcaaaagtcgacatttggttctctttctaacagcagctcggcaagcagcaccatcattggcgataacaacaataagaacggtgatggaaaagatccgcttggcccgaccacgctgatgaatacttctgctactgctccttctctgtgaaactgaaaaaaaaaaactaaggacaattgcgaaaacaaaaacactctgtttttctctgtttctggtttttcttacttgatgcattgttgtttctgttgctgttttctttctatataaagcaagaagaaactaaaggagagatgtgtgtttttttcttc

SEQ ID NO: 45496 - protein, 530 aa, Arabidopsis thaliana
  peptide (1)..(530): Ceres Seq. ID no. 13591650
  misc_feature (116)..(390): Homolog of NCBI NO: 30682907 NR Description: transcription activator (GRL5) [Arabidopsis
  misc_feature (116)..(390): Homolog of NCBI NO: 11994367 NR Description: gb|AAF17567.1~gene_id:MDC16.8~similar to unknown
  misc_feature (116)..(274): Homolog of NCBI NO: 6573149 NR Description: growth-regulating factor 1 [Oryza sativa]
  misc_feature (89)..(348): Homolog of NCBI NO: 12039285 NR Description: unknown protein [Oryza sativa]
  misc_feature (112)..(529): Homolog of NCBI NO: 28273382 NR Description: putative transcription activator
  misc_feature (1)..(103): Homolog of NCBI NO: 7487502 NR Description: hypothetical protein T28I19.20 - Arabidopsis
  misc_feature (51)..(510): Homolog of NCBI NO: 7487502 NR Description: hypothetical protein T28I19.20 - Arabidopsis
  misc_feature (1)..(103): Homolog of NCBI NO: 30691328 NR Description: transcription activator (GRL2) [Arabidopsis
  misc_feature (91)..(510): Homolog of NCBI NO: 30691328 NR Description: transcription activator (GRL2) [Arabidopsis
  misc_feature (1)..(530): Homolog of NCBI NO: 15227758 NR Description: transcription activator (GRL1) [Arabidopsis
MDLGVRVSGHETVSSPGQTELGSGFSNKQERSGFDGEDCWRSSKLSRTSTDGFSSSPASAKTLSFHQGIPLLRSTTINDPRKGQEHMLSFSSASGKSDVSPYLQYCRNSGYGLGGMMNTSNMHGNLLTGVKGPFSLTQWAELEQQALIYKYITANVPVPSSLLLSLKKSFFPYGSLPPNSFGWGSFHLGFSGGNMDPEPGRCRRTDGKKWRCSRDAVPDQKYCERHINRGRHRSRKPVEGQNGHNTNAAAAASAAAASTAAAVSKAAAGTSAVAMRGSDNNNSLAAAVGTQHHTNNQSTDSLANRVQNSRGASVFPATMNLQSKETHPKQSNNPFEFGLISSDSLLNPSHKQASYATSSKGFGSYLDFGNQAKHAGNHNNVDSWPEELKSDWTQLSMSIPMAPSSPVQDKLALSPLRLSREFDPAIHMGLGVNTEFLDPGKKTNNWIPISWGNNNSMGGPLGEVLNSTTNSPKFGSSPTGVLQKSTFGSLSNSSSASSTIIGDNNNKNGDGKDPLGPTTLMNTSATAPSL

SEQ ID NO: 45497 - protein, 444 aa, Arabidopsis thaliana
  peptide (1)..(444): Ceres Seq. ID no. 13591651
  misc_feature (30)..(304): Homolog of NCBI NO: 30682907 NR Description: transcription activator (GRL5) [Arabidopsis
  misc_feature (30)..(304): Homolog of NCBI NO: 11994367 NR Description: gb|AAF17567.1~gene_id:MDC16.8~similar to unknown
  misc_feature (30)..(188): Homolog of NCBI NO: 6573149 NR Description: growth-regulating factor 1 [Oryza sativa]
  misc_feature (3)..(262): Homolog of NCBI NO: 12039285 NR Description: unknown protein [Oryza sativa]
  misc_feature (26)..(443): Homolog of NCBI NO: 28273382 NR Description: putative transcription activator
  misc_feature (1)..(17): Homolog of NCBI NO: 7487502 NR Description: hypothetical protein T28I19.20 - Arabidopsis
  misc_feature (1)..(424): Homolog of NCBI NO: 7487502 NR Description: hypothetical protein T28I19.20 - Arabidopsis
  misc_feature (1)..(17): Homolog of NCBI NO: 30691328 NR Description: transcription activator (GRL2) [Arabidopsis
  misc_feature (5)..(424): Homolog of NCBI NO: 30691328 NR Description: transcription activator (GRL2) [Arabidopsis
  misc_feature (1)..(444): Homolog of NCBI NO: 15227758 NR Description: transcription activator (GRL1) [Arabidopsis
MLSFSSASGKSDVSPYLQYCRNSGYGLGGMMNTSNMHGNLLTGVKGPFSLTQWAELEQQALIYKYITANVPVPSSLLLSLKKSFFPYGSLPPNSFGWGSFHLGFSGGNMDPEPGRCRRTDGKKWRCSRDAVPDQKYCERHINRGRHRSRKPVEGQNGHNTNAAAAASAAAASTAAAVSKAAAGTSAVAMRGSDNNNSLAAAVGTQHHTNNQSTDSLANRVQNSRGASVFPATMNLQSKETHPKQSNNPFEFGLISSDSLLNPSHKQASYATSSKGFGSYLDFGNQAKHAGNHNNVDSWPEELKSDWTQLSMSIPMAPSSPVQDKLALSPLRLSREFDPAIHMGLGVNTEFLDPGKKTNNWIPISWGNNNSMGGPLGEVLNSTTNSPKFGSSPTGVLQKSTFGSLSNSSSASSTIIGDNNNKNGDGKDPLGPTTLMNTSATAPSL

SEQ ID NO: 45498 - protein, 415 aa, Arabidopsis thaliana
  peptide (1)..(415): Ceres Seq. ID no. 13591652
  misc_feature (14)..(157): Homolog of NCBI NO: 32470646 NR Description: putative growth-regulating factor [Solanum
  misc_feature (1)..(186): Homolog of NCBI NO: 38345778 NR Description: OSJNBa0083N12.16 [Oryza sativa (japonica
  misc_feature (1)..(275): Homolog of NCBI NO: 30682907 NR Description: transcription activator (GRL5) [Arabidopsis
  misc_feature (1)..(275): Homolog of NCBI NO: 11994367 NR Description: gb|AAF17567.1~gene_id:MDC16.8~similar to unknown
  misc_feature (1)..(159): Homolog of NCBI NO: 6573149 NR Description: growth-regulating factor 1 [Oryza sativa]
  misc_feature (1)..(233): Homolog of NCBI NO: 12039285 NR Description: unknown protein [Oryza sativa]
  misc_feature (1)..(414): Homolog of NCBI NO: 28273382 NR Description: putative transcription activator
  misc_feature (1)..(395): Homolog of NCBI NO: 7487502 NR Description: hypothetical protein T28I19.20 - Arabidopsis
  misc_feature (1)..(395): Homolog of NCBI NO: 30691328 NR Description: transcription activator (GRL2) [Arabidopsis
  misc_feature (1)..(415): Homolog of NCBI NO: 15227758 NR Description: transcription activator (GRL1) [Arabidopsis
MMNTSNMHGNLLTGVKGPFSLTQWAELEQQALIYKYITANVPVPSSLLLSLKKSFFPYGSLPPNSFGWGSFHLGFSGGNMDPEPGRCRRTDGKKWRCSRDAVPDQKYCERHINRGRHRSRKPVEGQNGHNTNAAAAASAAAASTAAAVSKAAAGTSAVAMRGSDNNNSLAAAVGTQHHTNNQSTDSLANRVQNSRGASVFPATMNLQSKETHPKQSNNPFEFGLISSDSLLNPSHKQASYATSSKGFGSYLDFGNQAKHAGNHNNVDSWPEELKSDWTQLSMSIPMAPSSPVQDKLALSPLRLSREFDPAIHMGLGVNTEFLDPGKKTNNWIPISWGNNNSMGGPLGEVLNSTTNSPKFGSSPTGVLQKSTFGSLSNSSSASSTIIGDNNNKNGDGKDPLGPTTLMNTSATAPSL

SEQ ID NO: 45499 - DNA, 2152 bp, Arabidopsis thaliana
  misc_feature (1)..(2152): Ceres Seq. ID no. 13576317
  misc_feature: MA Experiment ID: 20000171 Result: Down-regulated in Transcription
  misc_feature: MA Experiment 20000171 PARAMETER Experiment Name: At_42deg_Heat_P Parameter: Age (day) Value: 14
  misc_feature: MA Experiment 20000171 PARAMETER Experiment Name: At_42deg_Heat_P Parameter: Organism Value: A. thaliana
  misc_feature: MA Experiment 20000171 PARAMETER Experiment Name: At_42deg_Heat_P Parameter: Plant Line Value: WS
  misc_feature: MA Experiment 20000171 PARAMETER Experiment Name: At_42deg_Heat_P Parameter: Temperature (deg C) Value: 42 vs. 22
  misc_feature: MA Experiment 20000171 PARAMETER Experiment Name: At_42deg_Heat_P Parameter: Timepoint (hr) Value: 1
  misc_feature: MA Experiment 20000171 PARAMETER Experiment Name: At_42deg_Heat_P Parameter: Tissue Value: Aerial
  misc_feature: MA Experiment ID: 20000173 Result: Down-regulated in Transcription
  misc_feature: MA Experiment 20000173 PARAMETER Experiment Name: At_42deg_Heat_P Parameter: Age (day) Value: 14
  misc_feature: MA Experiment 20000173 PARAMETER Experiment Name: At_42deg_Heat_P Parameter: Organism Value: A. thaliana
  misc_feature: MA Experiment 20000173 PARAMETER Experiment Name: At_42deg_Heat_P Parameter: Plant Line Value: WS
  misc_feature: MA Experiment 20000173 PARAMETER Experiment Name: At_42deg_Heat_P Parameter: Temperature (deg C) Value: 42 vs. 22
  misc_feature: MA Experiment 20000173 PARAMETER Experiment Name: At_42deg_Heat_P Parameter: Timepoint (hr) Value: 6
  misc_feature: MA Experiment 20000173 PARAMETER Experiment Name: At_42deg_Heat_P Parameter: Tissue Value: Aerial
  misc_feature: MA Experiment ID: 20000179 Result: Down-regulated in Transcription
  misc_feature: MA Experiment 20000179 PARAMETER Experiment Name: At_Germinating_Seeds_P Parameter: Age (hr) Value: 6 vs. 0
  misc_feature: MA Experiment 20000179 PARAMETER Experiment Name: At_Germinating_Seeds_P Parameter: Tissue Value: Germinating Seeds
  misc_feature: MA Experiment ID: 20000180 Result: Down-regulated in Transcription
  misc_feature: MA Experiment 20000180 PARAMETER Experiment Name: At_Germinating_Seeds_P Parameter: Age (hr) Value: 24 vs. 0
  misc_feature: MA Experiment 20000180 PARAMETER Experiment Name: At_Germinating_Seeds_P Parameter: Tissue Value: Germinating Seeds
  misc_feature: MA Experiment ID: 20000234 Result: Up-regulated in Transcription
  misc_feature: MA Experiment 20000234 PARAMETER Experiment Name: At_Siliques_P Parameter: Age (day) Value: 21
  misc_feature: MA Experiment 20000234 PARAMETER Experiment Name: At_Siliques_P Parameter: Organism Value: A. thaliana
  misc_feature: MA Experiment 20000234 PARAMETER Experiment Name: At_Siliques_P Parameter: Plant Line Value: WS
  misc_feature: MA Experiment 20000234 PARAMETER Experiment Name: At_Siliques_P Parameter: Tissue Value: Less Than 5mm Siliques vs. Whole Plant
  misc_feature: MA Experiment ID: 20000235 Result: Up-regulated in Transcription
  misc_feature: MA Experiment 20000235 PARAMETER Experiment Name: At_Siliques_P Parameter: Age (day) Value: 21
  misc_feature: MA Experiment 20000235 PARAMETER Experiment Name: At_Siliques_P Parameter: Organism Value: A. thaliana
  misc_feature: MA Experiment 20000235 PARAMETER Experiment Name: At_Siliques_P Parameter: Plant Line Value: WS
  misc_feature: MA Experiment 20000235 PARAMETER Experiment Name: At_Siliques_P Parameter: Tissue Value: 5-10mm Siliques vs. Whole Plant
  misc_feature: MA Experiment ID: 20000265 Result: Down-regulated in Transcription
  misc_feature: MA Experiment 20000265 PARAMETER Experiment Name: At_Open_Flower_P Parameter: Age (day) Value: 21
  misc_feature: MA Experiment 20000265 PARAMETER Experiment Name: At_Open_Flower_P Parameter: Plant Line Value: WS
  misc_feature: MA Experiment 20000265 PARAMETER Experiment Name: At_Open_Flower_P Parameter: Tissue Value: Closed Flower vs. Whole Plant
  misc_feature: MA Experiment ID: 20000439 Result: Down-regulated in Transcription
  misc_feature: MA Experiment 20000439 PARAMETER Experiment Name: At_Roots__P Parameter: Age (day) Value: 14 vs. 21
  misc_feature: MA Experiment 20000439 PARAMETER Experiment Name: At_Roots__P Parameter: Organism Value: A. thaliana
  misc_feature: MA Experiment 20000439 PARAMETER Experiment Name: At_Roots__P Parameter: Tissue Value: Roots vs. Whole Plant
  misc_feature: MA Experiment ID: 20000709 Result: Up-regulated in Transcription
  misc_feature: MA Experiment 20000709 PARAMETER Experiment Name: At_15mM_NH4NO3_L-to-H_P Parameter: Age (hr) Value: 14
  misc_feature: MA Experiment 20000709 PARAMETER Experiment Name: At_15mM_NH4NO3_L-to-H_P Parameter: Organism Value: A. thaliana
  misc_feature: MA Experiment 20000709 PARAMETER Experiment Name: At_15mM_NH4NO3_L-to-H_P Parameter: Plant Line Value: WS
  misc_feature: MA Experiment 20000709 PARAMETER Experiment Name: At_15mM_NH4NO3_L-to-H_P Parameter: Timepoint (hr) Value: 4
  misc_feature: MA Experiment 20000709 PARAMETER Experiment Name: At_15mM_NH4NO3_L-to-H_P Parameter: Tissue Value: Aerial
  misc_feature: MA Experiment 20000709 PARAMETER Experiment Name: At_15mM_NH4NO3_L-to-H_P Parameter: Treatment Value: 15mM NH4NO3 vs. 30mM Mannitol
  misc_feature: MA Experiment ID: 20001451 Result: Up-regulated in Transcription
  misc_feature: MA Experiment 20001451 PARAMETER Experiment Name: At_Far-red-induction_P Parameter: Age (day) Value: 7
  misc_feature: MA Experiment 20001451 PARAMETER Experiment Name: At_Far-red-induction_P Parameter: Light Value: Far-red vs. White
  misc_feature: MA Experiment 20001451 PARAMETER Experiment Name: At_Far-red-induction_P Parameter: Organism Value: A. thaliana
  misc_feature: MA Experiment 20001451 PARAMETER Experiment Name: At_Far-red-induction_P Parameter: Plant Line Value: Columbia
  misc_feature: MA Experiment 20001451 PARAMETER Experiment Name: At_Far-red-induction_P Parameter: Timepoint (hr) Value: 24
  misc_feature: MA Experiment 20001451 PARAMETER Experiment Name: At_Far-red-induction_P Parameter: Tissue Value: Whole Plant
  misc_feature: MA Experiment ID: 20001560 Result: Up-regulated in Transcription
  misc_feature: MA Experiment 20001560 PARAMETER Experiment Name: At_Drought_Soil_Dry_P Parameter: Age (day) Value: 28
  misc_feature: MA Experiment 20001560 PARAMETER Experiment Name: At_Drought_Soil_Dry_P Parameter: Organism Value: A. thaliana
  misc_feature: MA Experiment 20001560 PARAMETER Experiment Name: At_Drought_Soil_Dry_P Parameter: Plant Line Value: WS
  misc_feature: MA Experiment 20001560 PARAMETER Experiment Name: At_Drought_Soil_Dry_P Parameter: Post Timepoint (hr) Value: None
  misc_feature: MA Experiment 20001560 PARAMETER Experiment Name: At_Drought_Soil_Dry_P Parameter: Post-Treatment Value: None
  misc_feature: MA Experiment 20001560 PARAMETER Experiment Name: At_Drought_Soil_Dry_P Parameter: Timepoint (day) Value: 14
  misc_feature: MA Experiment 20001560 PARAMETER Experiment Name: At_Drought_Soil_Dry_P Parameter: Treatment Value: Drought vs. No Drought
ggcaaccaagaatataacaaaagggaacaaatcacatatttntgtgaaatcccaaagaaagtttttgctttcaccggccagtcatgggaaactatcggtggccgtcaaagctatcaaagttatcactcagagcaaaacaaacgaatctgtaccgcgtcattctaatcgcgatcctctgcgtcaccttttacttcgtcggagtatggcaacactccggcagaggaatctcacgctcttccatttctaaccacgagctcacgtccgtgccctgcacgtttcctcaccaaaccacaccgattctcaacttcgcctcccgtcacacagcccctgaccttcctccgacgataacggacgcgcgtgttgttcaaatcccgtcgtgcggcgttgaattctcggagtacacgccctgcgagttcgtgaatcggtctttgaatttcccaagagagaggcttatatacagagagagacactgtccggaaaaacacgagatagtcaggtgtcggattccagcgccgtacggttacagtttaccttttcggtggccggagagccgtgacgtggcgtggtttgctaacgtgccgcatacggaactaacggtggagaagaagaatcagaactgggtaaggtatgagaaggataggtttttatttcctggtggtggtacgatgtttccacgtggagctgatgcttacatcgacgagatcggacggttgataaatctcaaagatggatcaattcggacagccattgatactggatgtggggtagcgagctttggggcgtatctaatgtcgaggaacatagtaacgatgtcgtttgcaccaagagacacacacgaagctcaggttcagttcgcacttgagagaggagtccctgccatcataggagtgttagcctctattaggctcccatttccggccagagccttcgacattgctcattgctctcgatgtctcattccttggggccaatacaacgggacgtatctcatagaagtggatagggtactgagaccgggggggtattggattttgtcgggaccgccgattaactggcagagacactggaagggttgggaaagaactagagacgatctcaactcggagcagtctcagatcgagagggtggctaggagcttgtgttggaggaaattggtgcagagagaggatcttgcggtttggcagaaacctaccaaccatgttcactgtaagcgcaatcggatagctttaggacgccctccgttctgccaccggacactacccaaccagggctggtacactaagcttgaaacctgtttgacgccgttgccggaagtaacaggatctgagatcaaagaagtagcgggtggacagttggcgagatggcctgagagattgaatgctcttcctccgaggatcaaaagtggaagcttggaagggatcactgaggatgaatttgtcagcaacacagagaaatggcagagaagagtgtcttactacaagaaatatgaccaacagctagcggagacgggaagatacagaaactttctcgacatgaacgctcatcttggaggtttcgcctcagccttagtcgatgatcctgtatgggtcatgaatgttgtccccgtggaggccagtgttaacacccttggagttatctatgagcgaggattgattggaacgtatcaaaactggtgtgaagcaatgtcaacttacccaaggacatacgatttcatccatgccgattcggtgttcagtctgtacaaagacagatgtgacatggaagatatcttgctagaaatggacaggattctaagaccaaagggaagcgtgatcatcagagacgacattgatgtgctaaccaaagtgaagaagattacagatgcgatgcaatgggaagggaggataggagatcatgaaaacggacctcttgaaagagagaagattttgtttcttgtgaaggagtactggaccgcacctgcgcctgatcagtcatcagatccttgatcaagcttggaataattcataaaatttgtagctccattcttttttcttcaaatgttttgtacacactaatcgactttgggggaaagaagaaacaaacacccgctaaattgtttcaaaccggagattcattgcgactttgtgagaaaatgaactagagagtttactac

SEQ ID NO: 45500 - protein, 633 aa, Arabidopsis thaliana
  peptide (1)..(633): Ceres Seq. ID no. 13576318
  misc_feature (105)..(619): Pfam Name: Putative methyltransferase Pfam Description: Putative methyltransferase
  misc_feature (105)..(619): Pfam Name: Putative methyltransferase Pfam Description: Putative methyltransferase
  misc_feature (105)..(619): Pfam Name: Putative methyltransferase Pfam Description: Putative methyltransferase
  misc_feature (10)..(622): Homolog of NCBI NO: 18071395 NR Description: hypothetical protein [Oryza sativa]
  misc_feature (71)..(626): Homolog of NCBI NO: 9665165 NR Description: Unknown Protein [Arabidopsis thaliana]
  misc_feature (17)..(632): Homolog of NCBI NO: 15235080 NR Description: dehydration-induced protein family [Arabidopsis
  misc_feature (31)..(629): Homolog of NCBI NO: 24413975 NR Description: hypothetical protein~similar to Oryza sativa
  misc_feature (71)..(626): Homolog of NCBI NO: 18398763 NR Description: dehydration-induced protein family [Arabidopsis
  misc_feature (10)..(622): Homolog of NCBI NO: 18071395 NR Description: hypothetical protein [Oryza sativa]
  misc_feature (17)..(632): Homolog of NCBI NO: 15235080 NR Description: dehydration-induced protein family [Arabidopsis
  misc_feature (71)..(626): Homolog of NCBI NO: 18398763 NR Description: dehydration-induced protein family [Arabidopsis
  misc_feature (31)..(629): Homolog of NCBI NO: 24413975 NR Description: hypothetical protein~similar to Oryza sativa
  misc_feature (17)..(632): Homolog of NCBI NO: 15235080 NR Description: dehydration-induced protein family [Arabidopsis
  misc_feature (71)..(626): Homolog of NCBI NO: 9665165 NR Description: Unknown Protein [Arabidopsis thaliana]
  misc_feature (10)..(622): Homolog of NCBI NO: 18071395 NR Description: hypothetical protein [Oryza sativa]
  misc_feature (11)..(633): Homolog of NCBI NO: 15225560 NR Description: dehydration-induced protein family [Arabidopsis
  misc_feature (73)..(623): Homolog of NCBI NO: 38567915 NR Description: OSJNBa0088I22.11 [Oryza sativa (japonica
  misc_feature (8)..(69): Homolog of NCBI NO: 38567915 NR Description: OSJNBa0088I22.11 [Oryza sativa (japonica
  misc_feature (15)..(624): Homolog of NCBI NO: 34898042 NR Description: OSJNBa0038F22.19 [Oryza sativa (japonica
  misc_feature (9)..(629): Homolog of NCBI NO: 37535962 NR Description: unknown protein [Oryza sativa (japonica
  misc_feature (11)..(633): Homolog of NCBI NO: 15225560 NR Description: dehydration-induced protein family [Arabidopsis
  misc_feature (73)..(623): Homolog of NCBI NO: 38567915 NR Description: OSJNBa0088I22.11 [Oryza sativa (japonica
  misc_feature (8)..(69): Homolog of NCBI NO: 38567915 NR Description: OSJNBa0088I22.11 [Oryza sativa (japonica
  misc_feature (15)..(624): Homolog of NCBI NO: 34898042 NR Description: OSJNBa0038F22.19 [Oryza sativa (japonica
  misc_feature (9)..(629): Homolog of NCBI NO: 37535962 NR Description: unknown protein [Oryza sativa (japonica
  misc_feature (71)..(626): Homolog of NCBI NO: 18398763 NR Description: dehydration-induced protein family [Arabidopsis
  misc_feature (31)..(629): Homolog of NCBI NO: 24413975 NR Description: hypothetical protein~similar to Oryza sativa
  misc_feature (71)..(626): Homolog of NCBI NO: 9665165 NR Description: Unknown Protein [Arabidopsis thaliana]
  misc_feature (9)..(629): Homolog of NCBI NO: 37535962 NR Description: unknown protein [Oryza sativa (japonica
  misc_feature (15)..(624): Homolog of NCBI NO: 34898042 NR Description: OSJNBa0038F22.19 [Oryza sativa (japonica
  misc_feature (8)..(69): Homolog of NCBI NO: 38567915 NR Description: OSJNBa0088I22.11 [Oryza sativa (japonica
  misc_feature (73)..(623): Homolog of NCBI NO: 38567915 NR Description: OSJNBa0088I22.11 [Oryza sativa (japonica
  misc_feature (11)..(633): Homolog of NCBI NO: 15225560 NR Description: dehydration-induced protein family [Arabidopsis
MGNYRWPSKLSKLSLRAKQTNLYRVILIAILCVTFYFVGVWQHSGRGISRSSISNHELTSVPCTFPHQTTPILNFASRHTAPDLPPTITDARVVQIPSCGVEFSEYTPCEFVNRSLNFPRERLIYRERHCPEKHEIVRCRIPAPYGYSLPFRWPESRDVAWFANVPHTELTVEKKNQNWVRYEKDRFLFPGGGTMFPRGADAYIDEIGRLINLKDGSIRTAIDTGCGVASFGAYLMSRNIVTMSFAPRDTHEAQVQFALERGVPAIIGVLASIRLPFPARAFDIAHCSRCLIPWGQYNGTYLIEVDRVLRPGGYWILSGPPINWQRHWKGWERTRDDLNSEQSQIERVARSLCWRKLVQREDLAVWQKPTNHVHCKRNRIALGRPPFCHRTLPNQGWYTKLETCLTPLPEVTGSEIKEVAGGQLARWPERLNALPPRIKSGSLEGITEDEFVSNTEKWQRRVSYYKKYDQQLAETGRYRNFLDMNAHLGGFASALVDDPVWVMNVVPVEASVNTLGVIYERGLIGTYQNWCEAMSTYPRTYDFIHADSVFSLYKDRCDMEDILLEMDRILRPKGSVIIRDDIDVLTKVKKITDAMQWEGRIGDHENGPLEREKILFLVKEYWTAPAPDQSSDP

SEQ ID NO: 45501 - protein, 439 aa, Arabidopsis thaliana
  peptide (1)..(439): Ceres Seq. ID no. 13576319
  misc_feature (1)..(425): Pfam Name: Putative methyltransferase Pfam Description: Putative methyltransferase
  misc_feature (1)..(425): Pfam Name: Putative methyltransferase Pfam Description: Putative methyltransferase
  misc_feature (1)..(425): Pfam Name: Putative methyltransferase Pfam Description: Putative methyltransferase
  misc_feature (1)..(428): Homolog of NCBI NO: 18396075 NR Description: dehydration-induced protein family [Arabidopsis
  misc_feature (1)..(428): Homolog of NCBI NO: 18071395 NR Description: hypothetical protein [Oryza sativa]
  misc_feature (1)..(432): Homolog of NCBI NO: 9665165 NR Description: Unknown Protein [Arabidopsis thaliana]
  misc_feature (1)..(438): Homolog of NCBI NO: 15235080 NR Description: dehydration-induced protein family [Arabidopsis
  misc_feature (1)..(435): Homolog of NCBI NO: 24413975 NR Description: hypothetical protein~similar to Oryza sativa
  misc_feature (1)..(428): Homolog of NCBI NO: 18396075 NR Description: dehydration-induced protein family [Arabidopsis
  misc_feature (1)..(432): Homolog of NCBI NO: 9665165 NR Description: Unknown Protein [Arabidopsis thaliana]
  misc_feature (1)..(435): Homolog of NCBI NO: 24413975 NR Description: hypothetical protein~similar to Oryza sativa
  misc_feature (1)..(438): Homolog of NCBI NO: 15235080 NR Description: dehydration-induced protein family [Arabidopsis
  misc_feature (1)..(432): Homolog of NCBI NO: 9665165 NR Description: Unknown Protein [Arabidopsis thaliana]
  misc_feature (1)..(428): Homolog of NCBI NO: 18071395 NR Description: hypothetical protein [Oryza sativa]
  misc_feature (1)..(428): Homolog of NCBI NO: 18396075 NR Description: dehydration-induced protein family [Arabidopsis
  misc_feature (1)..(439): Homolog of NCBI NO: 15225560 NR Description: dehydration-induced protein family [Arabidopsis
  misc_feature (1)..(429): Homolog of NCBI NO: 38567915 NR Description: OSJNBa0088I22.11 [Oryza sativa (japonica
  misc_feature (1)..(430): Homolog of NCBI NO: 34898042 NR Description: OSJNBa0038F22.19 [Oryza sativa (japonica
  misc_feature (1)..(435): Homolog of NCBI NO: 37535962 NR Description: unknown protein [Oryza sativa (japonica
  misc_feature (1)..(432): Homolog of NCBI NO: 18398763 NR Description: dehydration-induced protein family [Arabidopsis
  misc_feature (1)..(439): Homolog of NCBI NO: 15225560 NR Description: dehydration-induced protein family [Arabidopsis
  misc_feature (1)..(429): Homolog of NCBI NO: 38567915 NR Description: OSJNBa0088I22.11 [Oryza sativa (japonica
  misc_feature (1)..(430): Homolog of NCBI NO: 34898042 NR Description: OSJNBa0038F22.19 [Oryza sativa (japonica
  misc_feature (1)..(435): Homolog of NCBI NO: 37535962 NR Description: unknown protein [Oryza sativa (japonica
  misc_feature (1)..(432): Homolog of NCBI NO: 18398763 NR Description: dehydration-induced protein family [Arabidopsis
  misc_feature (1)..(435): Homolog of NCBI NO: 24413975 NR Description: hypothetical protein~similar to Oryza sativa
  misc_feature (1)..(438): Homolog of NCBI NO: 15235080 NR Description: dehydration-induced protein family [Arabidopsis
  misc_feature (1)..(428): Homolog of NCBI NO: 18071395 NR Description: hypothetical protein [Oryza sativa]
  misc_feature (1)..(432): Homolog of NCBI NO: 18398763 NR Description: dehydration-induced protein family [Arabidopsis
  misc_feature (1)..(435): Homolog of NCBI NO: 37535962 NR Description: unknown protein [Oryza sativa (japonica
  misc_feature (1)..(430): Homolog of NCBI NO: 34898042 NR Description: OSJNBa0038F22.19 [Oryza sativa (japonica
  misc_feature (1)..(429): Homolog of NCBI NO: 38567915 NR Description: OSJNBa0088I22.11 [Oryza sativa (japonica
  misc_feature (1)..(439): Homolog of NCBI NO: 15225560 NR Description: dehydration-induced protein family [Arabidopsis
MFPRGADAYIDEIGRLINLKDGSIRTAIDTGCGVASFGAYLMSRNIVTMSFAPRDTHEAQVQFALERGVPAIIGVLASIRLPFPARAFDIAHCSRCLIPWGQYNGTYLIEVDRVLRPGGYWILSGPPINWQRHWKGWERTRDDLNSEQSQIERVARSLCWRKLVQREDLAVWQKPTNHVHCKRNRIALGRPPFCHRTLPNQGWYTKLETCLTPLPEVTGSEIKEVAGGQLARWPERLNALPPRIKSGSLEGITEDEFVSNTEKWQRRVSYYKKYDQQLAETGRYRNFLDMNAHLGGFASALVDDPVWVMNVVPVEASVNTLGVIYERGLIGTYQNWCEAMSTYPRTYDFIHADSVFSLYKDRCDMEDILLEMDRILRPKGSVIIRDDIDVLTKVKKITDAMQWEGRIGDHENGPLEREKILFLVKEYWTAPAPDQSSDP

SEQ ID NO: 45502 - protein, 398 aa, Arabidopsis thaliana
  peptide (1)..(398): Ceres Seq. ID no. 13576320
  misc_feature (1)..(384): Pfam Name: Putative methyltransferase Pfam Description: Putative methyltransferase
  misc_feature (1)..(384): Pfam Name: Putative methyltransferase Pfam Description: Putative methyltransferase
  misc_feature (1)..(384): Pfam Name: Putative methyltransferase Pfam Description: Putative methyltransferase
  misc_feature (1)..(387): Homolog of NCBI NO: 18396075 NR Description: dehydration-induced protein family [Arabidopsis
  misc_feature (1)..(387): Homolog of NCBI NO: 18071395 NR Description: hypothetical protein [Oryza sativa]
  misc_feature (1)..(391): Homolog of NCBI NO: 9665165 NR Description: Unknown Protein [Arabidopsis thaliana]
  misc_feature (1)..(397): Homolog of NCBI NO: 15235080 NR Description: dehydration-induced protein family [Arabidopsis
  misc_feature (1)..(394): Homolog of NCBI NO: 24413975 NR Description: hypothetical protein~similar to Oryza sativa
  misc_feature (1)..(387): Homolog of NCBI NO: 18396075 NR Description: dehydration-induced protein family [Arabidopsis
  misc_feature (1)..(391): Homolog of NCBI NO: 9665165 NR Description: Unknown Protein [Arabidopsis thaliana]
  misc_feature (1)..(394): Homolog of NCBI NO: 24413975 NR Description: hypothetical protein~similar to Oryza sativa
  misc_feature (1)..(397): Homolog of NCBI NO: 15235080 NR Description: dehydration-induced protein family [Arabidopsis
  misc_feature (1)..(391): Homolog of NCBI NO: 9665165 NR Description: Unknown Protein [Arabidopsis thaliana]
  misc_feature (1)..(387): Homolog of NCBI NO: 18071395 NR Description: hypothetical protein [Oryza sativa]
  misc_feature (1)..(387): Homolog of NCBI NO: 18396075 NR Description: dehydration-induced protein family [Arabidopsis
  misc_feature (1)..(398): Homolog of NCBI NO: 15225560 NR Description: dehydration-induced protein family [Arabidopsis
  misc_feature (1)..(388): Homolog of NCBI NO: 38567915 NR Description: OSJNBa0088I22.11 [Oryza sativa (japonica
  misc_feature (1)..(389): Homolog of NCBI NO: 34898042 NR Description: OSJNBa0038F22.19 [Oryza sativa (japonica
  misc_feature (1)..(394): Homolog of NCBI NO: 37535962 NR Description: unknown protein [Oryza sativa (japonica
  misc_feature (1)..(391): Homolog of NCBI NO: 18398763 NR Description: dehydration-induced protein family [Arabidopsis
  misc_feature (1)..(398): Homolog of NCBI NO: 15225560 NR Description: dehydration-induced protein family [Arabidopsis
  misc_feature (1)..(388): Homolog of NCBI NO: 38567915 NR Description: OSJNBa0088I22.11 [Oryza sativa (japonica
  misc_feature (1)..(389): Homolog of NCBI NO: 34898042 NR Description: OSJNBa0038F22.19 [Oryza sativa (japonica
  misc_feature (1)..(394): Homolog of NCBI NO: 37535962 NR Description: unknown protein [Oryza sativa (japonica
  misc_feature (1)..(391): Homolog of NCBI NO: 18398763 NR Description: dehydration-induced protein family [Arabidopsis
  misc_feature (1)..(394): Homolog of NCBI NO: 24413975 NR Description: hypothetical protein~similar to Oryza sativa
  misc_feature (1)..(397): Homolog of NCBI NO: 15235080 NR Description: dehydration-induced protein family [Arabidopsis
  misc_feature (1)..(387): Homolog of NCBI NO: 18071395 NR Description: hypothetical protein [Oryza sativa]
  misc_feature (1)..(391): Homolog of NCBI NO: 18398763 NR Description: dehydration-induced protein family [Arabidopsis
  misc_feature (1)..(394): Homolog of NCBI NO: 37535962 NR Description: unknown protein [Oryza sativa (japonica
  misc_feature (1)..(389): Homolog of NCBI NO: 34898042 NR Description: OSJNBa0038F22.19 [Oryza sativa (japonica
  misc_feature (1)..(388): Homolog of NCBI NO: 38567915 NR Description: OSJNBa0088I22.11 [Oryza sativa (japonica
  misc_feature (1)..(398): Homolog of NCBI NO: 15225560 NR Description: dehydration-induced protein family [Arabidopsis
MSRNIVTMSFAPRDTHEAQVQFALERGVPAIIGVLASIRLPFPARAFDIAHCSRCLIPWGQYNGTYLIEVDRVLRPGGYWILSGPPINWQRHWKGWERTRDDLNSEQSQIERVARSLCWRKLVQREDLAVWQKPTNHVHCKRNRIALGRPPFCHRTLPNQGWYTKLETCLTPLPEVTGSEIKEVAGGQLARWPERLNALPPRIKSGSLEGITEDEFVSNTEKWQRRVSYYKKYDQQLAETGRYRNFLDMNAHLGGFASALVDDPVWVMNVVPVEASVNTLGVIYERGLIGTYQNWCEAMSTYPRTYDFIHADSVFSLYKDRCDMEDILLEMDRILRPKGSVIIRDDIDVLTKVKKITDAMQWEGRIGDHENGPLEREKILFLVKEYWTAPAPDQSSDP

SEQ ID NO: 45503 - DNA, 1669 bp, Arabidopsis thaliana
  misc_feature (1)..(1669): Ceres Seq. ID no. 13591557
  misc_feature: MA Experiment ID: 108434 Result: Up-regulated in Transcription
  misc_feature: MA Experiment 108434 PARAMETER Experiment Name: At_Root_Tips_cDNA_P Parameter: Tissue Value: Root Tips
  misc_feature: MA Experiment ID: 108463 Result: Down-regulated in Transcription
  misc_feature: MA Experiment 108463 PARAMETER Experiment Name: At_Germinating_Seeds_cDNA_P Parameter: Age (day) Value: 3 vs. 0
  misc_feature: MA Experiment 108463 PARAMETER Experiment Name: At_Germinating_Seeds_cDNA_P Parameter: Tissue Value: Germinating Seeds
  misc_feature: MA Experiment ID: 108595 Result: Down-regulated in Transcription
  misc_feature: MA Experiment 108595 PARAMETER Experiment Name: At_Ler-pi_Ovule_cDNA_P Parameter: Plant Line Value: null
  misc_feature: MA Experiment ID: 20000087 Result: Down-regulated in Transcription
  misc_feature: MA Experiment 20000087 PARAMETER Experiment Name: At_100uM_ABA_Mutants_cDNA_P Parameter: Plant Line Value: WS
  misc_feature: MA Experiment 20000087 PARAMETER Experiment Name: At_100uM_ABA_Mutants_cDNA_P Parameter: Timepoint (hr) Value: 6
  misc_feature: MA Experiment 20000087 PARAMETER Experiment Name: At_100uM_ABA_Mutants_cDNA_P Parameter: Tissue Value: Aerial
  misc_feature: MA Experiment 20000087 PARAMETER Experiment Name: At_100uM_ABA_Mutants_cDNA_P Parameter: Treatment Value: 100uM ABA vs. No Treatment
  misc_feature: MA Experiment ID: 20000234 Result: Up-regulated in Transcription
  misc_feature: MA Experiment 20000234 PARAMETER Experiment Name: At_Siliques_P Parameter: Age (day) Value: 21
  misc_feature: MA Experiment 20000234 PARAMETER Experiment Name: At_Siliques_P Parameter: Organism Value: A. thaliana
  misc_feature: MA Experiment 20000234 PARAMETER Experiment Name: At_Siliques_P Parameter: Plant Line Value: WS
  misc_feature: MA Experiment 20000234 PARAMETER Experiment Name: At_Siliques_P Parameter: Tissue Value: Less Than 5mm Siliques vs. Whole Plant
gaagacaaaacaatcgccgactttagactctgtcgccggcgacactcaaactcaaacgaacgaacactgtcctgatttgaggaatccggtgaatcgaaactagatgtccctcaatctgtctcgtctttcgcttctctcgtccccacgtatctcgatttcaactcacgctcctcggaaaggatacgtttgttgctctatgaagtcttatagattatctgaacttagttcttcccaagttgatagtttgaagtcacgccctcgcattgacttctcttctattttcgccactgtgaacccgattatcgatgctgttcgtagcaatggggataatgctgtcaaagaatacactgaaagatttgacaaagtccagctgaataaagttgtggaagatatgtctgagctttctgttcctgagctcgattccaatgtcaaagaagcgtttgatgttgcgtatgacaacatatatgcgtttcacttagcccaaaagtcaactgagaaaagcgttgagaatatgaaaggtgtcagatgtaaaagggtgtcaagatctattggctctgtaggtctttatgtgcctggtggaacagctgttttgccatcaacggctttgatgcttgctattcctgctcaaattgctggatgtaaaacagttgttcttgcaactccaccaagtaaggatggaagcatttgtaaggaggttctgtattgcgccaagagggctggtgttactcacatactcaaagctggtggagcgcaggctatagctgccatggcctgggggacagattcttgtccaaaggttgagaagatttttggtcctgggaaccagtatgtcacagctgctaagatgattcttcaaaacagcgaggcaatggtctcaatcgatatgcctgctggtccttcagaagtcctagttattgctgacgaacatgctagtccagtttacattgcagcagacttactttctcaggcggagcatggtccagatagtcaagttgttcttgtagttgtgggcgatagtgtagatctcaacgccatcgaagaagaaattgccaagcagtgcaaaagccttcctagaggagagtttgcttcaaaagcactaagtcacagtttcacagtgtttgctcgagatatgattgaggcaatatctttctcaaatctatatgcacccgaacatttgatcatcaatgtcaaagacgctgagaaatgggagggactgattgagaacgcaggctcggttttcataggaccatggactccagagagtgttggggattatgcgagcgggacaaaccacgttcttccaacatatggatatgcaagaatgtacagtggcgtctctctcgactctttcctaaagttcatgactgtacaatctttgacagaggaaggtctgagaaacctcggcccttatgtagcaactatggctgaaatcgaaggtttagatgcacacaagagagccgttactctcagactcaaggatatcgaagccaaacagcttgcataatccaattgagatttatattcagacaaaagaggcaaaaattctttttgtattgtatgaacatatttggtttcctgagatggaataacaataaaataagagatgttggaaaactcttaccataatcttgtttttcattctttaaatctaaatccttccgtatgtttg

SEQ ID NO: 45504 - protein, 466 aa, Arabidopsis thaliana
  peptide (1)..(466): Ceres Seq. ID no. 13591558
  misc_feature (45)..(458): Pfam Name: Histidinol dehydrogenase Pfam Description: Histidinol dehydrogenase
  misc_feature (31)..(458): Homolog of NCBI NO: 6166202 NR Description: Histidine biosynthesis trifunctional protein
  misc_feature (31)..(458): Homolog of NCBI NO: 2853025 NR Description: histidine-3 protein [Neurospora crassa]
  misc_feature (32)..(457): Homolog of NCBI NO: 31095443 NR Description: HIS4 [Hebeloma cylindrosporum]
  misc_feature (29)..(462): Homolog of NCBI NO: 34904356 NR Description: unnamed protein product [Oryza sativa (japonica
  misc_feature (4)..(466): Homolog of NCBI NO: 3982577 NR Description: histidinol dehydrogenase [Thlaspi goesingense]
  misc_feature (32)..(466): Homolog of NCBI NO: 21593566 NR Description: histidinol dehydrogenase [Arabidopsis thaliana]
  misc_feature (1)..(464): Homolog of NCBI NO: 123178 NR Description: Histidinol dehydrogenase, chloroplast precursor
  misc_feature (26)..(466): Homolog of NCBI NO: 30697913 NR Description: histidinol dehydrogenase [Arabidopsis thaliana]
  misc_feature (1)..(466): Homolog of NCBI NO: 10177677 NR Description: histidinol dehydrogenase [Arabidopsis thaliana]
  misc_feature (1)..(466): Homolog of NCBI NO: 30697915 NR Description: histidinol dehydrogenase [Arabidopsis thaliana]
MSLNLSRLSLLSSPRISISTHAPRKGYVCCSMKSYRLSELSSSQVDSLKSRPRIDFSSIFATVNPIIDAVRSNGDNAVKEYTERFDKVQLNKVVEDMSELSVPELDSNVKEAFDVAYDNIYAFHLAQKSTEKSVENMKGVRCKRVSRSIGSVGLYVPGGTAVLPSTALMLAIPAQIAGCKTVVLATPPSKDGSICKEVLYCAKRAGVTHILKAGGAQAIAAMAWGTDSCPKVEKIFGPGNQYVTAAKMILQNSEAMVSIDMPAGPSEVLVIADEHASPVYIAADLLSQAEHGPDSQVVLVVVGDSVDLNAIEEEIAKQCKSLPRGEFASKALSHSFTVFARDMIEAISFSNLYAPEHLIINVKDAEKWEGLIENAGSVFIGPWTPESVGDYASGTNHVLPTYGYARMYSGVSLDSFLKFMTVQSLTEEGLRNLGPYVATMAEIEGLDAHKRAVTLRLKDIEAKQLA

SEQ ID NO: 45505 - protein, 435 aa, Arabidopsis thaliana; identical to SEQ ID NO: 25239
  peptide (1)..(435): Ceres Seq. ID no. 13591559
  misc_feature (14)..(427): Pfam Name: Histidinol dehydrogenase Pfam Description: Histidinol dehydrogenase
  misc_feature (1)..(427): Homolog of NCBI NO: 6166202 NR Description: Histidine biosynthesis trifunctional protein
  misc_feature (1)..(427): Homolog of NCBI NO: 2853025 NR Description: histidine-3 protein [Neurospora crassa]
  misc_feature (1)..(426): Homolog of NCBI NO: 31095443 NR Description: HIS4 [Hebeloma cylindrosporum]
  misc_feature (1)..(431): Homolog of NCBI NO: 34904356 NR Description: unnamed protein product [Oryza sativa (japonica
  misc_feature (1)..(435): Homolog of NCBI NO: 3982577 NR Description: histidinol dehydrogenase [Thlaspi goesingense]
  misc_feature (1)..(435): Homolog of NCBI NO: 21593566 NR Description: histidinol dehydrogenase [Arabidopsis thaliana]
  misc_feature (1)..(433): Homolog of NCBI NO: 123178 NR Description: Histidinol dehydrogenase, chloroplast precursor
  misc_feature (1)..(435): Homolog of NCBI NO: 30697913 NR Description: histidinol dehydrogenase [Arabidopsis thaliana]
  misc_feature (1)..(435): Homolog of NCBI NO: 10177677 NR Description: histidinol dehydrogenase [Arabidopsis thaliana]
  misc_feature (1)..(435): Homolog of NCBI NO: 30697915 NR Description: histidinol dehydrogenase [Arabidopsis thaliana]

SEQ ID NO: 45506 - protein, 370 aa, Arabidopsis thaliana; identical to SEQ ID NO: 25240
  peptide (1)..(370): Ceres Seq. ID no. 13591560
  misc_feature (1)..(362): Pfam Name: Histidinol dehydrogenase Pfam Description: Histidinol dehydrogenase
  misc_feature (1)..(362): Homolog of NCBI NO: 6166202 NR Description: Histidine biosynthesis trifunctional protein
  misc_feature (1)..(362): Homolog of NCBI NO: 2853025 NR Description: histidine-3 protein [Neurospora crassa]
  misc_feature (1)..(361): Homolog of NCBI NO: 31095443 NR Description: HIS4 [Hebeloma cylindrosporum]
  misc_feature (1)..(366): Homolog of NCBI NO: 34904356 NR Description: unnamed protein product [Oryza sativa (japonica
  misc_feature (1)..(370): Homolog of NCBI NO: 3982577 NR Description: histidinol dehydrogenase [Thlaspi goesingense]
  misc_feature (1)..(370): Homolog of NCBI NO: 21593566 NR Description: histidinol dehydrogenase [Arabidopsis thaliana]
  misc_feature (1)..(368): Homolog of NCBI NO: 123178 NR Description: Histidinol dehydrogenase, chloroplast precursor
  misc_feature (1)..(370): Homolog of NCBI NO: 30697913 NR Description: histidinol dehydrogenase [Arabidopsis thaliana]
  misc_feature (1)..(370): Homolog of NCBI NO: 10177677 NR Description: histidinol dehydrogenase [Arabidopsis thaliana]
  misc_feature (1)..(370): Homolog of NCBI NO: 30697915 NR Description: histidinol dehydrogenase [Arabidopsis thaliana]

SEQ ID NO: 45507 - DNA, 1779 bp, Arabidopsis thaliana; identical to SEQ ID NO: 29030
  misc_feature (1)..(1779): Ceres Seq. ID no. 13600793
  misc_feature: MA Experiment ID: 20000179 Result: Up-regulated in Transcription
  misc_feature: MA Experiment 20000179 PARAMETER Experiment Name: At_Germinating_Seeds_P Parameter: Age (hr) Value: 6 vs. 0
  misc_feature: MA Experiment 20000179 PARAMETER Experiment Name: At_Germinating_Seeds_P Parameter: Tissue Value: Germinating Seeds
  misc_feature: MA Experiment ID: 20001451 Result: Down-regulated in Transcription
  misc_feature: MA Experiment 20001451 PARAMETER Experiment Name: At_Far-red-induction_P Parameter: Age (day) Value: 7
  misc_feature: MA Experiment 20001451 PARAMETER Experiment Name: At_Far-red-induction_P Parameter: Light Value: Far-red vs. White
  misc_feature: MA Experiment 20001451 PARAMETER Experiment Name: At_Far-red-induction_P Parameter: Organism Value: A. thaliana
  misc_feature: MA Experiment 20001451 PARAMETER Experiment Name: At_Far-red-induction_P Parameter: Plant Line Value: Columbia
  misc_feature: MA Experiment 20001451 PARAMETER Experiment Name: At_Far-red-induction_P Parameter: Timepoint (hr) Value: 24
  misc_feature: MA Experiment 20001451 PARAMETER Experiment Name: At_Far-red-induction_P Parameter: Tissue Value: Whole Plant

SEQ ID NO: 45508 - protein, 464 aa, Arabidopsis thaliana; identical to SEQ ID NO: 29031
  peptide (1)..(464): Ceres Seq. ID no. 15219006
  misc_feature (26)..(456): Pfam Name: Ribophorin I Pfam Description: Ribophorin I
  misc_feature (26)..(456): Pfam Name: Ribophorin I Pfam Description: Ribophorin I
  misc_feature (26)..(456): Pfam Name: Ribophorin I Pfam Description: Ribophorin I
  misc_feature (19)..(463): Homolog of NCBI NO: 31543605 NR Description: ribophorin I
  misc_feature (19)..(463): Homolog of NCBI NO: 16359229 NR Description: ribophorin I [Mus musculus]
  misc_feature (22)..(463): Homolog of NCBI NO: 9857227 NR Description: ribophorin I [Sus scrofa]
  misc_feature (19)..(463): Homolog of NCBI NO: 4506675 NR Description: ribophorin I [Homo sapiens]
  misc_feature (11)..(463): Homolog of NCBI NO: 28175644 NR Description: Similar to ribophorin I [Xenopus laevis]
  misc_feature (19)..(463): Homolog of NCBI NO: 31543605 NR Description: ribophorin I
  misc_feature (22)..(463): Homolog of NCBI NO: 9857227 NR Description: ribophorin I [Sus scrofa]
  misc_feature (11)..(463): Homolog of NCBI NO: 28175644 NR Description: Similar to ribophorin I [Xenopus laevis]
  misc_feature (19)..(463): Homolog of NCBI NO: 4506675 NR Description: ribophorin I [Homo sapiens]
  misc_feature (22)..(463): Homolog of NCBI NO: 9857227 NR Description: ribophorin I [Sus scrofa]
  misc_feature (19)..(463): Homolog of NCBI NO: 16359229 NR Description: ribophorin I [Mus musculus]
  misc_feature (19)..(463): Homolog of NCBI NO: 31543605 NR Description: ribophorin I
  misc_feature (1)..(464): Homolog of NCBI NO: 15226341 NR Description: ribophorin I -related [Arabidopsis thaliana]
  misc_feature (14)..(464): Homolog of NCBI NO: 7489438 NR Description: ribophorin I homolog - barley (fragment)
  misc_feature (5)..(464): Homolog of NCBI NO: 15223039 NR Description: ribophorin I
  misc_feature (4)..(463): Homolog of NCBI NO: 28277278 NR Description: Similar to ribophorin I [Xenopus laevis]
  misc_feature (1)..(463): Homolog of NCBI NO: 40674542 NR Description: Unknown (protein for MGC:76266) [Silurana
  misc_feature (1)..(464): Homolog of NCBI NO: 15226341 NR Description: ribophorin I -related [Arabidopsis thaliana]
  misc_feature (14)..(464): Homolog of NCBI NO: 7489438 NR Description: ribophorin I homolog - barley (fragment)
  misc_feature (5)..(464): Homolog of NCBI NO: 15223039 NR Description: ribophorin I
  misc_feature (4)..(463): Homolog of NCBI NO: 28277278 NR Description: Similar to ribophorin I [Xenopus laevis]
  misc_feature (1)..(463): Homolog of NCBI NO: 40674542 NR Description: Unknown (protein for MGC:76266) [Silurana
  misc_feature (11)..(463): Homolog of NCBI NO: 28175644 NR Description: Similar to ribophorin I [Xenopus laevis]
  misc_feature (19)..(463): Homolog of NCBI NO: 4506675 NR Description: ribophorin I [Homo sapiens]
  misc_feature (19)..(463): Homolog of NCBI NO: 16359229 NR Description: ribophorin I [Mus musculus]
  misc_feature (1)..(463): Homolog of NCBI NO: 40674542 NR Description: Unknown (protein for MGC:76266) [Silurana
  misc_feature (4)..(463): Homolog of NCBI NO: 28277278 NR Description: Similar to ribophorin I [Xenopus laevis]
  misc_feature (5)..(464): Homolog of NCBI NO: 15223039 NR Description: ribophorin I
  misc_feature (14)..(464): Homolog of NCBI NO: 7489438 NR Description: ribophorin I homolog - barley (fragment)
  misc_feature (1)..(464): Homolog of NCBI NO: 15226341 NR Description: ribophorin I -related [Arabidopsis thaliana]

SEQ ID NO: 45509 - protein, 403 aa, Arabidopsis thaliana; identical to SEQ ID NO: 29032
  peptide (1)..(403): Ceres Seq. ID no. 15219007
  misc_feature (1)..(395): Pfam Name: Ribophorin I Pfam Description: Ribophorin I
  misc_feature (1)..(395): Pfam Name: Ribophorin I Pfam Description: Ribophorin I
  misc_feature (1)..(395): Pfam Name: Ribophorin I Pfam Description: Ribophorin I
  misc_feature (1)..(402): Homolog of NCBI NO: 31543605 NR Description: ribophorin I
  misc_feature (1)..(402): Homolog of NCBI NO: 16359229 NR Description: ribophorin I [Mus musculus]
  misc_feature (1)..(402): Homolog of NCBI NO: 9857227 NR Description: ribophorin I [Sus scrofa]
  misc_feature (1)..(402): Homolog of NCBI NO: 4506675 NR Description: ribophorin I [Homo sapiens]
  misc_feature (1)..(402): Homolog of NCBI NO: 28175644 NR Description: Similar to ribophorin I [Xenopus laevis]
  misc_feature (1)..(402): Homolog of NCBI NO: 31543605 NR Description: ribophorin I
  misc_feature (1)..(402): Homolog of NCBI NO: 9857227 NR Description: ribophorin I [Sus scrofa]
  misc_feature (1)..(402): Homolog of NCBI NO: 28175644 NR Description: Similar to ribophorin I [Xenopus laevis]
  misc_feature (1)..(402): Homolog of NCBI NO: 4506675 NR Description: ribophorin I [Homo sapiens]
  misc_feature (1)..(402): Homolog of NCBI NO: 9857227 NR Description: ribophorin I [Sus scrofa]
  misc_feature (1)..(402): Homolog of NCBI NO: 16359229 NR Description: ribophorin I [Mus musculus]
  misc_feature (1)..(402): Homolog of NCBI NO: 31543605 NR Description: ribophorin I
  misc_feature (1)..(403): Homolog of NCBI NO: 15226341 NR Description: ribophorin I -related [Arabidopsis thaliana]
  misc_feature (1)..(403): Homolog of NCBI NO: 7489438 NR Description: ribophorin I homolog - barley (fragment)
  misc_feature (1)..(403): Homolog of NCBI NO: 15223039 NR Description: ribophorin I
  misc_feature (1)..(402): Homolog of NCBI NO: 28277278 NR Description: Similar to ribophorin I [Xenopus laevis]
  misc_feature (1)..(402): Homolog of NCBI NO: 40674542 NR Description: Unknown (protein for MGC:76266) [Silurana
  misc_feature (1)..(403): Homolog of NCBI NO: 15226341 NR Description: ribophorin I -related [Arabidopsis thaliana]
  misc_feature (1)..(403): Homolog of NCBI NO: 7489438 NR Description: ribophorin I homolog - barley (fragment)
  misc_feature (1)..(403): Homolog of NCBI NO: 15223039 NR Description: ribophorin I
  misc_feature (1)..(402): Homolog of NCBI NO: 28277278 NR Description: Similar to ribophorin I [Xenopus laevis]
  misc_feature (1)..(402): Homolog of NCBI NO: 40674542 NR Description: Unknown (protein for MGC:76266) [Silurana
  misc_feature (1)..(402): Homolog of NCBI NO: 28175644 NR Description: Similar to ribophorin I [Xenopus laevis]
  misc_feature (1)..(402): Homolog of NCBI NO: 4506675 NR Description: ribophorin I [Homo sapiens]
  misc_feature (1)..(402): Homolog of NCBI NO: 16359229 NR Description: ribophorin I [Mus musculus]
  misc_feature (1)..(402): Homolog of NCBI NO: 40674542 NR Description: Unknown (protein for MGC:76266) [Silurana
  misc_feature (1)..(402): Homolog of NCBI NO: 28277278 NR Description: Similar to ribophorin I [Xenopus laevis]
  misc_feature (1)..(403): Homolog of NCBI NO: 15223039 NR Description: ribophorin I
  misc_feature (1)..(403): Homolog of NCBI NO: 7489438 NR Description: ribophorin I homolog - barley (fragment)
  misc_feature (1)..(403): Homolog of NCBI NO: 15226341 NR Description: ribophorin I -related [Arabidopsis thaliana]

SEQ ID NO: 45510 - protein, 389 aa, Arabidopsis thaliana; identical to SEQ ID NO: 29033
  peptide (1)..(389): Ceres Seq. ID no. 15219008
  misc_feature (1)..(381): Pfam Name: Ribophorin I Pfam Description: Ribophorin I
  misc_feature (1)..(381): Pfam Name: Ribophorin I Pfam Description: Ribophorin I
  misc_feature (1)..(381): Pfam Name: Ribophorin I Pfam Description: Ribophorin I
  misc_feature (1)..(388): Homolog of NCBI NO: 31543605 NR Description: ribophorin I
  misc_feature (1)..(388): Homolog of NCBI NO: 16359229 NR Description: ribophorin I [Mus musculus]
  misc_feature (1)..(388): Homolog of NCBI NO: 9857227 NR Description: ribophorin I [Sus scrofa]
  misc_feature (1)..(388): Homolog of NCBI NO: 4506675 NR Description: ribophorin I [Homo sapiens]
  misc_feature (1)..(388): Homolog of NCBI NO: 28175644 NR Description: Similar to ribophorin I [Xenopus laevis]
  misc_feature (1)..(388): Homolog of NCBI NO: 31543605 NR Description: ribophorin I
  misc_feature (1)..(388): Homolog of NCBI NO: 9857227 NR Description: ribophorin I [Sus scrofa]
  misc_feature (1)..(388): Homolog of NCBI NO: 28175644 NR Description: Similar to ribophorin I [Xenopus laevis]
  misc_feature (1)..(388): Homolog of NCBI NO: 4506675 NR Description: ribophorin I [Homo sapiens]
  misc_feature (1)..(388): Homolog of NCBI NO: 9857227 NR Description: ribophorin I [Sus scrofa]
  misc_feature (1)..(388): Homolog of NCBI NO: 16359229 NR Description: ribophorin I [Mus musculus]
  misc_feature (1)..(388): Homolog of NCBI NO: 31543605 NR Description: ribophorin I
  misc_feature (1)..(389): Homolog of NCBI NO: 15226341 NR Description: ribophorin I -related [Arabidopsis thaliana]
  misc_feature (1)..(389): Homolog of NCBI NO: 7489438 NR Description: ribophorin I homolog - barley (fragment)
  misc_feature (1)..(389): Homolog of NCBI NO: 15223039 NR Description: ribophorin I
  misc_feature (1)..(388): Homolog of NCBI NO: 28277278 NR Description: Similar to ribophorin I [Xenopus laevis]
  misc_feature (1)..(388): Homolog of NCBI NO: 40674542 NR Description: Unknown (protein for MGC:76266) [Silurana
  misc_feature (1)..(389): Homolog of NCBI NO: 15226341 NR Description: ribophorin I -related [Arabidopsis thaliana]
  misc_feature (1)..(389): Homolog of NCBI NO: 7489438 NR Description: ribophorin I homolog - barley (fragment)
  misc_feature (1)..(389): Homolog of NCBI NO: 15223039 NR Description: ribophorin I
  misc_feature (1)..(388): Homolog of NCBI NO: 28277278 NR Description: Similar to ribophorin I [Xenopus laevis]
  misc_feature (1)..(388): Homolog of NCBI NO: 40674542 NR Description: Unknown (protein for MGC:76266) [Silurana
  misc_feature (1)..(388): Homolog of NCBI NO: 28175644 NR Description: Similar to ribophorin I [Xenopus laevis]
  misc_feature (1)..(388): Homolog of NCBI NO: 4506675 NR Description: ribophorin I [Homo sapiens]
  misc_feature (1)..(388): Homolog of NCBI NO: 16359229 NR Description: ribophorin I [Mus musculus]
  misc_feature (1)..(388): Homolog of NCBI NO: 40674542 NR Description: Unknown (protein for MGC:76266) [Silurana
  misc_feature (1)..(388): Homolog of NCBI NO: 28277278 NR Description: Similar to ribophorin I [Xenopus laevis]
  misc_feature (1)..(389): Homolog of NCBI NO: 15223039 NR Description: ribophorin I
  misc_feature (1)..(389): Homolog of NCBI NO: 7489438 NR Description: ribophorin I homolog - barley (fragment)
  misc_feature (1)..(389): Homolog of NCBI NO: 15226341 NR Description: ribophorin I -related [Arabidopsis thaliana]

SEQ ID NO: 45511 - DNA, 1645 bp, Arabidopsis thaliana; identical to SEQ ID NO: 35802
  misc_feature (1)..(1645): Ceres Seq. ID no. 13593234
  misc_feature: MA Experiment ID: 108462 Result: Up-regulated in Transcription
  misc_feature: MA Experiment 108462 PARAMETER Experiment Name: At_Germinating_Seeds_cDNA_P Parameter: Age (day) Value: 2 vs. 0
  misc_feature: MA Experiment 108462 PARAMETER Experiment Name: At_Germinating_Seeds_cDNA_P Parameter: Tissue Value: Germinating Seeds
  misc_feature: MA Experiment ID: 20000089 Result: Down-regulated in Transcription
  misc_feature: MA Experiment ID: 20000180 Result: Up-regulated in Transcription
  misc_feature: MA Experiment 20000180 PARAMETER Experiment Name: At_Germinating_Seeds_P Parameter: Age (hr) Value: 24 vs. 0
  misc_feature: MA Experiment 20000180 PARAMETER Experiment Name: At_Germinating_Seeds_P Parameter: Tissue Value: Germinating Seeds
  misc_feature: MA Experiment ID: 20000185 Result: Down-regulated in Transcription
  misc_feature: MA Experiment 20000185 PARAMETER Experiment Name: At_Roots__P Parameter: Age (day) Value: 7 vs. 21
  misc_feature: MA Experiment 20000185 PARAMETER Experiment Name: At_Roots__P Parameter: Organism Value: A. thaliana
  misc_feature: MA Experiment 20000185 PARAMETER Experiment Name: At_Roots__P Parameter: Tissue Value: Roots vs. Whole Plant
  misc_feature: MA Experiment ID: 20000227 Result: Down-regulated in Transcription
  misc_feature: MA Experiment 20000227 PARAMETER Experiment Name: At_Root-Tips-vs-Tops_P Parameter: Tissue Value: Root Tips vs. Root Tops
  misc_feature: MA Experiment ID: 20000438 Result: Up-regulated in Transcription
  misc_feature: MA Experiment 20000438 PARAMETER Experiment Name: At_Shoots__P Parameter: Age (day) Value: 14
  misc_feature: MA Experiment 20000438 PARAMETER Experiment Name: At_Shoots__P Parameter: Tissue Value: Shoots vs. Whole Plant
  misc_feature: MA Experiment ID: 20000439 Result: Down-regulated in Transcription
  misc_feature: MA Experiment 20000439 PARAMETER Experiment Name: At_Roots__P Parameter: Age (day) Value: 14 vs. 21
  misc_feature: MA Experiment 20000439 PARAMETER Experiment Name: At_Roots__P Parameter: Organism Value: A. thaliana
  misc_feature: MA Experiment 20000439 PARAMETER Experiment Name: At_Roots__P Parameter: Tissue Value: Roots vs. Whole Plant
  misc_feature: MA Experiment ID: 20001248 Result: Down-regulated in Transcription
  misc_feature: MA Experiment 20001248 PARAMETER Experiment Name: At_Far-red-induction_P Parameter: Age (day) Value: 7
  misc_feature: MA Experiment 20001248 PARAMETER Experiment Name: At_Far-red-induction_P Parameter: Light Value: Far-red vs. White
  misc_feature: MA Experiment 20001248 PARAMETER Experiment Name: At_Far-red-induction_P Parameter: Organism Value: A. thaliana
  misc_feature: MA Experiment 20001248 PARAMETER Experiment Name: At_Far-red-induction_P Parameter: Plant Line Value: Columbia
  misc_feature: MA Experiment 20001248 PARAMETER Experiment Name: At_Far-red-induction_P Parameter: Timepoint (hr) Value: 4
  misc_feature: MA Experiment 20001248 PARAMETER Experiment Name: At_Far-red-induction_P Parameter: Tissue Value: Whole Plant
  misc_feature: MA Experiment ID: 20001450 Result: Down-regulated in Transcription
  misc_feature: MA Experiment 20001450 PARAMETER Experiment Name: At_Far-red-induction_P Parameter: Age (day) Value: 7
  misc_feature: MA Experiment 20001450 PARAMETER Experiment Name: At_Far-red-induction_P Parameter: Light Value: Far-red vs. White
  misc_feature: MA Experiment 20001450 PARAMETER Experiment Name: At_Far-red-induction_P Parameter: Organism Value: A. thaliana
  misc_feature: MA Experiment 20001450 PARAMETER Experiment Name: At_Far-red-induction_P Parameter: Plant Line Value: Columbia
  misc_feature: MA Experiment 20001450 PARAMETER Experiment Name: At_Far-red-induction_P Parameter: Timepoint (hr) Value: 8
  misc_feature: MA Experiment 20001450 PARAMETER Experiment Name: At_Far-red-induction_P Parameter: Tissue Value: Whole Plant

SEQ ID NO: 45512 - protein, 443 aa, Arabidopsis thaliana; identical to SEQ ID NO: 25547
  peptide (1)..(443): Ceres Seq. ID no. 13593235
  misc_feature (251)..(423): Pfam Name: lactate/malate dehydrogenase, alpha/beta Pfam Description: lactate/malate dehydrogenase, alpha/beta
  misc_feature (251)..(423): Pfam Name: lactate/malate dehydrogenase, alpha/beta Pfam Description: lactate/malate dehydrogenase, alpha/beta
  misc_feature (52)..(443): Homolog of NCBI NO: 7546191 NR Description: Chain A, Chloroplast Nadp-Dependent Malate
  misc_feature (45)..(443): Homolog of NCBI NO: 726334 NR Description: NADP-malate dehydrogenase
  misc_feature (7)..(443): Homolog of NCBI NO: 1170895 NR Description: Malate dehydrogenase [NADP], chloroplast
  misc_feature (1)..(443): Homolog of NCBI NO: 462578 NR Description: Malate dehydrogenase [NADP], chloroplast
  misc_feature (1)..(443): Homolog of NCBI NO: 462579 NR Description: Malate dehydrogenase [NADP], chloroplast
  misc_feature (52)..(443): Homolog of NCBI NO: 7546191 NR Description: Chain A, Chloroplast Nadp-Dependent Malate
  misc_feature (7)..(443): Homolog of NCBI NO: 1170895 NR Description: Malate dehydrogenase [NADP], chloroplast
  misc_feature (1)..(443): Homolog of NCBI NO: 462579 NR Description: Malate dehydrogenase [NADP], chloroplast
  misc_feature (1)..(443): Homolog of NCBI NO: 30697049 NR Description: malate dehydrogenase
  misc_feature (1)..(443): Homolog of NCBI NO: 18377751 NR Description: putative NADP-dependent malate dehydrogenase
  misc_feature (1)..(443): Homolog of NCBI NO: 30697051 NR Description: malate dehydrogenase
  misc_feature (3)..(443): Homolog of NCBI NO: 21554349 NR Description: NADP-dependent malate dehydrogenase [Arabidopsis
  misc_feature (1)..(443): Homolog of NCBI NO: 11133370 NR Description: Malate dehydrogenase [NADP], chloroplast
  misc_feature (1)..(443): Homolog of NCBI NO: 462578 NR Description: Malate dehydrogenase [NADP], chloroplast
  misc_feature (45)..(443): Homolog of NCBI NO: 726334 NR Description: NADP-malate dehydrogenase
  misc_feature (1)..(443): Homolog of NCBI NO: 11133370 NR Description: Malate dehydrogenase [NADP], chloroplast
  misc_feature (3)..(443): Homolog of NCBI NO: 21554349 NR Description: NADP-dependent malate dehydrogenase [Arabidopsis
  misc_feature (1)..(443): Homolog of NCBI NO: 30697051 NR Description: malate dehydrogenase
  misc_feature (1)..(443): Homolog of NCBI NO: 18377751 NR Description: putative NADP-dependent malate dehydrogenase
  misc_feature (1)..(443): Homolog of NCBI NO: 30697049 NR Description: malate dehydrogenase

SEQ ID NO: 45513 - protein, 441 aa, Arabidopsis thaliana; identical to SEQ ID NO: 25548
  peptide (1)..(441): Ceres Seq. ID no. 13593236
  misc_feature (249)..(421): Pfam Name: lactate/malate dehydrogenase, alpha/beta Pfam Description: lactate/malate dehydrogenase, alpha/beta
  misc_feature (249)..(421): Pfam Name: lactate/malate dehydrogenase, alpha/beta Pfam Description: lactate/malate dehydrogenase, alpha/beta
  misc_feature (50)..(441): Homolog of NCBI NO: 7546191 NR Description: Chain A, Chloroplast Nadp-Dependent Malate
  misc_feature (43)..(441): Homolog of NCBI NO: 726334 NR Description: NADP-malate dehydrogenase
  misc_feature (5)..(441): Homolog of NCBI NO: 1170895 NR Description: Malate dehydrogenase [NADP], chloroplast
  misc_feature (1)..(441): Homolog of NCBI NO: 462578 NR Description: Malate dehydrogenase [NADP], chloroplast
  misc_feature (1)..(441): Homolog of NCBI NO: 462579 NR Description: Malate dehydrogenase [NADP], chloroplast
  misc_feature (50)..(441): Homolog of NCBI NO: 7546191 NR Description: Chain A, Chloroplast Nadp-Dependent Malate
  misc_feature (5)..(441): Homolog of NCBI NO: 1170895 NR Description: Malate dehydrogenase [NADP], chloroplast
  misc_feature (1)..(441): Homolog of NCBI NO: 462579 NR Description: Malate dehydrogenase [NADP], chloroplast
  misc_feature (1)..(441): Homolog of NCBI NO: 30697049 NR Description: malate dehydrogenase
  misc_feature (1)..(441): Homolog of NCBI NO: 18377751 NR Description: putative NADP-dependent malate dehydrogenase
  misc_feature (1)..(441): Homolog of NCBI NO: 30697051 NR Description: malate dehydrogenase
  misc_feature (1)..(441): Homolog of NCBI NO: 21554349 NR Description: NADP-dependent malate dehydrogenase [Arabidopsis
  misc_feature (1)..(441): Homolog of NCBI NO: 11133370 NR Description: Malate dehydrogenase [NADP], chloroplast
  misc_feature (1)..(441): Homolog of NCBI NO: 462578 NR Description: Malate dehydrogenase [NADP], chloroplast
  misc_feature (43)..(441): Homolog of NCBI NO: 726334 NR Description: NADP-malate dehydrogenase
  misc_feature (1)..(441): Homolog of NCBI NO: 11133370 NR Description: Malate dehydrogenase [NADP], chloroplast
  misc_feature (1)..(441): Homolog of NCBI NO: 21554349 NR Description: NADP-dependent malate dehydrogenase [Arabidopsis
  misc_feature (1)..(441): Homolog of NCBI NO: 30697051 NR Description: malate dehydrogenase
  misc_feature (1)..(441): Homolog of NCBI NO: 18377751 NR Description: putative NADP-dependent malate dehydrogenase
  misc_feature (1)..(441): Homolog of NCBI NO: 30697049 NR Description: malate dehydrogenase

SEQ ID NO: 45514 - protein, 334 aa, Arabidopsis thaliana; identical to SEQ ID NO: 25549
  peptide (1)..(334): Ceres Seq. ID no. 13593237
  misc_feature (142)..(314): Pfam Name: lactate/malate dehydrogenase, alpha/beta Pfam Description: lactate/malate dehydrogenase, alpha/beta
  misc_feature (142)..(314): Pfam Name: lactate/malate dehydrogenase, alpha/beta Pfam Description: lactate/malate dehydrogenase, alpha/beta
  misc_feature (1)..(334): Homolog of NCBI NO: 7546191 NR Description: Chain A, Chloroplast Nadp-Dependent Malate
  misc_feature (1)..(334): Homolog of NCBI NO: 726334 NR Description: NADP-malate dehydrogenase
  misc_feature (1)..(334): Homolog of NCBI NO: 1170895 NR Description: Malate dehydrogenase [NADP], chloroplast
  misc_feature (1)..(334): Homolog of NCBI NO: 462578 NR Description: Malate dehydrogenase [NADP], chloroplast
  misc_feature (1)..(334): Homolog of NCBI NO: 462579 NR Description: Malate dehydrogenase [NADP], chloroplast
  misc_feature (1)..(334): Homolog of NCBI NO: 7546191 NR Description: Chain A, Chloroplast Nadp-Dependent Malate
  misc_feature (1)..(334): Homolog of NCBI NO: 1170895 NR Description: Malate dehydrogenase [NADP], chloroplast
  misc_feature (1)..(334): Homolog of NCBI NO: 462579 NR Description: Malate dehydrogenase [NADP], chloroplast
  misc_feature (1)..(334): Homolog of NCBI NO: 30697049 NR Description: malate dehydrogenase
  misc_feature (1)..(334): Homolog of NCBI NO: 18377751 NR Description: putative NADP-dependent malate dehydrogenase
  misc_feature (1)..(334): Homolog of NCBI NO: 30697051 NR Description: malate dehydrogenase
  misc_feature (1)..(334): Homolog of NCBI NO: 21554349 NR Description: NADP-dependent malate dehydrogenase [Arabidopsis
  misc_feature (1)..(334): Homolog of NCBI NO: 11133370 NR Description: Malate dehydrogenase [NADP], chloroplast
  misc_feature (1)..(334): Homolog of NCBI NO: 462578 NR Description: Malate dehydrogenase [NADP], chloroplast
  misc_feature (1)..(334): Homolog of NCBI NO: 726334 NR Description: NADP-malate dehydrogenase
  misc_feature (1)..(334): Homolog of NCBI NO: 11133370 NR Description: Malate dehydrogenase [NADP], chloroplast
  misc_feature (1)..(334): Homolog of NCBI NO: 21554349 NR Description: NADP-dependent malate dehydrogenase [Arabidopsis
  misc_feature (1)..(334): Homolog of NCBI NO: 30697051 NR Description: malate dehydrogenase
  misc_feature (1)..(334): Homolog of NCBI NO: 18377751 NR Description: putative NADP-dependent malate dehydrogenase
  misc_feature (1)..(334): Homolog of NCBI NO: 30697049 NR Description: malate dehydrogenase

SEQ ID NO: 45515 - DNA, 1810 bp, Arabidopsis thaliana
  misc_feature (1)..(1810): Ceres Seq. ID no. 13575681
  misc_feature: MA Experiment ID: 20000329 Result: Down-regulated in Transcription
  misc_feature: MA Experiment 20000329 PARAMETER Experiment Name: At_4deg_Cold_Sub_P Parameter: Age (day) Value: 14
  misc_feature: MA Experiment 20000329 PARAMETER Experiment Name: At_4deg_Cold_Sub_P Parameter: Organism Value: A. thaliana
  misc_feature: MA Experiment 20000329 PARAMETER Experiment Name: At_4deg_Cold_Sub_P Parameter: Plant Line Value: WS
  misc_feature: MA Experiment 20000329 PARAMETER Experiment Name: At_4deg_Cold_Sub_P Parameter: Temperature (deg C) Value: 4 vs. 22
  misc_feature: MA Experiment 20000329 PARAMETER Experiment Name: At_4deg_Cold_Sub_P Parameter: Timepoint (hr) Value: 6
  misc_feature: MA Experiment 20000329 PARAMETER Experiment Name: At_4deg_Cold_Sub_P Parameter: Tissue Value: Aerial
  misc_feature: MA Experiment ID: 20000355 Result: Down-regulated in Transcription
  misc_feature: MA Experiment 20000355 PARAMETER Experiment Name: At_Siliques_Sub_P Parameter: Age (day) Value: 21
  misc_feature: MA Experiment 20000355 PARAMETER Experiment Name: At_Siliques_Sub_P Parameter: Organism Value: A. thaliana
  misc_feature: MA Experiment 20000355 PARAMETER Experiment Name: At_Siliques_Sub_P Parameter: Plant Line Value: WS
  misc_feature: MA Experiment 20000355 PARAMETER Experiment Name: At_Siliques_Sub_P Parameter: Tissue Value: Less Than 5mm Siliques vs. Whole Plant
ggtctcactctctctcccattgatcttcttcctcggctacatctcccgacgcctctctctcgttccgattttggtttaatatttgatgggaacatcatctggttcgaatcatcctcaccaaatgttaccaccacgtcaacaacaacgaagtggaggaggacttgaaacagctctttcactagtctcttcagatcaagagccgcgtcgcgagtctccagcggagagtgcgagttctcaagaaacatggccactaggagacactgttgctgggaagaagtcaatgagtcaaaagacagagcctgattctatggaacaaactgtgaatgtgatgcaccatgtttcgaatgcggacaaggtatcggtacgggatatcgctagggaaagagttgagttagttgcagagagaatgcatcgattaccggatgagtttcttgacgagttaaagaacggtcttaagtctatccttgaagggaatgtagcgcagagtgttgatgagttcatgttcttgcagaaggttgttcagagtagaactgatttgagctctgtaacacttgttagagctcatcgggtgcagcttgagatacttgtagcgataaataccgggattcaggcgtttttgcatccgaatattagtctgtctcagccgtctcttatcgagatttttgtatacaagagatgtagaaacatagcttgccaaaatcaactacctgctgatgattgctactgtgatatatgtactaataggaaagggttttgtaacctttgtatgtgtacgatctgtaacaagtttgatttttcggttaatacttgccgctggatcggatgtgacttgtgttcccactggactcatacggattgtgctattcgggatggacagatcaccactggatcctctgctaagaataatacttcaggtccaggagagatagtgtttaagtgtcgggcttgtaaccgaacgtctgagctgttgggatgggttaaagatgtgtttcagcactgtgcaccgaactgggatcgagaatctttgatgaaggaacttgattttgttagtaggattttccgcggaagcgaagatcaacgaggtaggaaactgttttggaagtgtgaggagcttattgacaagattaaaggtggtttggctgaagcaactgctgccaaattgatattaatgtttttccaagagatcgaatcagactctgcgaagagctttgaaaatggagaaggtggacgtttgatggcacctcaggatgcatgcaaccgaattgctgaagttgtacaagagactttgaggaaaatggagatagtggctgaggagaagatgagaatgttcaagaaggcacgcatggctcttgagacatgcgatagagagctcgaagacaaagccaaggaagtttcagaactgaaagcagagaggcagaagaagaaacttcagatagatgagctagagagaatcgtgaggctgaagcaagcggaggcagacatgttccagcttaaagcaaatgaagcaaagcgggaggctgataggttgcagaggattgtactagcgaaaatggataagtctgaggaggaatacgcaagtaactatctgaaacagaggctgagtgaggccgaggcagagaagcagtatctgtttgagaagattaagctgcaggaaaactcaagggtggcatcacaaagcagtggtgggggaggagacccgtcacaggtgatgatgtactcaaagatccgcgatctgcttcaaggatacaatctctctcccaaggttgatcctcaattaaacgagcgtaatcctttcagatccaatccctaa

SEQ ID NO: 45516 - protein, 574 aa, Arabidopsis thaliana
  peptide (1)..(574): Ceres Seq. ID no. 13575682
  misc_feature (319)..(526): Pfam Name: Myosin tail Pfam Description: Myosin tail
  misc_feature (391)..(526): Homolog of NCBI NO: 33339558 NR Description: ABRH1 [Marsilea quadrifolia]
  misc_feature (73)..(527): Homolog of NCBI NO: 18394157 NR Description: expressed protein [Arabidopsis thaliana]
  misc_feature (93)..(526): Homolog of NCBI NO: 15229445 NR Description: expressed protein [Arabidopsis thaliana]
  misc_feature (93)..(526): Homolog of NCBI NO: 30695820 NR Description: expressed protein [Arabidopsis thaliana]
  misc_feature (93)..(526): Homolog of NCBI NO: 28973711 NR Description: unknown protein [Arabidopsis thaliana]
  misc_feature (73)..(525): Homolog of NCBI NO: 25402780 NR Description: protein F10B6.14 [imported] - Arabidopsis
  misc_feature (13)..(552): Homolog of NCBI NO: 30385711 NR Description: Potyvirus VPg interacting protein [Nicotiana
  misc_feature (55)..(574): Homolog of NCBI NO: 30385713 NR Description: Potyvirus VPg interacting protein [Pisum sativum]
  misc_feature (1)..(574): Homolog of NCBI NO: 18398053 NR Description: expressed protein [Arabidopsis thaliana]
  misc_feature (1)..(574): Homolog of NCBI NO: 15238905 NR Description: expressed protein [Arabidopsis thaliana]
MGTSSGSNHPHQMLPPRQQQRSGGGLETALSLVSSDQEPRRESPAESASSQETWPLGDTVAGKKSMSQKTEPDSMEQTVNVMHHVSNADKVSVRDIARERVELVAERMHRLPDEFLDELKNGLKSILEGNVAQSVDEFMFLQKVVQSRTDLSSVTLVRAHRVQLEILVAINTGIQAFLHPNISLSQPSLIEIFVYKRCRNIACQNQLPADDCYCDICTNRKGFCNLCMCTICNKFDFSVNTCRWIGCDLCSHWTHTDCAIRDGQITTGSSAKNNTSGPGEIVFKCRACNRTSELLGWVKDVFQHCAPNWDRESLMKELDFVSRIFRGSEDQRGRKLFWKCEELIDKIKGGLAEATAAKLILMFFQEIESDSAKSFENGEGGRLMAPQDACNRIAEVVQETLRKMEIVAEEKMRMFKKARMALETCDRELEDKAKEVSELKAERQKKKLQIDELERIVRLKQAEADMFQLKANEAKREADRLQRIVLAKMDKSEEEYASNYLKQRLSEAEAEKQYLFEKIKLQENSRVASQSSGGGGDPSQVMMYSKIRDLLQGYNLSPKVDPQLNERNPFRSNP

SEQ ID NO: 45517 - protein, 562 aa, Arabidopsis thaliana
  peptide (1)..(562): Ceres Seq. ID no. 13575683
  misc_feature (307)..(514): Pfam Name: Myosin tail Pfam Description: Myosin tail
  misc_feature (379)..(514): Homolog of NCBI NO: 33339558 NR Description: ABRH1 [Marsilea quadrifolia]
  misc_feature (61)..(515): Homolog of NCBI NO: 18394157 NR Description: expressed protein [Arabidopsis thaliana]
  misc_feature (81)..(514): Homolog of NCBI NO: 15229445 NR Description: expressed protein [Arabidopsis thaliana]
  misc_feature (81)..(514): Homolog of NCBI NO: 30695820 NR Description: expressed protein [Arabidopsis thaliana]
  misc_feature (81)..(514): Homolog of NCBI NO: 28973711 NR Description: unknown protein [Arabidopsis thaliana]
  misc_feature (61)..(513): Homolog of NCBI NO: 25402780 NR Description: protein F10B6.14 [imported] - Arabidopsis
  misc_feature (1)..(540): Homolog of NCBI NO: 30385711 NR Description: Potyvirus VPg interacting protein [Nicotiana
  misc_feature (43)..(562): Homolog of NCBI NO: 30385713 NR Description: Potyvirus VPg interacting protein [Pisum sativum]
  misc_feature (1)..(562): Homolog of NCBI NO: 18398053 NR Description: expressed protein [Arabidopsis thaliana]
  misc_feature (1)..(562): Homolog of NCBI NO: 15238905 NR Description: expressed protein [Arabidopsis thaliana]
MLPPRQQQRSGGGLETALSLVSSDQEPRRESPAESASSQETWPLGDTVAGKKSMSQKTEPDSMEQTVNVMHHVSNADKVSVRDIARERVELVAERMHRLPDEFLDELKNGLKSILEGNVAQSVDEFMFLQKVVQSRTDLSSVTLVRAHRVQLEILVAINTGIQAFLHPNISLSQPSLIEIFVYKRCRNIACQNQLPADDCYCDICTNRKGFCNLCMCTICNKFDFSVNTCRWIGCDLCSHWTHTDCAIRDGQITTGSSAKNNTSGPGEIVFKCRACNRTSELLGWVKDVFQHCAPNWDRESLMKELDFVSRIFRGSEDQRGRKLFWKCEELIDKIKGGLAEATAAKLILMFFQEIESDSAKSFENGEGGRLMAPQDACNRIAEVVQETLRKMEIVAEEKMRMFKKARMALETCDRELEDKAKEVSELKAERQKKKLQIDELERIVRLKQAEADMFQLKANEAKREADRLQRIVLAKMDKSEEEYASNYLKQRLSEAEAEKQYLFEKIKLQENSRVASQSSGGGGDPSQVMMYSKIRDLLQGYNLSPKVDPQLNERNPFRSNP

SEQ ID NO: 45518 - protein, 509 aa, Arabidopsis thaliana
  peptide (1)..(509): Ceres Seq. ID no. 13575684
  misc_feature (254)..(461): Pfam Name: Myosin tail Pfam Description: Myosin tail
  misc_feature (326)..(461): Homolog of NCBI NO: 33339558 NR Description: ABRH1 [Marsilea quadrifolia]
  misc_feature (8)..(462): Homolog of NCBI NO: 18394157 NR Description: expressed protein [Arabidopsis thaliana]
  misc_feature (28)..(461): Homolog of NCBI NO: 15229445 NR Description: expressed protein [Arabidopsis thaliana]
  misc_feature (28)..(461): Homolog of NCBI NO: 30695820 NR Description: expressed protein [Arabidopsis thaliana]
  misc_feature (28)..(461): Homolog of NCBI NO: 28973711 NR Description: unknown protein [Arabidopsis thaliana]
  misc_feature (8)..(460): Homolog of NCBI NO: 25402780 NR Description: protein F10B6.14 [imported] - Arabidopsis
  misc_feature (1)..(487): Homolog of NCBI NO: 30385711 NR Description: Potyvirus VPg interacting protein [Nicotiana
  misc_feature (1)..(509): Homolog of NCBI NO: 30385713 NR Description: Potyvirus VPg interacting protein [Pisum sativum]
  misc_feature (1)..(509): Homolog of NCBI NO: 18398053 NR Description: expressed protein [Arabidopsis thaliana]
  misc_feature (1)..(509): Homolog of NCBI NO: 15238905 NR Description: expressed protein [Arabidopsis thaliana]
MSQKTEPDSMEQTVNVMHHVSNADKVSVRDIARERVELVAERMHRLPDEFLDELKNGLKSILEGNVAQSVDEFMFLQKVVQSRTDLSSVTLVRAHRVQLEILVAINTGIQAFLHPNISLSQPSLIEIFVYKRCRNIACQNQLPADDCYCDICTNRKGFCNLCMCTICNKFDFSVNTCRWIGCDLCSHWTHTDCAIRDGQITTGSSAKNNTSGPGEIVFKCRACNRTSELLGWVKDVFQHCAPNWDRESLMKELDFVSRIFRGSEDQRGRKLFWKCEELIDKIKGGLAEATAAKLILMFFQEIESDSAKSFENGEGGRLMAPQDACNRIAEVVQETLRKMEIVAEEKMRMFKKARMALETCDRELEDKAKEVSELKAERQKKKLQIDELERIVRLKQAEADMFQLKANEAKREADRLQRIVLAKMDKSEEEYASNYLKQRLSEAEAEKQYLFEKIKLQENSRVASQSSGGGGDPSQVMMYSKIRDLLQGYNLSPKVDPQLNERNPFRSNP

SEQ ID NO: 45519 - DNA, 1729 bp, Arabidopsis thaliana
  misc_feature (1)..(1729): Ceres Seq. ID no. 13576740
  misc_feature: MA Experiment ID: 20001560 Result: Down-regulated in Transcription
  misc_feature: MA Experiment 20001560 PARAMETER Experiment Name: At_Drought_Soil_Dry_P Parameter: Age (day) Value: 28
  misc_feature: MA Experiment 20001560 PARAMETER Experiment Name: At_Drought_Soil_Dry_P Parameter: Organism Value: A. thaliana
  misc_feature: MA Experiment 20001560 PARAMETER Experiment Name: At_Drought_Soil_Dry_P Parameter: Plant Line Value: WS
  misc_feature: MA Experiment 20001560 PARAMETER Experiment Name: At_Drought_Soil_Dry_P Parameter: Post Timepoint (hr) Value: None
  misc_feature: MA Experiment 20001560 PARAMETER Experiment Name: At_Drought_Soil_Dry_P Parameter: Post-Treatment Value: None
  misc_feature: MA Experiment 20001560 PARAMETER Experiment Name: At_Drought_Soil_Dry_P Parameter: Timepoint (day) Value: 14
  misc_feature: MA Experiment 20001560 PARAMETER Experiment Name: At_Drought_Soil_Dry_P Parameter: Treatment Value: Drought vs. No Drought
  misc_feature: MA Experiment ID: 20001905 Result: Down-regulated in Transcription
  misc_feature: MA Experiment 20001905 PARAMETER Experiment Name: At_Drought_Reproduction_P Parameter: Age (day) Value: 40
  misc_feature: MA Experiment 20001905 PARAMETER Experiment Name: At_Drought_Reproduction_P Parameter: Organism Value: A. thaliana
  misc_feature: MA Experiment 20001905 PARAMETER Experiment Name: At_Drought_Reproduction_P Parameter: Plant Line Value: WS
  misc_feature: MA Experiment 20001905 PARAMETER Experiment Name: At_Drought_Reproduction_P Parameter: Timepoint (day) Value: 10
  misc_feature: MA Experiment 20001905 PARAMETER Experiment Name: At_Drought_Reproduction_P Parameter: Tissue Value: Rosettes
  misc_feature: MA Experiment 20001905 PARAMETER Experiment Name: At_Drought_Reproduction_P Parameter: Treatment Value: Drought vs. No Drought
gacaagccatgtgcttcgggtgtgatccagtggagatatcgagggaacgcaaaggtaggggccagattctgtagtaccttcttcgcctacctactctctttcccgaatttatttgccggcggtgatcaatcagaacgggattttagcctgagtaatcggtcactgggaagagaatttcgacggtgagagaagatgaagatatttgtgaaaactctcaaggggactcacttcgagatcgaagtaaaacccgaggattcggttgttgatgtgaagaagaacatagagagtgtgcagggcgcagatgtgtatcctgctgcaaaacagatgcttattcaccaaggtaaagtgcttaaagatgagacaactattgaggaaaacaaagttgctgagaacagttttattgtcattatgatgaacaagagtaaacctgcttcagctgcagcatctagtgcatctgctggcacatcgcaggccaagtcgatacctccctcaacatcacagccttcaatttcccctcagactccagcttctgtatcagcaccagtggcacctgcaccaacacgtccaccaccacctgcaccgacaccgacacctgcacctgtagctgcaactgaaactgtgactacccctatacctgaacctgtacctgctactatatcatcaagcactcctgcaccagactcagctcctgtgggaagtcaaggtgatgtttacggacaagcagcatcaaatctagccgctggaagtaatttagagagtaccattcagcagattcttgacatgggtggaggaacctgggatcgtgagactgttgtccttgcacttcgtgctgcatttaacaaccctgaaagagctgtggaatatctttatactgggatccctgagcaagctgaagttccaccagttgcccgtcctccagctagtgccggacagcctgcaaatcctccagcacagactcaacaacctgcagcagcacccgcaagtggtcctaatgcaaatccgttagatctcttcccacagggcttgccaaatgttggaggaaatcctggtgctggaacacttgacttcttgcgcaacagccaacagttccaagctctgcgagcaatggtgcaagcaaaccctcaagttctgcagcccatgcttcaggaactgggaaaacagaacccaaacttgatgcggttgattcaagaccaccaagctgacttcttacgcttaatcaatgaacccgttgaaggagggggagaaagtggcaacctccttggccaaatggcggcgggaatgccacagccacaggcgattcaagtcacacatgaggaacgtgaagccattgaacggcttgaagcgatgggatttgagagagcattggtgttggaagtgttctttgcgtgcaacaagaatgaagagttggctgcaaactatcttctagatcacatgcatgaattcgaggaataagcttcttcagattactttacctactctctatctttcgcattggtccatatgttttagctatatatgtgtgggatgccaaatccatgacctcgtcactttgtccatgttcatggctcagttctcagtttaaaatgaagtttgtcatgtgttctttctttgtattgtcgttagtccttacaaaatatcttgttccagttatttttgttgaattggggacaggtattatttctgtatgtgcctaaatagtaaaattattaaattataaataatttttttt

SEQ ID NO: 45520 - protein, 419 aa, Arabidopsis thaliana
  peptide (1)..(419): Ceres Seq. ID no. 13576741
  misc_feature (1)..(79): Pfam Name: Ubiquitin family Pfam Description: Ubiquitin family
  misc_feature (107)..(419): Homolog of NCBI NO: 7446462 NR Description: RAD23 protein homolog - rice
  misc_feature (1)..(87): Homolog of NCBI NO: 25387250 NR Description: protein F20B17.8 [imported] - Arabidopsis
  misc_feature (172)..(419): Homolog of NCBI NO: 25387250 NR Description: protein F20B17.8 [imported] - Arabidopsis
  misc_feature (139)..(419): Homolog of NCBI NO: 5640111 NR Description: RAD23 protein [Lycopersicon esculentum]
  misc_feature (101)..(418): Homolog of NCBI NO: 7446459 NR Description: RAD23 protein, isoform I - carrot
  misc_feature (51)..(419): Homolog of NCBI NO: 14335004 NR Description: unknown protein [Arabidopsis thaliana]
  misc_feature (51)..(419): Homolog of NCBI NO: 15240922 NR Description: DNA repair protein RAD23, putative [Arabidopsis
  misc_feature (1)..(419): Homolog of NCBI NO: 38175472 NR Description: putative osRAD23 [Oryza sativa (japonica
  misc_feature (140)..(419): Homolog of NCBI NO: 30409726 NR Description: RAD23-like protein [Arabidopsis thaliana]
  misc_feature (1)..(419): Homolog of NCBI NO: 15232924 NR Description: RAD23 -related [Arabidopsis thaliana]
MKIFVKTLKGTHFEIEVKPEDSVVDVKKNIESVQGADVYPAAKQMLIHQGKVLKDETTIEENKVAENSFIVIMMNKSKPASAAASSASAGTSQAKSIPPSTSQPSISPQTPASVSAPVAPAPTRPPPPAPTPTPAPVAATETVTTPIPEPVPATISSSTPAPDSAPVGSQGDVYGQAASNLAAGSNLESTIQQILDMGGGTWDRETVVLALRAAFNNPERAVEYLYTGIPEQAEVPPVARPPASAGQPANPPAQTQQPAAAPASGPNANPLDLFPQGLPNVGGNPGAGTLDFLRNSQQFQALRAMVQANPQVLQPMLQELGKQNPNLMRLIQDHQADFLRLINEPVEGGGESGNLLGQMAAGMPQPQAIQVTHEEREAIERLEAMGFERALVLEVFFACNKNEELAANYLLDHMHEFEE

SEQ ID NO: 45521 - protein, 375 aa, Arabidopsis thaliana
  peptide (1)..(375): Ceres Seq. ID no. 13576742
  misc_feature (142)..(184): Pfam Name: UBA/TS-N domain Pfam Description: UBA/TS-N domain
  misc_feature (63)..(375): Homolog of NCBI NO: 7446462 NR Description: RAD23 protein homolog - rice
  misc_feature (1)..(43): Homolog of NCBI NO: 25387250 NR Description: protein F20B17.8 [imported] - Arabidopsis
  misc_feature (128)..(375): Homolog of NCBI NO: 25387250 NR Description: protein F20B17.8 [imported] - Arabidopsis
  misc_feature (95)..(375): Homolog of NCBI NO: 5640111 NR Description: RAD23 protein [Lycopersicon esculentum]
  misc_feature (57)..(374): Homolog of NCBI NO: 7446459 NR Description: RAD23 protein, isoform I - carrot
  misc_feature (7)..(375): Homolog of NCBI NO: 14335004 NR Description: unknown protein [Arabidopsis thaliana]
  misc_feature (7)..(375): Homolog of NCBI NO: 15240922 NR Description: DNA repair protein RAD23, putative [Arabidopsis
  misc_feature (1)..(375): Homolog of NCBI NO: 38175472 NR Description: putative osRAD23 [Oryza sativa (japonica
  misc_feature (96)..(375): Homolog of NCBI NO: 30409726 NR Description: RAD23-like protein [Arabidopsis thaliana]
  misc_feature (1)..(375): Homolog of NCBI NO: 15232924 NR Description: RAD23 -related [Arabidopsis thaliana]
MLIHQGKVLKDETTIEENKVAENSFIVIMMNKSKPASAAASSASAGTSQAKSIPPSTSQPSISPQTPASVSAPVAPAPTRPPPPAPTPTPAPVAATETVTTPIPEPVPATISSSTPAPDSAPVGSQGDVYGQAASNLAAGSNLESTIQQILDMGGGTWDRETVVLALRAAFNNPERAVEYLYTGIPEQAEVPPVARPPASAGQPANPPAQTQQPAAAPASGPNANPLDLFPQGLPNVGGNPGAGTLDFLRNSQQFQALRAMVQANPQVLQPMLQELGKQNPNLMRLIQDHQADFLRLINEPVEGGGESGNLLGQMAAGMPQPQAIQVTHEEREAIERLEAMGFERALVLEVFFACNKNEELAANYLLDHMHEFEE

SEQ ID NO: 45522 - protein, 347 aa, Arabidopsis thaliana
  peptide (1)..(347): Ceres Seq. ID no. 13576743
  misc_feature (114)..(156): Pfam Name: UBA/TS-N domain Pfam Description: UBA/TS-N domain
  misc_feature (35)..(347): Homolog of NCBI NO: 7446462 NR Description: RAD23 protein homolog - rice
  misc_feature (1)..(15): Homolog of NCBI NO: 25387250 NR Description: protein F20B17.8 [imported] - Arabidopsis
  misc_feature (100)..(347): Homolog of NCBI NO: 25387250 NR Description: protein F20B17.8 [imported] - Arabidopsis
  misc_feature (67)..(347): Homolog of NCBI NO: 5640111 NR Description: RAD23 protein [Lycopersicon esculentum]
  misc_feature (29)..(346): Homolog of NCBI NO: 7446459 NR Description: RAD23 protein, isoform I - carrot
  misc_feature (1)..(347): Homolog of NCBI NO: 14335004 NR Description: unknown protein [Arabidopsis thaliana]
  misc_feature (1)..(347): Homolog of NCBI NO: 15240922 NR Description: DNA repair protein RAD23, putative [Arabidopsis
  misc_feature (1)..(347): Homolog of NCBI NO: 38175472 NR Description: putative osRAD23 [Oryza sativa (japonica
  misc_feature (68)..(347): Homolog of NCBI NO: 30409726 NR Description: RAD23-like protein [Arabidopsis thaliana]
  misc_feature (1)..(347): Homolog of NCBI NO: 15232924 NR Description: RAD23 -related [Arabidopsis thaliana]
MMNKSKPASAAASSASAGTSQAKSIPPSTSQPSISPQTPASVSAPVAPAPTRPPPPAPTPTPAPVAATETVTTPIPEPVPATISSSTPAPDSAPVGSQGDVYGQAASNLAAGSNLESTIQQILDMGGGTWDRETVVLALRAAFNNPERAVEYLYTGIPEQAEVPPVARPPASAGQPANPPAQTQQPAAAPASGPNANPLDLFPQGLPNVGGNPGAGTLDFLRNSQQFQALRAMVQANPQVLQPMLQELGKQNPNLMRLIQDHQADFLRLINEPVEGGGESGNLLGQMAAGMPQPQAIQVTHEEREAIERLEAMGFERALVLEVFFACNKNEELAANYLLDHMHEFEE

SEQ ID NO: 45523 - DNA, 2532 bp, Arabidopsis thaliana
  misc_feature (1)..(2532): Ceres Seq. ID no. 13647179
  misc_feature: MA Experiment ID: 20000179 Result: Up-regulated in Transcription
  misc_feature: MA Experiment 20000179 PARAMETER Experiment Name: At_Germinating_Seeds_P Parameter: Age (hr) Value: 6 vs. 0
  misc_feature: MA Experiment 20000179 PARAMETER Experiment Name: At_Germinating_Seeds_P Parameter: Tissue Value: Germinating Seeds
  misc_feature: MA Experiment ID: 20000180 Result: Up-regulated in Transcription
  misc_feature: MA Experiment 20000180 PARAMETER Experiment Name: At_Germinating_Seeds_P Parameter: Age (hr) Value: 24 vs. 0
  misc_feature: MA Experiment 20000180 PARAMETER Experiment Name: At_Germinating_Seeds_P Parameter: Tissue Value: Germinating Seeds
  misc_feature: MA Experiment ID: 20000184 Result: Up-regulated in Transcription
  misc_feature: MA Experiment 20000184 PARAMETER Experiment Name: At_Shoots__P Parameter: Age (day) Value: 7
  misc_feature: MA Experiment 20000184 PARAMETER Experiment Name: At_Shoots__P Parameter: Tissue Value: Shoots vs. Whole Plant
  misc_feature: MA Experiment ID: 20000185 Result: Down-regulated in Transcription
  misc_feature: MA Experiment 20000185 PARAMETER Experiment Name: At_Roots__P Parameter: Age (day) Value: 7 vs. 21
  misc_feature: MA Experiment 20000185 PARAMETER Experiment Name: At_Roots__P Parameter: Organism Value: A. thaliana
  misc_feature: MA Experiment 20000185 PARAMETER Experiment Name: At_Roots__P Parameter: Tissue Value: Roots vs. Whole Plant
  misc_feature: MA Experiment ID: 20000438 Result: Up-regulated in Transcription
  misc_feature: MA Experiment 20000438 PARAMETER Experiment Name: At_Shoots__P Parameter: Age (day) Value: 14
  misc_feature: MA Experiment 20000438 PARAMETER Experiment Name: At_Shoots__P Parameter: Tissue Value: Shoots vs. Whole Plant
  misc_feature: MA Experiment ID: 20000439 Result: Down-regulated in Transcription
  misc_feature: MA Experiment 20000439 PARAMETER Experiment Name: At_Roots__P Parameter: Age (day) Value: 14 vs. 21
  misc_feature: MA Experiment 20000439 PARAMETER Experiment Name: At_Roots__P Parameter: Organism Value: A. thaliana
  misc_feature: MA Experiment 20000439 PARAMETER Experiment Name: At_Roots__P Parameter: Tissue Value: Roots vs. Whole Plant
  misc_feature: MA Experiment ID: 20000495 Result: Down-regulated in Transcription
  misc_feature: MA Experiment 20000495 PARAMETER Experiment Name: At_Guard_Cells_P Parameter: Harvest Date Value: 8/2/2002
  misc_feature: MA Experiment 20000495 PARAMETER Experiment Name: At_Guard_Cells_P Parameter: Organism Value: A. thaliana
  misc_feature: MA Experiment 20000495 PARAMETER Experiment Name: At_Guard_Cells_P Parameter: Tissue Value: Guard Cells vs. Leaves
  misc_feature: MA Experiment ID: 20001560 Result: Down-regulated in Transcription
  misc_feature: MA Experiment 20001560 PARAMETER Experiment Name: At_Drought_Soil_Dry_P Parameter: Age (day) Value: 28
  misc_feature: MA Experiment 20001560 PARAMETER Experiment Name: At_Drought_Soil_Dry_P Parameter: Organism Value: A. thaliana
  misc_feature: MA Experiment 20001560 PARAMETER Experiment Name: At_Drought_Soil_Dry_P Parameter: Plant Line Value: WS
  misc_feature: MA Experiment 20001560 PARAMETER Experiment Name: At_Drought_Soil_Dry_P Parameter: Post Timepoint (hr) Value: None
  misc_feature: MA Experiment 20001560 PARAMETER Experiment Name: At_Drought_Soil_Dry_P Parameter: Post-Treatment Value: None
  misc_feature: MA Experiment 20001560 PARAMETER Experiment Name: At_Drought_Soil_Dry_P Parameter: Timepoint (day) Value: 14
  misc_feature: MA Experiment 20001560 PARAMETER Experiment Name: At_Drought_Soil_Dry_P Parameter: Treatment Value: Drought vs. No Drought
gagaaaggactcgagaagtcatggcttctgcttaatctcctcttccttaaaaaccagaagatcctttgttccacgtttctcgtttgtagcttcttctctctcagaattcaattcgaattttgacaagtcttgacgaagaagaagaaacagagctgcttcaatggcttctaactcattactacgttcttcttcaaatttcttcttaggatcccatatcataatctcatctcccacccctaaaaccaccagaaaaccctctttccctttctccttcgtctcccgtgctaaataccaaatcactcgatcgtctcaagacgaaaattcgccaaatggtaaacccaattcgccattctcgtcgcaagtagccttagcagctattctactatcttcaatttcatcttcgccgctagctttagctgtagtggacgaaccagcttctccgtctgtcgttatagaatctcaagctgtgaagccatcgacgccatcgcaattgttcattcagaacgagatacttaaggctcctagtcctaaatcatcggatctcccagaaggatcacagtggcgatacagcgagtttcttaacgctgtgaagaaagggaaagtcgagagagttagattcagcaaagatggttctgttgttcagcttactgccgtcgacaatcgccgtgcttcagtcatcgtccctaacgaccctgaccttattgatatcttggctatgaacggagttgatatatccgtctctgaaggagaatcctcaggcaatgacttgttcactgtcattggaaacttgattttcccgcttttggcctttggtggactcttcttgcttttcaggcgagctcagggaggccctggtggtggtcctggtggcttgggtggtcctatggatttcggacgttctaaatccaagttccaggaagtgcctgagactggtgtgtcatttgcagatgttgctggggctgatcaagctaagttggagttacaggaagttgtggatttcttgaagaatcctgataagtacacagccttgggtgctaagattcctaaagggtgtttgcttgttggaccgcctggtacgggtaagacactcctggctagggcggtggctggggaagctggagtgccgttcttctcttgcgcggcctcggagttcgtagagctttttgtgggtgtgggtgcatcgagagttagggatttgttcgagaaggctaagtctaaagccccttgtattgtattcattgatgagattgacgctgtgggtaggcagagaggagctgggatgggaggaggaaatgatgagagagaacagactattaatcagctgttgacagagatggatggattttctggcaactctggtgtgatagttttggcagctacgaataggccggacgttcttgattcggctttgttgaggcctggaaggtttgatcgacaggtcacggtggataggcctgatgtggctggcagagtcaagattcttcaggttcattctagggggaaggcactcggtaaagatgtggactttgacaaggttgccagaaggacccctggtttcacgggtgctgacttacaaaacctgatgaatgaagcggcgattcttgcggctaggcgtgagcttaaggaaataagcaaggatgaaatctctgatgctcttgagaggatcattgctggacctgagaagaagaatgcagttgtctctgaagagaagaagagacttgttgcataccatgaggctggtcatgctctagtgggtgctcttatgccagaatatgatccggttgcaaagatttctatcattcctcgtggccaagctggtgggctcactttttttgctccaagcgaagaaagacttgagtctggattgtacagtaggagctaccttgagaatcaaatggctgttgcacttggcggaagggttgcagaggaggtgatctttggggatgagaatgtgacgactggagcatcaaatgatttcatgcaggtgtctcgtgtggcacgtcaaatgattgagagatttgggttcagcaaaaagattggacaagttgctgttggtggccctggtggaaatcccttcatgggtcaacaaatgtcatcacagaaagattactcaatggcaactgcggatattgtagatgctgaggtgcgagagttagttgagaaggcatacaagagagcaacggagatcataacaactcatattgatatcctacacaagcttgcacagctcctgatcgagaaagaaactgttgacggtgaagagttcatgagtctctttattgacggccaagctgagttgtatatttcttgattccttaaagttgccattgcttagtgcttacaataccataagctaataagtatattcgtgttcatatgtgtcaccgattcagtactcaccaattcagtatatttgtgtatattccgttgttttagtgaatctaaatatactttgtaatgcaatgcaatgtgtttaaagaaaagtaatttgatcaaaaaaaaaaaaaaaaaaaactcgagggggggcccggt

SEQ ID NO: 45524 - protein, 716 aa, Arabidopsis thaliana
  peptide (1)..(716): Ceres Seq. ID no. 13647180
  misc_feature (490)..(705): Pfam Name: Peptidase family M41 Pfam Description: Peptidase family M41
  misc_feature (490)..(705): Pfam Name: Peptidase family M41 Pfam Description: Peptidase family M41
  misc_feature (132)..(705): Homolog of NCBI NO: 30684767 NR Description: FtsH protease (VAR2) [Arabidopsis thaliana]
  misc_feature (110)..(705): Homolog of NCBI NO: 33240371 NR Description: Cell division protein FtsH
  misc_feature (111)..(707): Homolog of NCBI NO: 33239707 NR Description: Cell division protein FtsH
  misc_feature (129)..(705): Homolog of NCBI NO: 23129565 NR Description: hypothetical protein [Nostoc punctiforme]
  misc_feature (129)..(712): Homolog of NCBI NO: 17228756 NR Description: cell division protein [Nostoc sp. PCC 7120]
  misc_feature (132)..(705): Homolog of NCBI NO: 30684767 NR Description: FtsH protease (VAR2) [Arabidopsis thaliana]
  misc_feature (111)..(707): Homolog of NCBI NO: 33239707 NR Description: Cell division protein FtsH
  misc_feature (129)..(712): Homolog of NCBI NO: 17228756 NR Description: cell division protein [Nostoc sp. PCC 7120]
  misc_feature (1)..(716): Homolog of NCBI NO: 18422193 NR Description: FtsH protease, putative [Arabidopsis thaliana]
  misc_feature (73)..(701): Homolog of NCBI NO: 2077957 NR Description: ATPase [Arabidopsis thaliana]
  misc_feature (3)..(716): Homolog of NCBI NO: 17865457 NR Description: Cell division protein ftsH homolog, chloroplast
  misc_feature (1)..(716): Homolog of NCBI NO: 17865463 NR Description: Cell division protein ftsH homolog, chloroplast
  misc_feature (36)..(694): Homolog of NCBI NO: 2492515 NR Description: Cell division protein ftsH homolog, chloroplast
  misc_feature (129)..(705): Homolog of NCBI NO: 23129565 NR Description: hypothetical protein [Nostoc punctiforme]
  misc_feature (110)..(705): Homolog of NCBI NO: 33240371 NR Description: Cell division protein FtsH
  misc_feature (36)..(694): Homolog of NCBI NO: 2492515 NR Description: Cell division protein ftsH homolog, chloroplast
  misc_feature (1)..(716): Homolog of NCBI NO: 17865463 NR Description: Cell division protein ftsH homolog, chloroplast
  misc_feature (3)..(716): Homolog of NCBI NO: 17865457 NR Description: Cell division protein ftsH homolog, chloroplast
  misc_feature (73)..(701): Homolog of NCBI NO: 2077957 NR Description: ATPase [Arabidopsis thaliana]
  misc_feature (1)..(716): Homolog of NCBI NO: 18422193 NR Description: FtsH protease, putative [Arabidopsis thaliana]
MASNSLLRSSSNFFLGSHIIISSPTPKTTRKPSFPFSFVSRAKYQITRSSQDENSPNGKPNSPFSSQVALAAILLSSISSSPLALAVVDEPASPSVVIESQAVKPSTPSQLFIQNEILKAPSPKSSDLPEGSQWRYSEFLNAVKKGKVERVRFSKDGSVVQLTAVDNRRASVIVPNDPDLIDILAMNGVDISVSEGESSGNDLFTVIGNLIFPLLAFGGLFLLFRRAQGGPGGGPGGLGGPMDFGRSKSKFQEVPETGVSFADVAGADQAKLELQEVVDFLKNPDKYTALGAKIPKGCLLVGPPGTGKTLLARAVAGEAGVPFFSCAASEFVELFVGVGASRVRDLFEKAKSKAPCIVFIDEIDAVGRQRGAGMGGGNDEREQTINQLLTEMDGFSGNSGVIVLAATNRPDVLDSALLRPGRFDRQVTVDRPDVAGRVKILQVHSRGKALGKDVDFDKVARRTPGFTGADLQNLMNEAAILAARRELKEISKDEISDALERIIAGPEKKNAVVSEEKKRLVAYHEAGHALVGALMPEYDPVAKISIIPRGQAGGLTFFAPSEERLESGLYSRSYLENQMAVALGGRVAEEVIFGDENVTTGASNDFMQVSRVARQMIERFGFSKKIGQVAVGGPGGNPFMGQQMSSQKDYSMATADIVDAEVRELVEKAYKRATEIITTHIDILHKLAQLLIEKETVDGEEFMSLFIDGQAELYIS

SEQ ID NO: 45525 - protein, 531 aa, Arabidopsis thaliana
  peptide (1)..(531): Ceres Seq. ID no. 13647181
  misc_feature (305)..(520): Pfam Name: Peptidase family M41 Pfam Description: Peptidase family M41
  misc_feature (305)..(520): Pfam Name: Peptidase family M41 Pfam Description: Peptidase family M41
  misc_feature (1)..(520): Homolog of NCBI NO: 30684767 NR Description: FtsH protease (VAR2) [Arabidopsis thaliana]
  misc_feature (1)..(520): Homolog of NCBI NO: 33240371 NR Description: Cell division protein FtsH
  misc_feature (1)..(522): Homolog of NCBI NO: 33239707 NR Description: Cell division protein FtsH
  misc_feature (1)..(520): Homolog of NCBI NO: 23129565 NR Description: hypothetical protein [Nostoc punctiforme]
  misc_feature (1)..(527): Homolog of NCBI NO: 17228756 NR Description: cell division protein [Nostoc sp. PCC 7120]
  misc_feature (1)..(520): Homolog of NCBI NO: 30684767 NR Description: FtsH protease (VAR2) [Arabidopsis thaliana]
  misc_feature (1)..(522): Homolog of NCBI NO: 33239707 NR Description: Cell division protein FtsH
  misc_feature (1)..(527): Homolog of NCBI NO: 17228756 NR Description: cell division protein [Nostoc sp. PCC 7120]
  misc_feature (1)..(531): Homolog of NCBI NO: 18422193 NR Description: FtsH protease, putative [Arabidopsis thaliana]
  misc_feature (1)..(516): Homolog of NCBI NO: 2077957 NR Description: ATPase [Arabidopsis thaliana]
  misc_feature (1)..(531): Homolog of NCBI NO: 17865457 NR Description: Cell division protein ftsH homolog, chloroplast
  misc_feature (1)..(531): Homolog of NCBI NO: 17865463 NR Description: Cell division protein ftsH homolog, chloroplast
  misc_feature (1)..(509): Homolog of NCBI NO: 2492515 NR Description: Cell division protein ftsH homolog, chloroplast
  misc_feature (1)..(520): Homolog of NCBI NO: 23129565 NR Description: hypothetical protein [Nostoc punctiforme]
  misc_feature (1)..(520): Homolog of NCBI NO: 33240371 NR Description: Cell division protein FtsH
  misc_feature (1)..(509): Homolog of NCBI NO: 2492515 NR Description: Cell division protein ftsH homolog, chloroplast
  misc_feature (1)..(531): Homolog of NCBI NO: 17865463 NR Description: Cell division protein ftsH homolog, chloroplast
  misc_feature (1)..(531): Homolog of NCBI NO: 17865457 NR Description: Cell division protein ftsH homolog, chloroplast
  misc_feature (1)..(516): Homolog of NCBI NO: 2077957 NR Description: ATPase [Arabidopsis thaliana]
  misc_feature (1)..(531): Homolog of NCBI NO: 18422193 NR Description: FtsH protease, putative [Arabidopsis thaliana]
MNGVDISVSEGESSGNDLFTVIGNLIFPLLAFGGLFLLFRRAQGGPGGGPGGLGGPMDFGRSKSKFQEVPETGVSFADVAGADQAKLELQEVVDFLKNPDKYTALGAKIPKGCLLVGPPGTGKTLLARAVAGEAGVPFFSCAASEFVELFVGVGASRVRDLFEKAKSKAPCIVFIDEIDAVGRQRGAGMGGGNDEREQTINQLLTEMDGFSGNSGVIVLAATNRPDVLDSALLRPGRFDRQVTVDRPDVAGRVKILQVHSRGKALGKDVDFDKVARRTPGFTGADLQNLMNEAAILAARRELKEISKDEISDALERIIAGPEKKNAVVSEEKKRLVAYHEAGHALVGALMPEYDPVAKISIIPRGQAGGLTFFAPSEERLESGLYSRSYLENQMAVALGGRVAEEVIFGDENVTTGASNDFMQVSRVARQMIERFGFSKKIGQVAVGGPGGNPFMGQQMSSQKDYSMATADIVDAEVRELVEKAYKRATEIITTHIDILHKLAQLLIEKETVDGEEFMSLFIDGQAELYIS

SEQ ID NO: 45526 - protein, 475 aa, Arabidopsis thaliana
  peptide (1)..(475): Ceres Seq. ID no. 13647182
  misc_feature (249)..(464): Pfam Name: Peptidase family M41 Pfam Description: Peptidase family M41
  misc_feature (249)..(464): Pfam Name: Peptidase family M41 Pfam Description: Peptidase family M41
  misc_feature (1)..(464): Homolog of NCBI NO: 30684767 NR Description: FtsH protease (VAR2) [Arabidopsis thaliana]
  misc_feature (1)..(464): Homolog of NCBI NO: 33240371 NR Description: Cell division protein FtsH
  misc_feature (1)..(466): Homolog of NCBI NO: 33239707 NR Description: Cell division protein FtsH
  misc_feature (1)..(464): Homolog of NCBI NO: 23129565 NR Description: hypothetical protein [Nostoc punctiforme]
  misc_feature (1)..(471): Homolog of NCBI NO: 17228756 NR Description: cell division protein [Nostoc sp. PCC 7120]
  misc_feature (1)..(464): Homolog of NCBI NO: 30684767 NR Description: FtsH protease (VAR2) [Arabidopsis thaliana]
  misc_feature (1)..(466): Homolog of NCBI NO: 33239707 NR Description: Cell division protein FtsH
  misc_feature (1)..(471): Homolog of NCBI NO: 17228756 NR Description: cell division protein [Nostoc sp. PCC 7120]
  misc_feature (1)..(475): Homolog of NCBI NO: 18422193 NR Description: FtsH protease, putative [Arabidopsis thaliana]
  misc_feature (1)..(460): Homolog of NCBI NO: 2077957 NR Description: ATPase [Arabidopsis thaliana]
  misc_feature (1)..(475): Homolog of NCBI NO: 17865457 NR Description: Cell division protein ftsH homolog, chloroplast
  misc_feature (1)..(475): Homolog of NCBI NO: 17865463 NR Description: Cell division protein ftsH homolog, chloroplast
  misc_feature (1)..(453): Homolog of NCBI NO: 2492515 NR Description: Cell division protein ftsH homolog, chloroplast
  misc_feature (1)..(464): Homolog of NCBI NO: 23129565 NR Description: hypothetical protein [Nostoc punctiforme]
  misc_feature (1)..(464): Homolog of NCBI NO: 33240371 NR Description: Cell division protein FtsH
  misc_feature (1)..(453): Homolog of NCBI NO: 2492515 NR Description: Cell division protein ftsH homolog, chloroplast
  misc_feature (1)..(475): Homolog of NCBI NO: 17865463 NR Description: Cell division protein ftsH homolog, chloroplast
  misc_feature (1)..(475): Homolog of NCBI NO: 17865457 NR Description: Cell division protein ftsH homolog, chloroplast
  misc_feature (1)..(460): Homolog of NCBI NO: 2077957 NR Description: ATPase [Arabidopsis thaliana]
  misc_feature (1)..(475): Homolog of NCBI NO: 18422193 NR Description: FtsH protease, putative [Arabidopsis thaliana]
MDFGRSKSKFQEVPETGVSFADVAGADQAKLELQEVVDFLKNPDKYTALGAKIPKGCLLVGPPGTGKTLLARAVAGEAGVPFFSCAASEFVELFVGVGASRVRDLFEKAKSKAPCIVFIDEIDAVGRQRGAGMGGGNDEREQTINQLLTEMDGFSGNSGVIVLAATNRPDVLDSALLRPGRFDRQVTVDRPDVAGRVKILQVHSRGKALGKDVDFDKVARRTPGFTGADLQNLMNEAAILAARRELKEISKDEISDALERIIAGPEKKNAVVSEEKKRLVAYHEAGHALVGALMPEYDPVAKISIIPRGQAGGLTFFAPSEERLESGLYSRSYLENQMAVALGGRVAEEVIFGDENVTTGASNDFMQVSRVARQMIERFGFSKKIGQVAVGGPGGNPFMGQQMSSQKDYSMATADIVDAEVRELVEKAYKRATEIITTHIDILHKLAQLLIEKETVDGEEFMSLFIDGQAELYIS

SEQ ID NO: 45527 - DNA, 3366 bp, Arabidopsis thaliana
  misc_feature (1)..(3366): Ceres Seq. ID no. 13575701
  misc_feature: MA Experiment ID: 20000437 Result: Down-regulated in Transcription
  misc_feature: MA Experiment 20000437 PARAMETER Experiment Name: At_Drought_P Parameter: Age (day) Value: 8
  misc_feature: MA Experiment 20000437 PARAMETER Experiment Name: At_Drought_P Parameter: Organism Value: A. thaliana
  misc_feature: MA Experiment 20000437 PARAMETER Experiment Name: At_Drought_P Parameter: Plant Line Value: WS
  misc_feature: MA Experiment 20000437 PARAMETER Experiment Name: At_Drought_P Parameter: Timepoint (hr) Value: 24
  misc_feature: MA Experiment 20000437 PARAMETER Experiment Name: At_Drought_P Parameter: Tissue Value: Whole Plant
  misc_feature: MA Experiment 20000437 PARAMETER Experiment Name: At_Drought_P Parameter: Treatment Value: Drought vs. No Drought
acctccactggctttgaagctgttcctctctcacataaaaaaagcaaacacttaacgaggaagaaacacactcatatctctctcacgttccccaaatttttgatttttattatctttttgggtttggntaaaccatttatgggtctttagatctctcttgatagtaaagataagtaattttagggtctgtttggttctgtttctggaaatttcacttttttcacttttttgggatcacatttagctttttttggttcctttattttgtaacgccatttatgcgttaaacttgtgtgaagtgtttgtttggtctgagctggagatggtgagaatctcactgcttttgttgtgtttactggtttcaacttgtctcttcacttcttcatcagcacaagctccaggttttgtgagcttggattgtggaggtgcagagccattcactgatgaacttggactcaaatggtcacctgataatcatctcatttatggagaaaccgctaatatatcgtccgttaacgaaacaagaactcagtacacgactttaaggcatttccctgctgattcaagaaagtattgctacactctcaatgtcacgagtaggaatagatatctcattagagctactttcttgtatggtaatttcgacaacagcaacaatgtgtatcccaaattcgatatctccctcggggcgactcattgggcgaccattgttatctctgaaacctatataatcgaaactgcagaactggtgtttctggcttcttctcctactgttagtgtttgtttgtcaaatgccacaactggacagccgtttatatctactcttgagctttggcagttgagtggttcgatgtatggttcgatgctatctgaagaccggttttacctgagtgttgcagcacggataaatttcggggctgaaagtgaagcttctgtgaggtacccggatgatccgtatgatagaatatgggaatctgatttgcaaaagaagcctaattatcttgtggatgttgctgctgggactgtgcgagtgtcgactacattgccaatcgaaagcagggtcgatgacagaccgcctcagaaggttatgcagacggctgtggttggaacaaacgggtccttaacttacagaatgaacctagatggcttccctggttttggttgggcattcacatactttgctgaaatcgaggatttggctgaggatgagtcaaggaagtttagattagttctacctgagcagcctgagtatagcaaatcggttgttaacatcaaggaaaatacacagagaccgtatcgcgtttatgcacctggctatcctaacataacacttccatttgtgctaaactttcgatttgccaaaacggctgattcttctaggggacctattctgaatgccatggagatcagcaaatatttgcggaaaagcgatggttcagtagatgcaactgttatggctaatgtggcatcgctatattcttccactgaatgggctcaagaaggcggtgacccttgttcaccctcaccgtggtcatgggtgcaatgcaattcggatccacaaccaagggttgttgctatcaagctgtcgagtatgaacttgacgggaaatataccttctgacctggtgaaattgactggtttggttgagttatggcttgatgggaattcttttacgggtccaataccggatttctctcggtgtccaaacctggagataatacacctcgagaacaaccgactaaccggaaagatcccttcctcgttgacgaaactcccaaacctgaaagaactgtacctgcagaacaatgtgttaacaggaacaataccatcagacctggccaaagatgtgatctcaaacttctctgggaaccttaaccttgaaaaaagtggagataaaggcaagaagctcggtgtcatcatcggtgcatcagttggtgcttttgttctgctaattgcaaccatcatttcttgcatcgtcatgtgcaaaagcaagaagaataacaagttgggaaaaacttcggagttaacgaatcgtcccttaccgattcagagagtttcgtctaccttgagtgaagctcatggagacgctgcacattgcttcacactttatgagatcgaggaagccacaaaaaaattcgaaaagagaattgggtcgggaggttttggaatcgtatactatggtaaaacaagggaggggaaagagattgctgtaaaggttcttgcaaataattcatatcagggaaagagagagtttgcaaacgaggttacattactctcaaggatacatcatcggaaccttgtgcagtttcttggttattgccaagaagagggaaaaaacatgcttgtgtatgagttcatgcacaatgggactttgaaggagcatctttatggcgtggtaccacgtgaccggagaatcagttggattaaaaggcttgagatagctgaagatgcagcccgagggatcgagtatcttcacacagggtgtgttccagcaatcatacatagagatctcaagactagtaacatcctacttgacaaacacatgagggcaaaggtttcagatttcggtttgtcgaaattcgcagttgacgggacctcacatgtctccagcattgtccgtggcacagttggatatcttgaccccgagtactatatatcgcagcagttaacagagaagagtgatgtatatagcttcggagtcattcttcttgagctaatgtctggccaagaagccatatcgaatgaaagctttggtgtcaactgccggaacatagtccaatgggctaagatgcatatagacaacggggacatccgagggatcatcgatccagcgctagcggaagatgattacagtctccaatcaatgtggaagattgcggagaaagcgttgctgtgtgtgaaaccgcacgggaacatgagaccttcgatgtccgaggtgcaaaaagatatccaagacgcgattaggatcgagaaggaagcgttggctgcaagaggcggtatatcagacgagttttccaggagctcggctcattcgtcttcgctcaacatgggaatgcttgacctggctggatcacagagttatgtatccattgatgaatcagtattgcagccaacagctcggtagtagattcggctttgtttgtacagatgcattacttgcttgtgtttttgacctttcacattgtctctggtctttagttattagttttgagcttaacactactttttttttctttcttttggactcgaggttacaagaagtgcttcgagtttgtttgtttttcttttattgttttcagactaactcggtgatttatgtgggattgtgatatattatgttttcttttaactgattttcacattttc

SEQ ID NO: 45528 - protein, 933 aa, Arabidopsis thaliana
  peptide (1)..(933): Ceres Seq. ID no. 13575702
  misc_feature (7)..(481): Homolog of NCBI NO: 25405503 NR Description: probable protein kinase [imported] - Arabidopsis
  misc_feature (441)..(880): Homolog of NCBI NO: 15233796 NR Description: light repressible receptor protein kinase
  misc_feature (1)..(481): Homolog of NCBI NO: 15233796 NR Description: light repressible receptor protein kinase
  misc_feature (441)..(880): Homolog of NCBI NO: 2129635 NR Description: serine/threonine-specific receptor protein kinase
  misc_feature (1)..(481): Homolog of NCBI NO: 2129635 NR Description: serine/threonine-specific receptor protein kinase
  misc_feature (440)..(906): Homolog of NCBI NO: 25387121 NR Description: probable protein kinase [imported] - Arabidopsis
  misc_feature (27)..(492): Homolog of NCBI NO: 25387121 NR Description: probable protein kinase [imported] - Arabidopsis
  misc_feature (9)..(933): Homolog of NCBI NO: 18408845 NR Description: F12A21.14 [Arabidopsis thaliana]
  misc_feature (593)..(883): Homolog of NCBI NO: 34906098 NR Description: putative receptor-like protein kinase
  misc_feature (13)..(547): Homolog of NCBI NO: 34906098 NR Description: putative receptor-like protein kinase
MVRISLLLLCLLVSTCLFTSSSAQAPGFVSLDCGGAEPFTDELGLKWSPDNHLIYGETANISSVNETRTQYTTLRHFPADSRKYCYTLNVTSRNRYLIRATFLYGNFDNSNNVYPKFDISLGATHWATIVISETYIIETAELVFLASSPTVSVCLSNATTGQPFISTLELWQLSGSMYGSMLSEDRFYLSVAARINFGAESEASVRYPDDPYDRIWESDLQKKPNYLVDVAAGTVRVSTTLPIESRVDDRPPQKVMQTAVVGTNGSLTYRMNLDGFPGFGWAFTYFAEIEDLAEDESRKFRLVLPEQPEYSKSVVNIKENTQRPYRVYAPGYPNITLPFVLNFRFAKTADSSRGPILNAMEISKYLRKSDGSVDATVMANVASLYSSTEWAQEGGDPCSPSPWSWVQCNSDPQPRVVAIKLSSMNLTGNIPSDLVKLTGLVELWLDGNSFTGPIPDFSRCPNLEIIHLENNRLTGKIPSSLTKLPNLKELYLQNNVLTGTIPSDLAKDVISNFSGNLNLEKSGDKGKKLGVIIGASVGAFVLLIATIISCIVMCKSKKNNKLGKTSELTNRPLPIQRVSSTLSEAHGDAAHCFTLYEIEEATKKFEKRIGSGGFGIVYYGKTREGKEIAVKVLANNSYQGKREFANEVTLLSRIHHRNLVQFLGYCQEEGKNMLVYEFMHNGTLKEHLYGVVPRDRRISWIKRLEIAEDAARGIEYLHTGCVPAIIHRDLKTSNILLDKHMRAKVSDFGLSKFAVDGTSHVSSIVRGTVGYLDPEYYISQQLTEKSDVYSFGVILLELMSGQEAISNESFGVNCRNIVQWAKMHIDNGDIRGIIDPALAEDDYSLQSMWKIAEKALLCVKPHGNMRPSMSEVQKDIQDAIRIEKEALAARGGISDEFSRSSAHSSSLNMGMLDLAGSQSYVSIDESVLQPTAR

SEQ ID NO: 45529 - protein, 757 aa, Arabidopsis thaliana
  peptide (1)..(757): Ceres Seq. ID no. 13575703
  misc_feature (1)..(305): Homolog of NCBI NO: 25405503 NR Description: probable protein kinase [imported] - Arabidopsis
  misc_feature (265)..(704): Homolog of NCBI NO: 15233796 NR Description: light repressible receptor protein kinase
  misc_feature (1)..(305): Homolog of NCBI NO: 15233796 NR Description: light repressible receptor protein kinase
  misc_feature (265)..(704): Homolog of NCBI NO: 2129635 NR Description: serine/threonine-specific receptor protein kinase
  misc_feature (1)..(305): Homolog of NCBI NO: 2129635 NR Description: serine/threonine-specific receptor protein kinase
  misc_feature (264)..(730): Homolog of NCBI NO: 25387121 NR Description: probable protein kinase [imported] - Arabidopsis
  misc_feature (1)..(316): Homolog of NCBI NO: 25387121 NR Description: probable protein kinase [imported] - Arabidopsis
  misc_feature (1)..(757): Homolog of NCBI NO: 18408845 NR Description: F12A21.14 [Arabidopsis thaliana]
  misc_feature (417)..(707): Homolog of NCBI NO: 34906098 NR Description: putative receptor-like protein kinase
  misc_feature (1)..(371): Homolog of NCBI NO: 34906098 NR Description: putative receptor-like protein kinase
MYGSMLSEDRFYLSVAARINFGAESEASVRYPDDPYDRIWESDLQKKPNYLVDVAAGTVRVSTTLPIESRVDDRPPQKVMQTAVVGTNGSLTYRMNLDGFPGFGWAFTYFAEIEDLAEDESRKFRLVLPEQPEYSKSVVNIKENTQRPYRVYAPGYPNITLPFVLNFRFAKTADSSRGPILNAMEISKYLRKSDGSVDATVMANVASLYSSTEWAQEGGDPCSPSPWSWVQCNSDPQPRVVAIKLSSMNLTGNIPSDLVKLTGLVELWLDGNSFTGPIPDFSRCPNLEIIHLENNRLTGKIPSSLTKLPNLKELYLQNNVLTGTIPSDLAKDVISNFSGNLNLEKSGDKGKKLGVIIGASVGAFVLLIATIISCIVMCKSKKNNKLGKTSELTNRPLPIQRVSSTLSEAHGDAAHCFTLYEIEEATKKFEKRIGSGGFGIVYYGKTREGKEIAVKVLANNSYQGKREFANEVTLLSRIHHRNLVQFLGYCQEEGKNMLVYEFMHNGTLKEHLYGVVPRDRRISWIKRLEIAEDAARGIEYLHTGCVPAIIHRDLKTSNILLDKHMRAKVSDFGLSKFAVDGTSHVSSIVRGTVGYLDPEYYISQQLTEKSDVYSFGVILLELMSGQEAISNESFGVNCRNIVQWAKMHIDNGDIRGIIDPALAEDDYSLQSMWKIAEKALLCVKPHGNMRPSMSEVQKDIQDAIRIEKEALAARGGISDEFSRSSAHSSSLNMGMLDLAGSQSYVSIDESVLQPTAR

SEQ ID NO: 45530 - protein, 753 aa, Arabidopsis thaliana
  peptide (1)..(753): Ceres Seq. ID no. 13575704
  misc_feature (1)..(301): Homolog of NCBI NO: 25405503 NR Description: probable protein kinase [imported] - Arabidopsis
  misc_feature (261)..(700): Homolog of NCBI NO: 15233796 NR Description: light repressible receptor protein kinase
  misc_feature (1)..(301): Homolog of NCBI NO: 15233796 NR Description: light repressible receptor protein kinase
  misc_feature (261)..(700): Homolog of NCBI NO: 2129635 NR Description: serine/threonine-specific receptor protein kinase
  misc_feature (1)..(301): Homolog of NCBI NO: 2129635 NR Description: serine/threonine-specific receptor protein kinase
  misc_feature (260)..(726): Homolog of NCBI NO: 25387121 NR Description: probable protein kinase [imported] - Arabidopsis
  misc_feature (1)..(312): Homolog of NCBI NO: 25387121 NR Description: probable protein kinase [imported] - Arabidopsis
  misc_feature (1)..(753): Homolog of NCBI NO: 18408845 NR Description: F12A21.14 [Arabidopsis thaliana]
  misc_feature (413)..(703): Homolog of NCBI NO: 34906098 NR Description: putative receptor-like protein kinase
  misc_feature (1)..(367): Homolog of NCBI NO: 34906098 NR Description: putative receptor-like protein kinase
MLSEDRFYLSVAARINFGAESEASVRYPDDPYDRIWESDLQKKPNYLVDVAAGTVRVSTTLPIESRVDDRPPQKVMQTAVVGTNGSLTYRMNLDGFPGFGWAFTYFAEIEDLAEDESRKFRLVLPEQPEYSKSVVNIKENTQRPYRVYAPGYPNITLPFVLNFRFAKTADSSRGPILNAMEISKYLRKSDGSVDATVMANVASLYSSTEWAQEGGDPCSPSPWSWVQCNSDPQPRVVAIKLSSMNLTGNIPSDLVKLTGLVELWLDGNSFTGPIPDFSRCPNLEIIHLENNRLTGKIPSSLTKLPNLKELYLQNNVLTGTIPSDLAKDVISNFSGNLNLEKSGDKGKKLGVIIGASVGAFVLLIATIISCIVMCKSKKNNKLGKTSELTNRPLPIQRVSSTLSEAHGDAAHCFTLYEIEEATKKFEKRIGSGGFGIVYYGKTREGKEIAVKVLANNSYQGKREFANEVTLLSRIHHRNLVQFLGYCQEEGKNMLVYEFMHNGTLKEHLYGVVPRDRRISWIKRLEIAEDAARGIEYLHTGCVPAIIHRDLKTSNILLDKHMRAKVSDFGLSKFAVDGTSHVSSIVRGTVGYLDPEYYISQQLTEKSDVYSFGVILLELMSGQEAISNESFGVNCRNIVQWAKMHIDNGDIRGIIDPALAEDDYSLQSMWKIAEKALLCVKPHGNMRPSMSEVQKDIQDAIRIEKEALAARGGISDEFSRSSAHSSSLNMGMLDLAGSQSYVSIDESVLQPTAR

SEQ ID NO: 45531 - DNA, 2237 bp, Arabidopsis thaliana
  misc_feature (1)..(2237): Ceres Seq. ID no. 13646494
  misc_feature: MA Experiment ID: 20000234 Result: Up-regulated in Transcription
  misc_feature: MA Experiment 20000234 PARAMETER Experiment Name: At_Siliques_P Parameter: Age (day) Value: 21
  misc_feature: MA Experiment 20000234 PARAMETER Experiment Name: At_Siliques_P Parameter: Organism Value: A. thaliana
  misc_feature: MA Experiment 20000234 PARAMETER Experiment Name: At_Siliques_P Parameter: Plant Line Value: WS
  misc_feature: MA Experiment 20000234 PARAMETER Experiment Name: At_Siliques_P Parameter: Tissue Value: Less Than 5mm Siliques vs. Whole Plant
  misc_feature: MA Experiment ID: 20000264 Result: Up-regulated in Transcription
  misc_feature: MA Experiment 20000264 PARAMETER Experiment Name: At_Open_Flower_P Parameter: Age (day) Value: 21
  misc_feature: MA Experiment 20000264 PARAMETER Experiment Name: At_Open_Flower_P Parameter: Plant Line Value: WS
  misc_feature: MA Experiment 20000264 PARAMETER Experiment Name: At_Open_Flower_P Parameter: Tissue Value: Open Flower vs. Whole Plant
  misc_feature: MA Experiment ID: 20000265 Result: Up-regulated in Transcription
  misc_feature: MA Experiment 20000265 PARAMETER Experiment Name: At_Open_Flower_P Parameter: Age (day) Value: 21
  misc_feature: MA Experiment 20000265 PARAMETER Experiment Name: At_Open_Flower_P Parameter: Plant Line Value: WS
  misc_feature: MA Experiment 20000265 PARAMETER Experiment Name: At_Open_Flower_P Parameter: Tissue Value: Closed Flower vs. Whole Plant
  misc_feature: MA Experiment ID: 20000286 Result: Up-regulated in Transcription
  misc_feature: MA Experiment 20000286 PARAMETER Experiment Name: At_Open_Flower_P Parameter: Age (day) Value: 21
  misc_feature: MA Experiment 20000286 PARAMETER Experiment Name: At_Open_Flower_P Parameter: Plant Line Value: WS
  misc_feature: MA Experiment 20000286 PARAMETER Experiment Name: At_Open_Flower_P Parameter: Tissue Value: Half Open vs. Whole Plant
  misc_feature: MA Experiment ID: 20000794 Result: Up-regulated in Transcription
  misc_feature: MA Experiment 20000794 PARAMETER Experiment Name: At_Petals_P Parameter: Age (day) Value: 23-25 days
  misc_feature: MA Experiment 20000794 PARAMETER Experiment Name: At_Petals_P Parameter: Plant Line Value: WS
  misc_feature: MA Experiment 20000794 PARAMETER Experiment Name: At_Petals_P Parameter: Tissue Value: Petals vs. Whole plant
  misc_feature: MA Experiment ID: 20001757 Result: Down-regulated in Transcription
  misc_feature: MA Experiment 20001757 PARAMETER Experiment Name: At_50mM_NH4NO3_L-to-H_P Parameter: Timepoint (hr) Value: 6
  misc_feature: MA Experiment 20001757 PARAMETER Experiment Name: At_50mM_NH4NO3_L-to-H_P Parameter: Tissue Value: Leaf
  misc_feature: MA Experiment 20001757 PARAMETER Experiment Name: At_50mM_NH4NO3_L-to-H_P Parameter: Treatment Value: 50mM NH4NO3 vs 100mM Mannitol
tttaacgtgggtccttcaatctttttgaaggaccccgccattgtcaatcacctttcaaagggatctttattctttttggttttaggctttttagattattgaattgattttgaatgataatcatgatgaattgttttccgtgtttcacttcacaaaagagcagaaacgctccatgcacgacgaacgagactaacgatgataacgttgaacacaacgaattcagaccacctgttgttgcgacgacgaaacggactgaagaaagagaacctgcagagcaacaaccaccggtgaaaacattcaatttccgggagttagcgacggcgaccaagaatttccggcaagaatgtcttttaggagaaggtggattcggtagggtttacaaaggaactcttcaatctactggccagttggtagctgtaaagcagctagacaagcatggattacatggtaacaagagtttctagctgaagtcttgtcattggctaaacttgaacacccgaatcttgttaagcttataggatactgtgctgatggagatcaacggcttttagtctttgagtatgtctctggaggttcccttcaagaccatctttacgaacaaaagccaggccagaagccgatggattggataacgaggatgaagattgcgtttggtgcagcgcaaggattggattacttgcacgataaagttactccagcggtgatataccgagatttgaaagcttctaacatcttgttagatgctgagttttaccctaagctttgtgattttggtctgcataatctagagccaggaacaggtgatagcttgtttctttcttcccgggttatggatacttatggttattcagcacctgagtacactcgaggggacgatctcactgtcaagtcagatgtttatagcttcggagttgtgttgctcgaactcatcaccggtagaagagctattgacaccactaagcctaatgatgagcaaaatctagttgcttgggcacaaccgatatttaaagacccgaaaagatatccggatatggcagatcctcttttgaggaagaatttctcagagagagggttaaatcaagcagtggcaataacatcaatgtgtctacaagaggaaccaactgctcgtcctttgataagtgatgtaatggttgctcttagcttcctttcaatgtctacagaagatggtattccagccacggttccaatggaatcgttcagggacaaaagtatgtcgattgctctaagcagacacggttcttgttctgtaactccattttgtatttctcggaaagatgtaggcaacaaatccagttcttcatcagactcggaggatgaagaagaagaaaaggaacaacaagcagaaaaagaagaagaatcaacaagtaagaaaagacaagagcaggaagaaaccgcgacagattcagatgatgagtctgattcaaactccgaaaaggatcaagaagaggaacagtctcagttagagaaagccagggagtctagtagctcatcctctgactctggaagtgagagaatatcaattgatgaaacaaacgcaactgctcagagcttgaagataagttacagtaattatagctctgaggaagaagataacgagaagctaagcagtaaaagcagttgtaaatcaaacgaagaaagcactttttcgcggtatgacagcggtagagatcacgatgattcgtcaagaaacacaagcatgcgaatcaatagtcttgctcatgatgataaggaggaagacgaggaggagaatcatgaaacacggagctatagtgatcacgatgattctccaagaaacactagcatgcgaatcaatagtctttctcatgatgatgatgatgaggaagaggaggaggagaatcatgaaactcggcttgagcacattcatagctcgaaatctgaagaccaaagtgtttattcagatgatgatgccggcgaggaaagtggtgagtcgtctttgcataggatcgaagcaaaggaagaagaacatatttcttctgaccatgattaatcttttgcaacgaggaaaaaaatgtttcaacttttcgttttggaacaaaccatttgtcatataagtctaatatacatatcacatttcttttgagaaaatatgaaacttaaacaaaaaaaaaattatgtatatatctttaataccgtatattaggaagaaaatgtttacaaaaaaaaaaaaaaaaaaaactcgagggggggcccggtac

SEQ ID NO: 45532 - protein, 469 aa, Arabidopsis thaliana
  peptide (1)..(469): Ceres Seq. ID no. 13646495
  misc_feature (1)..(325): Homolog of NCBI NO: 15238886 NR Description: protein kinase family [Arabidopsis thaliana]
  misc_feature (1)..(275): Homolog of NCBI NO: 34907210 NR Description: putative serine/threonine kinase PBS1 protein
  misc_feature (1)..(305): Homolog of NCBI NO: 34395193 NR Description: putative protein serine/threonine kinase
  misc_feature (1)..(187): Homolog of NCBI NO: 15230190 NR Description: protein kinase family [Arabidopsis thaliana]
  misc_feature (1)..(187): Homolog of NCBI NO: 11994661 NR Description: receptor protein kinase-like protein [Arabidopsis
  misc_feature (1)..(196): Homolog of NCBI NO: 28416685 NR Description: At3g07070 [Arabidopsis thaliana]
  misc_feature (1)..(196): Homolog of NCBI NO: 18397825 NR Description: protein kinase family [Arabidopsis thaliana]
  misc_feature (1)..(392): Homolog of NCBI NO: 15232987 NR Description: protein kinase family [Arabidopsis thaliana]
  misc_feature (179)..(469): Homolog of NCBI NO: 15237361 NR Description: protein kinase family [Arabidopsis thaliana]
  misc_feature (1)..(443): Homolog of NCBI NO: 15237361 NR Description: protein kinase family [Arabidopsis thaliana]
MDWITRMKIAFGAAQGLDYLHDKVTPAVIYRDLKASNILLDAEFYPKLCDFGLHNLEPGTGDSLFLSSRVMDTYGYSAPEYTRGDDLTVKSDVYSFGVVLLELITGRRAIDTTKPNDEQNLVAWAQPIFKDPKRYPDMADPLLRKNFSERGLNQAVAITSMCLQEEPTARPLISDVMVALSFLSMSTEDGIPATVPMESFRDKSMSIALSRHGSCSVTPFCISRKDVGNKSSSSSDSEDEEEEKEQQAEKEEESTSKKRQEQEETATDSDDESDSNSEKDQEEEQSQLEKARESSSSSSDSGSERISIDETNATAQSLKISYSNYSSEEEDNEKLSSKSSCKSNEESTFSRYDSGRDHDDSSRNTSMRINSLAHDDKEEDEEENHETRSYSDHDDSPRNTSMRINSLSHDDDDEEEEEENHETRLEHIHSSKSEDQSVYSDDDAGEESGESSLHRIEAKEEEHISSDHD

SEQ ID NO: 45533 - protein, 463 aa, Arabidopsis thaliana
  peptide (1)..(463): Ceres Seq. ID no. 13646496
  misc_feature (1)..(319): Homolog of NCBI NO: 15238886 NR Description: protein kinase family [Arabidopsis thaliana]
  misc_feature (1)..(269): Homolog of NCBI NO: 34907210 NR Description: putative serine/threonine kinase PBS1 protein
  misc_feature (1)..(299): Homolog of NCBI NO: 34395193 NR Description: putative protein serine/threonine kinase
  misc_feature (1)..(181): Homolog of NCBI NO: 15230190 NR Description: protein kinase family [Arabidopsis thaliana]
  misc_feature (1)..(181): Homolog of NCBI NO: 11994661 NR Description: receptor protein kinase-like protein [Arabidopsis
  misc_feature (1)..(190): Homolog of NCBI NO: 28416685 NR Description: At3g07070 [Arabidopsis thaliana]
  misc_feature (1)..(190): Homolog of NCBI NO: 18397825 NR Description: protein kinase family [Arabidopsis thaliana]
  misc_feature (1)..(386): Homolog of NCBI NO: 15232987 NR Description: protein kinase family [Arabidopsis thaliana]
  misc_feature (173)..(463): Homolog of NCBI NO: 15237361 NR Description: protein kinase family [Arabidopsis thaliana]
  misc_feature (1)..(437): Homolog of NCBI NO: 15237361 NR Description: protein kinase family [Arabidopsis thaliana]
MKIAFGAAQGLDYLHDKVTPAVIYRDLKASNILLDAEFYPKLCDFGLHNLEPGTGDSLFLSSRVMDTYGYSAPEYTRGDDLTVKSDVYSFGVVLLELITGRRAIDTTKPNDEQNLVAWAQPIFKDPKRYPDMADPLLRKNFSERGLNQAVAITSMCLQEEPTARPLISDVMVALSFLSMSTEDGIPATVPMESFRDKSMSIALSRHGSCSVTPFCISRKDVGNKSSSSSDSEDEEEEKEQQAEKEEESTSKKRQEQEETATDSDDESDSNSEKDQEEEQSQLEKARESSSSSSDSGSERISIDETNATAQSLKISYSNYSSEEEDNEKLSSKSSCKSNEESTFSRYDSGRDHDDSSRNTSMRINSLAHDDKEEDEEENHETRSYSDHDDSPRNTSMRINSLSHDDDDEEEEEENHETRLEHIHSSKSEDQSVYSDDDAGEESGESSLHRIEAKEEEHISSDHD

SEQ ID NO: 45534 - protein, 399 aa, Arabidopsis thaliana
  peptide (1)..(399): Ceres Seq. ID no. 13646497
  misc_feature (1)..(255): Homolog of NCBI NO: 15238886 NR Description: protein kinase family [Arabidopsis thaliana]
  misc_feature (1)..(205): Homolog of NCBI NO: 34907210 NR Description: putative serine/threonine kinase PBS1 protein
  misc_feature (1)..(235): Homolog of NCBI NO: 34395193 NR Description: putative protein serine/threonine kinase
  misc_feature (1)..(117): Homolog of NCBI NO: 15230190 NR Description: protein kinase family [Arabidopsis thaliana]
  misc_feature (1)..(117): Homolog of NCBI NO: 11994661 NR Description: receptor protein kinase-like protein [Arabidopsis
  misc_feature (1)..(126): Homolog of NCBI NO: 28416685 NR Description: At3g07070 [Arabidopsis thaliana]
  misc_feature (1)..(126): Homolog of NCBI NO: 18397825 NR Description: protein kinase family [Arabidopsis thaliana]
  misc_feature (1)..(322): Homolog of NCBI NO: 15232987 NR Description: protein kinase family [Arabidopsis thaliana]
  misc_feature (109)..(399): Homolog of NCBI NO: 15237361 NR Description: protein kinase family [Arabidopsis thaliana]
  misc_feature (1)..(373): Homolog of NCBI NO: 15237361 NR Description: protein kinase family [Arabidopsis thaliana]
MDTYGYSAPEYTRGDDLTVKSDVYSFGVVLLELITGRRAIDTTKPNDEQNLVAWAQPIFKDPKRYPDMADPLLRKNFSERGLNQAVAITSMCLQEEPTARPLISDVMVALSFLSMSTEDGIPATVPMESFRDKSMSIALSRHGSCSVTPFCISRKDVGNKSSSSSDSEDEEEEKEQQAEKEEESTSKKRQEQEETATDSDDESDSNSEKDQEEEQSQLEKARESSSSSSDSGSERISIDETNATAQSLKISYSNYSSEEEDNEKLSSKSSCKSNEESTFSRYDSGRDHDDSSRNTSMRINSLAHDDKEEDEEENHETRSYSDHDDSPRNTSMRINSLSHDDDDEEEEEENHETRLEHIHSSKSEDQSVYSDDDAGEESGESSLHRIEAKEEEHISSDHD

SEQ ID NO: 45535 - DNA, 1850 bp, Arabidopsis thaliana
  misc_feature (1)..(1850): Ceres Seq. ID no. 13576295
  misc_feature: MA Experiment ID: 20000184 Result: Down-regulated in Transcription
  misc_feature: MA Experiment 20000184 PARAMETER Experiment Name: At_Shoots__P Parameter: Age (day) Value: 7
  misc_feature: MA Experiment 20000184 PARAMETER Experiment Name: At_Shoots__P Parameter: Tissue Value: Shoots vs. Whole Plant
actctgaacactctatgactaaaagaaaaaatcattcacctcgataccagaaagaagaaaagtcatcgcttttgggaaatttgatgaacaaagaccaaatcttaaaactcgaattcttctggttcctaaaaagtggctgtcaagaagagtgagacatgcatcaaactctctcttctcctgccatggcgtcaaacctccggaaaccctatttcctcaggtacttaactattcttccccaatcgatgatggtcgaaagctgaaacctttttctgcaaatcgattaaccgacaagaaaatccaacccaacccacccactttgttttgtttggatgataaaaatgtcggaaaagagtttgctttcttcaaaattcctcttttacacgataactgtttcaacgctactcttcattgtctcttctctcgtcttccttcaacgccacgattcttctttcacttcaagtttagttcgcaagctgattcttccaagaacagacatcaagaacgaagaattcggactaatcgatacgaaatgcgatcgagacagagatgtgttgaaggtgtttatgtacgatctaccctctgagtttcactttgggatattgaattggcacaaaaaaggatctgagatttggccaaatgtcaacaacattagtacaatcccatcttatcctggtgggttaaatcgtcaacacagtgtagagtattggctaacacttgatttattagcttcagagacacctgaaatcaagagaccttgtagtagtgcagctattagagtgaagaactctaatgaagctgatatagttttcgtgcctttctttgcttcgttgagttacaatcggaaatcgaagctccgtggaaacgaaacaagcagtgatgatagattgttgcaagaaagattagttgagttcttgaaaagtcaagatgagtggaaaagatttgatgggaaagatcatttgatagtagctcaccatccaaacagtttgctctatgcaagaaactttcttggatcagcaatgtttgttctttcggatttcggaaggtattcgtctgctatcgccaatcttgagaaagatatcattgcgccttacgtgcacgtcgttaagactatctctaacaacgagtcagcttcgtttgagaagcgtcctgtattggcatatttccaaggagctatctatagaaaagatggtggaactattcgtcaagaactgtataaccttctgaaagatgagaaagatgttcactttgcatttggaactgttagaggaaatgggactaaacaaactggtaaaggaatggcttcctcgaagttttgtctcaatatcgcgggtgacactccttcctctaaccgtcttttcgatgccattgtgagccattgtgttccggttataatcagtgatcagattgagcttccatttgaagatactcttgattattcgggtttctccgtgtttgtgcatgcttctgaagctgtaaagaaagagttcttggtgaatattctcagagggataacagaggatcagtggaagaagaagtgggggagattgaaagaggttgctgggtgttttgagtatcgctttccttcgcaagttggagattctgtgaatatgatttggtcagcggtttcgcataagctttcttcacttcagtttgatgttcatagaaagaatcgctaccgtagatctgaaatgtttgatagaaacggttcgagttaagatcatgtatgtgaaatatactacattctctttatgcttcatgtctgttttcttttcttgagttgaaaaagataacagtcaaatccttcaactcaaggtctaagttaatttgacagtacaagtcaagttttcact

SEQ ID NO: 45536 - protein, 461 aa, Arabidopsis thaliana
  peptide (1)..(461): Ceres Seq. ID no. 13576296
  misc_feature (77)..(406): Pfam Name: Exostosin family Pfam Description: Exostosin family
  misc_feature (27)..(448): Homolog of NCBI NO: 30686300 NR Description: Exostosin family [Arabidopsis thaliana]
  misc_feature (75)..(448): Homolog of NCBI NO: 34899802 NR Description: OJ1092_A07.9 [Oryza sativa (japonica
  misc_feature (318)..(436): Homolog of NCBI NO: 7487224 NR Description: hypothetical protein T1F15.13 - Arabidopsis
  misc_feature (68)..(306): Homolog of NCBI NO: 7487224 NR Description: hypothetical protein T1F15.13 - Arabidopsis
  misc_feature (68)..(450): Homolog of NCBI NO: 22330483 NR Description: Exostosin family [Arabidopsis thaliana]
  misc_feature (75)..(450): Homolog of NCBI NO: 19386797 NR Description: OJ1485_B09.5 [Oryza sativa (japonica
  misc_feature (75)..(451): Homolog of NCBI NO: 15228598 NR Description: Exostosin family [Arabidopsis thaliana]
  misc_feature (1)..(452): Homolog of NCBI NO: 15230692 NR Description: Exostosin family [Arabidopsis thaliana]
  misc_feature (4)..(461): Homolog of NCBI NO: 25406363 NR Description: F25A4.34 [imported] - Arabidopsis thaliana
  misc_feature (1)..(461): Homolog of NCBI NO: 18410670 NR Description: Exostosin family [Arabidopsis thaliana]
MIKMSEKSLLSSKFLFYTITVSTLLFIVSSLVFLQRHDSSFTSSLVRKLILPRTDIKNEEFGLIDTKCDRDRDVLKVFMYDLPSEFHFGILNWHKKGSEIWPNVNNISTIPSYPGGLNRQHSVEYWLTLDLLASETPEIKRPCSSAAIRVKNSNEADIVFVPFFASLSYNRKSKLRGNETSSDDRLLQERLVEFLKSQDEWKRFDGKDHLIVAHHPNSLLYARNFLGSAMFVLSDFGRYSSAIANLEKDIIAPYVHVVKTISNNESASFEKRPVLAYFQGAIYRKDGGTIRQELYNLLKDEKDVHFAFGTVRGNGTKQTGKGMASSKFCLNIAGDTPSSNRLFDAIVSHCVPVIISDQIELPFEDTLDYSGFSVFVHASEAVKKEFLVNILRGITEDQWKKKWGRLKEVAGCFEYRFPSQVGDSVNMIWSAVSHKLSSLQFDVHRKNRYRRSEMFDRNGSS

SEQ ID NO: 45537 - protein, 458 aa, Arabidopsis thaliana
  peptide (1)..(458): Ceres Seq. ID no. 13576297
  misc_feature (74)..(403): Pfam Name: Exostosin family Pfam Description: Exostosin family
  misc_feature (24)..(445): Homolog of NCBI NO: 30686300 NR Description: Exostosin family [Arabidopsis thaliana]
  misc_feature (72)..(445): Homolog of NCBI NO: 34899802 NR Description: OJ1092_A07.9 [Oryza sativa (japonica
  misc_feature (315)..(433): Homolog of NCBI NO: 7487224 NR Description: hypothetical protein T1F15.13 - Arabidopsis
  misc_feature (65)..(303): Homolog of NCBI NO: 7487224 NR Description: hypothetical protein T1F15.13 - Arabidopsis
  misc_feature (65)..(447): Homolog of NCBI NO: 22330483 NR Description: Exostosin family [Arabidopsis thaliana]
  misc_feature (72)..(447): Homolog of NCBI NO: 19386797 NR Description: OJ1485_B09.5 [Oryza sativa (japonica
  misc_feature (72)..(448): Homolog of NCBI NO: 15228598 NR Description: Exostosin family [Arabidopsis thaliana]
  misc_feature (1)..(449): Homolog of NCBI NO: 15230692 NR Description: Exostosin family [Arabidopsis thaliana]
  misc_feature (1)..(458): Homolog of NCBI NO: 25406363 NR Description: F25A4.34 [imported] - Arabidopsis thaliana
  misc_feature (1)..(458): Homolog of NCBI NO: 18410670 NR Description: Exostosin family [Arabidopsis thaliana]
MSEKSLLSSKFLFYTITVSTLLFIVSSLVFLQRHDSSFTSSLVRKLILPRTDIKNEEFGLIDTKCDRDRDVLKVFMYDLPSEFHFGILNWHKKGSEIWPNVNNISTIPSYPGGLNRQHSVEYWLTLDLLASETPEIKRPCSSAAIRVKNSNEADIVFVPFFASLSYNRKSKLRGNETSSDDRLLQERLVEFLKSQDEWKRFDGKDHLIVAHHPNSLLYARNFLGSAMFVLSDFGRYSSAIANLEKDIIAPYVHVVKTISNNESASFEKRPVLAYFQGAIYRKDGGTIRQELYNLLKDEKDVHFAFGTVRGNGTKQTGKGMASSKFCLNIAGDTPSSNRLFDAIVSHCVPVIISDQIELPFEDTLDYSGFSVFVHASEAVKKEFLVNILRGITEDQWKKKWGRLKEVAGCFEYRFPSQVGDSVNMIWSAVSHKLSSLQFDVHRKNRYRRSEMFDRNGSS

SEQ ID NO: 45538 - protein, 383 aa, Arabidopsis thaliana
  peptide (1)..(383): Ceres Seq. ID no. 13576298
  misc_feature (1)..(328): Pfam Name: Exostosin family Pfam Description: Exostosin family
  misc_feature (1)..(370): Homolog of NCBI NO: 30686300 NR Description: Exostosin family [Arabidopsis thaliana]
  misc_feature (1)..(370): Homolog of NCBI NO: 34899802 NR Description: OJ1092_A07.9 [Oryza sativa (japonica
  misc_feature (240)..(358): Homolog of NCBI NO: 7487224 NR Description: hypothetical protein T1F15.13 - Arabidopsis
  misc_feature (1)..(228): Homolog of NCBI NO: 7487224 NR Description: hypothetical protein T1F15.13 - Arabidopsis
  misc_feature (1)..(372): Homolog of NCBI NO: 22330483 NR Description: Exostosin family [Arabidopsis thaliana]
  misc_feature (1)..(372): Homolog of NCBI NO: 19386797 NR Description: OJ1485_B09.5 [Oryza sativa (japonica
  misc_feature (1)..(373): Homolog of NCBI NO: 15228598 NR Description: Exostosin family [Arabidopsis thaliana]
  misc_feature (1)..(374): Homolog of NCBI NO: 15230692 NR Description: Exostosin family [Arabidopsis thaliana]
  misc_feature (1)..(383): Homolog of NCBI NO: 25406363 NR Description: F25A4.34 [imported] - Arabidopsis thaliana
  misc_feature (1)..(383): Homolog of NCBI NO: 18410670 NR Description: Exostosin family [Arabidopsis thaliana]
MYDLPSEFHFGILNWHKKGSEIWPNVNNISTIPSYPGGLNRQHSVEYWLTLDLLASETPEIKRPCSSAAIRVKNSNEADIVFVPFFASLSYNRKSKLRGNETSSDDRLLQERLVEFLKSQDEWKRFDGKDHLIVAHHPNSLLYARNFLGSAMFVLSDFGRYSSAIANLEKDIIAPYVHVVKTISNNESASFEKRPVLAYFQGAIYRKDGGTIRQELYNLLKDEKDVHFAFGTVRGNGTKQTGKGMASSKFCLNIAGDTPSSNRLFDAIVSHCVPVIISDQIELPFEDTLDYSGFSVFVHASEAVKKEFLVNILRGITEDQWKKKWGRLKEVAGCFEYRFPSQVGDSVNMIWSAVSHKLSSLQFDVHRKNRYRRSEMFDRNGSS

SEQ ID NO: 45539 - DNA, 1622 bp, Arabidopsis thaliana
  misc_feature (1)..(1622): Ceres Seq. ID no. 13646614
  misc_feature: MA Experiment ID: 20000182 Result: Down-regulated in Transcription
  misc_feature: MA Experiment 20000182 PARAMETER Experiment Name: At_2mM_SA_P Parameter: Age (day) Value: 14
  misc_feature: MA Experiment 20000182 PARAMETER Experiment Name: At_2mM_SA_P Parameter: Organism Value: A. thaliana
  misc_feature: MA Experiment 20000182 PARAMETER Experiment Name: At_2mM_SA_P Parameter: Plant Line Value: WS
  misc_feature: MA Experiment 20000182 PARAMETER Experiment Name: At_2mM_SA_P Parameter: Timepoint (hr) Value: 6
  misc_feature: MA Experiment 20000182 PARAMETER Experiment Name: At_2mM_SA_P Parameter: Tissue Value: Aerial
  misc_feature: MA Experiment 20000182 PARAMETER Experiment Name: At_2mM_SA_P Parameter: Treatment Value: 2mM SA vs. No Treatment
  misc_feature: MA Experiment ID: 20000184 Result: Up-regulated in Transcription
  misc_feature: MA Experiment 20000184 PARAMETER Experiment Name: At_Shoots__P Parameter: Age (day) Value: 7
  misc_feature: MA Experiment 20000184 PARAMETER Experiment Name: At_Shoots__P Parameter: Tissue Value: Shoots vs. Whole Plant
  misc_feature: MA Experiment ID: 20000438 Result: Up-regulated in Transcription
  misc_feature: MA Experiment 20000438 PARAMETER Experiment Name: At_Shoots__P Parameter: Age (day) Value: 14
  misc_feature: MA Experiment 20000438 PARAMETER Experiment Name: At_Shoots__P Parameter: Tissue Value: Shoots vs. Whole Plant
  misc_feature: MA Experiment ID: 20000794 Result: Down-regulated in Transcription
  misc_feature: MA Experiment 20000794 PARAMETER Experiment Name: At_Petals_P Parameter: Age (day) Value: 23-25 days
  misc_feature: MA Experiment 20000794 PARAMETER Experiment Name: At_Petals_P Parameter: Plant Line Value: WS
  misc_feature: MA Experiment 20000794 PARAMETER Experiment Name: At_Petals_P Parameter: Tissue Value: Petals vs. Whole plant
  misc_feature: MA Experiment ID: 20001451 Result: Down-regulated in Transcription
  misc_feature: MA Experiment 20001451 PARAMETER Experiment Name: At_Far-red-induction_P Parameter: Age (day) Value: 7
  misc_feature: MA Experiment 20001451 PARAMETER Experiment Name: At_Far-red-induction_P Parameter: Light Value: Far-red vs. White
  misc_feature: MA Experiment 20001451 PARAMETER Experiment Name: At_Far-red-induction_P Parameter: Organism Value: A. thaliana
  misc_feature: MA Experiment 20001451 PARAMETER Experiment Name: At_Far-red-induction_P Parameter: Plant Line Value: Columbia
  misc_feature: MA Experiment 20001451 PARAMETER Experiment Name: At_Far-red-induction_P Parameter: Timepoint (hr) Value: 24
  misc_feature: MA Experiment 20001451 PARAMETER Experiment Name: At_Far-red-induction_P Parameter: Tissue Value: Whole Plant
gagctaccgttttctgttcactctgtacaacacacttgtctccttcttcctctcttctcttctctctctccatttcaaaaagggtgaaacttttcttctctttctagaagaagaaaaccagagatacagagagattctctctctaccaaacccctggaaaaatctccagattcatcttccatagaccaaactaaactctgttcactgtactctctgtcattgtcctgtaagagaaattgaaaaccctaggagattttgaatttcgtaaaaccctaaacacaaaaatgaaaatcccagaaaaacccatcttcttaatcttcgtctctttgatcctagcttcgagcttaaccttcacagcgacagcgaaatcaacaatcgagccttgctcaagcaacgacacttgcaacgctttactcggctacacactctacaccgacctcaaagtctcagaagtcgcatctctcttccaagtagacccaatctctatccttttagctaacgccatcgatatctcttacccagacgtcgaaaaccatatccttccttcgaagctcttcctcaaaatcccaatcacttgctcctgcgtcgacggaatcagaaaatctgtctctacccattacaaaacccgaccttctgacaatctaggatcgattgctgactctgtttacggaggcttggtctctgctgagcagatccaggaagctaactcggtgaatgacccgtcgctgcttgatgttgggactagtcttgttatccccttgccttgtgcttgtttcaatggcaccgacaattctttgccggctgtttatttgtcgtatgttgtgaaggagattgatacattggtcggaatcgcgaggaggtattcgactactattactgatttgatgaatgtgaatgctatgggagctcctgatgttagttctggagatattctcgctgttcctttgtcagcttgtgcttcaaagttccccagatacgcttcggatttcggattgattgttccaaatggtagctatgctctagctgcaggtcactgtgtgcaatgcagctgtgcgcttgggagccgcaatttgtattgtgagcctgcttccctagccgtctcttgctcaagtatgcagtgtagaaacagcaacctcatgctcggtaacatcacggtgcagcagactagcgctggctgtaatgttacaacttgtgattacaacggtatagccaacggcactatcttaaccatgctgaccaggtctcttcaacctcgatgtcccggacctcaacaatttgcgccgcttctagctccaccagatactgttcctagggatgtaatgtatgcaccagcaccttcaccagattttgatggtccaggatccatagcatcttcaccaagatcatctatgcttcctggtggtggtatcttgccaggtaatcccgctaatggtccagccggtagcatctcaaccgcctctgcctcctcagttagctacttctttatcacatttctcatctccattgcttctttttcccttgctttgtcatcttgattcaacaacaattgtttattttccgcgcattaaaaactcctatgtgaaattcttgatgagtagaaccaaaacattgttattgatccc

SEQ ID NO: 45540 - protein, 416 aa, Arabidopsis thaliana
  peptide (1)..(416): Ceres Seq. ID no. 15219074
  misc_feature (112)..(158): Pfam Name: LysM domain Pfam Description: LysM domain
  misc_feature (13)..(222): Homolog of NCBI NO: 37651074 NR Description: Nod-factor receptor 5 [Lotus corniculatus var.
  misc_feature (14)..(318): Homolog of NCBI NO: 22758281 NR Description: Unknown protein [Oryza sativa (japonica
  misc_feature (13)..(336): Homolog of NCBI NO: 21593990 NR Description: unknown [Arabidopsis thaliana]
  misc_feature (13)..(336): Homolog of NCBI NO: 18398317 NR Description: delta-8 sphingolipid desaturase [Arabidopsis
  misc_feature (13)..(337): Homolog of NCBI NO: 28207683 NR Description: Erwinia induced protein 1 [Solanum tuberosum]
  misc_feature (1)..(409): Homolog of NCBI NO: 25406518 NR Description: unknown protein T5M16.22 [imported] - Arabidopsis
  misc_feature (1)..(409): Homolog of NCBI NO: 30699276 NR Description: expressed protein [Arabidopsis thaliana]
  misc_feature (1)..(316): Homolog of NCBI NO: 30687570 NR Description: expressed protein [Arabidopsis thaliana]
  misc_feature (1)..(416): Homolog of NCBI NO: 18395044 NR Description: expressed protein [Arabidopsis thaliana]
MKIPEKPIFLIFVSLILASSLTFTATAKSTIEPCSSNDTCNALLGYTLYTDLKVSEVASLFQVDPISILLANAIDISYPDVENHILPSKLFLKIPITCSCVDGIRKSVSTHYKTRPSDNLGSIADSVYGGLVSAEQIQEANSVNDPSLLDVGTSLVIPLPCACFNGTDNSLPAVYLSYVVKEIDTLVGIARRYSTTITDLMNVNAMGAPDVSSGDILAVPLSACASKFPRYASDFGLIVPNGSYALAAGHCVQCSCALGSRNLYCEPASLAVSCSSMQCRNSNLMLGNITVQQTSAGCNVTTCDYNGIANGTILTMLTRSLQPRCPGPQQFAPLLAPPDTVPRDVMYAPAPSPDFDGPGSIASSPRSSMLPGGGILPGNPANGPAGSISTASASSVSYFFITFLISIASFSLALSS

SEQ ID NO: 45541 - protein, 216 aa, Arabidopsis thaliana
  peptide (1)..(216): Ceres Seq. ID no. 15219075
  misc_feature (1)..(22): Homolog of NCBI NO: 37651074 NR Description: Nod-factor receptor 5 [Lotus corniculatus var.
  misc_feature (1)..(118): Homolog of NCBI NO: 22758281 NR Description: Unknown protein [Oryza sativa (japonica
  misc_feature (1)..(136): Homolog of NCBI NO: 21593990 NR Description: unknown [Arabidopsis thaliana]
  misc_feature (1)..(136): Homolog of NCBI NO: 18398317 NR Description: delta-8 sphingolipid desaturase [Arabidopsis
  misc_feature (1)..(137): Homolog of NCBI NO: 28207683 NR Description: Erwinia induced protein 1 [Solanum tuberosum]
  misc_feature (1)..(209): Homolog of NCBI NO: 25406518 NR Description: unknown protein T5M16.22 [imported] - Arabidopsis
  misc_feature (1)..(209): Homolog of NCBI NO: 30699276 NR Description: expressed protein [Arabidopsis thaliana]
  misc_feature (1)..(116): Homolog of NCBI NO: 30687570 NR Description: expressed protein [Arabidopsis thaliana]
  misc_feature (1)..(216): Homolog of NCBI NO: 18395044 NR Description: expressed protein [Arabidopsis thaliana]
MNVNAMGAPDVSSGDILAVPLSACASKFPRYASDFGLIVPNGSYALAAGHCVQCSCALGSRNLYCEPASLAVSCSSMQCRNSNLMLGNITVQQTSAGCNVTTCDYNGIANGTILTMLTRSLQPRCPGPQQFAPLLAPPDTVPRDVMYAPAPSPDFDGPGSIASSPRSSMLPGGGILPGNPANGPAGSISTASASSVSYFFITFLISIASFSLALSS

SEQ ID NO: 45542 - protein, 211 aa, Arabidopsis thaliana
  peptide (1)..(211): Ceres Seq. ID no. 15219076
  misc_feature (1)..(17): Homolog of NCBI NO: 37651074 NR Description: Nod-factor receptor 5 [Lotus corniculatus var.
  misc_feature (1)..(113): Homolog of NCBI NO: 22758281 NR Description: Unknown protein [Oryza sativa (japonica
  misc_feature (1)..(131): Homolog of NCBI NO: 21593990 NR Description: unknown [Arabidopsis thaliana]
  misc_feature (1)..(131): Homolog of NCBI NO: 18398317 NR Description: delta-8 sphingolipid desaturase [Arabidopsis
  misc_feature (1)..(132): Homolog of NCBI NO: 28207683 NR Description: Erwinia induced protein 1 [Solanum tuberosum]
  misc_feature (1)..(204): Homolog of NCBI NO: 25406518 NR Description: unknown protein T5M16.22 [imported] - Arabidopsis
  misc_feature (1)..(204): Homolog of NCBI NO: 30699276 NR Description: expressed protein [Arabidopsis thaliana]
  misc_feature (1)..(111): Homolog of NCBI NO: 30687570 NR Description: expressed protein [Arabidopsis thaliana]
  misc_feature (1)..(211): Homolog of NCBI NO: 18395044 NR Description: expressed protein [Arabidopsis thaliana]
MGAPDVSSGDILAVPLSACASKFPRYASDFGLIVPNGSYALAAGHCVQCSCALGSRNLYCEPASLAVSCSSMQCRNSNLMLGNITVQQTSAGCNVTTCDYNGIANGTILTMLTRSLQPRCPGPQQFAPLLAPPDTVPRDVMYAPAPSPDFDGPGSIASSPRSSMLPGGGILPGNPANGPAGSISTASASSVSYFFITFLISIASFSLALSS

SEQ ID NO: 45543 - DNA, 1324 bp, Arabidopsis thaliana; identical to SEQ ID NO: 23955
  misc_feature (1)..(1324): Ceres Seq. ID no. 13591589
  misc_feature: MA Experiment ID: 108434 Result: Up-regulated in Transcription
  misc_feature: MA Experiment 108434 PARAMETER Experiment Name: At_Root_Tips_cDNA_P Parameter: Tissue Value: Root Tips
  misc_feature: MA Experiment ID: 108464 Result: Down-regulated in Transcription
  misc_feature: MA Experiment 108464 PARAMETER Experiment Name: At_Germinating_Seeds_cDNA_P Parameter: Age (day) Value: 4 vs. 0
  misc_feature: MA Experiment 108464 PARAMETER Experiment Name: At_Germinating_Seeds_cDNA_P Parameter: Tissue Value: Germinating Seeds
  misc_feature: MA Experiment ID: 20000112 Result: Up-regulated in Transcription
  misc_feature: MA Experiment 20000112 PARAMETER Experiment Name: At_42deg_Heat_cDNA_P Parameter: Temperature (deg C) Value: 42 vs. 22
  misc_feature: MA Experiment 20000112 PARAMETER Experiment Name: At_42deg_Heat_cDNA_P Parameter: Timepoint (hr) Value: 2
  misc_feature: MA Experiment 20000112 PARAMETER Experiment Name: At_42deg_Heat_cDNA_P Parameter: Tissue Value: Aerial
  misc_feature: MA Experiment ID: 20000113 Result: Up-regulated in Transcription
  misc_feature: MA Experiment 20000113 PARAMETER Experiment Name: At_42deg_Heat_cDNA_P Parameter: Temperature (deg C) Value: 42 vs. 22
  misc_feature: MA Experiment 20000113 PARAMETER Experiment Name: At_42deg_Heat_cDNA_P Parameter: Timepoint (hr) Value: 8
  misc_feature: MA Experiment 20000113 PARAMETER Experiment Name: At_42deg_Heat_cDNA_P Parameter: Tissue Value: Aerial
  misc_feature: MA Experiment ID: 20000144 Result: Up-regulated in Transcription
  misc_feature: MA Experiment 20000144 PARAMETER Experiment Name: At_42deg_Heat_cDNA_P Parameter: Temperature (deg C) Value: 42 vs. 22
  misc_feature: MA Experiment 20000144 PARAMETER Experiment Name: At_42deg_Heat_cDNA_P Parameter: Timepoint (hr) Value: 1
  misc_feature: MA Experiment 20000144 PARAMETER Experiment Name: At_42deg_Heat_cDNA_P Parameter: Tissue Value: Aerial
  misc_feature: MA Experiment ID: 20000184 Result: Up-regulated in Transcription
  misc_feature: MA Experiment 20000184 PARAMETER Experiment Name: At_Shoots__P Parameter: Age (day) Value: 7
  misc_feature: MA Experiment 20000184 PARAMETER Experiment Name: At_Shoots__P Parameter: Tissue Value: Shoots vs. Whole Plant
  misc_feature: MA Experiment ID: 20000185 Result: Up-regulated in Transcription
  misc_feature: MA Experiment 20000185 PARAMETER Experiment Name: At_Roots__P Parameter: Age (day) Value: 7 vs. 21
  misc_feature: MA Experiment 20000185 PARAMETER Experiment Name: At_Roots__P Parameter: Organism Value: A. thaliana
  misc_feature: MA Experiment 20000185 PARAMETER Experiment Name: At_Roots__P Parameter: Tissue Value: Roots vs. Whole Plant
  misc_feature: MA Experiment ID: 20000214 Result: Up-regulated in Transcription
  misc_feature: MA Experiment 20000214 PARAMETER Experiment Name: At_4deg_Cold_P Parameter: Timepoint (hr) Value: 6
  misc_feature: MA Experiment ID: 20000234 Result: Up-regulated in Transcription
  misc_feature: MA Experiment 20000234 PARAMETER Experiment Name: At_Siliques_P Parameter: Age (day) Value: 21
  misc_feature: MA Experiment 20000234 PARAMETER Experiment Name: At_Siliques_P Parameter: Organism Value: A. thaliana
  misc_feature: MA Experiment 20000234 PARAMETER Experiment Name: At_Siliques_P Parameter: Plant Line Value: WS
  misc_feature: MA Experiment 20000234 PARAMETER Experiment Name: At_Siliques_P Parameter: Tissue Value: Less Than 5mm Siliques vs. Whole Plant
  misc_feature: MA Experiment ID: 20000235 Result: Up-regulated in Transcription
  misc_feature: MA Experiment 20000235 PARAMETER Experiment Name: At_Siliques_P Parameter: Age (day) Value: 21
  misc_feature: MA Experiment 20000235 PARAMETER Experiment Name: At_Siliques_P Parameter: Organism Value: A. thaliana
  misc_feature: MA Experiment 20000235 PARAMETER Experiment Name: At_Siliques_P Parameter: Plant Line Value: WS
  misc_feature: MA Experiment 20000235 PARAMETER Experiment Name: At_Siliques_P Parameter: Tissue Value: 5-10mm Siliques vs. Whole Plant
  misc_feature: MA Experiment ID: 20000439 Result: Up-regulated in Transcription
  misc_feature: MA Experiment 20000439 PARAMETER Experiment Name: At_Roots__P Parameter: Age (day) Value: 14 vs. 21
  misc_feature: MA Experiment 20000439 PARAMETER Experiment Name: At_Roots__P Parameter: Organism Value: A. thaliana
  misc_feature: MA Experiment 20000439 PARAMETER Experiment Name: At_Roots__P Parameter: Tissue Value: Roots vs. Whole Plant
  misc_feature: MA Experiment ID: 20001248 Result: Down-regulated in Transcription
  misc_feature: MA Experiment 20001248 PARAMETER Experiment Name: At_Far-red-induction_P Parameter: Age (day) Value: 7
  misc_feature: MA Experiment 20001248 PARAMETER Experiment Name: At_Far-red-induction_P Parameter: Light Value: Far-red vs. White
  misc_feature: MA Experiment 20001248 PARAMETER Experiment Name: At_Far-red-induction_P Parameter: Organism Value: A. thaliana
  misc_feature: MA Experiment 20001248 PARAMETER Experiment Name: At_Far-red-induction_P Parameter: Plant Line Value: Columbia
  misc_feature: MA Experiment 20001248 PARAMETER Experiment Name: At_Far-red-induction_P Parameter: Timepoint (hr) Value: 4
  misc_feature: MA Experiment 20001248 PARAMETER Experiment Name: At_Far-red-induction_P Parameter: Tissue Value: Whole Plant

SEQ ID NO: 45544 - protein, 364 aa, Arabidopsis thaliana; identical to SEQ ID NO: 23956
  peptide (1)..(364): Ceres Seq. ID no. 13591590
  misc_feature (183)..(344): Pfam Name: Glyceraldehyde 3-phosphate dehydrogenase, Pfam Description: Glyceraldehyde 3-phosphate dehydrogenase,
  misc_feature (183)..(344): Pfam Name: Glyceraldehyde 3-phosphate dehydrogenase, Pfam Description: Glyceraldehyde 3-phosphate dehydrogenase,
  misc_feature (183)..(344): Pfam Name: Glyceraldehyde 3-phosphate dehydrogenase, Pfam Description: Glyceraldehyde 3-phosphate dehydrogenase,
  misc_feature (31)..(362): Homolog of NCBI NO: 4539543 NR Description: glyceraldehyde-3-phosphate dehydrogenase
  misc_feature (32)..(363): Homolog of NCBI NO: 462137 NR Description: GLYCERALDEHYDE 3-PHOSPHATE DEHYDROGENASE,
  misc_feature (27)..(362): Homolog of NCBI NO: 120669 NR Description: Glyceraldehyde 3-phosphate dehydrogenase,
  misc_feature (31)..(364): Homolog of NCBI NO: 462141 NR Description: Glyceraldehyde 3-phosphate dehydrogenase (GAPDH)
  misc_feature (27)..(364): Homolog of NCBI NO: 22094840 NR Description: glyceraldehyde 3-phosphate dehydrogenase [Solanum
  misc_feature (31)..(362): Homolog of NCBI NO: 4539543 NR Description: glyceraldehyde-3-phosphate dehydrogenase
  misc_feature (27)..(362): Homolog of NCBI NO: 120669 NR Description: Glyceraldehyde 3-phosphate dehydrogenase,
  misc_feature (27)..(364): Homolog of NCBI NO: 22094840 NR Description: glyceraldehyde 3-phosphate dehydrogenase [Solanum
  misc_feature (31)..(364): Homolog of NCBI NO: 462141 NR Description: Glyceraldehyde 3-phosphate dehydrogenase (GAPDH)
  misc_feature (27)..(362): Homolog of NCBI NO: 120669 NR Description: Glyceraldehyde 3-phosphate dehydrogenase,
  misc_feature (32)..(363): Homolog of NCBI NO: 462137 NR Description: GLYCERALDEHYDE 3-PHOSPHATE DEHYDROGENASE,
  misc_feature (31)..(362): Homolog of NCBI NO: 4539543 NR Description: glyceraldehyde-3-phosphate dehydrogenase
  misc_feature (27)..(364): Homolog of NCBI NO: 15229231 NR Description: glyceraldehyde-3-phosphate dehydrogenase C
  misc_feature (27)..(364): Homolog of NCBI NO: 21593240 NR Description: glyceraldehyde-3-phosphate dehydrogenase C
  misc_feature (27)..(364): Homolog of NCBI NO: 81622 NR Description: glyceraldehyde-3-phosphate dehydrogenase
  misc_feature (27)..(364): Homolog of NCBI NO: 15222848 NR Description: glyceraldehyde-3-phosphate dehydrogenase -related
  misc_feature (27)..(364): Homolog of NCBI NO: 120675 NR Description: Glyceraldehyde 3-phosphate dehydrogenase,
  misc_feature (27)..(364): Homolog of NCBI NO: 15229231 NR Description: glyceraldehyde-3-phosphate dehydrogenase C
  misc_feature (27)..(364): Homolog of NCBI NO: 21593240 NR Description: glyceraldehyde-3-phosphate dehydrogenase C
  misc_feature (27)..(364): Homolog of NCBI NO: 81622 NR Description: glyceraldehyde-3-phosphate dehydrogenase
  misc_feature (27)..(364): Homolog of NCBI NO: 15222848 NR Description: glyceraldehyde-3-phosphate dehydrogenase -related
  misc_feature (27)..(364): Homolog of NCBI NO: 120675 NR Description: Glyceraldehyde 3-phosphate dehydrogenase,
  misc_feature (27)..(364): Homolog of NCBI NO: 22094840 NR Description: glyceraldehyde 3-phosphate dehydrogenase [Solanum
  misc_feature (31)..(364): Homolog of NCBI NO: 462141 NR Description: Glyceraldehyde 3-phosphate dehydrogenase (GAPDH)
  misc_feature (32)..(363): Homolog of NCBI NO: 462137 NR Description: GLYCERALDEHYDE 3-PHOSPHATE DEHYDROGENASE,
  misc_feature (27)..(364): Homolog of NCBI NO: 120675 NR Description: Glyceraldehyde 3-phosphate dehydrogenase,
  misc_feature (27)..(364): Homolog of NCBI NO: 15222848 NR Description: glyceraldehyde-3-phosphate dehydrogenase -related
  misc_feature (27)..(364): Homolog of NCBI NO: 81622 NR Description: glyceraldehyde-3-phosphate dehydrogenase
  misc_feature (27)..(364): Homolog of NCBI NO: 21593240 NR Description: glyceraldehyde-3-phosphate dehydrogenase C
  misc_feature (27)..(364): Homolog of NCBI NO: 15229231 NR Description: glyceraldehyde-3-phosphate dehydrogenase C

SEQ ID NO: 45545 - protein, 338 aa, Arabidopsis thaliana; identical to SEQ ID NO: 23957
  peptide (1)..(338): Ceres Seq. ID no. 13591591
  misc_feature (157)..(318): Pfam Name: Glyceraldehyde 3-phosphate dehydrogenase, Pfam Description: Glyceraldehyde 3-phosphate dehydrogenase,
  misc_feature (157)..(318): Pfam Name: Glyceraldehyde 3-phosphate dehydrogenase, Pfam Description: Glyceraldehyde 3-phosphate dehydrogenase,
  misc_feature (157)..(318): Pfam Name: Glyceraldehyde 3-phosphate dehydrogenase, Pfam Description: Glyceraldehyde 3-phosphate dehydrogenase,
  misc_feature (5)..(336): Homolog of NCBI NO: 4539543 NR Description: glyceraldehyde-3-phosphate dehydrogenase
  misc_feature (6)..(337): Homolog of NCBI NO: 462137 NR Description: GLYCERALDEHYDE 3-PHOSPHATE DEHYDROGENASE,
  misc_feature (1)..(336): Homolog of NCBI NO: 120669 NR Description: Glyceraldehyde 3-phosphate dehydrogenase,
  misc_feature (5)..(338): Homolog of NCBI NO: 462141 NR Description: Glyceraldehyde 3-phosphate dehydrogenase (GAPDH)
  misc_feature (1)..(338): Homolog of NCBI NO: 22094840 NR Description: glyceraldehyde 3-phosphate dehydrogenase [Solanum
  misc_feature (5)..(336): Homolog of NCBI NO: 4539543 NR Description: glyceraldehyde-3-phosphate dehydrogenase
  misc_feature (1)..(336): Homolog of NCBI NO: 120669 NR Description: Glyceraldehyde 3-phosphate dehydrogenase,
  misc_feature (1)..(338): Homolog of NCBI NO: 22094840 NR Description: glyceraldehyde 3-phosphate dehydrogenase [Solanum
  misc_feature (5)..(338): Homolog of NCBI NO: 462141 NR Description: Glyceraldehyde 3-phosphate dehydrogenase (GAPDH)
  misc_feature (1)..(336): Homolog of NCBI NO: 120669 NR Description: Glyceraldehyde 3-phosphate dehydrogenase,
  misc_feature (6)..(337): Homolog of NCBI NO: 462137 NR Description: GLYCERALDEHYDE 3-PHOSPHATE DEHYDROGENASE,
  misc_feature (5)..(336): Homolog of NCBI NO: 4539543 NR Description: glyceraldehyde-3-phosphate dehydrogenase
  misc_feature (1)..(338): Homolog of NCBI NO: 15229231 NR Description: glyceraldehyde-3-phosphate dehydrogenase C
  misc_feature (1)..(338): Homolog of NCBI NO: 21593240 NR Description: glyceraldehyde-3-phosphate dehydrogenase C
  misc_feature (1)..(338): Homolog of NCBI NO: 81622 NR Description: glyceraldehyde-3-phosphate dehydrogenase
  misc_feature (1)..(338): Homolog of NCBI NO: 15222848 NR Description: glyceraldehyde-3-phosphate dehydrogenase -related
  misc_feature (1)..(338): Homolog of NCBI NO: 120675 NR Description: Glyceraldehyde 3-phosphate dehydrogenase,
  misc_feature (1)..(338): Homolog of NCBI NO: 15229231 NR Description: glyceraldehyde-3-phosphate dehydrogenase C
  misc_feature (1)..(338): Homolog of NCBI NO: 21593240 NR Description: glyceraldehyde-3-phosphate dehydrogenase C
  misc_feature (1)..(338): Homolog of NCBI NO: 81622 NR Description: glyceraldehyde-3-phosphate dehydrogenase
  misc_feature (1)..(338): Homolog of NCBI NO: 15222848 NR Description: glyceraldehyde-3-phosphate dehydrogenase -related
  misc_feature (1)..(338): Homolog of NCBI NO: 120675 NR Description: Glyceraldehyde 3-phosphate dehydrogenase,
  misc_feature (1)..(338): Homolog of NCBI NO: 22094840 NR Description: glyceraldehyde 3-phosphate dehydrogenase [Solanum
  misc_feature (5)..(338): Homolog of NCBI NO: 462141 NR Description: Glyceraldehyde 3-phosphate dehydrogenase (GAPDH)
  misc_feature (6)..(337): Homolog of NCBI NO: 462137 NR Description: GLYCERALDEHYDE 3-PHOSPHATE DEHYDROGENASE,
  misc_feature (1)..(338): Homolog of NCBI NO: 120675 NR Description: Glyceraldehyde 3-phosphate dehydrogenase,
  misc_feature (1)..(338): Homolog of NCBI NO: 15222848 NR Description: glyceraldehyde-3-phosphate dehydrogenase -related
  misc_feature (1)..(338): Homolog of NCBI NO: 81622 NR Description: glyceraldehyde-3-phosphate dehydrogenase
  misc_feature (1)..(338): Homolog of NCBI NO: 21593240 NR Description: glyceraldehyde-3-phosphate dehydrogenase C
  misc_feature (1)..(338): Homolog of NCBI NO: 15229231 NR Description: glyceraldehyde-3-phosphate dehydrogenase C

SEQ ID NO: 45546 - protein, 294 aa, Arabidopsis thaliana; identical to SEQ ID NO: 23958
  peptide (1)..(294): Ceres Seq. ID no. 13591592
  misc_feature (113)..(274): Pfam Name: Glyceraldehyde 3-phosphate dehydrogenase, Pfam Description: Glyceraldehyde 3-phosphate dehydrogenase,
  misc_feature (113)..(274): Pfam Name: Glyceraldehyde 3-phosphate dehydrogenase, Pfam Description: Glyceraldehyde 3-phosphate dehydrogenase,
  misc_feature (113)..(274): Pfam Name: Glyceraldehyde 3-phosphate dehydrogenase, Pfam Description: Glyceraldehyde 3-phosphate dehydrogenase,
  misc_feature (1)..(292): Homolog of NCBI NO: 4539543 NR Description: glyceraldehyde-3-phosphate dehydrogenase
  misc_feature (1)..(293): Homolog of NCBI NO: 462137 NR Description: GLYCERALDEHYDE 3-PHOSPHATE DEHYDROGENASE,
  misc_feature (1)..(292): Homolog of NCBI NO: 120669 NR Description: Glyceraldehyde 3-phosphate dehydrogenase,
  misc_feature (1)..(294): Homolog of NCBI NO: 462141 NR Description: Glyceraldehyde 3-phosphate dehydrogenase (GAPDH)
  misc_feature (1)..(294): Homolog of NCBI NO: 22094840 NR Description: glyceraldehyde 3-phosphate dehydrogenase [Solanum
  misc_feature (1)..(292): Homolog of NCBI NO: 4539543 NR Description: glyceraldehyde-3-phosphate dehydrogenase
  misc_feature (1)..(292): Homolog of NCBI NO: 120669 NR Description: Glyceraldehyde 3-phosphate dehydrogenase,
  misc_feature (1)..(294): Homolog of NCBI NO: 22094840 NR Description: glyceraldehyde 3-phosphate dehydrogenase [Solanum
  misc_feature (1)..(294): Homolog of NCBI NO: 462141 NR Description: Glyceraldehyde 3-phosphate dehydrogenase (GAPDH)
  misc_feature (1)..(292): Homolog of NCBI NO: 120669 NR Description: Glyceraldehyde 3-phosphate dehydrogenase,
  misc_feature (1)..(293): Homolog of NCBI NO: 462137 NR Description: GLYCERALDEHYDE 3-PHOSPHATE DEHYDROGENASE,
  misc_feature (1)..(292): Homolog of NCBI NO: 4539543 NR Description: glyceraldehyde-3-phosphate dehydrogenase
  misc_feature (1)..(294): Homolog of NCBI NO: 15229231 NR Description: glyceraldehyde-3-phosphate dehydrogenase C
  misc_feature (1)..(294): Homolog of NCBI NO: 21593240 NR Description: glyceraldehyde-3-phosphate dehydrogenase C
  misc_feature (1)..(294): Homolog of NCBI NO: 81622 NR Description: glyceraldehyde-3-phosphate dehydrogenase
  misc_feature (1)..(294): Homolog of NCBI NO: 15222848 NR Description: glyceraldehyde-3-phosphate dehydrogenase -related
  misc_feature (1)..(294): Homolog of NCBI NO: 120675 NR Description: Glyceraldehyde 3-phosphate dehydrogenase,
  misc_feature (1)..(294): Homolog of NCBI NO: 15229231 NR Description: glyceraldehyde-3-phosphate dehydrogenase C
  misc_feature (1)..(294): Homolog of NCBI NO: 21593240 NR Description: glyceraldehyde-3-phosphate dehydrogenase C
  misc_feature (1)..(294): Homolog of NCBI NO: 81622 NR Description: glyceraldehyde-3-phosphate dehydrogenase
  misc_feature (1)..(294): Homolog of NCBI NO: 15222848 NR Description: glyceraldehyde-3-phosphate dehydrogenase -related
  misc_feature (1)..(294): Homolog of NCBI NO: 120675 NR Description: Glyceraldehyde 3-phosphate dehydrogenase,
  misc_feature (1)..(294): Homolog of NCBI NO: 22094840 NR Description: glyceraldehyde 3-phosphate dehydrogenase [Solanum
  misc_feature (1)..(294): Homolog of NCBI NO: 462141 NR Description: Glyceraldehyde 3-phosphate dehydrogenase (GAPDH)
  misc_feature (1)..(293): Homolog of NCBI NO: 462137 NR Description: GLYCERALDEHYDE 3-PHOSPHATE DEHYDROGENASE,
  misc_feature (1)..(294): Homolog of NCBI NO: 120675 NR Description: Glyceraldehyde 3-phosphate dehydrogenase,
  misc_feature (1)..(294): Homolog of NCBI NO: 15222848 NR Description: glyceraldehyde-3-phosphate dehydrogenase -related
  misc_feature (1)..(294): Homolog of NCBI NO: 81622 NR Description: glyceraldehyde-3-phosphate dehydrogenase
  misc_feature (1)..(294): Homolog of NCBI NO: 21593240 NR Description: glyceraldehyde-3-phosphate dehydrogenase C
  misc_feature (1)..(294): Homolog of NCBI NO: 15229231 NR Description: glyceraldehyde-3-phosphate dehydrogenase C

SEQ ID NO: 45547 - DNA, 1324 bp, Arabidopsis thaliana; identical to SEQ ID NO: 23955
  misc_feature (1)..(1324): Ceres Seq. ID no. 13591589
  misc_feature: MA Experiment ID: 108434 Result: Up-regulated in Transcription
  misc_feature: MA Experiment 108434 PARAMETER Experiment Name: At_Root_Tips_cDNA_P Parameter: Tissue Value: Root Tips
  misc_feature: MA Experiment ID: 108464 Result: Down-regulated in Transcription
  misc_feature: MA Experiment 108464 PARAMETER Experiment Name: At_Germinating_Seeds_cDNA_P Parameter: Age (day) Value: 4 vs. 0
  misc_feature: MA Experiment 108464 PARAMETER Experiment Name: At_Germinating_Seeds_cDNA_P Parameter: Tissue Value: Germinating Seeds
  misc_feature: MA Experiment ID: 20000112 Result: Up-regulated in Transcription
  misc_feature: MA Experiment 20000112 PARAMETER Experiment Name: At_42deg_Heat_cDNA_P Parameter: Temperature (deg C) Value: 42 vs. 22
  misc_feature: MA Experiment 20000112 PARAMETER Experiment Name: At_42deg_Heat_cDNA_P Parameter: Timepoint (hr) Value: 2
  misc_feature: MA Experiment 20000112 PARAMETER Experiment Name: At_42deg_Heat_cDNA_P Parameter: Tissue Value: Aerial
  misc_feature: MA Experiment ID: 20000113 Result: Up-regulated in Transcription
  misc_feature: MA Experiment 20000113 PARAMETER Experiment Name: At_42deg_Heat_cDNA_P Parameter: Temperature (deg C) Value: 42 vs. 22
  misc_feature: MA Experiment 20000113 PARAMETER Experiment Name: At_42deg_Heat_cDNA_P Parameter: Timepoint (hr) Value: 8
  misc_feature: MA Experiment 20000113 PARAMETER Experiment Name: At_42deg_Heat_cDNA_P Parameter: Tissue Value: Aerial
  misc_feature: MA Experiment ID: 20000144 Result: Up-regulated in Transcription
  misc_feature: MA Experiment 20000144 PARAMETER Experiment Name: At_42deg_Heat_cDNA_P Parameter: Temperature (deg C) Value: 42 vs. 22
  misc_feature: MA Experiment 20000144 PARAMETER Experiment Name: At_42deg_Heat_cDNA_P Parameter: Timepoint (hr) Value: 1
  misc_feature: MA Experiment 20000144 PARAMETER Experiment Name: At_42deg_Heat_cDNA_P Parameter: Tissue Value: Aerial
  misc_feature: MA Experiment ID: 20000184 Result: Up-regulated in Transcription
  misc_feature: MA Experiment 20000184 PARAMETER Experiment Name: At_Shoots__P Parameter: Age (day) Value: 7
  misc_feature: MA Experiment 20000184 PARAMETER Experiment Name: At_Shoots__P Parameter: Tissue Value: Shoots vs. Whole Plant
  misc_feature: MA Experiment ID: 20000185 Result: Up-regulated in Transcription
  misc_feature: MA Experiment 20000185 PARAMETER Experiment Name: At_Roots__P Parameter: Age (day) Value: 7 vs. 21
  misc_feature: MA Experiment 20000185 PARAMETER Experiment Name: At_Roots__P Parameter: Organism Value: A. thaliana
  misc_feature: MA Experiment 20000185 PARAMETER Experiment Name: At_Roots__P Parameter: Tissue Value: Roots vs. Whole Plant
  misc_feature: MA Experiment ID: 20000214 Result: Up-regulated in Transcription
  misc_feature: MA Experiment 20000214 PARAMETER Experiment Name: At_4deg_Cold_P Parameter: Timepoint (hr) Value: 6
  misc_feature: MA Experiment ID: 20000234 Result: Up-regulated in Transcription
  misc_feature: MA Experiment 20000234 PARAMETER Experiment Name: At_Siliques_P Parameter: Age (day) Value: 21
  misc_feature: MA Experiment 20000234 PARAMETER Experiment Name: At_Siliques_P Parameter: Organism Value: A. thaliana
  misc_feature: MA Experiment 20000234 PARAMETER Experiment Name: At_Siliques_P Parameter: Plant Line Value: WS
  misc_feature: MA Experiment 20000234 PARAMETER Experiment Name: At_Siliques_P Parameter: Tissue Value: Less Than 5mm Siliques vs. Whole Plant
  misc_feature: MA Experiment ID: 20000235 Result: Up-regulated in Transcription
  misc_feature: MA Experiment 20000235 PARAMETER Experiment Name: At_Siliques_P Parameter: Age (day) Value: 21
  misc_feature: MA Experiment 20000235 PARAMETER Experiment Name: At_Siliques_P Parameter: Organism Value: A. thaliana
  misc_feature: MA Experiment 20000235 PARAMETER Experiment Name: At_Siliques_P Parameter: Plant Line Value: WS
  misc_feature: MA Experiment 20000235 PARAMETER Experiment Name: At_Siliques_P Parameter: Tissue Value: 5-10mm Siliques vs. Whole Plant
  misc_feature: MA Experiment ID: 20000439 Result: Up-regulated in Transcription
  misc_feature: MA Experiment 20000439 PARAMETER Experiment Name: At_Roots__P Parameter: Age (day) Value: 14 vs. 21
  misc_feature: MA Experiment 20000439 PARAMETER Experiment Name: At_Roots__P Parameter: Organism Value: A. thaliana
  misc_feature: MA Experiment 20000439 PARAMETER Experiment Name: At_Roots__P Parameter: Tissue Value: Roots vs. Whole Plant
  misc_feature: MA Experiment ID: 20001248 Result: Down-regulated in Transcription
  misc_feature: MA Experiment 20001248 PARAMETER Experiment Name: At_Far-red-induction_P Parameter: Age (day) Value: 7
  misc_feature: MA Experiment 20001248 PARAMETER Experiment Name: At_Far-red-induction_P Parameter: Light Value: Far-red vs. White
  misc_feature: MA Experiment 20001248 PARAMETER Experiment Name: At_Far-red-induction_P Parameter: Organism Value: A. thaliana
  misc_feature: MA Experiment 20001248 PARAMETER Experiment Name: At_Far-red-induction_P Parameter: Plant Line Value: Columbia
  misc_feature: MA Experiment 20001248 PARAMETER Experiment Name: At_Far-red-induction_P Parameter: Timepoint (hr) Value: 4
  misc_feature: MA Experiment 20001248 PARAMETER Experiment Name: At_Far-red-induction_P Parameter: Tissue Value: Whole Plant

SEQ ID NO: 45548 - protein, 364 aa, Arabidopsis thaliana; identical to SEQ ID NO: 23956
  peptide (1)..(364): Ceres Seq. ID no. 13591590
  misc_feature (183)..(344): Pfam Name: Glyceraldehyde 3-phosphate dehydrogenase, Pfam Description: Glyceraldehyde 3-phosphate dehydrogenase,
  misc_feature (183)..(344): Pfam Name: Glyceraldehyde 3-phosphate dehydrogenase, Pfam Description: Glyceraldehyde 3-phosphate dehydrogenase,
  misc_feature (183)..(344): Pfam Name: Glyceraldehyde 3-phosphate dehydrogenase, Pfam Description: Glyceraldehyde 3-phosphate dehydrogenase,
  misc_feature (31)..(362): Homolog of NCBI NO: 4539543 NR Description: glyceraldehyde-3-phosphate dehydrogenase
  misc_feature (32)..(363): Homolog of NCBI NO: 462137 NR Description: GLYCERALDEHYDE 3-PHOSPHATE DEHYDROGENASE,
  misc_feature (27)..(362): Homolog of NCBI NO: 120669 NR Description: Glyceraldehyde 3-phosphate dehydrogenase,
  misc_feature (31)..(364): Homolog of NCBI NO: 462141 NR Description: Glyceraldehyde 3-phosphate dehydrogenase (GAPDH)
  misc_feature (27)..(364): Homolog of NCBI NO: 22094840 NR Description: glyceraldehyde 3-phosphate dehydrogenase [Solanum
  misc_feature (31)..(362): Homolog of NCBI NO: 4539543 NR Description: glyceraldehyde-3-phosphate dehydrogenase
  misc_feature (27)..(362): Homolog of NCBI NO: 120669 NR Description: Glyceraldehyde 3-phosphate dehydrogenase,
  misc_feature (27)..(364): Homolog of NCBI NO: 22094840 NR Description: glyceraldehyde 3-phosphate dehydrogenase [Solanum
  misc_feature (31)..(364): Homolog of NCBI NO: 462141 NR Description: Glyceraldehyde 3-phosphate dehydrogenase (GAPDH)
  misc_feature (27)..(362): Homolog of NCBI NO: 120669 NR Description: Glyceraldehyde 3-phosphate dehydrogenase,
  misc_feature (32)..(363): Homolog of NCBI NO: 462137 NR Description: GLYCERALDEHYDE 3-PHOSPHATE DEHYDROGENASE,
  misc_feature (31)..(362): Homolog of NCBI NO: 4539543 NR Description: glyceraldehyde-3-phosphate dehydrogenase
  misc_feature (27)..(364): Homolog of NCBI NO: 15229231 NR Description: glyceraldehyde-3-phosphate dehydrogenase C
  misc_feature (27)..(364): Homolog of NCBI NO: 21593240 NR Description: glyceraldehyde-3-phosphate dehydrogenase C
  misc_feature (27)..(364): Homolog of NCBI NO: 81622 NR Description: glyceraldehyde-3-phosphate dehydrogenase
  misc_feature (27)..(364): Homolog of NCBI NO: 15222848 NR Description: glyceraldehyde-3-phosphate dehydrogenase -related
  misc_feature (27)..(364): Homolog of NCBI NO: 120675 NR Description: Glyceraldehyde 3-phosphate dehydrogenase,
  misc_feature (27)..(364): Homolog of NCBI NO: 15229231 NR Description: glyceraldehyde-3-phosphate dehydrogenase C
  misc_feature (27)..(364): Homolog of NCBI NO: 21593240 NR Description: glyceraldehyde-3-phosphate dehydrogenase C
  misc_feature (27)..(364): Homolog of NCBI NO: 81622 NR Description: glyceraldehyde-3-phosphate dehydrogenase
  misc_feature (27)..(364): Homolog of NCBI NO: 15222848 NR Description: glyceraldehyde-3-phosphate dehydrogenase -related
  misc_feature (27)..(364): Homolog of NCBI NO: 120675 NR Description: Glyceraldehyde 3-phosphate dehydrogenase,
  misc_feature (27)..(364): Homolog of NCBI NO: 22094840 NR Description: glyceraldehyde 3-phosphate dehydrogenase [Solanum
  misc_feature (31)..(364): Homolog of NCBI NO: 462141 NR Description: Glyceraldehyde 3-phosphate dehydrogenase (GAPDH)
  misc_feature (32)..(363): Homolog of NCBI NO: 462137 NR Description: GLYCERALDEHYDE 3-PHOSPHATE DEHYDROGENASE,
  misc_feature (27)..(364): Homolog of NCBI NO: 120675 NR Description: Glyceraldehyde 3-phosphate dehydrogenase,
  misc_feature (27)..(364): Homolog of NCBI NO: 15222848 NR Description: glyceraldehyde-3-phosphate dehydrogenase -related
  misc_feature (27)..(364): Homolog of NCBI NO: 81622 NR Description: glyceraldehyde-3-phosphate dehydrogenase
  misc_feature (27)..(364): Homolog of NCBI NO: 21593240 NR Description: glyceraldehyde-3-phosphate dehydrogenase C
  misc_feature (27)..(364): Homolog of NCBI NO: 15229231 NR Description: glyceraldehyde-3-phosphate dehydrogenase C

SEQ ID NO: 45549 - protein, 338 aa, Arabidopsis thaliana; identical to SEQ ID NO: 23957
  peptide (1)..(338): Ceres Seq. ID no. 13591591
  misc_feature (157)..(318): Pfam Name: Glyceraldehyde 3-phosphate dehydrogenase, Pfam Description: Glyceraldehyde 3-phosphate dehydrogenase,
  misc_feature (157)..(318): Pfam Name: Glyceraldehyde 3-phosphate dehydrogenase, Pfam Description: Glyceraldehyde 3-phosphate dehydrogenase,
  misc_feature (157)..(318): Pfam Name: Glyceraldehyde 3-phosphate dehydrogenase, Pfam Description: Glyceraldehyde 3-phosphate dehydrogenase,
  misc_feature (5)..(336): Homolog of NCBI NO: 4539543 NR Description: glyceraldehyde-3-phosphate dehydrogenase
  misc_feature (6)..(337): Homolog of NCBI NO: 462137 NR Description: GLYCERALDEHYDE 3-PHOSPHATE DEHYDROGENASE,
  misc_feature (1)..(336): Homolog of NCBI NO: 120669 NR Description: Glyceraldehyde 3-phosphate dehydrogenase,
  misc_feature (5)..(338): Homolog of NCBI NO: 462141 NR Description: Glyceraldehyde 3-phosphate dehydrogenase (GAPDH)
  misc_feature (1)..(338): Homolog of NCBI NO: 22094840 NR Description: glyceraldehyde 3-phosphate dehydrogenase [Solanum
  misc_feature (5)..(336): Homolog of NCBI NO: 4539543 NR Description: glyceraldehyde-3-phosphate dehydrogenase
  misc_feature (1)..(336): Homolog of NCBI NO: 120669 NR Description: Glyceraldehyde 3-phosphate dehydrogenase,
  misc_feature (1)..(338): Homolog of NCBI NO: 22094840 NR Description: glyceraldehyde 3-phosphate dehydrogenase [Solanum
  misc_feature (5)..(338): Homolog of NCBI NO: 462141 NR Description: Glyceraldehyde 3-phosphate dehydrogenase (GAPDH)
  misc_feature (1)..(336): Homolog of NCBI NO: 120669 NR Description: Glyceraldehyde 3-phosphate dehydrogenase,
  misc_feature (6)..(337): Homolog of NCBI NO: 462137 NR Description: GLYCERALDEHYDE 3-PHOSPHATE DEHYDROGENASE,
  misc_feature (5)..(336): Homolog of NCBI NO: 4539543 NR Description: glyceraldehyde-3-phosphate dehydrogenase
  misc_feature (1)..(338): Homolog of NCBI NO: 15229231 NR Description: glyceraldehyde-3-phosphate dehydrogenase C
  misc_feature (1)..(338): Homolog of NCBI NO: 21593240 NR Description: glyceraldehyde-3-phosphate dehydrogenase C
  misc_feature (1)..(338): Homolog of NCBI NO: 81622 NR Description: glyceraldehyde-3-phosphate dehydrogenase
  misc_feature (1)..(338): Homolog of NCBI NO: 15222848 NR Description: glyceraldehyde-3-phosphate dehydrogenase -related
  misc_feature (1)..(338): Homolog of NCBI NO: 120675 NR Description: Glyceraldehyde 3-phosphate dehydrogenase,
  misc_feature (1)..(338): Homolog of NCBI NO: 15229231 NR Description: glyceraldehyde-3-phosphate dehydrogenase C
  misc_feature (1)..(338): Homolog of NCBI NO: 21593240 NR Description: glyceraldehyde-3-phosphate dehydrogenase C
  misc_feature (1)..(338): Homolog of NCBI NO: 81622 NR Description: glyceraldehyde-3-phosphate dehydrogenase
  misc_feature (1)..(338): Homolog of NCBI NO: 15222848 NR Description: glyceraldehyde-3-phosphate dehydrogenase -related
  misc_feature (1)..(338): Homolog of NCBI NO: 120675 NR Description: Glyceraldehyde 3-phosphate dehydrogenase,
  misc_feature (1)..(338): Homolog of NCBI NO: 22094840 NR Description: glyceraldehyde 3-phosphate dehydrogenase [Solanum
  misc_feature (5)..(338): Homolog of NCBI NO: 462141 NR Description: Glyceraldehyde 3-phosphate dehydrogenase (GAPDH)
  misc_feature (6)..(337): Homolog of NCBI NO: 462137 NR Description: GLYCERALDEHYDE 3-PHOSPHATE DEHYDROGENASE,
  misc_feature (1)..(338): Homolog of NCBI NO: 120675 NR Description: Glyceraldehyde 3-phosphate dehydrogenase,
  misc_feature (1)..(338): Homolog of NCBI NO: 15222848 NR Description: glyceraldehyde-3-phosphate dehydrogenase -related
  misc_feature (1)..(338): Homolog of NCBI NO: 81622 NR Description: glyceraldehyde-3-phosphate dehydrogenase
  misc_feature (1)..(338): Homolog of NCBI NO: 21593240 NR Description: glyceraldehyde-3-phosphate dehydrogenase C
  misc_feature (1)..(338): Homolog of NCBI NO: 15229231 NR Description: glyceraldehyde-3-phosphate dehydrogenase C

SEQ ID NO: 45550 - protein, 294 aa, Arabidopsis thaliana; identical to SEQ ID NO: 23958
  peptide (1)..(294): Ceres Seq. ID no. 13591592
  misc_feature (113)..(274): Pfam Name: Glyceraldehyde 3-phosphate dehydrogenase, Pfam Description: Glyceraldehyde 3-phosphate dehydrogenase,
  misc_feature (113)..(274): Pfam Name: Glyceraldehyde 3-phosphate dehydrogenase, Pfam Description: Glyceraldehyde 3-phosphate dehydrogenase,
  misc_feature (113)..(274): Pfam Name: Glyceraldehyde 3-phosphate dehydrogenase, Pfam Description: Glyceraldehyde 3-phosphate dehydrogenase,
  misc_feature (1)..(292): Homolog of NCBI NO: 4539543 NR Description: glyceraldehyde-3-phosphate dehydrogenase
  misc_feature (1)..(293): Homolog of NCBI NO: 462137 NR Description: GLYCERALDEHYDE 3-PHOSPHATE DEHYDROGENASE,
  misc_feature (1)..(292): Homolog of NCBI NO: 120669 NR Description: Glyceraldehyde 3-phosphate dehydrogenase,
  misc_feature (1)..(294): Homolog of NCBI NO: 462141 NR Description: Glyceraldehyde 3-phosphate dehydrogenase (GAPDH)
  misc_feature (1)..(294): Homolog of NCBI NO: 22094840 NR Description: glyceraldehyde 3-phosphate dehydrogenase [Solanum
  misc_feature (1)..(292): Homolog of NCBI NO: 4539543 NR Description: glyceraldehyde-3-phosphate dehydrogenase
  misc_feature (1)..(292): Homolog of NCBI NO: 120669 NR Description: Glyceraldehyde 3-phosphate dehydrogenase,
  misc_feature (1)..(294): Homolog of NCBI NO: 22094840 NR Description: glyceraldehyde 3-phosphate dehydrogenase [Solanum
  misc_feature (1)..(294): Homolog of NCBI NO: 462141 NR Description: Glyceraldehyde 3-phosphate dehydrogenase (GAPDH)
  misc_feature (1)..(292): Homolog of NCBI NO: 120669 NR Description: Glyceraldehyde 3-phosphate dehydrogenase,
  misc_feature (1)..(293): Homolog of NCBI NO: 462137 NR Description: GLYCERALDEHYDE 3-PHOSPHATE DEHYDROGENASE,
  misc_feature (1)..(292): Homolog of NCBI NO: 4539543 NR Description: glyceraldehyde-3-phosphate dehydrogenase
  misc_feature (1)..(294): Homolog of NCBI NO: 15229231 NR Description: glyceraldehyde-3-phosphate dehydrogenase C
  misc_feature (1)..(294): Homolog of NCBI NO: 21593240 NR Description: glyceraldehyde-3-phosphate dehydrogenase C
  misc_feature (1)..(294): Homolog of NCBI NO: 81622 NR Description: glyceraldehyde-3-phosphate dehydrogenase
  misc_feature (1)..(294): Homolog of NCBI NO: 15222848 NR Description: glyceraldehyde-3-phosphate dehydrogenase -related
  misc_feature (1)..(294): Homolog of NCBI NO: 120675 NR Description: Glyceraldehyde 3-phosphate dehydrogenase,
  misc_feature (1)..(294): Homolog of NCBI NO: 15229231 NR Description: glyceraldehyde-3-phosphate dehydrogenase C
  misc_feature (1)..(294): Homolog of NCBI NO: 21593240 NR Description: glyceraldehyde-3-phosphate dehydrogenase C
  misc_feature (1)..(294): Homolog of NCBI NO: 81622 NR Description: glyceraldehyde-3-phosphate dehydrogenase
  misc_feature (1)..(294): Homolog of NCBI NO: 15222848 NR Description: glyceraldehyde-3-phosphate dehydrogenase -related
  misc_feature (1)..(294): Homolog of NCBI NO: 120675 NR Description: Glyceraldehyde 3-phosphate dehydrogenase,
  misc_feature (1)..(294): Homolog of NCBI NO: 22094840 NR Description: glyceraldehyde 3-phosphate dehydrogenase [Solanum
  misc_feature (1)..(294): Homolog of NCBI NO: 462141 NR Description: Glyceraldehyde 3-phosphate dehydrogenase (GAPDH)
  misc_feature (1)..(293): Homolog of NCBI NO: 462137 NR Description: GLYCERALDEHYDE 3-PHOSPHATE DEHYDROGENASE,
  misc_feature (1)..(294): Homolog of NCBI NO: 120675 NR Description: Glyceraldehyde 3-phosphate dehydrogenase,
  misc_feature (1)..(294): Homolog of NCBI NO: 15222848 NR Description: glyceraldehyde-3-phosphate dehydrogenase -related
  misc_feature (1)..(294): Homolog of NCBI NO: 81622 NR Description: glyceraldehyde-3-phosphate dehydrogenase
  misc_feature (1)..(294): Homolog of NCBI NO: 21593240 NR Description: glyceraldehyde-3-phosphate dehydrogenase C
  misc_feature (1)..(294): Homolog of NCBI NO: 15229231 NR Description: glyceraldehyde-3-phosphate dehydrogenase C

SEQ ID NO: 45551 - DNA, 2490 bp, Arabidopsis thaliana
  misc_feature (1)..(2490): Ceres Seq. ID no. 13646671
  misc_feature: MA Experiment ID: 20000184 Result: Down-regulated in Transcription
  misc_feature: MA Experiment 20000184 PARAMETER Experiment Name: At_Shoots__P Parameter: Age (day) Value: 7
  misc_feature: MA Experiment 20000184 PARAMETER Experiment Name: At_Shoots__P Parameter: Tissue Value: Shoots vs. Whole Plant
  misc_feature: MA Experiment ID: 20001248 Result: Up-regulated in Transcription
  misc_feature: MA Experiment 20001248 PARAMETER Experiment Name: At_Far-red-induction_P Parameter: Age (day) Value: 7
  misc_feature: MA Experiment 20001248 PARAMETER Experiment Name: At_Far-red-induction_P Parameter: Light Value: Far-red vs. White
  misc_feature: MA Experiment 20001248 PARAMETER Experiment Name: At_Far-red-induction_P Parameter: Organism Value: A. thaliana
  misc_feature: MA Experiment 20001248 PARAMETER Experiment Name: At_Far-red-induction_P Parameter: Plant Line Value: Columbia
  misc_feature: MA Experiment 20001248 PARAMETER Experiment Name: At_Far-red-induction_P Parameter: Timepoint (hr) Value: 4
  misc_feature: MA Experiment 20001248 PARAMETER Experiment Name: At_Far-red-induction_P Parameter: Tissue Value: Whole Plant
  misc_feature: MA Experiment ID: 20001450 Result: Up-regulated in Transcription
  misc_feature: MA Experiment 20001450 PARAMETER Experiment Name: At_Far-red-induction_P Parameter: Age (day) Value: 7
  misc_feature: MA Experiment 20001450 PARAMETER Experiment Name: At_Far-red-induction_P Parameter: Light Value: Far-red vs. White
  misc_feature: MA Experiment 20001450 PARAMETER Experiment Name: At_Far-red-induction_P Parameter: Organism Value: A. thaliana
  misc_feature: MA Experiment 20001450 PARAMETER Experiment Name: At_Far-red-induction_P Parameter: Plant Line Value: Columbia
  misc_feature: MA Experiment 20001450 PARAMETER Experiment Name: At_Far-red-induction_P Parameter: Timepoint (hr) Value: 8
  misc_feature: MA Experiment 20001450 PARAMETER Experiment Name: At_Far-red-induction_P Parameter: Tissue Value: Whole Plant
cccccccccccccgaggaaataattaagagcgtcatttttggtatcccgcgcaactttttcttctcagtttcagtttctctacatcgattcatcgattccactctcttgattgctgtttagatcaatccgtctcgaacccaggggttagtatatagtggatcaaactgatccgacccgacccgacccgaattattaatgtcggaagttaatgagatgagtggtggttctattggcggcgaattgttgagagcgtcgccgaaggttttaacggccggtgatcggaaattactcaaggtggagcttcggccaggggatacgacgtatgtttcgtggaagaagcttatgagggatgctggtaaggtcaatggtttatcggcttcggttcccgacccgcctcctaatgctaaccctaaccttgagtttcgaattgcaccggggcatccagtagagattgaaacgaatgaacaacctcattctaacagtttcaacgctgttattgagaagatagagaggctctataaggggaacgatagaagtgatggggaagagttagacggtgctcctgatgatgatgagtatgacactgaagattcatttatagatgatgctgaactggatgagtatttcgaagttgataattcaacagttaaacatgatggattttatgtaaatagaggcaagttggagcggatggaaccttcaacaacatctaaccagcaacccaaaaaacggcgacgaaaagattcagcaaaaccctgtcgtgatgcagttgacgtatccgataaacacaccaagttgtctataacagctaggaaaaaggatcaatcaactgctcctgggtcctggaaaacacaggagtcacctttgccttctggagcgcaagatgcaaatacttcagtacctctggatgatgtgaagcattctgatagagcaaatcatcagtctaggaatgatacaagtcacaagtcaagggaaactggatcctctagtgcccttcatcagaaatacagcaacaaaagcttacaccaacaatctacgtccctgctaggaaaatctccccccaatgtctttgcagaggtaacagtagtccgtcagaaagaaaacaatggtatgcatcagctggcaaatgtaacgggaagcagacaatctagtcaagcgtctaaaaaagatggttctaatgtgaagtctaaaacctcaatcctcgagaaagccataagggaactggagaaggtggttgtggaatcaaggcctcctgctatcactgaaaatcaagaagctgatacctcatcccaggcagtgaagagaagattgcccagggatgttaaattgaaacttgctaaagttgctaggattgcgcaggcaagccagggaaaacattcaacagagttaatcaaccgtcttatgagcattgttggtcacctaatccagcttaggtctcttaagaggaacttgaaaatcatgattgatatgggagattctgcaacccgagaaaaggatactaggttcaagcaaatcaacaatgaagttcttgatatgataaaggccaaagtttctttgatggaatcacaggcaatcaaaccagaaggtgcaacatcagacgattttcaggactcagtagaaaagccatctttgaagaagtttgtcatggatgcggcattggaggataaattgtgtgacctatatgacatatttatcgacggattggatgaagatcaaggtccacaaacaaaaaagctatatgtcaatttggctgaactctggccaaatagattgatggattatcgtgggatcaaacatgcaattttccgggcaaaggagagacgaaaagcattgtatggaaaccttgcgaaagagatggatcaaacaaagatgaagaagagtatgaagcagttggtaccaagaacagactgtactgctcagcccaacaccgaattagtggttcagagacaacacagtggggaaaaaaaattgattgttgatccaaatgcaaccagcacttccgtggtcactagtcaaactatggttgacagatcaaatcagcagcagcctgagaagctaaagggaatctcaagctcttgcaatcctacagaggaaacaagagtggtcaagagaaagaacgaggctgtaatggctgagaaacaagtcgttcttgccctgaagaagcccgaacatccacagacacgtgtaatcccagctcctcagaatctgaacatcccacgaacaaccccggacctgaacttgccaagttgacatcacgattgacaaaggagctcttagaaacgccggagacaataacctctggcctcttccttccttgtattttgaggtggcacggcattagtcctggcgatgccgatgcttggtttttttagctacaaagcatggtttataaagttgtctgtattccagtttggctcttattaagttagttactctatttacgtgtcctttttcaaaactctaatgtataaagttatgattttacggac

SEQ ID NO: 45552 - protein, 684 aa, Arabidopsis thaliana
  peptide (1)..(684): Ceres Seq. ID no. 13646672
  misc_feature (503)..(663): Homolog of NCBI NO: 4106388 NR Description: unknown [Arabidopsis thaliana]
  misc_feature (316)..(437): Homolog of NCBI NO: 16506638 NR Description: wound-responsive protein 14.05 [Castanea sativa]
  misc_feature (20)..(185): Homolog of NCBI NO: 20161447 NR Description: B1065E10.22 [Oryza sativa (japonica
  misc_feature (212)..(666): Homolog of NCBI NO: 20161447 NR Description: B1065E10.22 [Oryza sativa (japonica
  misc_feature (10)..(501): Homolog of NCBI NO: 7486999 NR Description: hypothetical protein T14N5.16 - Arabidopsis
  misc_feature (10)..(684): Homolog of NCBI NO: 15223894 NR Description: expressed protein [Arabidopsis thaliana]
MSEVNEMSGGSIGGELLRASPKVLTAGDRKLLKVELRPGDTTYVSWKKLMRDAGKVNGLSASVPDPPPNANPNLEFRIAPGHPVEIETNEQPHSNSFNAVIEKIERLYKGNDRSDGEELDGAPDDDEYDTEDSFIDDAELDEYFEVDNSTVKHDGFYVNRGKLERMEPSTTSNQQPKKRRRKDSAKPCRDAVDVSDKHTKLSITARKKDQSTAPGSWKTQESPLPSGAQDANTSVPLDDVKHSDRANHQSRNDTSHKSRETGSSSALHQKYSNKSLHQQSTSLLGKSPPNVFAEVTVVRQKENNGMHQLANVTGSRQSSQASKKDGSNVKSKTSILEKAIRELEKVVVESRPPAITENQEADTSSQAVKRRLPRDVKLKLAKVARIAQASQGKHSTELINRLMSIVGHLIQLRSLKRNLKIMIDMGDSATREKDTRFKQINNEVLDMIKAKVSLMESQAIKPEGATSDDFQDSVEKPSLKKFVMDAALEDKLCDLYDIFIDGLDEDQGPQTKKLYVNLAELWPNRLMDYRGIKHAIFRAKERRKALYGNLAKEMDQTKMKKSMKQLVPRTDCTAQPNTELVVQRQHSGEKKLIVDPNATSTSVVTSQTMVDRSNQQQPEKLKGISSSCNPTEETRVVKRKNEAVMAEKQVVLALKKPEHPQTRVIPAPQNLNIPRTTPDLNLPS

SEQ ID NO: 45553 - protein, 678 aa, Arabidopsis thaliana
  peptide (1)..(678): Ceres Seq. ID no. 13646673
  misc_feature (497)..(657): Homolog of NCBI NO: 4106388 NR Description: unknown [Arabidopsis thaliana]
  misc_feature (310)..(431): Homolog of NCBI NO: 16506638 NR Description: wound-responsive protein 14.05 [Castanea sativa]
  misc_feature (14)..(179): Homolog of NCBI NO: 20161447 NR Description: B1065E10.22 [Oryza sativa (japonica
  misc_feature (206)..(660): Homolog of NCBI NO: 20161447 NR Description: B1065E10.22 [Oryza sativa (japonica
  misc_feature (4)..(495): Homolog of NCBI NO: 7486999 NR Description: hypothetical protein T14N5.16 - Arabidopsis
  misc_feature (4)..(678): Homolog of NCBI NO: 15223894 NR Description: expressed protein [Arabidopsis thaliana]
MSGGSIGGELLRASPKVLTAGDRKLLKVELRPGDTTYVSWKKLMRDAGKVNGLSASVPDPPPNANPNLEFRIAPGHPVEIETNEQPHSNSFNAVIEKIERLYKGNDRSDGEELDGAPDDDEYDTEDSFIDDAELDEYFEVDNSTVKHDGFYVNRGKLERMEPSTTSNQQPKKRRRKDSAKPCRDAVDVSDKHTKLSITARKKDQSTAPGSWKTQESPLPSGAQDANTSVPLDDVKHSDRANHQSRNDTSHKSRETGSSSALHQKYSNKSLHQQSTSLLGKSPPNVFAEVTVVRQKENNGMHQLANVTGSRQSSQASKKDGSNVKSKTSILEKAIRELEKVVVESRPPAITENQEADTSSQAVKRRLPRDVKLKLAKVARIAQASQGKHSTELINRLMSIVGHLIQLRSLKRNLKIMIDMGDSATREKDTRFKQINNEVLDMIKAKVSLMESQAIKPEGATSDDFQDSVEKPSLKKFVMDAALEDKLCDLYDIFIDGLDEDQGPQTKKLYVNLAELWPNRLMDYRGIKHAIFRAKERRKALYGNLAKEMDQTKMKKSMKQLVPRTDCTAQPNTELVVQRQHSGEKKLIVDPNATSTSVVTSQTMVDRSNQQQPEKLKGISSSCNPTEETRVVKRKNEAVMAEKQVVLALKKPEHPQTRVIPAPQNLNIPRTTPDLNLPS

SEQ ID NO: 45554 - protein, 635 aa, Arabidopsis thaliana
  peptide (1)..(635): Ceres Seq. ID no. 13646674
  misc_feature (454)..(614): Homolog of NCBI NO: 4106388 NR Description: unknown [Arabidopsis thaliana]
  misc_feature (267)..(388): Homolog of NCBI NO: 16506638 NR Description: wound-responsive protein 14.05 [Castanea sativa]
  misc_feature (1)..(136): Homolog of NCBI NO: 20161447 NR Description: B1065E10.22 [Oryza sativa (japonica
  misc_feature (163)..(617): Homolog of NCBI NO: 20161447 NR Description: B1065E10.22 [Oryza sativa (japonica
  misc_feature (1)..(452): Homolog of NCBI NO: 7486999 NR Description: hypothetical protein T14N5.16 - Arabidopsis
  misc_feature (1)..(635): Homolog of NCBI NO: 15223894 NR Description: expressed protein [Arabidopsis thaliana]
MRDAGKVNGLSASVPDPPPNANPNLEFRIAPGHPVEIETNEQPHSNSFNAVIEKIERLYKGNDRSDGEELDGAPDDDEYDTEDSFIDDAELDEYFEVDNSTVKHDGFYVNRGKLERMEPSTTSNQQPKKRRRKDSAKPCRDAVDVSDKHTKLSITARKKDQSTAPGSWKTQESPLPSGAQDANTSVPLDDVKHSDRANHQSRNDTSHKSRETGSSSALHQKYSNKSLHQQSTSLLGKSPPNVFAEVTVVRQKENNGMHQLANVTGSRQSSQASKKDGSNVKSKTSILEKAIRELEKVVVESRPPAITENQEADTSSQAVKRRLPRDVKLKLAKVARIAQASQGKHSTELINRLMSIVGHLIQLRSLKRNLKIMIDMGDSATREKDTRFKQINNEVLDMIKAKVSLMESQAIKPEGATSDDFQDSVEKPSLKKFVMDAALEDKLCDLYDIFIDGLDEDQGPQTKKLYVNLAELWPNRLMDYRGIKHAIFRAKERRKALYGNLAKEMDQTKMKKSMKQLVPRTDCTAQPNTELVVQRQHSGEKKLIVDPNATSTSVVTSQTMVDRSNQQQPEKLKGISSSCNPTEETRVVKRKNEAVMAEKQVVLALKKPEHPQTRVIPAPQNLNIPRTTPDLNLPS

SEQ ID NO: 45555 - DNA, 1969 bp, Arabidopsis thaliana
  misc_feature (1)..(1969): Ceres Seq. ID no. 13646675
  misc_feature: MA Experiment ID: 20000173 Result: Down-regulated in Transcription
  misc_feature: MA Experiment 20000173 PARAMETER Experiment Name: At_42deg_Heat_P Parameter: Age (day) Value: 14
  misc_feature: MA Experiment 20000173 PARAMETER Experiment Name: At_42deg_Heat_P Parameter: Organism Value: A. thaliana
  misc_feature: MA Experiment 20000173 PARAMETER Experiment Name: At_42deg_Heat_P Parameter: Plant Line Value: WS
  misc_feature: MA Experiment 20000173 PARAMETER Experiment Name: At_42deg_Heat_P Parameter: Temperature (deg C) Value: 42 vs. 22
  misc_feature: MA Experiment 20000173 PARAMETER Experiment Name: At_42deg_Heat_P Parameter: Timepoint (hr) Value: 6
  misc_feature: MA Experiment 20000173 PARAMETER Experiment Name: At_42deg_Heat_P Parameter: Tissue Value: Aerial
  misc_feature: MA Experiment ID: 20000184 Result: Down-regulated in Transcription
  misc_feature: MA Experiment 20000184 PARAMETER Experiment Name: At_Shoots__P Parameter: Age (day) Value: 7
  misc_feature: MA Experiment 20000184 PARAMETER Experiment Name: At_Shoots__P Parameter: Tissue Value: Shoots vs. Whole Plant
ggcgaaaccaaacctaacagcatttttctccaattccttcttcttcttcttcttcttctgtaacctcgtcttcttcagcttatactcatagctataccaaagaaaacctcttaaaacccttcttctctcgatccatcgatcagcaacaattcacttctaatcgatcaagagctttccgatatcgtcgatcccaattaacatggcttccaacggcgcttctccgagaattgttgatgctactgagaacagcttggataagatcaagcgacaattggcatctggctctggtcggaacttgctacaaggacctcttttcaagcgatctgaaactctgagaaaatggaacgaacgatgggtgatacttgatccaacaacagggaaaatggagtataagacgaggcgaaatgagccaactatcaagggaacaattttgtttgacgaaaatagcacaatctccatctctcctgtcaacttccaggggcttccaaaatataatggttgctgtatttatattggtaccccacagaagaaagattactttttgtgtgcagagactcctggtgcagctaaagcttgggtcacaaccttacatgcgacacagctagttctaaaggcccataaggaggctgtcgaatctctaagtggaagtggttctgcaacacttggtaccgttgcaaccgttgttgccgctgccaattcaacagcattggaatgttccagagaaattcaagcagcaatgcagatctctttgaggaatgcattgaaaataacgccaaataaaccgattgatggaccactagatgatttgacaataatgaaggaaactctgcgtgtcaaagatgaagaattacataatttagccagggaacttcgttctcgtgactcaatgataaaggaaatagcagataagctatctgagactgctgaagcagctgtagctgcagcatctgctgctcatacaatggatgaacaaaggaaaatcgtttgtgtggaatttgagcgcttgactacagactcacagagacagcaagaagccacaaaattaaagctcaaggaattggaagagaagacctttactttgagtaaggaaaaagatcaattggttaaggaaagagacgctgctctccaagaggcacatatgtggcggtctgagcttgggaaagccagagagcgtgttgtcatacttgaaggagctgttgtgagggccgaagagaaagtgagggttgcagaagcaagcggtgaagcaaaatcaaaagaggcttctcagagagaagcaactgcttggacagagaagcaagagcttttagcatatgtgaatatgttacaaactcagcttcaaaggcagcaactagagacaaagcaagtgtgtgaggagaagactgagtctactaacggcgaagcttctcttccaatgacaaaggaaacagaaaagaatgtggataaagcatgtctgagcatttcaagaacagcctctataccgggagagaatgtagtccatatgagtgaagagcaggtagtaaacgctcagcctccggtgggagaaaacgaatggaatgatattcaggcaacagaggcaagagtttctgatgtaagagaaatatctgcagagactgaacgggacagaagaaacagcttggatatcccggtagtgtctcctgaacctaacgttccacgcaatgatccgccttccgaatcatttcatcaccagccttgaataaagattggtagatcttcgtacattttaatatactctttgatggtctggtaatgtttggagagttgattcttctaacaacaaaaagaatttgtctttttagttttcttgtacattcaagagttgttatgtatctgccgctcttgaatttgtctgactagggaatgattctttttcccttttatcacaacatgaagaacagagagatatgtgttaaactctgatttaggaaacaaatgagttacaagagagact

SEQ ID NO: 45556 - protein, 504 aa, Arabidopsis thaliana
  peptide (1)..(504): Ceres Seq. ID no. 15219083
  misc_feature (32)..(135): Pfam Name: PH domain Pfam Description: PH domain
  misc_feature (165)..(425): Homolog of NCBI NO: 4063845 NR Description: response regulator homolog [Myxococcus xanthus]
  misc_feature (105)..(485): Homolog of NCBI NO: 34394393 NR Description: unknown protein [Oryza sativa (japonica
  misc_feature (1)..(485): Homolog of NCBI NO: 34394392 NR Description: unknown protein [Oryza sativa (japonica
  misc_feature (1)..(488): Homolog of NCBI NO: 40538917 NR Description: putative PH domain containing protein
  misc_feature (1)..(504): Homolog of NCBI NO: 30684745 NR Description: expressed protein [Arabidopsis thaliana]
  misc_feature (9)..(105): Homolog of NCBI NO: 25408106 NR Description: hypothetical protein At2g30880 [imported] -
  misc_feature (132)..(504): Homolog of NCBI NO: 25408106 NR Description: hypothetical protein At2g30880 [imported] -
MASNGASPRIVDATENSLDKIKRQLASGSGRNLLQGPLFKRSETLRKWNERWVILDPTTGKMEYKTRRNEPTIKGTILFDENSTISISPVNFQGLPKYNGCCIYIGTPQKKDYFLCAETPGAAKAWVTTLHATQLVLKAHKEAVESLSGSGSATLGTVATVVAAANSTALECSREIQAAMQISLRNALKITPNKPIDGPLDDLTIMKETLRVKDEELHNLARELRSRDSMIKEIADKLSETAEAAVAAASAAHTMDEQRKIVCVEFERLTTDSQRQQEATKLKLKELEEKTFTLSKEKDQLVKERDAALQEAHMWRSELGKARERVVILEGAVVRAEEKVRVAEASGEAKSKEASQREATAWTEKQELLAYVNMLQTQLQRQQLETKQVCEEKTESTNGEASLPMTKETEKNVDKACLSISRTASIPGENVVHMSEEQVVNAQPPVGENEWNDIQATEARVSDVREISAETERDRRNSLDIPVVSPEPNVPRNDPPSESFHHQP

SEQ ID NO: 45557 - protein, 443 aa, Arabidopsis thaliana
  peptide (1)..(443): Ceres Seq. ID no. 15219084
  misc_feature (1)..(74): Pfam Name: PH domain Pfam Description: PH domain
  misc_feature (104)..(364): Homolog of NCBI NO: 4063845 NR Description: response regulator homolog [Myxococcus xanthus]
  misc_feature (44)..(424): Homolog of NCBI NO: 34394393 NR Description: unknown protein [Oryza sativa (japonica
  misc_feature (1)..(424): Homolog of NCBI NO: 34394392 NR Description: unknown protein [Oryza sativa (japonica
  misc_feature (1)..(427): Homolog of NCBI NO: 40538917 NR Description: putative PH domain containing protein
  misc_feature (1)..(443): Homolog of NCBI NO: 30684745 NR Description: expressed protein [Arabidopsis thaliana]
  misc_feature (1)..(44): Homolog of NCBI NO: 25408106 NR Description: hypothetical protein At2g30880 [imported] -
  misc_feature (71)..(443): Homolog of NCBI NO: 25408106 NR Description: hypothetical protein At2g30880 [imported] -
MEYKTRRNEPTIKGTILFDENSTISISPVNFQGLPKYNGCCIYIGTPQKKDYFLCAETPGAAKAWVTTLHATQLVLKAHKEAVESLSGSGSATLGTVATVVAAANSTALECSREIQAAMQISLRNALKITPNKPIDGPLDDLTIMKETLRVKDEELHNLARELRSRDSMIKEIADKLSETAEAAVAAASAAHTMDEQRKIVCVEFERLTTDSQRQQEATKLKLKELEEKTFTLSKEKDQLVKERDAALQEAHMWRSELGKARERVVILEGAVVRAEEKVRVAEASGEAKSKEASQREATAWTEKQELLAYVNMLQTQLQRQQLETKQVCEEKTESTNGEASLPMTKETEKNVDKACLSISRTASIPGENVVHMSEEQVVNAQPPVGENEWNDIQATEARVSDVREISAETERDRRNSLDIPVVSPEPNVPRNDPPSESFHHQP

SEQ ID NO: 45558 - protein, 325 aa, Arabidopsis thaliana
  peptide (1)..(325): Ceres Seq. ID no. 15219085
  misc_feature (17)..(234): Pfam Name: Tropomyosin Pfam Description: Tropomyosin
  misc_feature (1)..(246): Homolog of NCBI NO: 4063845 NR Description: response regulator homolog [Myxococcus xanthus]
  misc_feature (1)..(306): Homolog of NCBI NO: 34394393 NR Description: unknown protein [Oryza sativa (japonica
  misc_feature (1)..(306): Homolog of NCBI NO: 34394392 NR Description: unknown protein [Oryza sativa (japonica
  misc_feature (1)..(309): Homolog of NCBI NO: 40538917 NR Description: putative PH domain containing protein
  misc_feature (1)..(325): Homolog of NCBI NO: 30684745 NR Description: expressed protein [Arabidopsis thaliana]
  misc_feature (1)..(325): Homolog of NCBI NO: 25408106 NR Description: hypothetical protein At2g30880 [imported] -
MQISLRNALKITPNKPIDGPLDDLTIMKETLRVKDEELHNLARELRSRDSMIKEIADKLSETAEAAVAAASAAHTMDEQRKIVCVEFERLTTDSQRQQEATKLKLKELEEKTFTLSKEKDQLVKERDAALQEAHMWRSELGKARERVVILEGAVVRAEEKVRVAEASGEAKSKEASQREATAWTEKQELLAYVNMLQTQLQRQQLETKQVCEEKTESTNGEASLPMTKETEKNVDKACLSISRTASIPGENVVHMSEEQVVNAQPPVGENEWNDIQATEARVSDVREISAETERDRRNSLDIPVVSPEPNVPRNDPPSESFHHQP

SEQ ID NO: 45559 - DNA, 865 bp, Arabidopsis thaliana; identical to SEQ ID NO: 35741
  misc_feature (1)..(865): Ceres Seq. ID no. 12559367
  misc_feature: MA Experiment ID: 20000495 Result: Down-regulated in Transcription
  misc_feature: MA Experiment 20000495 PARAMETER Experiment Name: At_Guard_Cells_P Parameter: Harvest Date Value: 8/2/2002
  misc_feature: MA Experiment 20000495 PARAMETER Experiment Name: At_Guard_Cells_P Parameter: Organism Value: A. thaliana
  misc_feature: MA Experiment 20000495 PARAMETER Experiment Name: At_Guard_Cells_P Parameter: Tissue Value: Guard Cells vs. Leaves
  misc_feature: MA Experiment ID: 20001451 Result: Down-regulated in Transcription
  misc_feature: MA Experiment 20001451 PARAMETER Experiment Name: At_Far-red-induction_P Parameter: Age (day) Value: 7
  misc_feature: MA Experiment 20001451 PARAMETER Experiment Name: At_Far-red-induction_P Parameter: Light Value: Far-red vs. White
  misc_feature: MA Experiment 20001451 PARAMETER Experiment Name: At_Far-red-induction_P Parameter: Organism Value: A. thaliana
  misc_feature: MA Experiment 20001451 PARAMETER Experiment Name: At_Far-red-induction_P Parameter: Plant Line Value: Columbia
  misc_feature: MA Experiment 20001451 PARAMETER Experiment Name: At_Far-red-induction_P Parameter: Timepoint (hr) Value: 24
  misc_feature: MA Experiment 20001451 PARAMETER Experiment Name: At_Far-red-induction_P Parameter: Tissue Value: Whole Plant

SEQ ID NO: 45560 - protein, 160 aa, Arabidopsis thaliana; identical to SEQ ID NO: 35742
  peptide (1)..(160): Ceres Seq. ID no. 12559368
  misc_feature (3)..(156): Homolog of NCBI NO: 3212324 NR Description: Human Ubc9
  misc_feature (3)..(156): Homolog of NCBI NO: 2194010 NR Description: Chain A, Human Ubiquitin-Conjugating Enzyme Ubc9
  misc_feature (3)..(159): Homolog of NCBI NO: 30584109 NR Description: Homo sapiens ubiquitin-conjugating enzyme E2I
  misc_feature (3)..(157): Homolog of NCBI NO: 7621708 NR Description: putative E2 enzyme Ubc9 [Dictyostelium discoideum]
  misc_feature (1)..(158): Homolog of NCBI NO: 38345867 NR Description: OSJNBa0064M23.9 [Oryza sativa (japonica
  misc_feature (35)..(160): Homolog of NCBI NO: 11272348 NR Description: ubiquitin-conjugating enzyme
  misc_feature (1)..(160): Homolog of NCBI NO: 37536440 NR Description: putative ubiquitin-conjugating enzyme
  misc_feature (1)..(160): Homolog of NCBI NO: 20975734 NR Description: putative ubiquitin-conjugating enzyme [Populus
  misc_feature (1)..(160): Homolog of NCBI NO: 25446690 NR Description: Putative ubiquitin-conjugating enzyme
  misc_feature (1)..(160): Homolog of NCBI NO: 15230881 NR Description: E2 ubiquitin-conjugating-like enzyme, Ahus5
  misc_feature (3)..(156): Homolog of NCBI NO: 3212324 NR Description: Human Ubc9
  misc_feature (3)..(156): Homolog of NCBI NO: 2194010 NR Description: Chain A, Human Ubiquitin-Conjugating Enzyme Ubc9
  misc_feature (3)..(159): Homolog of NCBI NO: 30584109 NR Description: Homo sapiens ubiquitin-conjugating enzyme E2I
  misc_feature (3)..(157): Homolog of NCBI NO: 7621708 NR Description: putative E2 enzyme Ubc9 [Dictyostelium discoideum]
  misc_feature (1)..(158): Homolog of NCBI NO: 38345867 NR Description: OSJNBa0064M23.9 [Oryza sativa (japonica
  misc_feature (35)..(160): Homolog of NCBI NO: 11272348 NR Description: ubiquitin-conjugating enzyme
  misc_feature (1)..(160): Homolog of NCBI NO: 37536440 NR Description: putative ubiquitin-conjugating enzyme
  misc_feature (1)..(160): Homolog of NCBI NO: 20975734 NR Description: putative ubiquitin-conjugating enzyme [Populus
  misc_feature (1)..(160): Homolog of NCBI NO: 25446690 NR Description: Putative ubiquitin-conjugating enzyme
  misc_feature (1)..(160): Homolog of NCBI NO: 15230881 NR Description: E2 ubiquitin-conjugating-like enzyme, Ahus5

SEQ ID NO: 45561 - protein, 121 aa, Arabidopsis thaliana; identical to SEQ ID NO: 35743
  peptide (1)..(121): Ceres Seq. ID no. 12559369
  misc_feature (1)..(117): Homolog of NCBI NO: 3212324 NR Description: Human Ubc9
  misc_feature (1)..(117): Homolog of NCBI NO: 2194010 NR Description: Chain A, Human Ubiquitin-Conjugating Enzyme Ubc9
  misc_feature (1)..(120): Homolog of NCBI NO: 30584109 NR Description: Homo sapiens ubiquitin-conjugating enzyme E2I
  misc_feature (1)..(118): Homolog of NCBI NO: 7621708 NR Description: putative E2 enzyme Ubc9 [Dictyostelium discoideum]
  misc_feature (1)..(119): Homolog of NCBI NO: 38345867 NR Description: OSJNBa0064M23.9 [Oryza sativa (japonica
  misc_feature (1)..(121): Homolog of NCBI NO: 11272348 NR Description: ubiquitin-conjugating enzyme
  misc_feature (1)..(121): Homolog of NCBI NO: 37536440 NR Description: putative ubiquitin-conjugating enzyme
  misc_feature (1)..(121): Homolog of NCBI NO: 20975734 NR Description: putative ubiquitin-conjugating enzyme [Populus
  misc_feature (1)..(121): Homolog of NCBI NO: 25446690 NR Description: Putative ubiquitin-conjugating enzyme
  misc_feature (1)..(121): Homolog of NCBI NO: 15230881 NR Description: E2 ubiquitin-conjugating-like enzyme, Ahus5
  misc_feature (1)..(117): Homolog of NCBI NO: 3212324 NR Description: Human Ubc9
  misc_feature (1)..(117): Homolog of NCBI NO: 2194010 NR Description: Chain A, Human Ubiquitin-Conjugating Enzyme Ubc9
  misc_feature (1)..(120): Homolog of NCBI NO: 30584109 NR Description: Homo sapiens ubiquitin-conjugating enzyme E2I
  misc_feature (1)..(118): Homolog of NCBI NO: 7621708 NR Description: putative E2 enzyme Ubc9 [Dictyostelium discoideum]
  misc_feature (1)..(119): Homolog of NCBI NO: 38345867 NR Description: OSJNBa0064M23.9 [Oryza sativa (japonica
  misc_feature (1)..(121): Homolog of NCBI NO: 11272348 NR Description: ubiquitin-conjugating enzyme
  misc_feature (1)..(121): Homolog of NCBI NO: 37536440 NR Description: putative ubiquitin-conjugating enzyme
  misc_feature (1)..(121): Homolog of NCBI NO: 20975734 NR Description: putative ubiquitin-conjugating enzyme [Populus
  misc_feature (1)..(121): Homolog of NCBI NO: 25446690 NR Description: Putative ubiquitin-conjugating enzyme
  misc_feature (1)..(121): Homolog of NCBI NO: 15230881 NR Description: E2 ubiquitin-conjugating-like enzyme, Ahus5

SEQ ID NO: 45562 - protein, 98 aa, Arabidopsis thaliana; identical to SEQ ID NO: 35744
  peptide (1)..(98): Ceres Seq. ID no. 12559370
  misc_feature (1)..(94): Homolog of NCBI NO: 4507785 NR Description: ubiquitin-conjugating enzyme E2I (UBC9 homolog,
  misc_feature (1)..(94): Homolog of NCBI NO: 2194010 NR Description: Chain A, Human Ubiquitin-Conjugating Enzyme Ubc9
  misc_feature (1)..(97): Homolog of NCBI NO: 30584109 NR Description: Homo sapiens ubiquitin-conjugating enzyme E2I
  misc_feature (1)..(95): Homolog of NCBI NO: 7621708 NR Description: putative E2 enzyme Ubc9 [Dictyostelium discoideum]
  misc_feature (1)..(96): Homolog of NCBI NO: 38345867 NR Description: OSJNBa0064M23.9 [Oryza sativa (japonica
  misc_feature (1)..(98): Homolog of NCBI NO: 11272348 NR Description: ubiquitin-conjugating enzyme
  misc_feature (1)..(98): Homolog of NCBI NO: 37536440 NR Description: putative ubiquitin-conjugating enzyme
  misc_feature (1)..(98): Homolog of NCBI NO: 20975734 NR Description: putative ubiquitin-conjugating enzyme [Populus
  misc_feature (1)..(98): Homolog of NCBI NO: 25446690 NR Description: Putative ubiquitin-conjugating enzyme
  misc_feature (1)..(98): Homolog of NCBI NO: 15230881 NR Description: E2 ubiquitin-conjugating-like enzyme, Ahus5
  misc_feature (1)..(94): Homolog of NCBI NO: 4507785 NR Description: ubiquitin-conjugating enzyme E2I (UBC9 homolog,
  misc_feature (1)..(94): Homolog of NCBI NO: 2194010 NR Description: Chain A, Human Ubiquitin-Conjugating Enzyme Ubc9
  misc_feature (1)..(97): Homolog of NCBI NO: 30584109 NR Description: Homo sapiens ubiquitin-conjugating enzyme E2I
  misc_feature (1)..(95): Homolog of NCBI NO: 7621708 NR Description: putative E2 enzyme Ubc9 [Dictyostelium discoideum]
  misc_feature (1)..(96): Homolog of NCBI NO: 38345867 NR Description: OSJNBa0064M23.9 [Oryza sativa (japonica
  misc_feature (1)..(98): Homolog of NCBI NO: 11272348 NR Description: ubiquitin-conjugating enzyme
  misc_feature (1)..(98): Homolog of NCBI NO: 37536440 NR Description: putative ubiquitin-conjugating enzyme
  misc_feature (1)..(98): Homolog of NCBI NO: 20975734 NR Description: putative ubiquitin-conjugating enzyme [Populus
  misc_feature (1)..(98): Homolog of NCBI NO: 25446690 NR Description: Putative ubiquitin-conjugating enzyme
  misc_feature (1)..(98): Homolog of NCBI NO: 15230881 NR Description: E2 ubiquitin-conjugating-like enzyme, Ahus5

SEQ ID NO: 45563 - DNA, 1541 bp, Arabidopsis thaliana; identical to SEQ ID NO: 40725
  misc_feature (1)..(1541): Ceres Seq. ID no. 12600340
  misc_feature: MA Experiment ID: 108473 Result: Down-regulated in Transcription
  misc_feature: MA Experiment 108473 PARAMETER Experiment Name: At_Drought_Flowers_cDNA_P Parameter: Timepoint (hr) Value: 7 d
  misc_feature: MA Experiment 108473 PARAMETER Experiment Name: At_Drought_Flowers_cDNA_P Parameter: Tissue Value: Flower
  misc_feature: MA Experiment 108473 PARAMETER Experiment Name: At_Drought_Flowers_cDNA_P Parameter: Treatment Value: Drought vs. No Drought
  misc_feature: MA Experiment ID: 108577 Result: Down-regulated in Transcription
  misc_feature: MA Experiment 108577 PARAMETER Experiment Name: At_42deg_Heat_cDNA_P Parameter: Temperature (deg C) Value: 42 vs. 22
  misc_feature: MA Experiment 108577 PARAMETER Experiment Name: At_42deg_Heat_cDNA_P Parameter: Timepoint (hr) Value: 6
  misc_feature: MA Experiment 108577 PARAMETER Experiment Name: At_42deg_Heat_cDNA_P Parameter: Tissue Value: Aerial
  misc_feature: MA Experiment ID: 108585 Result: Down-regulated in Transcription
  misc_feature: MA Experiment 108585 PARAMETER Experiment Name: At_5mM_NaNP_cDNA_P Parameter: Timepoint (hr) Value: 6
  misc_feature: MA Experiment 108585 PARAMETER Experiment Name: At_5mM_NaNP_cDNA_P Parameter: Tissue Value: Aerial
  misc_feature: MA Experiment 108585 PARAMETER Experiment Name: At_5mM_NaNP_cDNA_P Parameter: Treatment Value: null
  misc_feature: MA Experiment ID: 108595 Result: Down-regulated in Transcription
  misc_feature: MA Experiment 108595 PARAMETER Experiment Name: At_Ler-pi_Ovule_cDNA_P Parameter: Plant Line Value: null
  misc_feature: MA Experiment ID: 108607 Result: Down-regulated in Transcription
  misc_feature: MA Experiment 108607 PARAMETER Experiment Name: At_100uM_ABA_cDNA_P Parameter: Timepoint (hr) Value: 4
  misc_feature: MA Experiment 108607 PARAMETER Experiment Name: At_100uM_ABA_cDNA_P Parameter: Tissue Value: Aerial
  misc_feature: MA Experiment 108607 PARAMETER Experiment Name: At_100uM_ABA_cDNA_P Parameter: Treatment Value: 100uM ABA vs. No Treatment
  misc_feature: MA Experiment ID: 108668 Result: Down-regulated in Transcription
  misc_feature: MA Experiment 108668 PARAMETER Experiment Name: At_2mM_SA_cDNA_P Parameter: Plant Line Value: WS
  misc_feature: MA Experiment 108668 PARAMETER Experiment Name: At_2mM_SA_cDNA_P Parameter: Timepoint (hr) Value: 6
  misc_feature: MA Experiment 108668 PARAMETER Experiment Name: At_2mM_SA_cDNA_P Parameter: Treatment Value: 2mM SA vs. No Treatment
  misc_feature: MA Experiment ID: 20000087 Result: Down-regulated in Transcription
  misc_feature: MA Experiment 20000087 PARAMETER Experiment Name: At_100uM_ABA_Mutants_cDNA_P Parameter: Plant Line Value: WS
  misc_feature: MA Experiment 20000087 PARAMETER Experiment Name: At_100uM_ABA_Mutants_cDNA_P Parameter: Timepoint (hr) Value: 6
  misc_feature: MA Experiment 20000087 PARAMETER Experiment Name: At_100uM_ABA_Mutants_cDNA_P Parameter: Tissue Value: Aerial
  misc_feature: MA Experiment 20000087 PARAMETER Experiment Name: At_100uM_ABA_Mutants_cDNA_P Parameter: Treatment Value: 100uM ABA vs. No Treatment
  misc_feature: MA Experiment ID: 20000111 Result: Down-regulated in Transcription
  misc_feature: MA Experiment 20000111 PARAMETER Experiment Name: At_42deg_Heat_cDNA_P Parameter: Temperature (deg C) Value: 42 vs. 22
  misc_feature: MA Experiment 20000111 PARAMETER Experiment Name: At_42deg_Heat_cDNA_P Parameter: Timepoint (hr) Value: 6
  misc_feature: MA Experiment 20000111 PARAMETER Experiment Name: At_42deg_Heat_cDNA_P Parameter: Tissue Value: Aerial
  misc_feature: MA Experiment ID: 20000113 Result: Down-regulated in Transcription
  misc_feature: MA Experiment 20000113 PARAMETER Experiment Name: At_42deg_Heat_cDNA_P Parameter: Temperature (deg C) Value: 42 vs. 22
  misc_feature: MA Experiment 20000113 PARAMETER Experiment Name: At_42deg_Heat_cDNA_P Parameter: Timepoint (hr) Value: 8
  misc_feature: MA Experiment 20000113 PARAMETER Experiment Name: At_42deg_Heat_cDNA_P Parameter: Tissue Value: Aerial
  misc_feature: MA Experiment ID: 20000314 Result: Down-regulated in Transcription
  misc_feature: MA Experiment 20000314 PARAMETER Experiment Name: At_14day_Shoots-Roots_Sub_P Parameter: Age (day) Value: 14
  misc_feature: MA Experiment 20000314 PARAMETER Experiment Name: At_14day_Shoots-Roots_Sub_P Parameter: Organism Value: A. thaliana
  misc_feature: MA Experiment 20000314 PARAMETER Experiment Name: At_14day_Shoots-Roots_Sub_P Parameter: Plant Line Value: WS
  misc_feature: MA Experiment 20000314 PARAMETER Experiment Name: At_14day_Shoots-Roots_Sub_P Parameter: Tissue Value: Roots vs. Whole Plant
  misc_feature: MA Experiment ID: 20000328 Result: Down-regulated in Transcription
  misc_feature: MA Experiment 20000328 PARAMETER Experiment Name: At_42deg_Heat_Sub_P Parameter: Age (day) Value: 14
  misc_feature: MA Experiment 20000328 PARAMETER Experiment Name: At_42deg_Heat_Sub_P Parameter: Organism Value: A. thaliana
  misc_feature: MA Experiment 20000328 PARAMETER Experiment Name: At_42deg_Heat_Sub_P Parameter: Plant Line Value: WS
  misc_feature: MA Experiment 20000328 PARAMETER Experiment Name: At_42deg_Heat_Sub_P Parameter: Temperature (deg C) Value: 42 vs. 22
  misc_feature: MA Experiment 20000328 PARAMETER Experiment Name: At_42deg_Heat_Sub_P Parameter: Timepoint (hr) Value: 6
  misc_feature: MA Experiment 20000328 PARAMETER Experiment Name: At_42deg_Heat_Sub_P Parameter: Tissue Value: Aerial
  misc_feature: MA Experiment ID: 20000346 Result: Down-regulated in Transcription
  misc_feature: MA Experiment 20000346 PARAMETER Experiment Name: At_2mM_SA_Sub_P Parameter: Age (day) Value: 14
  misc_feature: MA Experiment 20000346 PARAMETER Experiment Name: At_2mM_SA_Sub_P Parameter: Organism Value: A. thaliana
  misc_feature: MA Experiment 20000346 PARAMETER Experiment Name: At_2mM_SA_Sub_P Parameter: Plant Line Value: WS
  misc_feature: MA Experiment 20000346 PARAMETER Experiment Name: At_2mM_SA_Sub_P Parameter: Timepoint (hr) Value: 1
  misc_feature: MA Experiment 20000346 PARAMETER Experiment Name: At_2mM_SA_Sub_P Parameter: Tissue Value: Aerial
  misc_feature: MA Experiment 20000346 PARAMETER Experiment Name: At_2mM_SA_Sub_P Parameter: Treatment Value: 2mM SA vs. No Treatment
  misc_feature: MA Experiment ID: 20000347 Result: Down-regulated in Transcription
  misc_feature: MA Experiment 20000347 PARAMETER Experiment Name: At_2mM_SA_Sub_P Parameter: Age (day) Value: 14
  misc_feature: MA Experiment 20000347 PARAMETER Experiment Name: At_2mM_SA_Sub_P Parameter: Organism Value: A. thaliana
  misc_feature: MA Experiment 20000347 PARAMETER Experiment Name: At_2mM_SA_Sub_P Parameter: Plant Line Value: WS
  misc_feature: MA Experiment 20000347 PARAMETER Experiment Name: At_2mM_SA_Sub_P Parameter: Timepoint (hr) Value: 6
  misc_feature: MA Experiment 20000347 PARAMETER Experiment Name: At_2mM_SA_Sub_P Parameter: Tissue Value: Aerial
  misc_feature: MA Experiment 20000347 PARAMETER Experiment Name: At_2mM_SA_Sub_P Parameter: Treatment Value: 2mM SA vs. No Treatment
  misc_feature: MA Experiment ID: 20000352 Result: Down-regulated in Transcription
  misc_feature: MA Experiment 20000352 PARAMETER Experiment Name: At_Drought_Sub_P Parameter: Age (day) Value: 7
  misc_feature: MA Experiment 20000352 PARAMETER Experiment Name: At_Drought_Sub_P Parameter: Organism Value: A. thaliana
  misc_feature: MA Experiment 20000352 PARAMETER Experiment Name: At_Drought_Sub_P Parameter: Plant Line Value: WS
  misc_feature: MA Experiment 20000352 PARAMETER Experiment Name: At_Drought_Sub_P Parameter: Timepoint (hr) Value: 6
  misc_feature: MA Experiment 20000352 PARAMETER Experiment Name: At_Drought_Sub_P Parameter: Tissue Value: Whole Plant
  misc_feature: MA Experiment 20000352 PARAMETER Experiment Name: At_Drought_Sub_P Parameter: Treatment Value: Drought vs. No Drought

SEQ ID NO: 45564 - protein, 444 aa, Arabidopsis thaliana; identical to SEQ ID NO: 40726
  peptide (1)..(444): Ceres Seq. ID no. 12600341
  misc_feature (154)..(428): Pfam Name: Glycosyl hydrolases family 28 Pfam Description: Glycosyl hydrolases family 28
  misc_feature (154)..(428): Pfam Name: Glycosyl hydrolases family 28 Pfam Description: Glycosyl hydrolases family 28
  misc_feature (6)..(437): Homolog of NCBI NO: 21553827 NR Description: polygalacturonase, putative [Arabidopsis thaliana]
  misc_feature (6)..(437): Homolog of NCBI NO: 7939578 NR Description: polygalacturonase-like protein [Arabidopsis
  misc_feature (62)..(440): Homolog of NCBI NO: 34393209 NR Description: putative polygalacturonase
  misc_feature (4)..(432): Homolog of NCBI NO: 11263971 NR Description: hypothetical protein T17J13.70 - Arabidopsis
  misc_feature (4)..(432): Homolog of NCBI NO: 18412253 NR Description: polygalacturonase, putative
  misc_feature (6)..(437): Homolog of NCBI NO: 21553827 NR Description: polygalacturonase, putative [Arabidopsis thaliana]
  misc_feature (62)..(440): Homolog of NCBI NO: 34393209 NR Description: putative polygalacturonase
  misc_feature (4)..(432): Homolog of NCBI NO: 18412253 NR Description: polygalacturonase, putative
  misc_feature (1)..(444): Homolog of NCBI NO: 15236625 NR Description: polygalacturonase, putative
  misc_feature (8)..(437): Homolog of NCBI NO: 15238207 NR Description: polygalacturonase, putative; protein id:
  misc_feature (2)..(443): Homolog of NCBI NO: 34912726 NR Description: putative polygalacturonase
  misc_feature (4)..(437): Homolog of NCBI NO: 22329119 NR Description: polygalacturonase, putative; protein id:
  misc_feature (24)..(440): Homolog of NCBI NO: 40714685 NR Description: putative polygalacturonase
  misc_feature (4)..(432): Homolog of NCBI NO: 11263971 NR Description: hypothetical protein T17J13.70 - Arabidopsis
  misc_feature (6)..(437): Homolog of NCBI NO: 7939578 NR Description: polygalacturonase-like protein [Arabidopsis
  misc_feature (24)..(440): Homolog of NCBI NO: 40714685 NR Description: putative polygalacturonase
  misc_feature (4)..(437): Homolog of NCBI NO: 22329119 NR Description: polygalacturonase, putative; protein id:
  misc_feature (2)..(443): Homolog of NCBI NO: 34912726 NR Description: putative polygalacturonase
  misc_feature (8)..(437): Homolog of NCBI NO: 15238207 NR Description: polygalacturonase, putative; protein id:
  misc_feature (1)..(444): Homolog of NCBI NO: 15236625 NR Description: polygalacturonase, putative

SEQ ID NO: 45565 - protein, 349 aa, Arabidopsis thaliana; identical to SEQ ID NO: 40727
  peptide (1)..(349): Ceres Seq. ID no. 12600342
  misc_feature (59)..(333): Pfam Name: Glycosyl hydrolases family 28 Pfam Description: Glycosyl hydrolases family 28
  misc_feature (59)..(333): Pfam Name: Glycosyl hydrolases family 28 Pfam Description: Glycosyl hydrolases family 28
  misc_feature (1)..(342): Homolog of NCBI NO: 21553827 NR Description: polygalacturonase, putative [Arabidopsis thaliana]
  misc_feature (1)..(342): Homolog of NCBI NO: 7939578 NR Description: polygalacturonase-like protein [Arabidopsis
  misc_feature (1)..(345): Homolog of NCBI NO: 34393209 NR Description: putative polygalacturonase
  misc_feature (1)..(337): Homolog of NCBI NO: 11263971 NR Description: hypothetical protein T17J13.70 - Arabidopsis
  misc_feature (1)..(337): Homolog of NCBI NO: 18412253 NR Description: polygalacturonase, putative
  misc_feature (1)..(342): Homolog of NCBI NO: 21553827 NR Description: polygalacturonase, putative [Arabidopsis thaliana]
  misc_feature (1)..(345): Homolog of NCBI NO: 34393209 NR Description: putative polygalacturonase
  misc_feature (1)..(337): Homolog of NCBI NO: 18412253 NR Description: polygalacturonase, putative
  misc_feature (1)..(349): Homolog of NCBI NO: 15236625 NR Description: polygalacturonase, putative
  misc_feature (1)..(342): Homolog of NCBI NO: 15238207 NR Description: polygalacturonase, putative; protein id:
  misc_feature (1)..(348): Homolog of NCBI NO: 34912726 NR Description: putative polygalacturonase
  misc_feature (1)..(342): Homolog of NCBI NO: 22329119 NR Description: polygalacturonase, putative; protein id:
  misc_feature (1)..(345): Homolog of NCBI NO: 40714685 NR Description: putative polygalacturonase
  misc_feature (1)..(337): Homolog of NCBI NO: 11263971 NR Description: hypothetical protein T17J13.70 - Arabidopsis
  misc_feature (1)..(342): Homolog of NCBI NO: 7939578 NR Description: polygalacturonase-like protein [Arabidopsis
  misc_feature (1)..(345): Homolog of NCBI NO: 40714685 NR Description: putative polygalacturonase
  misc_feature (1)..(342): Homolog of NCBI NO: 22329119 NR Description: polygalacturonase, putative; protein id:
  misc_feature (1)..(348): Homolog of NCBI NO: 34912726 NR Description: putative polygalacturonase
  misc_feature (1)..(342): Homolog of NCBI NO: 15238207 NR Description: polygalacturonase, putative; protein id:
  misc_feature (1)..(349): Homolog of NCBI NO: 15236625 NR Description: polygalacturonase, putative

SEQ ID NO: 45566 - protein, 309 aa, Arabidopsis thaliana; identical to SEQ ID NO: 40728
  peptide (1)..(309): Ceres Seq. ID no. 12600343
  misc_feature (19)..(293): Pfam Name: Glycosyl hydrolases family 28 Pfam Description: Glycosyl hydrolases family 28
  misc_feature (19)..(293): Pfam Name: Glycosyl hydrolases family 28 Pfam Description: Glycosyl hydrolases family 28
  misc_feature (1)..(302): Homolog of NCBI NO: 15228881 NR Description: polygalacturonase, putative
  misc_feature (1)..(302): Homolog of NCBI NO: 7939578 NR Description: polygalacturonase-like protein [Arabidopsis
  misc_feature (1)..(305): Homolog of NCBI NO: 34393209 NR Description: putative polygalacturonase
  misc_feature (1)..(297): Homolog of NCBI NO: 11263971 NR Description: hypothetical protein T17J13.70 - Arabidopsis
  misc_feature (1)..(297): Homolog of NCBI NO: 18412253 NR Description: polygalacturonase, putative
  misc_feature (1)..(302): Homolog of NCBI NO: 15228881 NR Description: polygalacturonase, putative
  misc_feature (1)..(305): Homolog of NCBI NO: 34393209 NR Description: putative polygalacturonase
  misc_feature (1)..(297): Homolog of NCBI NO: 18412253 NR Description: polygalacturonase, putative
  misc_feature (1)..(309): Homolog of NCBI NO: 15236625 NR Description: polygalacturonase, putative
  misc_feature (1)..(302): Homolog of NCBI NO: 15238207 NR Description: polygalacturonase, putative; protein id:
  misc_feature (1)..(308): Homolog of NCBI NO: 34912726 NR Description: putative polygalacturonase
  misc_feature (1)..(302): Homolog of NCBI NO: 22329119 NR Description: polygalacturonase, putative; protein id:
  misc_feature (1)..(305): Homolog of NCBI NO: 40714685 NR Description: putative polygalacturonase
  misc_feature (1)..(297): Homolog of NCBI NO: 11263971 NR Description: hypothetical protein T17J13.70 - Arabidopsis
  misc_feature (1)..(302): Homolog of NCBI NO: 7939578 NR Description: polygalacturonase-like protein [Arabidopsis
  misc_feature (1)..(305): Homolog of NCBI NO: 40714685 NR Description: putative polygalacturonase
  misc_feature (1)..(302): Homolog of NCBI NO: 22329119 NR Description: polygalacturonase, putative; protein id:
  misc_feature (1)..(308): Homolog of NCBI NO: 34912726 NR Description: putative polygalacturonase
  misc_feature (1)..(302): Homolog of NCBI NO: 15238207 NR Description: polygalacturonase, putative; protein id:
  misc_feature (1)..(309): Homolog of NCBI NO: 15236625 NR Description: polygalacturonase, putative

SEQ ID NO: 45567 - DNA, 1250 bp, Arabidopsis thaliana
  misc_feature (1)..(1250): Ceres Seq. ID no. 13646676
  misc_feature: MA Experiment ID: 20000315 Result: Down-regulated in Transcription
  misc_feature: MA Experiment 20000315 PARAMETER Experiment Name: At_14day_Shoots-Roots_Sub_P Parameter: Age (day) Value: 14
  misc_feature: MA Experiment 20000315 PARAMETER Experiment Name: At_14day_Shoots-Roots_Sub_P Parameter: Organism Value: A. thaliana
  misc_feature: MA Experiment 20000315 PARAMETER Experiment Name: At_14day_Shoots-Roots_Sub_P Parameter: Plant Line Value: WS
  misc_feature: MA Experiment 20000315 PARAMETER Experiment Name: At_14day_Shoots-Roots_Sub_P Parameter: Tissue Value: Shoots vs. Whole Plant
  misc_feature: MA Experiment ID: 20000328 Result: Down-regulated in Transcription
  misc_feature: MA Experiment 20000328 PARAMETER Experiment Name: At_42deg_Heat_Sub_P Parameter: Age (day) Value: 14
  misc_feature: MA Experiment 20000328 PARAMETER Experiment Name: At_42deg_Heat_Sub_P Parameter: Organism Value: A. thaliana
  misc_feature: MA Experiment 20000328 PARAMETER Experiment Name: At_42deg_Heat_Sub_P Parameter: Plant Line Value: WS
  misc_feature: MA Experiment 20000328 PARAMETER Experiment Name: At_42deg_Heat_Sub_P Parameter: Temperature (deg C) Value: 42 vs. 22
  misc_feature: MA Experiment 20000328 PARAMETER Experiment Name: At_42deg_Heat_Sub_P Parameter: Timepoint (hr) Value: 6
  misc_feature: MA Experiment 20000328 PARAMETER Experiment Name: At_42deg_Heat_Sub_P Parameter: Tissue Value: Aerial
ccgggaagtttctctgatcgccatttccacgtcgtactaagcttctctttcgccatccgttttaggcaacgaagacgaagatcatgaaagggattacgaggcttctcaattctctttcgcgacatacagcttccgtaacttgttctccatcttcttcttctcttctgatatcacgtcgctctctgtttatctcggcggcgacacactttccggtgaatttctcggagtcgataacaactaatgcttctcgtaactgttcgagatcttcttcatttcccttcaattggatcgagcaaaggaggacaatgtttatccagacacaatcaacaccaaacccttcttctctaatgtttagtcctggtaaaccagttatggagattggaagtgctgatttccctaattctcgttctgctatgagttcacctttagctaaagccattttcgccattgatggtgtagttcgagttttctatgggtcagattttgttactgtaacaaagtcagatgatgtaacatgggatatactcaagcctgatatctttgcagtggtaatggacttttactcttctggtcagcctttgtttctcgactcacaagctacagctgccaaggataccgctattcatgaggatgactctgaaactgtagcaatgattaaggaactcttggagacgcgtatccgaccatcagttcaagatgatggaggggacatcgagtattgtggatttgatacggaaactggtatagttaagcttagaatgcaaggagcttgtagcggctgtccaagctcatctgttactttgaaatccggaattgagaatatgcttatgcattatgtatccgaggtcaaaggtgttgagcaagaattcgatggtgaagaggagggaacatcttctggtccaatggagtagagtaacagaaatgcatcacaaaaaaacttgagatttgttgctgctcttcaatatacagaagaagaataaactagaggtacattagttttgtcttctcctgaacctggcagcctcagaaaactatagactactggaaaacatggagttgtctcatataacccaataattgaaatttttacggttatatacttatatggcttctagtgagcgttcacaagtgtagctgaaagggtaaagatttgttgcacaaagttaagtagaagtttttgctgatttgaagttatataaggtttgtgatcaaaaaaaaaaaaaaaaaaaactcgagggggggcccggtac

SEQ ID NO: 45568 - protein, 275 aa, Arabidopsis thaliana
  peptide (1)..(275): Ceres Seq. ID no. 13646677
  misc_feature (191)..(261): Pfam Name: NifU-like domain Pfam Description: NifU-like domain
  misc_feature (75)..(266): Homolog of NCBI NO: 26324295 NR Description: unnamed protein product [Mus musculus]
  misc_feature (73)..(260): Homolog of NCBI NO: 37681825 NR Description: HIRA interacting protein 5 [Danio rerio]
  misc_feature (65)..(263): Homolog of NCBI NO: 31203061 NR Description: ENSANGP00000019230 [Anopheles gambiae]
  misc_feature (72)..(263): Homolog of NCBI NO: 24643765 NR Description: CG32857-PA [Drosophila melanogaster]
  misc_feature (72)..(263): Homolog of NCBI NO: 6554171 NR Description: TO42 [Drosophila melanogaster]
  misc_feature (1)..(162): Homolog of NCBI NO: 15223842 NR Description: expressed protein [Arabidopsis thaliana]
  misc_feature (1)..(275): Homolog of NCBI NO: 15223842 NR Description: expressed protein [Arabidopsis thaliana]
  misc_feature (11)..(275): Homolog of NCBI NO: 34897632 NR Description: hypothetical protein [Oryza sativa]
  misc_feature (1)..(274): Homolog of NCBI NO: 18402817 NR Description: expressed protein [Arabidopsis thaliana]
  misc_feature (1)..(275): Homolog of NCBI NO: 25405462 NR Description: unknown protein, 90320-88994 [imported] -
MKGITRLLNSLSRHTASVTCSPSSSSLLISRRSLFISAATHFPVNFSESITTNASRNCSRSSSFPFNWIEQRRTMFIQTQSTPNPSSLMFSPGKPVMEIGSADFPNSRSAMSSPLAKAIFAIDGVVRVFYGSDFVTVTKSDDVTWDILKPDIFAVVMDFYSSGQPLFLDSQATAAKDTAIHEDDSETVAMIKELLETRIRPSVQDDGGDIEYCGFDTETGIVKLRMQGACSGCPSSSVTLKSGIENMLMHYVSEVKGVEQEFDGEEEGTSSGPME

SEQ ID NO: 45569 - protein, 201 aa, Arabidopsis thaliana
  peptide (1)..(201): Ceres Seq. ID no. 13646678
  misc_feature (117)..(187): Pfam Name: NifU-like domain Pfam Description: NifU-like domain
  misc_feature (1)..(192): Homolog of NCBI NO: 26324295 NR Description: unnamed protein product [Mus musculus]
  misc_feature (1)..(186): Homolog of NCBI NO: 37681825 NR Description: HIRA interacting protein 5 [Danio rerio]
  misc_feature (1)..(189): Homolog of NCBI NO: 31203061 NR Description: ENSANGP00000019230 [Anopheles gambiae]
  misc_feature (1)..(189): Homolog of NCBI NO: 24643765 NR Description: CG32857-PA [Drosophila melanogaster]
  misc_feature (1)..(189): Homolog of NCBI NO: 6554171 NR Description: TO42 [Drosophila melanogaster]
  misc_feature (1)..(88): Homolog of NCBI NO: 15223842 NR Description: expressed protein [Arabidopsis thaliana]
  misc_feature (1)..(201): Homolog of NCBI NO: 15223842 NR Description: expressed protein [Arabidopsis thaliana]
  misc_feature (1)..(201): Homolog of NCBI NO: 34897632 NR Description: hypothetical protein [Oryza sativa]
  misc_feature (1)..(200): Homolog of NCBI NO: 18402817 NR Description: expressed protein [Arabidopsis thaliana]
  misc_feature (1)..(201): Homolog of NCBI NO: 25405462 NR Description: unknown protein, 90320-88994 [imported] -
MFIQTQSTPNPSSLMFSPGKPVMEIGSADFPNSRSAMSSPLAKAIFAIDGVVRVFYGSDFVTVTKSDDVTWDILKPDIFAVVMDFYSSGQPLFLDSQATAAKDTAIHEDDSETVAMIKELLETRIRPSVQDDGGDIEYCGFDTETGIVKLRMQGACSGCPSSSVTLKSGIENMLMHYVSEVKGVEQEFDGEEEGTSSGPME

SEQ ID NO: 45570 - protein, 187 aa, Arabidopsis thaliana
  peptide (1)..(187): Ceres Seq. ID no. 13646679
  misc_feature (103)..(173): Pfam Name: NifU-like domain Pfam Description: NifU-like domain
  misc_feature (1)..(178): Homolog of NCBI NO: 26324295 NR Description: unnamed protein product [Mus musculus]
  misc_feature (1)..(172): Homolog of NCBI NO: 37681825 NR Description: HIRA interacting protein 5 [Danio rerio]
  misc_feature (1)..(175): Homolog of NCBI NO: 31203061 NR Description: ENSANGP00000019230 [Anopheles gambiae]
  misc_feature (1)..(175): Homolog of NCBI NO: 24643765 NR Description: CG32857-PA [Drosophila melanogaster]
  misc_feature (1)..(175): Homolog of NCBI NO: 6554171 NR Description: TO42 [Drosophila melanogaster]
  misc_feature (1)..(74): Homolog of NCBI NO: 15223842 NR Description: expressed protein [Arabidopsis thaliana]
  misc_feature (1)..(187): Homolog of NCBI NO: 15223842 NR Description: expressed protein [Arabidopsis thaliana]
  misc_feature (1)..(187): Homolog of NCBI NO: 34897632 NR Description: hypothetical protein [Oryza sativa]
  misc_feature (1)..(186): Homolog of NCBI NO: 18402817 NR Description: expressed protein [Arabidopsis thaliana]
  misc_feature (1)..(187): Homolog of NCBI NO: 25405462 NR Description: unknown protein, 90320-88994 [imported] -
MFSPGKPVMEIGSADFPNSRSAMSSPLAKAIFAIDGVVRVFYGSDFVTVTKSDDVTWDILKPDIFAVVMDFYSSGQPLFLDSQATAAKDTAIHEDDSETVAMIKELLETRIRPSVQDDGGDIEYCGFDTETGIVKLRMQGACSGCPSSSVTLKSGIENMLMHYVSEVKGVEQEFDGEEEGTSSGPME

SEQ ID NO: 45571 - DNA, 1050 bp, Arabidopsis thaliana; identical to SEQ ID NO: 24257
  misc_feature (1)..(1050): Ceres Seq. ID no. 13591665
  misc_feature: MA Experiment ID: 108434 Result: Up-regulated in Transcription
  misc_feature: MA Experiment 108434 PARAMETER Experiment Name: At_Root_Tips_cDNA_P Parameter: Tissue Value: Root Tips
  misc_feature: MA Experiment ID: 20000234 Result: Up-regulated in Transcription
  misc_feature: MA Experiment 20000234 PARAMETER Experiment Name: At_Siliques_P Parameter: Age (day) Value: 21
  misc_feature: MA Experiment 20000234 PARAMETER Experiment Name: At_Siliques_P Parameter: Organism Value: A. thaliana
  misc_feature: MA Experiment 20000234 PARAMETER Experiment Name: At_Siliques_P Parameter: Plant Line Value: WS
  misc_feature: MA Experiment 20000234 PARAMETER Experiment Name: At_Siliques_P Parameter: Tissue Value: Less Than 5mm Siliques vs. Whole Plant
  misc_feature: MA Experiment ID: 20000265 Result: Up-regulated in Transcription
  misc_feature: MA Experiment 20000265 PARAMETER Experiment Name: At_Open_Flower_P Parameter: Age (day) Value: 21
  misc_feature: MA Experiment 20000265 PARAMETER Experiment Name: At_Open_Flower_P Parameter: Plant Line Value: WS
  misc_feature: MA Experiment 20000265 PARAMETER Experiment Name: At_Open_Flower_P Parameter: Tissue Value: Closed Flower vs. Whole Plant

SEQ ID NO: 45572 - protein, 284 aa, Arabidopsis thaliana; identical to SEQ ID NO: 24258
  peptide (1)..(284): Ceres Seq. ID no. 13591666
  misc_feature (85)..(218): Pfam Name: ADP-ribosylation factor family Pfam Description: ADP-ribosylation factor family
  misc_feature (85)..(218): Pfam Name: ADP-ribosylation factor family Pfam Description: ADP-ribosylation factor family
  misc_feature (46)..(269): Homolog of NCBI NO: 33086606 NR Description: Ab2-417 [Rattus norvegicus]
  misc_feature (46)..(269): Homolog of NCBI NO: 14917113 NR Description: signal recognition particle receptor, beta
  misc_feature (46)..(269): Homolog of NCBI NO: 14042265 NR Description: unnamed protein product [Homo sapiens]
  misc_feature (46)..(269): Homolog of NCBI NO: 27721301 NR Description: similar to signal recognition particle receptor,
  misc_feature (46)..(271): Homolog of NCBI NO: 12842535 NR Description: unnamed protein product [Mus musculus]
  misc_feature (46)..(269): Homolog of NCBI NO: 33086606 NR Description: Ab2-417 [Rattus norvegicus]
  misc_feature (46)..(269): Homolog of NCBI NO: 14042265 NR Description: unnamed protein product [Homo sapiens]
  misc_feature (46)..(271): Homolog of NCBI NO: 12842535 NR Description: unnamed protein product [Mus musculus]
  misc_feature (25)..(284): Homolog of NCBI NO: 15239201 NR Description: signal recognition particle receptor beta
  misc_feature (25)..(284): Homolog of NCBI NO: 15224229 NR Description: signal recognition particle receptor beta subunit
  misc_feature (46)..(265): Homolog of NCBI NO: 38174090 NR Description: Unknown (protein for MGC:75930) [Silurana
  misc_feature (46)..(269): Homolog of NCBI NO: 38649415 NR Description: Signal recognition particle receptor, beta
  misc_feature (46)..(271): Homolog of NCBI NO: 6678137 NR Description: signal recognition particle receptor, B subunit
  misc_feature (46)..(269): Homolog of NCBI NO: 27721301 NR Description: similar to signal recognition particle receptor,
  misc_feature (46)..(269): Homolog of NCBI NO: 14917113 NR Description: signal recognition particle receptor, beta
  misc_feature (46)..(271): Homolog of NCBI NO: 6678137 NR Description: signal recognition particle receptor, B subunit
  misc_feature (46)..(269): Homolog of NCBI NO: 38649415 NR Description: Signal recognition particle receptor, beta
  misc_feature (46)..(265): Homolog of NCBI NO: 38174090 NR Description: Unknown (protein for MGC:75930) [Silurana
  misc_feature (25)..(284): Homolog of NCBI NO: 15224229 NR Description: signal recognition particle receptor beta subunit
  misc_feature (25)..(284): Homolog of NCBI NO: 15239201 NR Description: signal recognition particle receptor beta

SEQ ID NO: 45573 - protein, 260 aa, Arabidopsis thaliana; identical to SEQ ID NO: 24259
  peptide (1)..(260): Ceres Seq. ID no. 13591667
  misc_feature (61)..(194): Pfam Name: ADP-ribosylation factor family Pfam Description: ADP-ribosylation factor family
  misc_feature (61)..(194): Pfam Name: ADP-ribosylation factor family Pfam Description: ADP-ribosylation factor family
  misc_feature (22)..(245): Homolog of NCBI NO: 33086606 NR Description: Ab2-417 [Rattus norvegicus]
  misc_feature (22)..(245): Homolog of NCBI NO: 14917113 NR Description: signal recognition particle receptor, beta
  misc_feature (22)..(245): Homolog of NCBI NO: 14042265 NR Description: unnamed protein product [Homo sapiens]
  misc_feature (22)..(245): Homolog of NCBI NO: 27721301 NR Description: similar to signal recognition particle receptor,
  misc_feature (22)..(247): Homolog of NCBI NO: 12842535 NR Description: unnamed protein product [Mus musculus]
  misc_feature (22)..(245): Homolog of NCBI NO: 33086606 NR Description: Ab2-417 [Rattus norvegicus]
  misc_feature (22)..(245): Homolog of NCBI NO: 14042265 NR Description: unnamed protein product [Homo sapiens]
  misc_feature (22)..(247): Homolog of NCBI NO: 12842535 NR Description: unnamed protein product [Mus musculus]
  misc_feature (1)..(260): Homolog of NCBI NO: 15239201 NR Description: signal recognition particle receptor beta
  misc_feature (1)..(260): Homolog of NCBI NO: 15224229 NR Description: signal recognition particle receptor beta subunit
  misc_feature (22)..(241): Homolog of NCBI NO: 38174090 NR Description: Unknown (protein for MGC:75930) [Silurana
  misc_feature (22)..(245): Homolog of NCBI NO: 38649415 NR Description: Signal recognition particle receptor, beta
  misc_feature (22)..(247): Homolog of NCBI NO: 6678137 NR Description: signal recognition particle receptor, B subunit
  misc_feature (22)..(245): Homolog of NCBI NO: 27721301 NR Description: similar to signal recognition particle receptor,
  misc_feature (22)..(245): Homolog of NCBI NO: 14917113 NR Description: signal recognition particle receptor, beta
  misc_feature (22)..(247): Homolog of NCBI NO: 6678137 NR Description: signal recognition particle receptor, B subunit
  misc_feature (22)..(245): Homolog of NCBI NO: 38649415 NR Description: Signal recognition particle receptor, beta
  misc_feature (22)..(241): Homolog of NCBI NO: 38174090 NR Description: Unknown (protein for MGC:75930) [Silurana
  misc_feature (1)..(260): Homolog of NCBI NO: 15224229 NR Description: signal recognition particle receptor beta subunit
  misc_feature (1)..(260): Homolog of NCBI NO: 15239201 NR Description: signal recognition particle receptor beta

SEQ ID NO: 45574 - protein, 172 aa, Arabidopsis thaliana; identical to SEQ ID NO: 24260
  peptide (1)..(172): Ceres Seq. ID no. 13591668
  misc_feature (1)..(106): Pfam Name: ADP-ribosylation factor family Pfam Description: ADP-ribosylation factor family
  misc_feature (1)..(106): Pfam Name: ADP-ribosylation factor family Pfam Description: ADP-ribosylation factor family
  misc_feature (1)..(157): Homolog of NCBI NO: 33086606 NR Description: Ab2-417 [Rattus norvegicus]
  misc_feature (1)..(157): Homolog of NCBI NO: 14917113 NR Description: signal recognition particle receptor, beta
  misc_feature (1)..(157): Homolog of NCBI NO: 14042265 NR Description: unnamed protein product [Homo sapiens]
  misc_feature (1)..(157): Homolog of NCBI NO: 27721301 NR Description: similar to signal recognition particle receptor,
  misc_feature (1)..(159): Homolog of NCBI NO: 12842535 NR Description: unnamed protein product [Mus musculus]
  misc_feature (1)..(157): Homolog of NCBI NO: 33086606 NR Description: Ab2-417 [Rattus norvegicus]
  misc_feature (1)..(157): Homolog of NCBI NO: 14042265 NR Description: unnamed protein product [Homo sapiens]
  misc_feature (1)..(159): Homolog of NCBI NO: 12842535 NR Description: unnamed protein product [Mus musculus]
  misc_feature (1)..(172): Homolog of NCBI NO: 15239201 NR Description: signal recognition particle receptor beta
  misc_feature (1)..(172): Homolog of NCBI NO: 15224229 NR Description: signal recognition particle receptor beta subunit
  misc_feature (1)..(153): Homolog of NCBI NO: 38174090 NR Description: Unknown (protein for MGC:75930) [Silurana
  misc_feature (1)..(157): Homolog of NCBI NO: 38649415 NR Description: Signal recognition particle receptor, beta
  misc_feature (1)..(159): Homolog of NCBI NO: 6678137 NR Description: signal recognition particle receptor, B subunit
  misc_feature (1)..(157): Homolog of NCBI NO: 27721301 NR Description: similar to signal recognition particle receptor,
  misc_feature (1)..(157): Homolog of NCBI NO: 14917113 NR Description: signal recognition particle receptor, beta
  misc_feature (1)..(159): Homolog of NCBI NO: 6678137 NR Description: signal recognition particle receptor, B subunit
  misc_feature (1)..(157): Homolog of NCBI NO: 38649415 NR Description: Signal recognition particle receptor, beta
  misc_feature (1)..(153): Homolog of NCBI NO: 38174090 NR Description: Unknown (protein for MGC:75930) [Silurana
  misc_feature (1)..(172): Homolog of NCBI NO: 15224229 NR Description: signal recognition particle receptor beta subunit
  misc_feature (1)..(172): Homolog of NCBI NO: 15239201 NR Description: signal recognition particle receptor beta

SEQ ID NO: 45575 - DNA, 1663 bp, Arabidopsis thaliana; identical to SEQ ID NO: 30264
  misc_feature (1)..(1663): Ceres Seq. ID no. 13591657
  misc_feature: MA Experiment ID: 108579 Result: Down-regulated in Transcription
  misc_feature: MA Experiment 108579 PARAMETER Experiment Name: At_4deg_Cold_cDNA_P Parameter: Temperature (deg C) Value: 4 vs. 22
  misc_feature: MA Experiment 108579 PARAMETER Experiment Name: At_4deg_Cold_cDNA_P Parameter: Timepoint (hr) Value: 6
  misc_feature: MA Experiment 108579 PARAMETER Experiment Name: At_4deg_Cold_cDNA_P Parameter: Tissue Value: Aerial

SEQ ID NO: 45576 - protein, 476 aa, Arabidopsis thaliana; identical to SEQ ID NO: 30265
  peptide (1)..(476): Ceres Seq. ID no. 13591658
  misc_feature (69)..(476): Pfam Name: Aminotransferase class-III Pfam Description: Aminotransferase class-III
  misc_feature (69)..(476): Pfam Name: Aminotransferase class-III Pfam Description: Aminotransferase class-III
  misc_feature (69)..(476): Pfam Name: Aminotransferase class-III Pfam Description: Aminotransferase class-III
  misc_feature (132)..(466): Homolog of NCBI NO: 7434175 NR Description: hypothetical protein T19P19.50 - Arabidopsis
  misc_feature (1)..(229): Homolog of NCBI NO: 28574759 NR Description: CG11241-PA [Drosophila melanogaster]
  misc_feature (1)..(229): Homolog of NCBI NO: 16198011 NR Description: LD24726p [Drosophila melanogaster]
  misc_feature (232)..(474): Homolog of NCBI NO: 28574759 NR Description: CG11241-PA [Drosophila melanogaster]
  misc_feature (232)..(474): Homolog of NCBI NO: 16198011 NR Description: LD24726p [Drosophila melanogaster]
  misc_feature (132)..(466): Homolog of NCBI NO: 7434175 NR Description: hypothetical protein T19P19.50 - Arabidopsis
  misc_feature (1)..(229): Homolog of NCBI NO: 16198011 NR Description: LD24726p [Drosophila melanogaster]
  misc_feature (232)..(474): Homolog of NCBI NO: 16198011 NR Description: LD24726p [Drosophila melanogaster]
  misc_feature (232)..(474): Homolog of NCBI NO: 28574759 NR Description: CG11241-PA [Drosophila melanogaster]
  misc_feature (1)..(229): Homolog of NCBI NO: 16198011 NR Description: LD24726p [Drosophila melanogaster]
  misc_feature (1)..(229): Homolog of NCBI NO: 28574759 NR Description: CG11241-PA [Drosophila melanogaster]
  misc_feature (132)..(466): Homolog of NCBI NO: 7434175 NR Description: hypothetical protein T19P19.50 - Arabidopsis
  misc_feature (1)..(476): Homolog of NCBI NO: 5731259 NR Description: alanine:glyoxylate aminotransferase 2 homolog
  misc_feature (1)..(476): Homolog of NCBI NO: 18420498 NR Description: alanine--glyoxylate aminotransferase
  misc_feature (3)..(476): Homolog of NCBI NO: 15224499 NR Description: alanine--glyoxylate aminotransferase
  misc_feature (3)..(476): Homolog of NCBI NO: 15028237 NR Description: putative beta-alanine-pyruvate aminotransferase
  misc_feature (39)..(476): Homolog of NCBI NO: 15231974 NR Description: alanine--glyoxylate aminotransferase
  misc_feature (1)..(476): Homolog of NCBI NO: 5731259 NR Description: alanine:glyoxylate aminotransferase 2 homolog
  misc_feature (1)..(476): Homolog of NCBI NO: 18420498 NR Description: alanine--glyoxylate aminotransferase
  misc_feature (3)..(476): Homolog of NCBI NO: 15224499 NR Description: alanine--glyoxylate aminotransferase
  misc_feature (3)..(476): Homolog of NCBI NO: 15028237 NR Description: putative beta-alanine-pyruvate aminotransferase
  misc_feature (39)..(476): Homolog of NCBI NO: 15231974 NR Description: alanine--glyoxylate aminotransferase
  misc_feature (232)..(474): Homolog of NCBI NO: 16198011 NR Description: LD24726p [Drosophila melanogaster]
  misc_feature (232)..(474): Homolog of NCBI NO: 28574759 NR Description: CG11241-PA [Drosophila melanogaster]
  misc_feature (1)..(229): Homolog of NCBI NO: 28574759 NR Description: CG11241-PA [Drosophila melanogaster]
  misc_feature (39)..(476): Homolog of NCBI NO: 15231974 NR Description: alanine--glyoxylate aminotransferase
  misc_feature (3)..(476): Homolog of NCBI NO: 15028237 NR Description: putative beta-alanine-pyruvate aminotransferase
  misc_feature (3)..(476): Homolog of NCBI NO: 15224499 NR Description: alanine--glyoxylate aminotransferase
  misc_feature (1)..(476): Homolog of NCBI NO: 18420498 NR Description: alanine--glyoxylate aminotransferase
  misc_feature (1)..(476): Homolog of NCBI NO: 5731259 NR Description: alanine:glyoxylate aminotransferase 2 homolog

SEQ ID NO: 45577 - protein, 391 aa, Arabidopsis thaliana; identical to SEQ ID NO: 30266
  peptide (1)..(391): Ceres Seq. ID no. 13591659
  misc_feature (1)..(391): Pfam Name: Aminotransferase class-III Pfam Description: Aminotransferase class-III
  misc_feature (1)..(391): Pfam Name: Aminotransferase class-III Pfam Description: Aminotransferase class-III
  misc_feature (1)..(391): Pfam Name: Aminotransferase class-III Pfam Description: Aminotransferase class-III
  misc_feature (47)..(381): Homolog of NCBI NO: 7434175 NR Description: hypothetical protein T19P19.50 - Arabidopsis
  misc_feature (1)..(144): Homolog of NCBI NO: 28574759 NR Description: CG11241-PA [Drosophila melanogaster]
  misc_feature (1)..(144): Homolog of NCBI NO: 16198011 NR Description: LD24726p [Drosophila melanogaster]
  misc_feature (147)..(389): Homolog of NCBI NO: 28574759 NR Description: CG11241-PA [Drosophila melanogaster]
  misc_feature (147)..(389): Homolog of NCBI NO: 16198011 NR Description: LD24726p [Drosophila melanogaster]
  misc_feature (47)..(381): Homolog of NCBI NO: 7434175 NR Description: hypothetical protein T19P19.50 - Arabidopsis
  misc_feature (1)..(144): Homolog of NCBI NO: 16198011 NR Description: LD24726p [Drosophila melanogaster]
  misc_feature (147)..(389): Homolog of NCBI NO: 16198011 NR Description: LD24726p [Drosophila melanogaster]
  misc_feature (147)..(389): Homolog of NCBI NO: 28574759 NR Description: CG11241-PA [Drosophila melanogaster]
  misc_feature (1)..(144): Homolog of NCBI NO: 16198011 NR Description: LD24726p [Drosophila melanogaster]
  misc_feature (1)..(144): Homolog of NCBI NO: 28574759 NR Description: CG11241-PA [Drosophila melanogaster]
  misc_feature (47)..(381): Homolog of NCBI NO: 7434175 NR Description: hypothetical protein T19P19.50 - Arabidopsis
  misc_feature (1)..(391): Homolog of NCBI NO: 5731259 NR Description: alanine:glyoxylate aminotransferase 2 homolog
  misc_feature (1)..(391): Homolog of NCBI NO: 18420498 NR Description: alanine--glyoxylate aminotransferase
  misc_feature (1)..(391): Homolog of NCBI NO: 15224499 NR Description: alanine--glyoxylate aminotransferase
  misc_feature (1)..(391): Homolog of NCBI NO: 15028237 NR Description: putative beta-alanine-pyruvate aminotransferase
  misc_feature (1)..(391): Homolog of NCBI NO: 15231974 NR Description: alanine--glyoxylate aminotransferase
  misc_feature (1)..(391): Homolog of NCBI NO: 5731259 NR Description: alanine:glyoxylate aminotransferase 2 homolog
  misc_feature (1)..(391): Homolog of NCBI NO: 18420498 NR Description: alanine--glyoxylate aminotransferase
  misc_feature (1)..(391): Homolog of NCBI NO: 15224499 NR Description: alanine--glyoxylate aminotransferase
  misc_feature (1)..(391): Homolog of NCBI NO: 15028237 NR Description: putative beta-alanine-pyruvate aminotransferase
  misc_feature (1)..(391): Homolog of NCBI NO: 15231974 NR Description: alanine--glyoxylate aminotransferase
  misc_feature (147)..(389): Homolog of NCBI NO: 16198011 NR Description: LD24726p [Drosophila melanogaster]
  misc_feature (147)..(389): Homolog of NCBI NO: 28574759 NR Description: CG11241-PA [Drosophila melanogaster]
  misc_feature (1)..(144): Homolog of NCBI NO: 28574759 NR Description: CG11241-PA [Drosophila melanogaster]
  misc_feature (1)..(391): Homolog of NCBI NO: 15231974 NR Description: alanine--glyoxylate aminotransferase
  misc_feature (1)..(391): Homolog of NCBI NO: 15028237 NR Description: putative beta-alanine-pyruvate aminotransferase
  misc_feature (1)..(391): Homolog of NCBI NO: 15224499 NR Description: alanine--glyoxylate aminotransferase
  misc_feature (1)..(391): Homolog of NCBI NO: 18420498 NR Description: alanine--glyoxylate aminotransferase
  misc_feature (1)..(391): Homolog of NCBI NO: 5731259 NR Description: alanine:glyoxylate aminotransferase 2 homolog

SEQ ID NO: 45578 - protein, 327 aa, Arabidopsis thaliana; identical to SEQ ID NO: 30267
  peptide (1)..(327): Ceres Seq. ID no. 13591660
  misc_feature (1)..(327): Pfam Name: Aminotransferase class-III Pfam Description: Aminotransferase class-III
  misc_feature (1)..(327): Pfam Name: Aminotransferase class-III Pfam Description: Aminotransferase class-III
  misc_feature (1)..(327): Pfam Name: Aminotransferase class-III Pfam Description: Aminotransferase class-III
  misc_feature (1)..(317): Homolog of NCBI NO: 7434175 NR Description: hypothetical protein T19P19.50 - Arabidopsis
  misc_feature (1)..(80): Homolog of NCBI NO: 28574759 NR Description: CG11241-PA [Drosophila melanogaster]
  misc_feature (1)..(80): Homolog of NCBI NO: 16198011 NR Description: LD24726p [Drosophila melanogaster]
  misc_feature (83)..(325): Homolog of NCBI NO: 28574759 NR Description: CG11241-PA [Drosophila melanogaster]
  misc_feature (83)..(325): Homolog of NCBI NO: 16198011 NR Description: LD24726p [Drosophila melanogaster]
  misc_feature (1)..(317): Homolog of NCBI NO: 7434175 NR Description: hypothetical protein T19P19.50 - Arabidopsis
  misc_feature (1)..(80): Homolog of NCBI NO: 16198011 NR Description: LD24726p [Drosophila melanogaster]
  misc_feature (83)..(325): Homolog of NCBI NO: 16198011 NR Description: LD24726p [Drosophila melanogaster]
  misc_feature (83)..(325): Homolog of NCBI NO: 28574759 NR Description: CG11241-PA [Drosophila melanogaster]
  misc_feature (1)..(80): Homolog of NCBI NO: 16198011 NR Description: LD24726p [Drosophila melanogaster]
  misc_feature (1)..(80): Homolog of NCBI NO: 28574759 NR Description: CG11241-PA [Drosophila melanogaster]
  misc_feature (1)..(317): Homolog of NCBI NO: 7434175 NR Description: hypothetical protein T19P19.50 - Arabidopsis
  misc_feature (1)..(327): Homolog of NCBI NO: 5731259 NR Description: alanine:glyoxylate aminotransferase 2 homolog
  misc_feature (1)..(327): Homolog of NCBI NO: 18420498 NR Description: alanine--glyoxylate aminotransferase
  misc_feature (1)..(327): Homolog of NCBI NO: 15224499 NR Description: alanine--glyoxylate aminotransferase
  misc_feature (1)..(327): Homolog of NCBI NO: 15028237 NR Description: putative beta-alanine-pyruvate aminotransferase
  misc_feature (1)..(327): Homolog of NCBI NO: 15231974 NR Description: alanine--glyoxylate aminotransferase
  misc_feature (1)..(327): Homolog of NCBI NO: 5731259 NR Description: alanine:glyoxylate aminotransferase 2 homolog
  misc_feature (1)..(327): Homolog of NCBI NO: 18420498 NR Description: alanine--glyoxylate aminotransferase
  misc_feature (1)..(327): Homolog of NCBI NO: 15224499 NR Description: alanine--glyoxylate aminotransferase
  misc_feature (1)..(327): Homolog of NCBI NO: 15028237 NR Description: putative beta-alanine-pyruvate aminotransferase
  misc_feature (1)..(327): Homolog of NCBI NO: 15231974 NR Description: alanine--glyoxylate aminotransferase
  misc_feature (83)..(325): Homolog of NCBI NO: 16198011 NR Description: LD24726p [Drosophila melanogaster]
  misc_feature (83)..(325): Homolog of NCBI NO: 28574759 NR Description: CG11241-PA [Drosophila melanogaster]
  misc_feature (1)..(80): Homolog of NCBI NO: 28574759 NR Description: CG11241-PA [Drosophila melanogaster]
  misc_feature (1)..(327): Homolog of NCBI NO: 15231974 NR Description: alanine--glyoxylate aminotransferase
  misc_feature (1)..(327): Homolog of NCBI NO: 15028237 NR Description: putative beta-alanine-pyruvate aminotransferase
  misc_feature (1)..(327): Homolog of NCBI NO: 15224499 NR Description: alanine--glyoxylate aminotransferase
  misc_feature (1)..(327): Homolog of NCBI NO: 18420498 NR Description: alanine--glyoxylate aminotransferase
  misc_feature (1)..(327): Homolog of NCBI NO: 5731259 NR Description: alanine:glyoxylate aminotransferase 2 homolog

SEQ ID NO: 45579 - DNA, 2110 bp, Arabidopsis thaliana
  misc_feature (1)..(2110): Ceres Seq. ID no. 13646533
  misc_feature: MA Experiment ID: 20000166 Result: Down-regulated in Transcription
  misc_feature: MA Experiment 20000166 PARAMETER Experiment Name: At_100uM_ABA_P Parameter: Age (day) Value: 14
  misc_feature: MA Experiment 20000166 PARAMETER Experiment Name: At_100uM_ABA_P Parameter: Organism Value: A. thaliana
  misc_feature: MA Experiment 20000166 PARAMETER Experiment Name: At_100uM_ABA_P Parameter: Plant Line Value: WS
  misc_feature: MA Experiment 20000166 PARAMETER Experiment Name: At_100uM_ABA_P Parameter: Timepoint (hr) Value: 1
  misc_feature: MA Experiment 20000166 PARAMETER Experiment Name: At_100uM_ABA_P Parameter: Tissue Value: Aerial
  misc_feature: MA Experiment 20000166 PARAMETER Experiment Name: At_100uM_ABA_P Parameter: Treatment Value: 100uM ABA vs. No Treatment
  misc_feature: MA Experiment ID: 20000173 Result: Down-regulated in Transcription
  misc_feature: MA Experiment 20000173 PARAMETER Experiment Name: At_42deg_Heat_P Parameter: Age (day) Value: 14
  misc_feature: MA Experiment 20000173 PARAMETER Experiment Name: At_42deg_Heat_P Parameter: Organism Value: A. thaliana
  misc_feature: MA Experiment 20000173 PARAMETER Experiment Name: At_42deg_Heat_P Parameter: Plant Line Value: WS
  misc_feature: MA Experiment 20000173 PARAMETER Experiment Name: At_42deg_Heat_P Parameter: Temperature (deg C) Value: 42 vs. 22
  misc_feature: MA Experiment 20000173 PARAMETER Experiment Name: At_42deg_Heat_P Parameter: Timepoint (hr) Value: 6
  misc_feature: MA Experiment 20000173 PARAMETER Experiment Name: At_42deg_Heat_P Parameter: Tissue Value: Aerial
  misc_feature: MA Experiment ID: 20000179 Result: Down-regulated in Transcription
  misc_feature: MA Experiment 20000179 PARAMETER Experiment Name: At_Germinating_Seeds_P Parameter: Age (hr) Value: 6 vs. 0
  misc_feature: MA Experiment 20000179 PARAMETER Experiment Name: At_Germinating_Seeds_P Parameter: Tissue Value: Germinating Seeds
  misc_feature: MA Experiment ID: 20000184 Result: Down-regulated in Transcription
  misc_feature: MA Experiment 20000184 PARAMETER Experiment Name: At_Shoots__P Parameter: Age (day) Value: 7
  misc_feature: MA Experiment 20000184 PARAMETER Experiment Name: At_Shoots__P Parameter: Tissue Value: Shoots vs. Whole Plant
  misc_feature: MA Experiment ID: 20000185 Result: Up-regulated in Transcription
  misc_feature: MA Experiment 20000185 PARAMETER Experiment Name: At_Roots__P Parameter: Age (day) Value: 7 vs. 21
  misc_feature: MA Experiment 20000185 PARAMETER Experiment Name: At_Roots__P Parameter: Organism Value: A. thaliana
  misc_feature: MA Experiment 20000185 PARAMETER Experiment Name: At_Roots__P Parameter: Tissue Value: Roots vs. Whole Plant
  misc_feature: MA Experiment ID: 20000227 Result: Down-regulated in Transcription
  misc_feature: MA Experiment 20000227 PARAMETER Experiment Name: At_Root-Tips-vs-Tops_P Parameter: Tissue Value: Root Tips vs. Root Tops
  misc_feature: MA Experiment ID: 20000234 Result: Down-regulated in Transcription
  misc_feature: MA Experiment 20000234 PARAMETER Experiment Name: At_Siliques_P Parameter: Age (day) Value: 21
  misc_feature: MA Experiment 20000234 PARAMETER Experiment Name: At_Siliques_P Parameter: Organism Value: A. thaliana
  misc_feature: MA Experiment 20000234 PARAMETER Experiment Name: At_Siliques_P Parameter: Plant Line Value: WS
  misc_feature: MA Experiment 20000234 PARAMETER Experiment Name: At_Siliques_P Parameter: Tissue Value: Less Than 5mm Siliques vs. Whole Plant
  misc_feature: MA Experiment ID: 20000265 Result: Down-regulated in Transcription
  misc_feature: MA Experiment 20000265 PARAMETER Experiment Name: At_Open_Flower_P Parameter: Age (day) Value: 21
  misc_feature: MA Experiment 20000265 PARAMETER Experiment Name: At_Open_Flower_P Parameter: Plant Line Value: WS
  misc_feature: MA Experiment 20000265 PARAMETER Experiment Name: At_Open_Flower_P Parameter: Tissue Value: Closed Flower vs. Whole Plant
  misc_feature: MA Experiment ID: 20000575 Result: Down-regulated in Transcription
  misc_feature: MA Experiment 20000575 PARAMETER Experiment Name: At_100uM_ABA_Mutants__P Parameter: Organism Value: A. thaliana
  misc_feature: MA Experiment 20000575 PARAMETER Experiment Name: At_100uM_ABA_Mutants__P Parameter: Plant Line Value: CS22
  misc_feature: MA Experiment 20000575 PARAMETER Experiment Name: At_100uM_ABA_Mutants__P Parameter: Timepoint (hr) Value: 6
  misc_feature: MA Experiment 20000575 PARAMETER Experiment Name: At_100uM_ABA_Mutants__P Parameter: Tissue Value: Whole Plant
  misc_feature: MA Experiment 20000575 PARAMETER Experiment Name: At_100uM_ABA_Mutants__P Parameter: Treatment Value: 1uM ABA vs. No Treatment
  misc_feature: MA Experiment ID: 20000576 Result: Down-regulated in Transcription
  misc_feature: MA Experiment 20000576 PARAMETER Experiment Name: At_100uM_ABA_Mutants__P Parameter: Organism Value: A. thaliana
  misc_feature: MA Experiment 20000576 PARAMETER Experiment Name: At_100uM_ABA_Mutants__P Parameter: Plant Line Value: CS23
  misc_feature: MA Experiment 20000576 PARAMETER Experiment Name: At_100uM_ABA_Mutants__P Parameter: Timepoint (hr) Value: 6
  misc_feature: MA Experiment 20000576 PARAMETER Experiment Name: At_100uM_ABA_Mutants__P Parameter: Tissue Value: Whole Plant
  misc_feature: MA Experiment 20000576 PARAMETER Experiment Name: At_100uM_ABA_Mutants__P Parameter: Treatment Value: 1uM ABA vs. No Treatment
  misc_feature: MA Experiment ID: 20001451 Result: Down-regulated in Transcription
  misc_feature: MA Experiment 20001451 PARAMETER Experiment Name: At_Far-red-induction_P Parameter: Age (day) Value: 7
  misc_feature: MA Experiment 20001451 PARAMETER Experiment Name: At_Far-red-induction_P Parameter: Light Value: Far-red vs. White
  misc_feature: MA Experiment 20001451 PARAMETER Experiment Name: At_Far-red-induction_P Parameter: Organism Value: A. thaliana
  misc_feature: MA Experiment 20001451 PARAMETER Experiment Name: At_Far-red-induction_P Parameter: Plant Line Value: Columbia
  misc_feature: MA Experiment 20001451 PARAMETER Experiment Name: At_Far-red-induction_P Parameter: Timepoint (hr) Value: 24
  misc_feature: MA Experiment 20001451 PARAMETER Experiment Name: At_Far-red-induction_P Parameter: Tissue Value: Whole Plant
  misc_feature: MA Experiment ID: 20001560 Result: Down-regulated in Transcription
  misc_feature: MA Experiment 20001560 PARAMETER Experiment Name: At_Drought_Soil_Dry_P Parameter: Age (day) Value: 28
  misc_feature: MA Experiment 20001560 PARAMETER Experiment Name: At_Drought_Soil_Dry_P Parameter: Organism Value: A. thaliana
  misc_feature: MA Experiment 20001560 PARAMETER Experiment Name: At_Drought_Soil_Dry_P Parameter: Plant Line Value: WS
  misc_feature: MA Experiment 20001560 PARAMETER Experiment Name: At_Drought_Soil_Dry_P Parameter: Post Timepoint (hr) Value: None
  misc_feature: MA Experiment 20001560 PARAMETER Experiment Name: At_Drought_Soil_Dry_P Parameter: Post-Treatment Value: None
  misc_feature: MA Experiment 20001560 PARAMETER Experiment Name: At_Drought_Soil_Dry_P Parameter: Timepoint (day) Value: 14
  misc_feature: MA Experiment 20001560 PARAMETER Experiment Name: At_Drought_Soil_Dry_P Parameter: Treatment Value: Drought vs. No Drought
gggtctcattttcctctggcctatataaatccactatcctccacttctgtctttcatcatcattccacataaacaaaatatcttcttgctcattattcatcatcaatctactactccgtaaactttgcttcctctgtttgtattagctcagaagagatatgggaagtactccgactgatttacccggtgaggatgtcgccgataacagatccggcgtcggcggtggtatttctgacgtctacggtgaggattccgccaccttggaccagcttgtcaccccttgggttacctctgtcgctagtggctacacattgatgcgtgatccgagatacaacaagggacttgcgtttactgataaagaaagagatgctcattacttaactggtcttcttccccctgtgattttgagtcaggatgttcaggagaggaaggtgatgcacaatctccgtcagtacactgttcctctgcagcgttacatggccctgatggatcttcaggaaaggaacgagaggttgttctacaagcttttgattgataacgttgaggagttgcttccagttgtgtacacaccaacagttggtgaggcttgccagaagtatgggagcattttcaggaagccacagggtctctacatcagtttgaacgagaagggcaagattcttgaagttttgaagaactggccccagagaggaatccaagttattgttgttactgatggtgagcggattctcggtctgggagatcttggttgccagggaatgggaattccagtggggaaactttctctttacaccgctttgggaggaatccgtccatcagcttgtcttccaatcaccattgatgtgggtacaaacaatgagaagttgctaaatgatgaattctacatcggtcttaaacagcgaagagcaactggccaggaatatgctgaattcctgcacgaattcatgtgcgctgtaaagcagaactatggagagaaagtgttggttcagtttgaagattttgcaaaccacaatgcgtttgaccttttgtctaagtacagtgatagccatcttgtcttcaatgacgatatccagggtactgcatccgtggtgcttgctgggcttattgccgctcagaaggtgcttggtaaaaaactggctgaccataccttcctgttcttgggtgccggagaggctggaaccggtatcgctgagctaattgctcttaagatttcgaaagagactggagctcccatcactgagacccggaagaagatttggcttgtggactccaagggactgattgttagctcacgcaaagaatctcttcagcacttcaagcagccatgggcacatgagcacaaacctgtgaaggacctcattggtgctgttaatgcaatcaagccaaccgttctcattggaacatccggtgtgggtcagactttcacaaaagaagttgtcgaggccatggctaccaacaacgagaaaccgttgattcttgctctctcaaaccctacttctcaagctgagtgtactgctgaacaggcttacacatggaccaagggtcgtgcaatctttggaagtggaagcccatttgatcctgttgtgtacgatggcaaaacctacttgcctggccaggcaaacaattgctacattttccctggtctgggtcttggtttgatcatgtctggggcaattcgtgtccgtgatgacatgctcctcgcagcttctgaagcattggccgcacaagtgacagaagagcattacgccaatggtctgatctacccgccattctcaaacatcagagagatctctgctaacattgcagcctgtgtcgccgccaaaacctatgacctcggattggcgtcgaacctgccacgtgcaaaggatcttgtcaagtttgcagagagcagcatgtacagccctgtgtacagaaactaccgttaaaaaagttttgttgaagaaacctgcagattatactattcacaacccttgatagtttcttaaggcttgtatttaagttttttgtttgtttgtttgttgtttgttttctcttctacattatgatgctgtttgtgaactctctctctgtctttgctgataaataataaattgttactaatataatctac

SEQ ID NO: 45580 - protein, 588 aa, Arabidopsis thaliana
  peptide (1)..(588): Ceres Seq. ID no. 13646534
  misc_feature (304)..(557): Pfam Name: Malic enzyme, NAD binding domain Pfam Description: Malic enzyme, NAD binding domain
  misc_feature (304)..(557): Pfam Name: Malic enzyme, NAD binding domain Pfam Description: Malic enzyme, NAD binding domain
  misc_feature (12)..(588): Homolog of NCBI NO: 547886 NR Description: NADP-DEPENDENT MALIC ENZYME, CHLOROPLAST
  misc_feature (1)..(588): Homolog of NCBI NO: 1708924 NR Description: NADP-DEPENDENT MALIC ENZYME (NADP-ME)
  misc_feature (15)..(588): Homolog of NCBI NO: 8118507 NR Description: NADP-dependent malic protein [Ricinus communis]
  misc_feature (15)..(588): Homolog of NCBI NO: 4239891 NR Description: NADP-malic enzyme [Aloe arborescens]
  misc_feature (21)..(588): Homolog of NCBI NO: 115420 NR Description: NADP-DEPENDENT MALIC ENZYME (NADP-ME)
  misc_feature (12)..(588): Homolog of NCBI NO: 547886 NR Description: NADP-DEPENDENT MALIC ENZYME, CHLOROPLAST
  misc_feature (15)..(588): Homolog of NCBI NO: 8118507 NR Description: NADP-dependent malic protein [Ricinus communis]
  misc_feature (21)..(588): Homolog of NCBI NO: 115420 NR Description: NADP-DEPENDENT MALIC ENZYME (NADP-ME)
  misc_feature (1)..(588): Homolog of NCBI NO: 15239146 NR Description: NADP dependent malic enzyme - like protein
  misc_feature (1)..(588): Homolog of NCBI NO: 15239517 NR Description: malate dehydrogenase - like protein [Arabidopsis
  misc_feature (10)..(588): Homolog of NCBI NO: 510876 NR Description: NADP dependent malic enzyme [Phaseolus vulgaris]
  misc_feature (21)..(588): Homolog of NCBI NO: 7427668 NR Description: malate dehydrogenase
  misc_feature (1)..(588): Homolog of NCBI NO: 7431234 NR Description: malate dehydrogenase
  misc_feature (15)..(588): Homolog of NCBI NO: 4239891 NR Description: NADP-malic enzyme [Aloe arborescens]
  misc_feature (1)..(588): Homolog of NCBI NO: 1708924 NR Description: NADP-DEPENDENT MALIC ENZYME (NADP-ME)
  misc_feature (1)..(588): Homolog of NCBI NO: 7431234 NR Description: malate dehydrogenase
  misc_feature (21)..(588): Homolog of NCBI NO: 7427668 NR Description: malate dehydrogenase
  misc_feature (10)..(588): Homolog of NCBI NO: 510876 NR Description: NADP dependent malic enzyme [Phaseolus vulgaris]
  misc_feature (1)..(588): Homolog of NCBI NO: 15239517 NR Description: malate dehydrogenase - like protein [Arabidopsis
  misc_feature (1)..(588): Homolog of NCBI NO: 15239146 NR Description: NADP dependent malic enzyme - like protein
MGSTPTDLPGEDVADNRSGVGGGISDVYGEDSATLDQLVTPWVTSVASGYTLMRDPRYNKGLAFTDKERDAHYLTGLLPPVILSQDVQERKVMHNLRQYTVPLQRYMALMDLQERNERLFYKLLIDNVEELLPVVYTPTVGEACQKYGSIFRKPQGLYISLNEKGKILEVLKNWPQRGIQVIVVTDGERILGLGDLGCQGMGIPVGKLSLYTALGGIRPSACLPITIDVGTNNEKLLNDEFYIGLKQRRATGQEYAEFLHEFMCAVKQNYGEKVLVQFEDFANHNAFDLLSKYSDSHLVFNDDIQGTASVVLAGLIAAQKVLGKKLADHTFLFLGAGEAGTGIAELIALKISKETGAPITETRKKIWLVDSKGLIVSSRKESLQHFKQPWAHEHKPVKDLIGAVNAIKPTVLIGTSGVGQTFTKEVVEAMATNNEKPLILALSNPTSQAECTAEQAYTWTKGRAIFGSGSPFDPVVYDGKTYLPGQANNCYIFPGLGLGLIMSGAIRVRDDMLLAASEALAAQVTEEHYANGLIYPPFSNIREISANIAACVAAKTYDLGLASNLPRAKDLVKFAESSMYSPVYRNYR

SEQ ID NO: 45581 - protein, 536 aa, Arabidopsis thaliana
  peptide (1)..(536): Ceres Seq. ID no. 13646535
  misc_feature (252)..(505): Pfam Name: Malic enzyme, NAD binding domain Pfam Description: Malic enzyme, NAD binding domain
  misc_feature (252)..(505): Pfam Name: Malic enzyme, NAD binding domain Pfam Description: Malic enzyme, NAD binding domain
  misc_feature (1)..(536): Homolog of NCBI NO: 547886 NR Description: NADP-DEPENDENT MALIC ENZYME, CHLOROPLAST
  misc_feature (1)..(536): Homolog of NCBI NO: 1708924 NR Description: NADP-DEPENDENT MALIC ENZYME (NADP-ME)
  misc_feature (1)..(536): Homolog of NCBI NO: 8118507 NR Description: NADP-dependent malic protein [Ricinus communis]
  misc_feature (1)..(536): Homolog of NCBI NO: 4239891 NR Description: NADP-malic enzyme [Aloe arborescens]
  misc_feature (1)..(536): Homolog of NCBI NO: 115420 NR Description: NADP-DEPENDENT MALIC ENZYME (NADP-ME)
  misc_feature (1)..(536): Homolog of NCBI NO: 547886 NR Description: NADP-DEPENDENT MALIC ENZYME, CHLOROPLAST
  misc_feature (1)..(536): Homolog of NCBI NO: 8118507 NR Description: NADP-dependent malic protein [Ricinus communis]
  misc_feature (1)..(536): Homolog of NCBI NO: 115420 NR Description: NADP-DEPENDENT MALIC ENZYME (NADP-ME)
  misc_feature (1)..(536): Homolog of NCBI NO: 15239146 NR Description: NADP dependent malic enzyme - like protein
  misc_feature (1)..(536): Homolog of NCBI NO: 15239517 NR Description: malate dehydrogenase - like protein [Arabidopsis
  misc_feature (1)..(536): Homolog of NCBI NO: 510876 NR Description: NADP dependent malic enzyme [Phaseolus vulgaris]
  misc_feature (1)..(536): Homolog of NCBI NO: 7427668 NR Description: malate dehydrogenase
  misc_feature (1)..(536): Homolog of NCBI NO: 7431234 NR Description: malate dehydrogenase
  misc_feature (1)..(536): Homolog of NCBI NO: 4239891 NR Description: NADP-malic enzyme [Aloe arborescens]
  misc_feature (1)..(536): Homolog of NCBI NO: 1708924 NR Description: NADP-DEPENDENT MALIC ENZYME (NADP-ME)
  misc_feature (1)..(536): Homolog of NCBI NO: 7431234 NR Description: malate dehydrogenase
  misc_feature (1)..(536): Homolog of NCBI NO: 7427668 NR Description: malate dehydrogenase
  misc_feature (1)..(536): Homolog of NCBI NO: 510876 NR Description: NADP dependent malic enzyme [Phaseolus vulgaris]
  misc_feature (1)..(536): Homolog of NCBI NO: 15239517 NR Description: malate dehydrogenase - like protein [Arabidopsis
  misc_feature (1)..(536): Homolog of NCBI NO: 15239146 NR Description: NADP dependent malic enzyme - like protein
MRDPRYNKGLAFTDKERDAHYLTGLLPPVILSQDVQERKVMHNLRQYTVPLQRYMALMDLQERNERLFYKLLIDNVEELLPVVYTPTVGEACQKYGSIFRKPQGLYISLNEKGKILEVLKNWPQRGIQVIVVTDGERILGLGDLGCQGMGIPVGKLSLYTALGGIRPSACLPITIDVGTNNEKLLNDEFYIGLKQRRATGQEYAEFLHEFMCAVKQNYGEKVLVQFEDFANHNAFDLLSKYSDSHLVFNDDIQGTASVVLAGLIAAQKVLGKKLADHTFLFLGAGEAGTGIAELIALKISKETGAPITETRKKIWLVDSKGLIVSSRKESLQHFKQPWAHEHKPVKDLIGAVNAIKPTVLIGTSGVGQTFTKEVVEAMATNNEKPLILALSNPTSQAECTAEQAYTWTKGRAIFGSGSPFDPVVYDGKTYLPGQANNCYIFPGLGLGLIMSGAIRVRDDMLLAASEALAAQVTEEHYANGLIYPPFSNIREISANIAACVAAKTYDLGLASNLPRAKDLVKFAESSMYSPVYRNYR

SEQ ID NO: 45582 - protein, 496 aa, Arabidopsis thaliana
  peptide (1)..(496): Ceres Seq. ID no. 13646536
  misc_feature (212)..(465): Pfam Name: Malic enzyme, NAD binding domain Pfam Description: Malic enzyme, NAD binding domain
  misc_feature (212)..(465): Pfam Name: Malic enzyme, NAD binding domain Pfam Description: Malic enzyme, NAD binding domain
  misc_feature (1)..(496): Homolog of NCBI NO: 547886 NR Description: NADP-DEPENDENT MALIC ENZYME, CHLOROPLAST
  misc_feature (1)..(496): Homolog of NCBI NO: 1708924 NR Description: NADP-DEPENDENT MALIC ENZYME (NADP-ME)
  misc_feature (1)..(496): Homolog of NCBI NO: 8118507 NR Description: NADP-dependent malic protein [Ricinus communis]
  misc_feature (1)..(496): Homolog of NCBI NO: 4239891 NR Description: NADP-malic enzyme [Aloe arborescens]
  misc_feature (1)..(496): Homolog of NCBI NO: 115420 NR Description: NADP-DEPENDENT MALIC ENZYME (NADP-ME)
  misc_feature (1)..(496): Homolog of NCBI NO: 547886 NR Description: NADP-DEPENDENT MALIC ENZYME, CHLOROPLAST
  misc_feature (1)..(496): Homolog of NCBI NO: 8118507 NR Description: NADP-dependent malic protein [Ricinus communis]
  misc_feature (1)..(496): Homolog of NCBI NO: 115420 NR Description: NADP-DEPENDENT MALIC ENZYME (NADP-ME)
  misc_feature (1)..(496): Homolog of NCBI NO: 15239146 NR Description: NADP dependent malic enzyme - like protein
  misc_feature (1)..(496): Homolog of NCBI NO: 15239517 NR Description: malate dehydrogenase - like protein [Arabidopsis
  misc_feature (1)..(496): Homolog of NCBI NO: 510876 NR Description: NADP dependent malic enzyme [Phaseolus vulgaris]
  misc_feature (1)..(496): Homolog of NCBI NO: 7427668 NR Description: malate dehydrogenase
  misc_feature (1)..(496): Homolog of NCBI NO: 7431234 NR Description: malate dehydrogenase
  misc_feature (1)..(496): Homolog of NCBI NO: 4239891 NR Description: NADP-malic enzyme [Aloe arborescens]
  misc_feature (1)..(496): Homolog of NCBI NO: 1708924 NR Description: NADP-DEPENDENT MALIC ENZYME (NADP-ME)
  misc_feature (1)..(496): Homolog of NCBI NO: 7431234 NR Description: malate dehydrogenase
  misc_feature (1)..(496): Homolog of NCBI NO: 7427668 NR Description: malate dehydrogenase
  misc_feature (1)..(496): Homolog of NCBI NO: 510876 NR Description: NADP dependent malic enzyme [Phaseolus vulgaris]
  misc_feature (1)..(496): Homolog of NCBI NO: 15239517 NR Description: malate dehydrogenase - like protein [Arabidopsis
  misc_feature (1)..(496): Homolog of NCBI NO: 15239146 NR Description: NADP dependent malic enzyme - like protein
MHNLRQYTVPLQRYMALMDLQERNERLFYKLLIDNVEELLPVVYTPTVGEACQKYGSIFRKPQGLYISLNEKGKILEVLKNWPQRGIQVIVVTDGERILGLGDLGCQGMGIPVGKLSLYTALGGIRPSACLPITIDVGTNNEKLLNDEFYIGLKQRRATGQEYAEFLHEFMCAVKQNYGEKVLVQFEDFANHNAFDLLSKYSDSHLVFNDDIQGTASVVLAGLIAAQKVLGKKLADHTFLFLGAGEAGTGIAELIALKISKETGAPITETRKKIWLVDSKGLIVSSRKESLQHFKQPWAHEHKPVKDLIGAVNAIKPTVLIGTSGVGQTFTKEVVEAMATNNEKPLILALSNPTSQAECTAEQAYTWTKGRAIFGSGSPFDPVVYDGKTYLPGQANNCYIFPGLGLGLIMSGAIRVRDDMLLAASEALAAQVTEEHYANGLIYPPFSNIREISANIAACVAAKTYDLGLASNLPRAKDLVKFAESSMYSPVYRNYR

SEQ ID NO: 45583 - DNA, 3044 bp, Arabidopsis thaliana
  misc_feature (1)..(3044): Ceres Seq. ID no. 12784587
  misc_feature: MA Experiment ID: 20000182 Result: Up-regulated in Transcription
  misc_feature: MA Experiment 20000182 PARAMETER Experiment Name: At_2mM_SA_P Parameter: Age (day) Value: 14
  misc_feature: MA Experiment 20000182 PARAMETER Experiment Name: At_2mM_SA_P Parameter: Organism Value: A. thaliana
  misc_feature: MA Experiment 20000182 PARAMETER Experiment Name: At_2mM_SA_P Parameter: Plant Line Value: WS
  misc_feature: MA Experiment 20000182 PARAMETER Experiment Name: At_2mM_SA_P Parameter: Timepoint (hr) Value: 6
  misc_feature: MA Experiment 20000182 PARAMETER Experiment Name: At_2mM_SA_P Parameter: Tissue Value: Aerial
  misc_feature: MA Experiment 20000182 PARAMETER Experiment Name: At_2mM_SA_P Parameter: Treatment Value: 2mM SA vs. No Treatment
  misc_feature: MA Experiment ID: 20000184 Result: Up-regulated in Transcription
  misc_feature: MA Experiment 20000184 PARAMETER Experiment Name: At_Shoots__P Parameter: Age (day) Value: 7
  misc_feature: MA Experiment 20000184 PARAMETER Experiment Name: At_Shoots__P Parameter: Tissue Value: Shoots vs. Whole Plant
  misc_feature: MA Experiment ID: 20000185 Result: Down-regulated in Transcription
  misc_feature: MA Experiment 20000185 PARAMETER Experiment Name: At_Roots__P Parameter: Age (day) Value: 7 vs. 21
  misc_feature: MA Experiment 20000185 PARAMETER Experiment Name: At_Roots__P Parameter: Organism Value: A. thaliana
  misc_feature: MA Experiment 20000185 PARAMETER Experiment Name: At_Roots__P Parameter: Tissue Value: Roots vs. Whole Plant
  misc_feature: MA Experiment ID: 20000213 Result: Up-regulated in Transcription
  misc_feature: MA Experiment 20000213 PARAMETER Experiment Name: At_4deg_Cold_P Parameter: Timepoint (hr) Value: 2
  misc_feature: MA Experiment ID: 20000234 Result: Down-regulated in Transcription
  misc_feature: MA Experiment 20000234 PARAMETER Experiment Name: At_Siliques_P Parameter: Age (day) Value: 21
  misc_feature: MA Experiment 20000234 PARAMETER Experiment Name: At_Siliques_P Parameter: Organism Value: A. thaliana
  misc_feature: MA Experiment 20000234 PARAMETER Experiment Name: At_Siliques_P Parameter: Plant Line Value: WS
  misc_feature: MA Experiment 20000234 PARAMETER Experiment Name: At_Siliques_P Parameter: Tissue Value: Less Than 5mm Siliques vs. Whole Plant
  misc_feature: MA Experiment ID: 20000264 Result: Down-regulated in Transcription
  misc_feature: MA Experiment 20000264 PARAMETER Experiment Name: At_Open_Flower_P Parameter: Age (day) Value: 21
  misc_feature: MA Experiment 20000264 PARAMETER Experiment Name: At_Open_Flower_P Parameter: Plant Line Value: WS
  misc_feature: MA Experiment 20000264 PARAMETER Experiment Name: At_Open_Flower_P Parameter: Tissue Value: Open Flower vs. Whole Plant
  misc_feature: MA Experiment ID: 20000265 Result: Down-regulated in Transcription
  misc_feature: MA Experiment 20000265 PARAMETER Experiment Name: At_Open_Flower_P Parameter: Age (day) Value: 21
  misc_feature: MA Experiment 20000265 PARAMETER Experiment Name: At_Open_Flower_P Parameter: Plant Line Value: WS
  misc_feature: MA Experiment 20000265 PARAMETER Experiment Name: At_Open_Flower_P Parameter: Tissue Value: Closed Flower vs. Whole Plant
  misc_feature: MA Experiment ID: 20000267 Result: Down-regulated in Transcription
  misc_feature: MA Experiment 20000267 PARAMETER Experiment Name: At_Drought_P Parameter: Age (day) Value: 7
  misc_feature: MA Experiment 20000267 PARAMETER Experiment Name: At_Drought_P Parameter: Organism Value: A. thaliana
  misc_feature: MA Experiment 20000267 PARAMETER Experiment Name: At_Drought_P Parameter: Plant Line Value: WS
  misc_feature: MA Experiment 20000267 PARAMETER Experiment Name: At_Drought_P Parameter: Timepoint (hr) Value: 6
  misc_feature: MA Experiment 20000267 PARAMETER Experiment Name: At_Drought_P Parameter: Tissue Value: Whole Plant
  misc_feature: MA Experiment 20000267 PARAMETER Experiment Name: At_Drought_P Parameter: Treatment Value: Drought vs. No Drought
  misc_feature: MA Experiment ID: 20000269 Result: Up-regulated in Transcription
  misc_feature: MA Experiment 20000269 PARAMETER Experiment Name: At_1mM_KNO3_L-vs-H_Roots_P Parameter: Age (day) Value: 7,10,12
  misc_feature: MA Experiment 20000269 PARAMETER Experiment Name: At_1mM_KNO3_L-vs-H_Roots_P Parameter: Organism Value: A. thaliana
  misc_feature: MA Experiment 20000269 PARAMETER Experiment Name: At_1mM_KNO3_L-vs-H_Roots_P Parameter: Plant Line Value: WS
  misc_feature: MA Experiment 20000269 PARAMETER Experiment Name: At_1mM_KNO3_L-vs-H_Roots_P Parameter: Timepoint (day) Value: 7,10,12
  misc_feature: MA Experiment 20000269 PARAMETER Experiment Name: At_1mM_KNO3_L-vs-H_Roots_P Parameter: Tissue Value: Roots
  misc_feature: MA Experiment 20000269 PARAMETER Experiment Name: At_1mM_KNO3_L-vs-H_Roots_P Parameter: Treatment Value: 1mM KNO3 vs. 50mM KNO3
  misc_feature: MA Experiment ID: 20000286 Result: Down-regulated in Transcription
  misc_feature: MA Experiment 20000286 PARAMETER Experiment Name: At_Open_Flower_P Parameter: Age (day) Value: 21
  misc_feature: MA Experiment 20000286 PARAMETER Experiment Name: At_Open_Flower_P Parameter: Plant Line Value: WS
  misc_feature: MA Experiment 20000286 PARAMETER Experiment Name: At_Open_Flower_P Parameter: Tissue Value: Half Open vs. Whole Plant
  misc_feature: MA Experiment ID: 20000308 Result: Down-regulated in Transcription
  misc_feature: MA Experiment 20000308 PARAMETER Experiment Name: At_100mM_NaCl__P Parameter: Age (day) Value: 17
  misc_feature: MA Experiment 20000308 PARAMETER Experiment Name: At_100mM_NaCl__P Parameter: Organism Value: A. thaliana
  misc_feature: MA Experiment 20000308 PARAMETER Experiment Name: At_100mM_NaCl__P Parameter: Plant Line Value: WS
  misc_feature: MA Experiment 20000308 PARAMETER Experiment Name: At_100mM_NaCl__P Parameter: Timepoint (hr) Value: 72
  misc_feature: MA Experiment 20000308 PARAMETER Experiment Name: At_100mM_NaCl__P Parameter: Tissue Value: Whole Plant
  misc_feature: MA Experiment 20000308 PARAMETER Experiment Name: At_100mM_NaCl__P Parameter: Treatment Value: 100mM NaCl vs. No Treatment
  misc_feature: MA Experiment ID: 20000437 Result: Down-regulated in Transcription
  misc_feature: MA Experiment 20000437 PARAMETER Experiment Name: At_Drought_P Parameter: Age (day) Value: 8
  misc_feature: MA Experiment 20000437 PARAMETER Experiment Name: At_Drought_P Parameter: Organism Value: A. thaliana
  misc_feature: MA Experiment 20000437 PARAMETER Experiment Name: At_Drought_P Parameter: Plant Line Value: WS
  misc_feature: MA Experiment 20000437 PARAMETER Experiment Name: At_Drought_P Parameter: Timepoint (hr) Value: 24
  misc_feature: MA Experiment 20000437 PARAMETER Experiment Name: At_Drought_P Parameter: Tissue Value: Whole Plant
  misc_feature: MA Experiment 20000437 PARAMETER Experiment Name: At_Drought_P Parameter: Treatment Value: Drought vs. No Drought
  misc_feature: MA Experiment ID: 20000441 Result: Up-regulated in Transcription
  misc_feature: MA Experiment 20000441 PARAMETER Experiment Name: At_1uM_BR-BRZ__P Parameter: Tissue Value: Shoot Apices
  misc_feature: MA Experiment 20000441 PARAMETER Experiment Name: At_1uM_BR-BRZ__P Parameter: Treatment Value: 1uM BR vs. No Treatment
  misc_feature: MA Experiment ID: 20000443 Result: Up-regulated in Transcription
  misc_feature: MA Experiment 20000443 PARAMETER Experiment Name: At_1uM_BR-BRZ__P Parameter: Tissue Value: Shoot Apices
  misc_feature: MA Experiment 20000443 PARAMETER Experiment Name: At_1uM_BR-BRZ__P Parameter: Treatment Value: 1uM BRZ vs. No Treatment
  misc_feature: MA Experiment ID: 20000495 Result: Down-regulated in Transcription
  misc_feature: MA Experiment 20000495 PARAMETER Experiment Name: At_Guard_Cells_P Parameter: Harvest Date Value: 8/2/2002
  misc_feature: MA Experiment 20000495 PARAMETER Experiment Name: At_Guard_Cells_P Parameter: Organism Value: A. thaliana
  misc_feature: MA Experiment 20000495 PARAMETER Experiment Name: At_Guard_Cells_P Parameter: Tissue Value: Guard Cells vs. Leaves
  misc_feature: MA Experiment ID: 20000709 Result: Up-regulated in Transcription
  misc_feature: MA Experiment 20000709 PARAMETER Experiment Name: At_15mM_NH4NO3_L-to-H_P Parameter: Age (hr) Value: 14
  misc_feature: MA Experiment 20000709 PARAMETER Experiment Name: At_15mM_NH4NO3_L-to-H_P Parameter: Organism Value: A. thaliana
  misc_feature: MA Experiment 20000709 PARAMETER Experiment Name: At_15mM_NH4NO3_L-to-H_P Parameter: Plant Line Value: WS
  misc_feature: MA Experiment 20000709 PARAMETER Experiment Name: At_15mM_NH4NO3_L-to-H_P Parameter: Timepoint (hr) Value: 4
  misc_feature: MA Experiment 20000709 PARAMETER Experiment Name: At_15mM_NH4NO3_L-to-H_P Parameter: Tissue Value: Aerial
  misc_feature: MA Experiment 20000709 PARAMETER Experiment Name: At_15mM_NH4NO3_L-to-H_P Parameter: Treatment Value: 15mM NH4NO3 vs. 30mM Mannitol
  misc_feature: MA Experiment ID: 20000794 Result: Down-regulated in Transcription
  misc_feature: MA Experiment 20000794 PARAMETER Experiment Name: At_Petals_P Parameter: Age (day) Value: 23-25 days
  misc_feature: MA Experiment 20000794 PARAMETER Experiment Name: At_Petals_P Parameter: Plant Line Value: WS
  misc_feature: MA Experiment 20000794 PARAMETER Experiment Name: At_Petals_P Parameter: Tissue Value: Petals vs. Whole plant
  misc_feature: MA Experiment ID: 20001457 Result: Up-regulated in Transcription
  misc_feature: MA Experiment 20001457 PARAMETER Experiment Name: At_50mM_NH4NO3_L-to-H_P Parameter: Age (day) Value: Undefined
  misc_feature: MA Experiment 20001457 PARAMETER Experiment Name: At_50mM_NH4NO3_L-to-H_P Parameter: Organism Value: Undefined
  misc_feature: MA Experiment 20001457 PARAMETER Experiment Name: At_50mM_NH4NO3_L-to-H_P Parameter: Plant Line Value: Undefined
  misc_feature: MA Experiment 20001457 PARAMETER Experiment Name: At_50mM_NH4NO3_L-to-H_P Parameter: Timepoint (hr) Value: 0.5
  misc_feature: MA Experiment 20001457 PARAMETER Experiment Name: At_50mM_NH4NO3_L-to-H_P Parameter: Tissue Value: Siliques
  misc_feature: MA Experiment 20001457 PARAMETER Experiment Name: At_50mM_NH4NO3_L-to-H_P Parameter: Treatment Value: 50mM NH4NO3 vs. 100mM Manitol
  misc_feature: MA Experiment ID: 20001458 Result: Up-regulated in Transcription
  misc_feature: MA Experiment 20001458 PARAMETER Experiment Name: At_50mM_NH4NO3_L-to-H_P Parameter: Age (day) Value: Undefined
  misc_feature: MA Experiment 20001458 PARAMETER Experiment Name: At_50mM_NH4NO3_L-to-H_P Parameter: Organism Value: Undefined
  misc_feature: MA Experiment 20001458 PARAMETER Experiment Name: At_50mM_NH4NO3_L-to-H_P Parameter: Plant Line Value: Undefined
  misc_feature: MA Experiment 20001458 PARAMETER Experiment Name: At_50mM_NH4NO3_L-to-H_P Parameter: Timepoint (hr) Value: 2
  misc_feature: MA Experiment 20001458 PARAMETER Experiment Name: At_50mM_NH4NO3_L-to-H_P Parameter: Tissue Value: Siliques
  misc_feature: MA Experiment 20001458 PARAMETER Experiment Name: At_50mM_NH4NO3_L-to-H_P Parameter: Treatment Value: 50mM NH4NO3 vs. 100mM Manitol
  misc_feature: MA Experiment ID: 20001459 Result: Up-regulated in Transcription
  misc_feature: MA Experiment 20001459 PARAMETER Experiment Name: At_50mM_NH4NO3_L-to-H_P Parameter: Age (day) Value: Undefined
  misc_feature: MA Experiment 20001459 PARAMETER Experiment Name: At_50mM_NH4NO3_L-to-H_P Parameter: Organism Value: Undefined
  misc_feature: MA Experiment 20001459 PARAMETER Experiment Name: At_50mM_NH4NO3_L-to-H_P Parameter: Plant Line Value: Undefined
  misc_feature: MA Experiment 20001459 PARAMETER Experiment Name: At_50mM_NH4NO3_L-to-H_P Parameter: Timepoint (hr) Value: 4
  misc_feature: MA Experiment 20001459 PARAMETER Experiment Name: At_50mM_NH4NO3_L-to-H_P Parameter: Tissue Value: Siliques
  misc_feature: MA Experiment 20001459 PARAMETER Experiment Name: At_50mM_NH4NO3_L-to-H_P Parameter: Treatment Value: 50mM NH4NO3 vs. 100mM Manitol
  misc_feature: MA Experiment ID: 20001557 Result: Up-regulated in Transcription
  misc_feature: MA Experiment 20001557 PARAMETER Experiment Name: At_Drought_Soil_Dry_P Parameter: Age (day) Value: 27
  misc_feature: MA Experiment 20001557 PARAMETER Experiment Name: At_Drought_Soil_Dry_P Parameter: Organism Value: A. thaliana
  misc_feature: MA Experiment 20001557 PARAMETER Experiment Name: At_Drought_Soil_Dry_P Parameter: Plant Line Value: WS
  misc_feature: MA Experiment 20001557 PARAMETER Experiment Name: At_Drought_Soil_Dry_P Parameter: Post Timepoint (hr) Value: 3
  misc_feature: MA Experiment 20001557 PARAMETER Experiment Name: At_Drought_Soil_Dry_P Parameter: Post-Treatment Value: Re-Water vs. No Drought
  misc_feature: MA Experiment 20001557 PARAMETER Experiment Name: At_Drought_Soil_Dry_P Parameter: Timepoint (day) Value: 13
  misc_feature: MA Experiment 20001557 PARAMETER Experiment Name: At_Drought_Soil_Dry_P Parameter: Treatment Value: Drought vs. No Drought
  misc_feature: MA Experiment ID: 20001755 Result: Up-regulated in Transcription
  misc_feature: MA Experiment 20001755 PARAMETER Experiment Name: At_50mM_NH4NO3_L-to-H_P Parameter: Timepoint (hr) Value: 2
  misc_feature: MA Experiment 20001755 PARAMETER Experiment Name: At_50mM_NH4NO3_L-to-H_P Parameter: Tissue Value: Leaf
  misc_feature: MA Experiment 20001755 PARAMETER Experiment Name: At_50mM_NH4NO3_L-to-H_P Parameter: Treatment Value: 50mM NH4NO3 vs 100mM Mannitol
  misc_feature: MA Experiment ID: 20001757 Result: Up-regulated in Transcription
  misc_feature: MA Experiment 20001757 PARAMETER Experiment Name: At_50mM_NH4NO3_L-to-H_P Parameter: Timepoint (hr) Value: 6
  misc_feature: MA Experiment 20001757 PARAMETER Experiment Name: At_50mM_NH4NO3_L-to-H_P Parameter: Tissue Value: Leaf
  misc_feature: MA Experiment 20001757 PARAMETER Experiment Name: At_50mM_NH4NO3_L-to-H_P Parameter: Treatment Value: 50mM NH4NO3 vs 100mM Mannitol
  misc_feature: MA Experiment ID: 20001759 Result: Up-regulated in Transcription
  misc_feature: MA Experiment 20001759 PARAMETER Experiment Name: At_50mM_NH4NO3_L-to-H_P Parameter: Timepoint (hr) Value: 1
  misc_feature: MA Experiment 20001759 PARAMETER Experiment Name: At_50mM_NH4NO3_L-to-H_P Parameter: Tissue Value: Siliques
  misc_feature: MA Experiment 20001759 PARAMETER Experiment Name: At_50mM_NH4NO3_L-to-H_P Parameter: Treatment Value: 50mM NH4NO3 vs 100mM Mannitol
  misc_feature: MA Experiment ID: 20001760 Result: Up-regulated in Transcription
  misc_feature: MA Experiment 20001760 PARAMETER Experiment Name: At_50mM_NH4NO3_L-to-H_P Parameter: Timepoint (hr) Value: 2
  misc_feature: MA Experiment 20001760 PARAMETER Experiment Name: At_50mM_NH4NO3_L-to-H_P Parameter: Tissue Value: Siliques
  misc_feature: MA Experiment 20001760 PARAMETER Experiment Name: At_50mM_NH4NO3_L-to-H_P Parameter: Treatment Value: 50mM NH4NO3 vs 100mM Mannitol
  misc_feature: MA Experiment ID: 20001906 Result: Down-regulated in Transcription
  misc_feature: MA Experiment 20001906 PARAMETER Experiment Name: At_Drought_Reproduction_P Parameter: Age (day) Value: 35
  misc_feature: MA Experiment 20001906 PARAMETER Experiment Name: At_Drought_Reproduction_P Parameter: Organism Value: A. thaliana
  misc_feature: MA Experiment 20001906 PARAMETER Experiment Name: At_Drought_Reproduction_P Parameter: Plant Line Value: WS
  misc_feature: MA Experiment 20001906 PARAMETER Experiment Name: At_Drought_Reproduction_P Parameter: Timepoint (day) Value: 5
  misc_feature: MA Experiment 20001906 PARAMETER Experiment Name: At_Drought_Reproduction_P Parameter: Tissue Value: Siliques
  misc_feature: MA Experiment 20001906 PARAMETER Experiment Name: At_Drought_Reproduction_P Parameter: Treatment Value: Drought vs. No Drought
  misc_feature: MA Experiment ID: 20001910 Result: Down-regulated in Transcription
  misc_feature: MA Experiment 20001910 PARAMETER Experiment Name: At_Drought_Reproduction_P Parameter: Age (day) Value: 37
  misc_feature: MA Experiment 20001910 PARAMETER Experiment Name: At_Drought_Reproduction_P Parameter: Organism Value: A. thaliana
  misc_feature: MA Experiment 20001910 PARAMETER Experiment Name: At_Drought_Reproduction_P Parameter: Plant Line Value: WS
  misc_feature: MA Experiment 20001910 PARAMETER Experiment Name: At_Drought_Reproduction_P Parameter: Timepoint (day) Value: 7
  misc_feature: MA Experiment 20001910 PARAMETER Experiment Name: At_Drought_Reproduction_P Parameter: Tissue Value: Flowers
  misc_feature: MA Experiment 20001910 PARAMETER Experiment Name: At_Drought_Reproduction_P Parameter: Treatment Value: Drought vs. No Drought
tcgtcctcagatctcatctcactcacaagagagagatagagagagaaaaaggctctgctttctacattatttacgattatacactttccaacatggcggcctctgtagataatcgccaatacgctcgtctcgagccaggtttgaacggcgtggttcgttcttacaaacctcccgttccaggccggtccgattcccctaaggcgcaccagaaccaaaccaccaaccaaaccgtgttcttgaaaccagccaaggttcatgacgatgacgaagacgtgtcgagcgaagacgagaacgagacacacaacagcaacgccgtgtactacaaggagatgataagaaaatccaacgccgagcttgaaccgtccgttttggacccgagggacgaatacacggctgatagctggatcgagcgtaacccttccatggtacgtctcacagggaaacatcccttcaactccgaggcgcctcttaaccgtttaatgcaccacgggtttatcacccctgtcccgttgcactacgttcgtaaccacggccacgtccctaaagcccaatgggccgaatggacggtcgaggtgaccggattcgtcaaacggcccatgaaattcaccatggaccagctcgtctccgagtttgcttaccgcgagttcgccgcgacgctagtctgcgcggggaaccgccgtaaggaacagaacatggtgaagaagtcaaagggattcaactggggatccgccggagtttccacctccgtgtggcgtggtgtccctctctgcgacgtactgcgtcgctgcgggatctttagccgaaaaggcggcgctctcaacgtctgcttcgaagggtcggaggatcttccgggcggtgccggaactgctggttccaaatacggaacgagcatcaagaaggaatatgccatggatccatcaagagacatcattttggcttatatgcaaaacggagagtatctaacaccagaccacggttttccggttcggatcatcatccccggtttcattggtggccggatggttaaatggttgaaacgaatcattgtcacaactaaagaatccgacaatttctaccatttcaaggacaacagagttttaccttctttggtagacgccgaactcgccgacgaagaaggttggtggtataagccagagtacataatcaacgagctaaacataaactccgtgattacgacgccatgtcacgaggagattcttcccatcaacgctttcacaacccaaagaccttatactttaaagggttacgcatattccggaggtggaaaaaaagtgacccgtgtggaggtcacggtagatggtggagagacatggaacgtatgtgcacttgaccatcaagagaagccaaacaagtatgggaagttctggtgttggtgtttttggtcacttgaggttgaggttttggacttgcttagtgccaaagagattgctgttcgtgcatgggacgagactctcaacacgcagcccgagaaaatgatatggaatctcatggggatgatgaataactgctggtttagagtgaagactaacgtgtgcaagccacacaagggagagattgggattgtgttcgagcatccaacgcttcctggtaatgaatctggtggatggatggcgaaggaacgtcacctcgaaaaatcggctgacgcgcctcctagtctaaagaagtctgtctcgacgccgtttatgaacacaactgcgaagatgtactcgatgtccgaggtcaagaagcataattcggctgactcttgctggatcattgtccatggacatatctatgattgtacacgattccttatggatcacccgggtggttcggattcaatcttgatcaatgctggtacggattgtacggaggagtttgaagccattcactcggataaagccaagaagatgcttgaggattaccgtatcggtgagctcatcaccactggttattcctctgactcttcctcgcctaacaactcggttcacggttcatccgccgtgttctcgctgttggctcccattggagaggcgactccggttaggaacctcgctttggttaatccccgggctaaagtcccggttcaactcgtcgaaaagacttccatttctcatgatgttcgtaaattccggtttgctttaccggttgaggatatggttctaggcttaccggttggtaagcacattttcctttgcgccaccatcaatgacaagctctgcctcagagcttacacaccaagcagcaccgttgatgtggttggctacttcgagctcgtggtcaagatttactttggcggtgtccacccaagattccctaacggcgggctcatgtctcagtacctagactctttgcctatagggtcaactttggagattaaaggaccattgggtcacgttgagtatctcggcaagggtagtttcacggttcacggtaaaccaaagtttgctgataaattggcaatgttggcaggtggaaccggaataactccggtttaccaaattatccaagccattctcaaggatccagaggatgagactgaaatgtacgtcatttatgctaaccggaccgaggaagatattctcctaagggaggaactggatggttgggcagagcaatacccggaccggttaaaggtttggtacgtagtggaatcagctaaggaaggttgggcatacagtaccgggtttatttccgaggcgattatgcgagaacatatccctgatggattagatggctcagcccttgccatggcttgcggaccaccaccgatgattcagtttgcggttcagccgaatttggagaagatgcaatataacatcaaggaggatttcttgatattctagtctaaagccaagatatttcaaagtcaaaacgttaagtcgtcaaaaagcctagtgttatgatagattctaaataagtattgagggatttgtttgtatataatgttggttctttaaagtcttggatttggaaatataatgtgttcgttgtattcacgatcgatattttttttcacaataatatacaaaaagtaatttcag

SEQ ID NO: 45584 - protein, 947 aa, Arabidopsis thaliana
  peptide (1)..(947): Ceres Seq. ID no. 12784588
  misc_feature (127)..(359): Pfam Name: Oxidoreductase molybdopterin binding domain Pfam Description: Oxidoreductase molybdopterin binding domain
  misc_feature (590)..(907): Homolog of NCBI NO: 14456133 NR Description: putative nitrate reductase [Ustilago maydis]
  misc_feature (27)..(451): Homolog of NCBI NO: 14456133 NR Description: putative nitrate reductase [Ustilago maydis]
  misc_feature (120)..(947): Homolog of NCBI NO: 1171706 NR Description: Nitrate reductase [NADPH] (NR)
  misc_feature (116)..(947): Homolog of NCBI NO: 730145 NR Description: Nitrate reductase [NADPH] (NR)
  misc_feature (125)..(453): Homolog of NCBI NO: 1071816 NR Description: nitrate reductase (NADPH) (EC 1.6.6.3) -
  misc_feature (125)..(453): Homolog of NCBI NO: 548358 NR Description: Nitrate reductase [NADPH] (NR)
  misc_feature (373)..(947): Homolog of NCBI NO: 1071816 NR Description: nitrate reductase (NADPH) (EC 1.6.6.3) -
  misc_feature (373)..(947): Homolog of NCBI NO: 548358 NR Description: Nitrate reductase [NADPH] (NR)
  misc_feature (123)..(947): Homolog of NCBI NO: 730148 NR Description: Nitrate reductase [NADPH] (NR)
  misc_feature (122)..(938): Homolog of NCBI NO: 7432652 NR Description: nitrate reductase (NADH) (EC 1.7.1.1)
VLRSHLTHKREIEREKGSAFYIIYDYTLSNMAASVDNRQYARLEPGLNGVVRSYKPPVPGRSDSPKAHQNQTTNQTVFLKPAKVHDDDEDVSSEDENETHNSNAVYYKEMIRKSNAELEPSVLDPRDEYTADSWIERNPSMVRLTGKHPFNSEAPLNRLMHHGFITPVPLHYVRNHGHVPKAQWAEWTVEVTGFVKRPMKFTMDQLVSEFAYREFAATLVCAGNRRKEQNMVKKSKGFNWGSAGVSTSVWRGVPLCDVLRRCGIFSRKGGALNVCFEGSEDLPGGAGTAGSKYGTSIKKEYAMDPSRDIILAYMQNGEYLTPDHGFPVRIIIPGFIGGRMVKWLKRIIVTTKESDNFYHFKDNRVLPSLVDAELADEEGWWYKPEYIINELNINSVITTPCHEEILPINAFTTQRPYTLKGYAYSGGGKKVTRVEVTVDGGETWNVCALDHQEKPNKYGKFWCWCFWSLEVEVLDLLSAKEIAVRAWDETLNTQPEKMIWNLMGMMNNCWFRVKTNVCKPHKGEIGIVFEHPTLPGNESGGWMAKERHLEKSADAPPSLKKSVSTPFMNTTAKMYSMSEVKKHNSADSCWIIVHGHIYDCTRFLMDHPGGSDSILINAGTDCTEEFEAIHSDKAKKMLEDYRIGELITTGYSSDSSSPNNSVHGSSAVFSLLAPIGEATPVRNLALVNPRAKVPVQLVEKTSISHDVRKFRFALPVEDMVLGLPVGKHIFLCATINDKLCLRAYTPSSTVDVVGYFELVVKIYFGGVHPRFPNGGLMSQYLDSLPIGSTLEIKGPLGHVEYLGKGSFTVHGKPKFADKLAMLAGGTGITPVYQIIQAILKDPEDETEMYVIYANRTEEDILLREELDGWAEQYPDRLKVWYVVESAKEGWAYSTGFISEAIMREHIPDGLDGSALAMACGPPPMIQFAVQPNLEKMQYNIKEDFLIF

SEQ ID NO: 45585 - protein, 917 aa, Arabidopsis thaliana; identical to SEQ ID NO: 45155
  peptide (1)..(917): Ceres Seq. ID no. 12784589
  misc_feature (97)..(329): Pfam Name: Oxidoreductase molybdopterin binding domain Pfam Description: Oxidoreductase molybdopterin binding domain
  misc_feature (560)..(877): Homolog of NCBI NO: 14456133 NR Description: putative nitrate reductase [Ustilago maydis]
  misc_feature (1)..(421): Homolog of NCBI NO: 14456133 NR Description: putative nitrate reductase [Ustilago maydis]
  misc_feature (90)..(917): Homolog of NCBI NO: 1171706 NR Description: Nitrate reductase [NADPH] (NR)
  misc_feature (86)..(917): Homolog of NCBI NO: 730145 NR Description: Nitrate reductase [NADPH] (NR)
  misc_feature (95)..(423): Homolog of NCBI NO: 1071816 NR Description: nitrate reductase (NADPH) (EC 1.6.6.3) -
  misc_feature (95)..(423): Homolog of NCBI NO: 548358 NR Description: Nitrate reductase [NADPH] (NR)
  misc_feature (343)..(917): Homolog of NCBI NO: 1071816 NR Description: nitrate reductase (NADPH) (EC 1.6.6.3) -
  misc_feature (343)..(917): Homolog of NCBI NO: 548358 NR Description: Nitrate reductase [NADPH] (NR)
  misc_feature (93)..(917): Homolog of NCBI NO: 730148 NR Description: Nitrate reductase [NADPH] (NR)
  misc_feature (92)..(908): Homolog of NCBI NO: 7432652 NR Description: nitrate reductase (NADH) (EC 1.7.1.1)

SEQ ID NO: 45586 - protein, 838 aa, Arabidopsis thaliana; identical to SEQ ID NO: 45156
  peptide (1)..(838): Ceres Seq. ID no. 12784590
  misc_feature (18)..(250): Pfam Name: Oxidoreductase molybdopterin binding domain Pfam Description: Oxidoreductase molybdopterin binding domain
  misc_feature (481)..(798): Homolog of NCBI NO: 14456133 NR Description: putative nitrate reductase [Ustilago maydis]
  misc_feature (1)..(342): Homolog of NCBI NO: 14456133 NR Description: putative nitrate reductase [Ustilago maydis]
  misc_feature (11)..(838): Homolog of NCBI NO: 1171706 NR Description: Nitrate reductase [NADPH] (NR)
  misc_feature (7)..(838): Homolog of NCBI NO: 730145 NR Description: Nitrate reductase [NADPH] (NR)
  misc_feature (16)..(344): Homolog of NCBI NO: 1071816 NR Description: nitrate reductase (NADPH) (EC 1.6.6.3) -
  misc_feature (16)..(344): Homolog of NCBI NO: 548358 NR Description: Nitrate reductase [NADPH] (NR)
  misc_feature (264)..(838): Homolog of NCBI NO: 1071816 NR Description: nitrate reductase (NADPH) (EC 1.6.6.3) -
  misc_feature (264)..(838): Homolog of NCBI NO: 548358 NR Description: Nitrate reductase [NADPH] (NR)
  misc_feature (14)..(838): Homolog of NCBI NO: 730148 NR Description: Nitrate reductase [NADPH] (NR)
  misc_feature (13)..(829): Homolog of NCBI NO: 7432652 NR Description: nitrate reductase (NADH) (EC 1.7.1.1)

SEQ ID NO: 45587 - DNA, 2205 bp, Arabidopsis thaliana
  misc_feature (1)..(2205): Ceres Seq. ID no. 13646842
  misc_feature: MA Experiment ID: 20000171 Result: Down-regulated in Transcription
  misc_feature: MA Experiment 20000171 PARAMETER Experiment Name: At_42deg_Heat_P Parameter: Age (day) Value: 14
  misc_feature: MA Experiment 20000171 PARAMETER Experiment Name: At_42deg_Heat_P Parameter: Organism Value: A. thaliana
  misc_feature: MA Experiment 20000171 PARAMETER Experiment Name: At_42deg_Heat_P Parameter: Plant Line Value: WS
  misc_feature: MA Experiment 20000171 PARAMETER Experiment Name: At_42deg_Heat_P Parameter: Temperature (deg C) Value: 42 vs. 22
  misc_feature: MA Experiment 20000171 PARAMETER Experiment Name: At_42deg_Heat_P Parameter: Timepoint (hr) Value: 1
  misc_feature: MA Experiment 20000171 PARAMETER Experiment Name: At_42deg_Heat_P Parameter: Tissue Value: Aerial
  misc_feature: MA Experiment ID: 20000179 Result: Down-regulated in Transcription
  misc_feature: MA Experiment 20000179 PARAMETER Experiment Name: At_Germinating_Seeds_P Parameter: Age (hr) Value: 6 vs. 0
  misc_feature: MA Experiment 20000179 PARAMETER Experiment Name: At_Germinating_Seeds_P Parameter: Tissue Value: Germinating Seeds
  misc_feature: MA Experiment ID: 20000180 Result: Down-regulated in Transcription
  misc_feature: MA Experiment 20000180 PARAMETER Experiment Name: At_Germinating_Seeds_P Parameter: Age (hr) Value: 24 vs. 0
  misc_feature: MA Experiment 20000180 PARAMETER Experiment Name: At_Germinating_Seeds_P Parameter: Tissue Value: Germinating Seeds
  misc_feature: MA Experiment ID: 20000184 Result: Down-regulated in Transcription
  misc_feature: MA Experiment 20000184 PARAMETER Experiment Name: At_Shoots__P Parameter: Age (day) Value: 7
  misc_feature: MA Experiment 20000184 PARAMETER Experiment Name: At_Shoots__P Parameter: Tissue Value: Shoots vs. Whole Plant
  misc_feature: MA Experiment ID: 20001248 Result: Up-regulated in Transcription
  misc_feature: MA Experiment 20001248 PARAMETER Experiment Name: At_Far-red-induction_P Parameter: Age (day) Value: 7
  misc_feature: MA Experiment 20001248 PARAMETER Experiment Name: At_Far-red-induction_P Parameter: Light Value: Far-red vs. White
  misc_feature: MA Experiment 20001248 PARAMETER Experiment Name: At_Far-red-induction_P Parameter: Organism Value: A. thaliana
  misc_feature: MA Experiment 20001248 PARAMETER Experiment Name: At_Far-red-induction_P Parameter: Plant Line Value: Columbia
  misc_feature: MA Experiment 20001248 PARAMETER Experiment Name: At_Far-red-induction_P Parameter: Timepoint (hr) Value: 4
  misc_feature: MA Experiment 20001248 PARAMETER Experiment Name: At_Far-red-induction_P Parameter: Tissue Value: Whole Plant
  misc_feature: MA Experiment ID: 20001451 Result: Up-regulated in Transcription
  misc_feature: MA Experiment 20001451 PARAMETER Experiment Name: At_Far-red-induction_P Parameter: Age (day) Value: 7
  misc_feature: MA Experiment 20001451 PARAMETER Experiment Name: At_Far-red-induction_P Parameter: Light Value: Far-red vs. White
  misc_feature: MA Experiment 20001451 PARAMETER Experiment Name: At_Far-red-induction_P Parameter: Organism Value: A. thaliana
  misc_feature: MA Experiment 20001451 PARAMETER Experiment Name: At_Far-red-induction_P Parameter: Plant Line Value: Columbia
  misc_feature: MA Experiment 20001451 PARAMETER Experiment Name: At_Far-red-induction_P Parameter: Timepoint (hr) Value: 24
  misc_feature: MA Experiment 20001451 PARAMETER Experiment Name: At_Far-red-induction_P Parameter: Tissue Value: Whole Plant
  misc_feature: MA Experiment ID: 20001557 Result: Up-regulated in Transcription
  misc_feature: MA Experiment 20001557 PARAMETER Experiment Name: At_Drought_Soil_Dry_P Parameter: Age (day) Value: 27
  misc_feature: MA Experiment 20001557 PARAMETER Experiment Name: At_Drought_Soil_Dry_P Parameter: Organism Value: A. thaliana
  misc_feature: MA Experiment 20001557 PARAMETER Experiment Name: At_Drought_Soil_Dry_P Parameter: Plant Line Value: WS
  misc_feature: MA Experiment 20001557 PARAMETER Experiment Name: At_Drought_Soil_Dry_P Parameter: Post Timepoint (hr) Value: 3
  misc_feature: MA Experiment 20001557 PARAMETER Experiment Name: At_Drought_Soil_Dry_P Parameter: Post-Treatment Value: Re-Water vs. No Drought
  misc_feature: MA Experiment 20001557 PARAMETER Experiment Name: At_Drought_Soil_Dry_P Parameter: Timepoint (day) Value: 13
  misc_feature: MA Experiment 20001557 PARAMETER Experiment Name: At_Drought_Soil_Dry_P Parameter: Treatment Value: Drought vs. No Drought
  misc_feature: MA Experiment ID: 20001558 Result: Up-regulated in Transcription
  misc_feature: MA Experiment 20001558 PARAMETER Experiment Name: At_Drought_Soil_Dry_P Parameter: Age (day) Value: 27
  misc_feature: MA Experiment 20001558 PARAMETER Experiment Name: At_Drought_Soil_Dry_P Parameter: Organism Value: A. thaliana
  misc_feature: MA Experiment 20001558 PARAMETER Experiment Name: At_Drought_Soil_Dry_P Parameter: Plant Line Value: WS
  misc_feature: MA Experiment 20001558 PARAMETER Experiment Name: At_Drought_Soil_Dry_P Parameter: Post Timepoint (hr) Value: 6
  misc_feature: MA Experiment 20001558 PARAMETER Experiment Name: At_Drought_Soil_Dry_P Parameter: Post-Treatment Value: Re-Water vs. No Drought
  misc_feature: MA Experiment 20001558 PARAMETER Experiment Name: At_Drought_Soil_Dry_P Parameter: Timepoint (day) Value: 13
  misc_feature: MA Experiment 20001558 PARAMETER Experiment Name: At_Drought_Soil_Dry_P Parameter: Treatment Value: Drought vs. No Drought
  misc_feature: MA Experiment ID: 20001560 Result: Up-regulated in Transcription
  misc_feature: MA Experiment 20001560 PARAMETER Experiment Name: At_Drought_Soil_Dry_P Parameter: Age (day) Value: 28
  misc_feature: MA Experiment 20001560 PARAMETER Experiment Name: At_Drought_Soil_Dry_P Parameter: Organism Value: A. thaliana
  misc_feature: MA Experiment 20001560 PARAMETER Experiment Name: At_Drought_Soil_Dry_P Parameter: Plant Line Value: WS
  misc_feature: MA Experiment 20001560 PARAMETER Experiment Name: At_Drought_Soil_Dry_P Parameter: Post Timepoint (hr) Value: None
  misc_feature: MA Experiment 20001560 PARAMETER Experiment Name: At_Drought_Soil_Dry_P Parameter: Post-Treatment Value: None
  misc_feature: MA Experiment 20001560 PARAMETER Experiment Name: At_Drought_Soil_Dry_P Parameter: Timepoint (day) Value: 14
  misc_feature: MA Experiment 20001560 PARAMETER Experiment Name: At_Drought_Soil_Dry_P Parameter: Treatment Value: Drought vs. No Drought
  misc_feature: MA Experiment ID: 20001757 Result: Up-regulated in Transcription
  misc_feature: MA Experiment 20001757 PARAMETER Experiment Name: At_50mM_NH4NO3_L-to-H_P Parameter: Timepoint (hr) Value: 6
  misc_feature: MA Experiment 20001757 PARAMETER Experiment Name: At_50mM_NH4NO3_L-to-H_P Parameter: Tissue Value: Leaf
  misc_feature: MA Experiment 20001757 PARAMETER Experiment Name: At_50mM_NH4NO3_L-to-H_P Parameter: Treatment Value: 50mM NH4NO3 vs 100mM Mannitol
  misc_feature: MA Experiment ID: 20001911 Result: Up-regulated in Transcription
  misc_feature: MA Experiment 20001911 PARAMETER Experiment Name: At_Drought_Reproduction_P Parameter: Age (day) Value: 40
  misc_feature: MA Experiment 20001911 PARAMETER Experiment Name: At_Drought_Reproduction_P Parameter: Organism Value: A. thaliana
  misc_feature: MA Experiment 20001911 PARAMETER Experiment Name: At_Drought_Reproduction_P Parameter: Plant Line Value: WS
  misc_feature: MA Experiment 20001911 PARAMETER Experiment Name: At_Drought_Reproduction_P Parameter: Timepoint (day) Value: 10
  misc_feature: MA Experiment 20001911 PARAMETER Experiment Name: At_Drought_Reproduction_P Parameter: Tissue Value: Flowers
  misc_feature: MA Experiment 20001911 PARAMETER Experiment Name: At_Drought_Reproduction_P Parameter: Treatment Value: Drought vs. No Drought
ctagtcccccccccccccgatcttccttctcgataaacccttttcttttaacctactcagtttttctgtttgcgtcgctctcatcccagggcgagaaagatggtgaaacggagtaaaaagagtaagagtaagagggtgaccttgaagcagaagcataaggtcctgaaaaaggtgaaggagcaccacaagaagaaggcaaaggatgctaaaaagcttggccttcaccgtaagccaagagtagagaaagacccaggtatacccaatgactggcctttcaaggaacaagagcttaaagcccttgaagttcgacgtgcccgtgctcttgaggagattgaacagaagaaagaagctcgcaaagaaagggccaaaaagaggaaacttggtttggttgatgatgaggataccaagacagaaggagagaccatagaagacttacctaaagttgtcaatgttcgagataactcggagagggctttctacaaggagctagttaaagtcattgaattgtctgatgtcattttggaggttcttgatgcccgtgatcctcttggcactcgttgtactgacatggagaggatggtgatgcaagccggtcccaataagcatcttgtgttgctgctgaacaagattgatcttgttccccgagaggctgctgagaaatggcttatgtaccttagggaagaatttccagctgttgccttcaagtgtagcacccaggaacagagatcaaacttgggttggaaatcatctaaggcatcaaaaccaagcaatatgttgcagacgagtgattgtcttggagcagacactcttatcaaattgttgaagaactactcaagaagtcatgagttaaaaaaatctatcacagttggtattattggactgcctaatgtcggcaagagtagtcttattaacagtctgaagagagcgcatgttgtcaatgttggtgccactcctggactgactagatctctgcaagaggttcacttggacaaaaacgtgaagttgctggattgtcctggagttgtgatgttgaaatcatcaggaaatgatgcttccatagctctccgaaattgtaaaagaatcgagaagttggatgacccagttagtccagtgaaggaaattctcaagctttgtcctgaagatatgctggtgactctctacaaaatcccgagcttcgaggcagttgatgatttcctttacaaagtcgccactgtaaggggtaaacttaaaaagggtggtcttgtggatattgatgctgctgccagaattgttttgcatgactggaatgaaggtaaaatcccatactatacaatgccgccaaagagggaccagggtggacatgcagagtcaaagattgtgactgagctggccaaggatttcaacatcgatgaggtttacagtggtgaatcctctttcattgggagcttgaagacggttaacgaattcaaccctgttattattccttcaaatggtcctctcaatttcgatgaaactatgatcgaggatgagtctaagacgcagacggaagaggaggctgagcatgagagtgatgatgatgagtcaatgggaggggaggaggaggaagaggcaggaaagacgaaggagaaatcagagacggggaggcagaacgtgaagctatacgcagcggaaagcatgttgaatacaaagaaacagaaagcagagaagaagaagaggaagaaagcaaagaaagcaggagctgatgaggaggatctgatggacggagattatgatttcaaagtggattataggaagaacaaagatggagaagacgaagaattccagattgatgctaaaatcccaatggctggacttttgcctgaagaatgagtgattggaaaccacaacgttttttttttttttttttttttgtatttggcgtttatgagtcggtcggttaaactttccgatatatgtgcttcatgaactagtagtaatactgaagcgattttgatttctttaattaacgtttcttctattccaaaaaaaaaaaaaaaaaaaaaaaaaaaaaaaaaaaaaaaaaaaaaaaaaaaaaaaaaaaaaaaaaaaaaaaaaaaacaaaaaaaaaaaaaaaaaaaaaattcactgaccaaaaaaaaaaaaaaaaaaaaaaaaggccccggggggggggggggcccccaattccccctaaaaagggggggattaaaaacagtgggggggtttttt

SEQ ID NO: 45588 - protein, 582 aa, Arabidopsis thaliana
  peptide (1)..(582): Ceres Seq. ID no. 13646843
  misc_feature (1)..(125): Pfam Name: Caldesmon Pfam Description: Caldesmon
  misc_feature (2)..(556): Homolog of NCBI NO: 27752312 NR Description: nucleostemin [Mus musculus]
  misc_feature (2)..(506): Homolog of NCBI NO: 28212232 NR Description: nucleostemin [Rattus norvegicus]
  misc_feature (2)..(570): Homolog of NCBI NO: 24647590 NR Description: CG3983-PB [Drosophila melanogaster]
  misc_feature (2)..(570): Homolog of NCBI NO: 21428328 NR Description: AT23067p [Drosophila melanogaster]
  misc_feature (1)..(538): Homolog of NCBI NO: 17534827 NR Description: GTPase of MMR1/HSR1 type (62.3 kD)
  misc_feature (48)..(542): Homolog of NCBI NO: 33468623 NR Description: SI:zK13A21.8 (novel protein similar to human
  misc_feature (1)..(547): Homolog of NCBI NO: 39587211 NR Description: Hypothetical protein CBG00673 [Caenorhabditis
  misc_feature (1)..(578): Homolog of NCBI NO: 34914820 NR Description: putative GTPase [Oryza sativa (japonica
  misc_feature (37)..(531): Homolog of NCBI NO: 15451214 NR Description: putative GTPase [Arabidopsis thaliana]
  misc_feature (1)..(582): Homolog of NCBI NO: 15231373 NR Description: GTPase -related [Arabidopsis thaliana]
MVKRSKKSKSKRVTLKQKHKVLKKVKEHHKKKAKDAKKLGLHRKPRVEKDPGIPNDWPFKEQELKALEVRRARALEEIEQKKEARKERAKKRKLGLVDDEDTKTEGETIEDLPKVVNVRDNSERAFYKELVKVIELSDVILEVLDARDPLGTRCTDMERMVMQAGPNKHLVLLLNKIDLVPREAAEKWLMYLREEFPAVAFKCSTQEQRSNLGWKSSKASKPSNMLQTSDCLGADTLIKLLKNYSRSHELKKSITVGIIGLPNVGKSSLINSLKRAHVVNVGATPGLTRSLQEVHLDKNVKLLDCPGVVMLKSSGNDASIALRNCKRIEKLDDPVSPVKEILKLCPEDMLVTLYKIPSFEAVDDFLYKVATVRGKLKKGGLVDIDAAARIVLHDWNEGKIPYYTMPPKRDQGGHAESKIVTELAKDFNIDEVYSGESSFIGSLKTVNEFNPVIIPSNGPLNFDETMIEDESKTQTEEEAEHESDDDESMGGEEEEEAGKTKEKSETGRQNVKLYAAESMLNTKKQKAEKKKRKKAKKAGADEEDLMDGDYDFKVDYRKNKDGEDEEFQIDAKIPMAGLLPEE

SEQ ID NO: 45589 - protein, 426 aa, Arabidopsis thaliana
  peptide (1)..(426): Ceres Seq. ID no. 13646844
  misc_feature (314)..(405): Pfam Name: Caldesmon Pfam Description: Caldesmon
  misc_feature (1)..(400): Homolog of NCBI NO: 27752312 NR Description: nucleostemin [Mus musculus]
  misc_feature (1)..(350): Homolog of NCBI NO: 28212232 NR Description: nucleostemin [Rattus norvegicus]
  misc_feature (1)..(414): Homolog of NCBI NO: 24647590 NR Description: CG3983-PB [Drosophila melanogaster]
  misc_feature (1)..(414): Homolog of NCBI NO: 21428328 NR Description: AT23067p [Drosophila melanogaster]
  misc_feature (1)..(382): Homolog of NCBI NO: 17534827 NR Description: GTPase of MMR1/HSR1 type (62.3 kD)
  misc_feature (1)..(386): Homolog of NCBI NO: 33468623 NR Description: SI:zK13A21.8 (novel protein similar to human
  misc_feature (1)..(391): Homolog of NCBI NO: 39587211 NR Description: Hypothetical protein CBG00673 [Caenorhabditis
  misc_feature (1)..(422): Homolog of NCBI NO: 34914820 NR Description: putative GTPase [Oryza sativa (japonica
  misc_feature (1)..(375): Homolog of NCBI NO: 15451214 NR Description: putative GTPase [Arabidopsis thaliana]
  misc_feature (1)..(426): Homolog of NCBI NO: 15231373 NR Description: GTPase -related [Arabidopsis thaliana]
MERMVMQAGPNKHLVLLLNKIDLVPREAAEKWLMYLREEFPAVAFKCSTQEQRSNLGWKSSKASKPSNMLQTSDCLGADTLIKLLKNYSRSHELKKSITVGIIGLPNVGKSSLINSLKRAHVVNVGATPGLTRSLQEVHLDKNVKLLDCPGVVMLKSSGNDASIALRNCKRIEKLDDPVSPVKEILKLCPEDMLVTLYKIPSFEAVDDFLYKVATVRGKLKKGGLVDIDAAARIVLHDWNEGKIPYYTMPPKRDQGGHAESKIVTELAKDFNIDEVYSGESSFIGSLKTVNEFNPVIIPSNGPLNFDETMIEDESKTQTEEEAEHESDDDESMGGEEEEEAGKTKEKSETGRQNVKLYAAESMLNTKKQKAEKKKRKKAKKAGADEEDLMDGDYDFKVDYRKNKDGEDEEFQIDAKIPMAGLLPEE

SEQ ID NO: 45590 - protein, 423 aa, Arabidopsis thaliana
  peptide (1)..(423): Ceres Seq. ID no. 13646845
  misc_feature (311)..(402): Pfam Name: Caldesmon Pfam Description: Caldesmon
  misc_feature (1)..(397): Homolog of NCBI NO: 27752312 NR Description: nucleostemin [Mus musculus]
  misc_feature (1)..(347): Homolog of NCBI NO: 28212232 NR Description: nucleostemin [Rattus norvegicus]
  misc_feature (1)..(411): Homolog of NCBI NO: 24647590 NR Description: CG3983-PB [Drosophila melanogaster]
  misc_feature (1)..(411): Homolog of NCBI NO: 21428328 NR Description: AT23067p [Drosophila melanogaster]
  misc_feature (1)..(379): Homolog of NCBI NO: 17534827 NR Description: GTPase of MMR1/HSR1 type (62.3 kD)
  misc_feature (1)..(383): Homolog of NCBI NO: 33468623 NR Description: SI:zK13A21.8 (novel protein similar to human
  misc_feature (1)..(388): Homolog of NCBI NO: 39587211 NR Description: Hypothetical protein CBG00673 [Caenorhabditis
  misc_feature (1)..(419): Homolog of NCBI NO: 34914820 NR Description: putative GTPase [Oryza sativa (japonica
  misc_feature (1)..(372): Homolog of NCBI NO: 15451214 NR Description: putative GTPase [Arabidopsis thaliana]
  misc_feature (1)..(423): Homolog of NCBI NO: 15231373 NR Description: GTPase -related [Arabidopsis thaliana]
MVMQAGPNKHLVLLLNKIDLVPREAAEKWLMYLREEFPAVAFKCSTQEQRSNLGWKSSKASKPSNMLQTSDCLGADTLIKLLKNYSRSHELKKSITVGIIGLPNVGKSSLINSLKRAHVVNVGATPGLTRSLQEVHLDKNVKLLDCPGVVMLKSSGNDASIALRNCKRIEKLDDPVSPVKEILKLCPEDMLVTLYKIPSFEAVDDFLYKVATVRGKLKKGGLVDIDAAARIVLHDWNEGKIPYYTMPPKRDQGGHAESKIVTELAKDFNIDEVYSGESSFIGSLKTVNEFNPVIIPSNGPLNFDETMIEDESKTQTEEEAEHESDDDESMGGEEEEEAGKTKEKSETGRQNVKLYAAESMLNTKKQKAEKKKRKKAKKAGADEEDLMDGDYDFKVDYRKNKDGEDEEFQIDAKIPMAGLLPEE

SEQ ID NO: 45591 - DNA, 1623 bp, Arabidopsis thaliana
  misc_feature (1)..(1623): Ceres Seq. ID no. 13646667
  misc_feature: MA Experiment ID: 20001557 Result: Up-regulated in Transcription
  misc_feature: MA Experiment 20001557 PARAMETER Experiment Name: At_Drought_Soil_Dry_P Parameter: Age (day) Value: 27
  misc_feature: MA Experiment 20001557 PARAMETER Experiment Name: At_Drought_Soil_Dry_P Parameter: Organism Value: A. thaliana
  misc_feature: MA Experiment 20001557 PARAMETER Experiment Name: At_Drought_Soil_Dry_P Parameter: Plant Line Value: WS
  misc_feature: MA Experiment 20001557 PARAMETER Experiment Name: At_Drought_Soil_Dry_P Parameter: Post Timepoint (hr) Value: 3
  misc_feature: MA Experiment 20001557 PARAMETER Experiment Name: At_Drought_Soil_Dry_P Parameter: Post-Treatment Value: Re-Water vs. No Drought
  misc_feature: MA Experiment 20001557 PARAMETER Experiment Name: At_Drought_Soil_Dry_P Parameter: Timepoint (day) Value: 13
  misc_feature: MA Experiment 20001557 PARAMETER Experiment Name: At_Drought_Soil_Dry_P Parameter: Treatment Value: Drought vs. No Drought
  misc_feature: MA Experiment ID: 20001558 Result: Up-regulated in Transcription
  misc_feature: MA Experiment 20001558 PARAMETER Experiment Name: At_Drought_Soil_Dry_P Parameter: Age (day) Value: 27
  misc_feature: MA Experiment 20001558 PARAMETER Experiment Name: At_Drought_Soil_Dry_P Parameter: Organism Value: A. thaliana
  misc_feature: MA Experiment 20001558 PARAMETER Experiment Name: At_Drought_Soil_Dry_P Parameter: Plant Line Value: WS
  misc_feature: MA Experiment 20001558 PARAMETER Experiment Name: At_Drought_Soil_Dry_P Parameter: Post Timepoint (hr) Value: 6
  misc_feature: MA Experiment 20001558 PARAMETER Experiment Name: At_Drought_Soil_Dry_P Parameter: Post-Treatment Value: Re-Water vs. No Drought
  misc_feature: MA Experiment 20001558 PARAMETER Experiment Name: At_Drought_Soil_Dry_P Parameter: Timepoint (day) Value: 13
  misc_feature: MA Experiment 20001558 PARAMETER Experiment Name: At_Drought_Soil_Dry_P Parameter: Treatment Value: Drought vs. No Drought
  misc_feature: MA Experiment ID: 20001560 Result: Up-regulated in Transcription
  misc_feature: MA Experiment 20001560 PARAMETER Experiment Name: At_Drought_Soil_Dry_P Parameter: Age (day) Value: 28
  misc_feature: MA Experiment 20001560 PARAMETER Experiment Name: At_Drought_Soil_Dry_P Parameter: Organism Value: A. thaliana
  misc_feature: MA Experiment 20001560 PARAMETER Experiment Name: At_Drought_Soil_Dry_P Parameter: Plant Line Value: WS
  misc_feature: MA Experiment 20001560 PARAMETER Experiment Name: At_Drought_Soil_Dry_P Parameter: Post Timepoint (hr) Value: None
  misc_feature: MA Experiment 20001560 PARAMETER Experiment Name: At_Drought_Soil_Dry_P Parameter: Post-Treatment Value: None
  misc_feature: MA Experiment 20001560 PARAMETER Experiment Name: At_Drought_Soil_Dry_P Parameter: Timepoint (day) Value: 14
  misc_feature: MA Experiment 20001560 PARAMETER Experiment Name: At_Drought_Soil_Dry_P Parameter: Treatment Value: Drought vs. No Drought
ataattcgaacaaggaaacaaatccaaagcttcattatcatcatctgttacttcttagatttgcttatccttcttcactttctcaattttgaatctgagaattcgtgcctccgatctctctccctctcgccgtggatagagatggagagcttaccaacgacggtctcagggaaatcagaccggcgaggtaggttttccaagtctcagaacacctccaagccctctcttatcttggccttcttctcttgtcttgcttggctctacgtcgctggccggttatggcaagatgcgcagtacagagcagcactcaatactgtgcttaagaggaattatgatcagaggcctaaggttcttacggtggaggacaaacttgtggtccttggatgcaaagatcttgagaggagaattgttgaaactgaaatggagttggcacaggcaaagagtcaaggctatcttaaaaaacagaaaagtgtctcttcttcagggaagaaaatgctagctgttattggagtttacacaggctttggaagtcacttgaagcgcaataaatttagaggctcttggatgccacgagatgatgctcttaaaaaacttgaggaaagaggagttgtcatacgctttgtgattggtcggagtgcaaccgaggtgatagcctagatagaaaaattgacgaagaaaatcgtgcaactaaagactttttgattcttgagaatcacgaggaagcccaagaagagttaccgaagaaagtgaagttcttctacagtgctgctgttcagaattgggacgcagagttttatgtcaaagttgatgacaacgttgacttggatcttgaggggatgattgcgcttcttgaaagtcgtcgtagtcaagatggtgcttacattgggtgcatgaaatctggagatgtgattactgaagagggaagtcaatggtatgagcctgagtggtggaaatttggggacgacaaatcgtatttccgtcatgcaactggttcgctggtaatactctcaaagaatctggctcagtatgtcaatataaacagtggattgttgaagacatatgcgtttgatgataccaccattggatcatggatgattggcgtccaggcaacatatatagacgacaatcgcctttgctgcagcagcacaagacaagaaaaagtgtgttccatggcatgatcactgcatagatgatcctcttgtcccagagcaaagacggcggtttctcatcgcattcatggcgctccgatactcttttggggcagattcttggaccggatactgaacttatcattagttttgttagaatgggagtatgattaggccattcattacagtttatgattagaggcatgcgtatcccttgagctttggagtaagaaaatggggaaatggtatagatgtgaatgaagtataatttttcctttggtatcatatcaccatcatttgtccgtccattctagcccaatctctggcaggcgtttaatgttcgaaccttaagtttgcatttttggttgctggtttttaaaaatgtgttagttaagacttaagaggacaaaagaaaatcgtctgctttaagctcataaacacttcggaccaatacgtggttaaaaatacttcattg

SEQ ID NO: 45592 - protein, 218 aa, Arabidopsis thaliana
  peptide (1)..(218): Ceres Seq. ID no. 13646668
  misc_feature (48)..(191): Homolog of NCBI NO: 7485371 NR Description: hypothetical protein F10N7.70 - Arabidopsis
  misc_feature (61)..(215): Homolog of NCBI NO: 9759181 NR Description: Avr9 elicitor response protein-like [Arabidopsis
  misc_feature (61)..(215): Homolog of NCBI NO: 18423501 NR Description: galactosyltransferase family [Arabidopsis
  misc_feature (75)..(212): Homolog of NCBI NO: 22553068 NR Description: beta 1,3-glycosyltransferase-like protein I
  misc_feature (64)..(212): Homolog of NCBI NO: 20372915 NR Description: beta 1,3-glycosyltransferase-like protein I
  misc_feature (61)..(212): Homolog of NCBI NO: 40253477 NR Description: putative Avr9 elicitor response protein
  misc_feature (66)..(213): Homolog of NCBI NO: 34898462 NR Description: ESTs D47620(S13223),AU029621(E31157) correspond a region of the predicted gene.~Similar to Arabidopsis thaliana
  misc_feature (48)..(212): Homolog of NCBI NO: 15224704 NR Description: galactosyltransferase family [Arabidopsis
  misc_feature (110)..(213): Homolog of NCBI NO: 26451702 NR Description: unknown protein [Arabidopsis thaliana]
  misc_feature (48)..(213): Homolog of NCBI NO: 15236681 NR Description: galactosyltransferase family [Arabidopsis
IIRTRKQIQSFIIIICYFLDLLILLHFLNFESENSCLRSLSLSPWIEMESLPTTVSGKSDRRGRFSKSQNTSKPSLILAFFSCLAWLYVAGRLWQDAQYRAALNTVLKRNYDQRPKVLTVEDKLVVLGCKDLERRIVETEMELAQAKSQGYLKKQKSVSSSGKKMLAVIGVYTGFGSHLKRNKFRGSWMPRDDALKKLEERGVVIRFVIGRSATEVIA

SEQ ID NO: 45593 - protein, 171 aa, Arabidopsis thaliana
  peptide (1)..(171): Ceres Seq. ID no. 13646669
  misc_feature (1)..(144): Homolog of NCBI NO: 7485371 NR Description: hypothetical protein F10N7.70 - Arabidopsis
  misc_feature (14)..(168): Homolog of NCBI NO: 9759181 NR Description: Avr9 elicitor response protein-like [Arabidopsis
  misc_feature (14)..(168): Homolog of NCBI NO: 18423501 NR Description: galactosyltransferase family [Arabidopsis
  misc_feature (28)..(165): Homolog of NCBI NO: 22553068 NR Description: beta 1,3-glycosyltransferase-like protein I
  misc_feature (17)..(165): Homolog of NCBI NO: 20372915 NR Description: beta 1,3-glycosyltransferase-like protein I
  misc_feature (14)..(165): Homolog of NCBI NO: 40253477 NR Description: putative Avr9 elicitor response protein
  misc_feature (19)..(166): Homolog of NCBI NO: 34898462 NR Description: ESTs D47620(S13223),AU029621(E31157) correspond a region of the predicted gene.~Similar to Arabidopsis thaliana
  misc_feature (1)..(165): Homolog of NCBI NO: 15224704 NR Description: galactosyltransferase family [Arabidopsis
  misc_feature (63)..(166): Homolog of NCBI NO: 26451702 NR Description: unknown protein [Arabidopsis thaliana]
  misc_feature (1)..(166): Homolog of NCBI NO: 15236681 NR Description: galactosyltransferase family [Arabidopsis
MESLPTTVSGKSDRRGRFSKSQNTSKPSLILAFFSCLAWLYVAGRLWQDAQYRAALNTVLKRNYDQRPKVLTVEDKLVVLGCKDLERRIVETEMELAQAKSQGYLKKQKSVSSSGKKMLAVIGVYTGFGSHLKRNKFRGSWMPRDDALKKLEERGVVIRFVIGRSATEVIA

SEQ ID NO: 45594 - protein, 113 aa, Arabidopsis thaliana
  peptide (1)..(113): Ceres Seq. ID no. 13646670
  misc_feature (1)..(97): Pfam Name: Galactosyltransferase Pfam Description: Galactosyltransferase
  misc_feature (1)..(68): Homolog of NCBI NO: 7485372 NR Description: hypothetical protein F10N7.80 - Arabidopsis
  misc_feature (1)..(108): Homolog of NCBI NO: 9759181 NR Description: Avr9 elicitor response protein-like [Arabidopsis
  misc_feature (1)..(111): Homolog of NCBI NO: 18423501 NR Description: galactosyltransferase family [Arabidopsis
  misc_feature (1)..(103): Homolog of NCBI NO: 22553068 NR Description: beta 1,3-glycosyltransferase-like protein I
  misc_feature (1)..(113): Homolog of NCBI NO: 20372915 NR Description: beta 1,3-glycosyltransferase-like protein I
  misc_feature (1)..(111): Homolog of NCBI NO: 40253477 NR Description: putative Avr9 elicitor response protein
  misc_feature (1)..(113): Homolog of NCBI NO: 34898462 NR Description: ESTs D47620(S13223),AU029621(E31157) correspond a region of the predicted gene.~Similar to Arabidopsis thaliana
  misc_feature (1)..(106): Homolog of NCBI NO: 15224704 NR Description: galactosyltransferase family [Arabidopsis
  misc_feature (1)..(113): Homolog of NCBI NO: 26451702 NR Description: unknown protein [Arabidopsis thaliana]
  misc_feature (1)..(113): Homolog of NCBI NO: 15236681 NR Description: galactosyltransferase family [Arabidopsis
MIALLESRRSQDGAYIGCMKSGDVITEEGSQWYEPEWWKFGDDKSYFRHATGSLVILSKNLAQYVNINSGLLKTYAFDDTTIGSWMIGVQATYIDDNRLCCSSTRQEKVCSMA

SEQ ID NO: 45595 - DNA, 1431 bp, Arabidopsis thaliana; identical to SEQ ID NO: 21040
  misc_feature (1)..(1431): Ceres Seq. ID no. 13591669
  misc_feature: MA Experiment ID: 20000180 Result: Up-regulated in Transcription
  misc_feature: MA Experiment 20000180 PARAMETER Experiment Name: At_Germinating_Seeds_P Parameter: Age (hr) Value: 24 vs. 0
  misc_feature: MA Experiment 20000180 PARAMETER Experiment Name: At_Germinating_Seeds_P Parameter: Tissue Value: Germinating Seeds
  misc_feature: MA Experiment ID: 20000184 Result: Up-regulated in Transcription
  misc_feature: MA Experiment 20000184 PARAMETER Experiment Name: At_Shoots__P Parameter: Age (day) Value: 7
  misc_feature: MA Experiment 20000184 PARAMETER Experiment Name: At_Shoots__P Parameter: Tissue Value: Shoots vs. Whole Plant
  misc_feature: MA Experiment ID: 20000185 Result: Down-regulated in Transcription
  misc_feature: MA Experiment 20000185 PARAMETER Experiment Name: At_Roots__P Parameter: Age (day) Value: 7 vs. 21
  misc_feature: MA Experiment 20000185 PARAMETER Experiment Name: At_Roots__P Parameter: Organism Value: A. thaliana
  misc_feature: MA Experiment 20000185 PARAMETER Experiment Name: At_Roots__P Parameter: Tissue Value: Roots vs. Whole Plant
  misc_feature: MA Experiment ID: 20000437 Result: Down-regulated in Transcription
  misc_feature: MA Experiment 20000437 PARAMETER Experiment Name: At_Drought_P Parameter: Age (day) Value: 8
  misc_feature: MA Experiment 20000437 PARAMETER Experiment Name: At_Drought_P Parameter: Organism Value: A. thaliana
  misc_feature: MA Experiment 20000437 PARAMETER Experiment Name: At_Drought_P Parameter: Plant Line Value: WS
  misc_feature: MA Experiment 20000437 PARAMETER Experiment Name: At_Drought_P Parameter: Timepoint (hr) Value: 24
  misc_feature: MA Experiment 20000437 PARAMETER Experiment Name: At_Drought_P Parameter: Tissue Value: Whole Plant
  misc_feature: MA Experiment 20000437 PARAMETER Experiment Name: At_Drought_P Parameter: Treatment Value: Drought vs. No Drought
  misc_feature: MA Experiment ID: 20000438 Result: Up-regulated in Transcription
  misc_feature: MA Experiment 20000438 PARAMETER Experiment Name: At_Shoots__P Parameter: Age (day) Value: 14
  misc_feature: MA Experiment 20000438 PARAMETER Experiment Name: At_Shoots__P Parameter: Tissue Value: Shoots vs. Whole Plant
  misc_feature: MA Experiment ID: 20000439 Result: Down-regulated in Transcription
  misc_feature: MA Experiment 20000439 PARAMETER Experiment Name: At_Roots__P Parameter: Age (day) Value: 14 vs. 21
  misc_feature: MA Experiment 20000439 PARAMETER Experiment Name: At_Roots__P Parameter: Organism Value: A. thaliana
  misc_feature: MA Experiment 20000439 PARAMETER Experiment Name: At_Roots__P Parameter: Tissue Value: Roots vs. Whole Plant
  misc_feature: MA Experiment ID: 20000794 Result: Down-regulated in Transcription
  misc_feature: MA Experiment 20000794 PARAMETER Experiment Name: At_Petals_P Parameter: Age (day) Value: 23-25 days
  misc_feature: MA Experiment 20000794 PARAMETER Experiment Name: At_Petals_P Parameter: Plant Line Value: WS
  misc_feature: MA Experiment 20000794 PARAMETER Experiment Name: At_Petals_P Parameter: Tissue Value: Petals vs. Whole plant
  misc_feature: MA Experiment ID: 20001450 Result: Down-regulated in Transcription
  misc_feature: MA Experiment 20001450 PARAMETER Experiment Name: At_Far-red-induction_P Parameter: Age (day) Value: 7
  misc_feature: MA Experiment 20001450 PARAMETER Experiment Name: At_Far-red-induction_P Parameter: Light Value: Far-red vs. White
  misc_feature: MA Experiment 20001450 PARAMETER Experiment Name: At_Far-red-induction_P Parameter: Organism Value: A. thaliana
  misc_feature: MA Experiment 20001450 PARAMETER Experiment Name: At_Far-red-induction_P Parameter: Plant Line Value: Columbia
  misc_feature: MA Experiment 20001450 PARAMETER Experiment Name: At_Far-red-induction_P Parameter: Timepoint (hr) Value: 8
  misc_feature: MA Experiment 20001450 PARAMETER Experiment Name: At_Far-red-induction_P Parameter: Tissue Value: Whole Plant
  misc_feature: MA Experiment ID: 20001557 Result: Down-regulated in Transcription
  misc_feature: MA Experiment 20001557 PARAMETER Experiment Name: At_Drought_Soil_Dry_P Parameter: Age (day) Value: 27
  misc_feature: MA Experiment 20001557 PARAMETER Experiment Name: At_Drought_Soil_Dry_P Parameter: Organism Value: A. thaliana
  misc_feature: MA Experiment 20001557 PARAMETER Experiment Name: At_Drought_Soil_Dry_P Parameter: Plant Line Value: WS
  misc_feature: MA Experiment 20001557 PARAMETER Experiment Name: At_Drought_Soil_Dry_P Parameter: Post Timepoint (hr) Value: 3
  misc_feature: MA Experiment 20001557 PARAMETER Experiment Name: At_Drought_Soil_Dry_P Parameter: Post-Treatment Value: Re-Water vs. No Drought
  misc_feature: MA Experiment 20001557 PARAMETER Experiment Name: At_Drought_Soil_Dry_P Parameter: Timepoint (day) Value: 13
  misc_feature: MA Experiment 20001557 PARAMETER Experiment Name: At_Drought_Soil_Dry_P Parameter: Treatment Value: Drought vs. No Drought
  misc_feature: MA Experiment ID: 20001558 Result: Down-regulated in Transcription
  misc_feature: MA Experiment 20001558 PARAMETER Experiment Name: At_Drought_Soil_Dry_P Parameter: Age (day) Value: 27
  misc_feature: MA Experiment 20001558 PARAMETER Experiment Name: At_Drought_Soil_Dry_P Parameter: Organism Value: A. thaliana
  misc_feature: MA Experiment 20001558 PARAMETER Experiment Name: At_Drought_Soil_Dry_P Parameter: Plant Line Value: WS
  misc_feature: MA Experiment 20001558 PARAMETER Experiment Name: At_Drought_Soil_Dry_P Parameter: Post Timepoint (hr) Value: 6
  misc_feature: MA Experiment 20001558 PARAMETER Experiment Name: At_Drought_Soil_Dry_P Parameter: Post-Treatment Value: Re-Water vs. No Drought
  misc_feature: MA Experiment 20001558 PARAMETER Experiment Name: At_Drought_Soil_Dry_P Parameter: Timepoint (day) Value: 13
  misc_feature: MA Experiment 20001558 PARAMETER Experiment Name: At_Drought_Soil_Dry_P Parameter: Treatment Value: Drought vs. No Drought
  misc_feature: MA Experiment ID: 20001559 Result: Down-regulated in Transcription
  misc_feature: MA Experiment 20001559 PARAMETER Experiment Name: At_Drought_Soil_Dry_P Parameter: Age (day) Value: 28
  misc_feature: MA Experiment 20001559 PARAMETER Experiment Name: At_Drought_Soil_Dry_P Parameter: Organism Value: A. thaliana
  misc_feature: MA Experiment 20001559 PARAMETER Experiment Name: At_Drought_Soil_Dry_P Parameter: Plant Line Value: WS
  misc_feature: MA Experiment 20001559 PARAMETER Experiment Name: At_Drought_Soil_Dry_P Parameter: Post Timepoint (hr) Value: 29
  misc_feature: MA Experiment 20001559 PARAMETER Experiment Name: At_Drought_Soil_Dry_P Parameter: Post-Treatment Value: Re-Water vs. No Drought
  misc_feature: MA Experiment 20001559 PARAMETER Experiment Name: At_Drought_Soil_Dry_P Parameter: Timepoint (day) Value: 14
  misc_feature: MA Experiment 20001559 PARAMETER Experiment Name: At_Drought_Soil_Dry_P Parameter: Treatment Value: Drought vs. No Drought

SEQ ID NO: 45596 - protein, 406 aa, Arabidopsis thaliana; identical to SEQ ID NO: 21041
  peptide (1)..(406): Ceres Seq. ID no. 15221056
  misc_feature (89)..(376): Pfam Name: NAD dependent epimerase/dehydratase family Pfam Description: NAD dependent epimerase/dehydratase family
  misc_feature (89)..(376): Pfam Name: NAD dependent epimerase/dehydratase family Pfam Description: NAD dependent epimerase/dehydratase family
  misc_feature (90)..(398): Homolog of NCBI NO: 23040971 NR Description: hypothetical protein [Trichodesmium erythraeum
  misc_feature (67)..(406): Homolog of NCBI NO: 34398358 NR Description: 41 kDa ribosome-associated protein precursor
  misc_feature (62)..(132): Homolog of NCBI NO: 34900052 NR Description: putative mRNA binding protein precursor
  misc_feature (133)..(399): Homolog of NCBI NO: 34900052 NR Description: putative mRNA binding protein precursor
  misc_feature (62)..(399): Homolog of NCBI NO: 34393296 NR Description: putative mRNA binding protein precursor
  misc_feature (90)..(398): Homolog of NCBI NO: 23040971 NR Description: hypothetical protein [Trichodesmium erythraeum
  misc_feature (62)..(132): Homolog of NCBI NO: 34900052 NR Description: putative mRNA binding protein precursor
  misc_feature (62)..(399): Homolog of NCBI NO: 34393296 NR Description: putative mRNA binding protein precursor
  misc_feature (1)..(406): Homolog of NCBI NO: 15229384 NR Description: mRNA binding protein precursor - like
  misc_feature (20)..(406): Homolog of NCBI NO: 32746733 NR Description: mRNA-binding protein precursor [Nicotiana tabacum]
  misc_feature (1)..(406): Homolog of NCBI NO: 25457656 NR Description: mRNA-binding protein precursor [imported] -
  misc_feature (1)..(406): Homolog of NCBI NO: 26453355 NR Description: mRNA binding protein precursor [Lycopersicon
  misc_feature (2)..(405): Homolog of NCBI NO: 7484674 NR Description: mRNA-binding protein CSP41 precursor, chloroplast
  misc_feature (133)..(399): Homolog of NCBI NO: 34900052 NR Description: putative mRNA binding protein precursor
  misc_feature (67)..(406): Homolog of NCBI NO: 34398358 NR Description: 41 kDa ribosome-associated protein precursor
  misc_feature (2)..(405): Homolog of NCBI NO: 7484674 NR Description: mRNA-binding protein CSP41 precursor, chloroplast
  misc_feature (1)..(406): Homolog of NCBI NO: 26453355 NR Description: mRNA binding protein precursor [Lycopersicon
  misc_feature (1)..(406): Homolog of NCBI NO: 25457656 NR Description: mRNA-binding protein precursor [imported] -
  misc_feature (20)..(406): Homolog of NCBI NO: 32746733 NR Description: mRNA-binding protein precursor [Nicotiana tabacum]
  misc_feature (1)..(406): Homolog of NCBI NO: 15229384 NR Description: mRNA binding protein precursor - like

SEQ ID NO: 45597 - protein, 284 aa, Arabidopsis thaliana; identical to SEQ ID NO: 21042
  peptide (1)..(284): Ceres Seq. ID no. 15221057
  misc_feature (1)..(254): Pfam Name: NAD dependent epimerase/dehydratase family Pfam Description: NAD dependent epimerase/dehydratase family
  misc_feature (1)..(254): Pfam Name: NAD dependent epimerase/dehydratase family Pfam Description: NAD dependent epimerase/dehydratase family
  misc_feature (1)..(277): Homolog of NCBI NO: 17232323 NR Description: mRNA-binding protein [Nostoc sp. PCC 7120]
  misc_feature (1)..(276): Homolog of NCBI NO: 23040971 NR Description: hypothetical protein [Trichodesmium erythraeum
  misc_feature (1)..(284): Homolog of NCBI NO: 34398358 NR Description: 41 kDa ribosome-associated protein precursor
  misc_feature (11)..(277): Homolog of NCBI NO: 34900052 NR Description: putative mRNA binding protein precursor
  misc_feature (1)..(277): Homolog of NCBI NO: 34393296 NR Description: putative mRNA binding protein precursor
  misc_feature (1)..(277): Homolog of NCBI NO: 17232323 NR Description: mRNA-binding protein [Nostoc sp. PCC 7120]
  misc_feature (1)..(284): Homolog of NCBI NO: 34398358 NR Description: 41 kDa ribosome-associated protein precursor
  misc_feature (1)..(277): Homolog of NCBI NO: 34393296 NR Description: putative mRNA binding protein precursor
  misc_feature (1)..(284): Homolog of NCBI NO: 15229384 NR Description: mRNA binding protein precursor - like
  misc_feature (1)..(284): Homolog of NCBI NO: 32746733 NR Description: mRNA-binding protein precursor [Nicotiana tabacum]
  misc_feature (1)..(284): Homolog of NCBI NO: 25457656 NR Description: mRNA-binding protein precursor [imported] -
  misc_feature (1)..(284): Homolog of NCBI NO: 26453355 NR Description: mRNA binding protein precursor [Lycopersicon
  misc_feature (1)..(283): Homolog of NCBI NO: 7484674 NR Description: mRNA-binding protein CSP41 precursor, chloroplast
  misc_feature (11)..(277): Homolog of NCBI NO: 34900052 NR Description: putative mRNA binding protein precursor
  misc_feature (1)..(276): Homolog of NCBI NO: 23040971 NR Description: hypothetical protein [Trichodesmium erythraeum
  misc_feature (1)..(283): Homolog of NCBI NO: 7484674 NR Description: mRNA-binding protein CSP41 precursor, chloroplast
  misc_feature (1)..(284): Homolog of NCBI NO: 26453355 NR Description: mRNA binding protein precursor [Lycopersicon
  misc_feature (1)..(284): Homolog of NCBI NO: 25457656 NR Description: mRNA-binding protein precursor [imported] -
  misc_feature (1)..(284): Homolog of NCBI NO: 32746733 NR Description: mRNA-binding protein precursor [Nicotiana tabacum]
  misc_feature (1)..(284): Homolog of NCBI NO: 15229384 NR Description: mRNA binding protein precursor - like

SEQ ID NO: 45598 - DNA, 2809 bp, Arabidopsis thaliana; identical to SEQ ID NO: 44960
  misc_feature (1)..(2809): Ceres Seq. ID no. 12559536
  misc_feature: MA Experiment ID: 108434 Result: Down-regulated in Transcription
  misc_feature: MA Experiment 108434 PARAMETER Experiment Name: At_Root_Tips_cDNA_P Parameter: Tissue Value: Root Tips
  misc_feature: MA Experiment ID: 108463 Result: Up-regulated in Transcription
  misc_feature: MA Experiment 108463 PARAMETER Experiment Name: At_Germinating_Seeds_cDNA_P Parameter: Age (day) Value: 3 vs. 0
  misc_feature: MA Experiment 108463 PARAMETER Experiment Name: At_Germinating_Seeds_cDNA_P Parameter: Tissue Value: Germinating Seeds
  misc_feature: MA Experiment ID: 108473 Result: Down-regulated in Transcription
  misc_feature: MA Experiment 108473 PARAMETER Experiment Name: At_Drought_Flowers_cDNA_P Parameter: Timepoint (hr) Value: 7 d
  misc_feature: MA Experiment 108473 PARAMETER Experiment Name: At_Drought_Flowers_cDNA_P Parameter: Tissue Value: Flower
  misc_feature: MA Experiment 108473 PARAMETER Experiment Name: At_Drought_Flowers_cDNA_P Parameter: Treatment Value: Drought vs. No Drought
  misc_feature: MA Experiment ID: 108488 Result: Up-regulated in Transcription
  misc_feature: MA Experiment ID: 108489 Result: Down-regulated in Transcription
  misc_feature: MA Experiment ID: 108574 Result: Up-regulated in Transcription
  misc_feature: MA Experiment 108574 PARAMETER Experiment Name: At_Wounding__cDNA_P Parameter: Timepoint (hr) Value: 1
  misc_feature: MA Experiment 108574 PARAMETER Experiment Name: At_Wounding__cDNA_P Parameter: Tissue Value: Aerial
  misc_feature: MA Experiment 108574 PARAMETER Experiment Name: At_Wounding__cDNA_P Parameter: Treatment Value: Wounding vs. No Wounding
  misc_feature: MA Experiment ID: 108579 Result: Up-regulated in Transcription
  misc_feature: MA Experiment 108579 PARAMETER Experiment Name: At_4deg_Cold_cDNA_P Parameter: Temperature (deg C) Value: 4 vs. 22
  misc_feature: MA Experiment 108579 PARAMETER Experiment Name: At_4deg_Cold_cDNA_P Parameter: Timepoint (hr) Value: 6
  misc_feature: MA Experiment 108579 PARAMETER Experiment Name: At_4deg_Cold_cDNA_P Parameter: Tissue Value: Aerial
  misc_feature: MA Experiment ID: 108585 Result: Down-regulated in Transcription
  misc_feature: MA Experiment 108585 PARAMETER Experiment Name: At_5mM_NaNP_cDNA_P Parameter: Timepoint (hr) Value: 6
  misc_feature: MA Experiment 108585 PARAMETER Experiment Name: At_5mM_NaNP_cDNA_P Parameter: Tissue Value: Aerial
  misc_feature: MA Experiment 108585 PARAMETER Experiment Name: At_5mM_NaNP_cDNA_P Parameter: Treatment Value: null
  misc_feature: MA Experiment ID: 108607 Result: Up-regulated in Transcription
  misc_feature: MA Experiment 108607 PARAMETER Experiment Name: At_100uM_ABA_cDNA_P Parameter: Timepoint (hr) Value: 4
  misc_feature: MA Experiment 108607 PARAMETER Experiment Name: At_100uM_ABA_cDNA_P Parameter: Tissue Value: Aerial
  misc_feature: MA Experiment 108607 PARAMETER Experiment Name: At_100uM_ABA_cDNA_P Parameter: Treatment Value: 100uM ABA vs. No Treatment
  misc_feature: MA Experiment ID: 20000069 Result: Up-regulated in Transcription
  misc_feature: MA Experiment 20000069 PARAMETER Experiment Name: At_100uM_ABA_Mutants_cDNA_P Parameter: Plant Line Value: CS23
  misc_feature: MA Experiment 20000069 PARAMETER Experiment Name: At_100uM_ABA_Mutants_cDNA_P Parameter: Timepoint (hr) Value: 6
  misc_feature: MA Experiment 20000069 PARAMETER Experiment Name: At_100uM_ABA_Mutants_cDNA_P Parameter: Tissue Value: Aerial
  misc_feature: MA Experiment 20000069 PARAMETER Experiment Name: At_100uM_ABA_Mutants_cDNA_P Parameter: Treatment Value: 100uM ABA vs. No Treatment
  misc_feature: MA Experiment ID: 20000070 Result: Up-regulated in Transcription
  misc_feature: MA Experiment 20000070 PARAMETER Experiment Name: At_100uM_ABA_Mutants_cDNA_P Parameter: Plant Line Value: CS24
  misc_feature: MA Experiment 20000070 PARAMETER Experiment Name: At_100uM_ABA_Mutants_cDNA_P Parameter: Timepoint (hr) Value: 6
  misc_feature: MA Experiment 20000070 PARAMETER Experiment Name: At_100uM_ABA_Mutants_cDNA_P Parameter: Tissue Value: Aerial
  misc_feature: MA Experiment 20000070 PARAMETER Experiment Name: At_100uM_ABA_Mutants_cDNA_P Parameter: Treatment Value: 100uM ABA vs. No Treatment
  misc_feature: MA Experiment ID: 20000086 Result: Up-regulated in Transcription
  misc_feature: MA Experiment 20000086 PARAMETER Experiment Name: At_100uM_ABA_Mutants_cDNA_P Parameter: Plant Line Value: CS22
  misc_feature: MA Experiment 20000086 PARAMETER Experiment Name: At_100uM_ABA_Mutants_cDNA_P Parameter: Timepoint (hr) Value: 6
  misc_feature: MA Experiment 20000086 PARAMETER Experiment Name: At_100uM_ABA_Mutants_cDNA_P Parameter: Tissue Value: Aerial
  misc_feature: MA Experiment 20000086 PARAMETER Experiment Name: At_100uM_ABA_Mutants_cDNA_P Parameter: Treatment Value: 100uM ABA vs. No Treatment
  misc_feature: MA Experiment ID: 20000088 Result: Up-regulated in Transcription
  misc_feature: MA Experiment 20000088 PARAMETER Experiment Name: At_100uM_ABA_Mutants_cDNA_P Parameter: Plant Line Value: Landsberg
  misc_feature: MA Experiment 20000088 PARAMETER Experiment Name: At_100uM_ABA_Mutants_cDNA_P Parameter: Timepoint (hr) Value: 6
  misc_feature: MA Experiment 20000088 PARAMETER Experiment Name: At_100uM_ABA_Mutants_cDNA_P Parameter: Tissue Value: Aerial
  misc_feature: MA Experiment 20000088 PARAMETER Experiment Name: At_100uM_ABA_Mutants_cDNA_P Parameter: Treatment Value: 100uM ABA vs. No Treatment
  misc_feature: MA Experiment ID: 20000111 Result: Down-regulated in Transcription
  misc_feature: MA Experiment 20000111 PARAMETER Experiment Name: At_42deg_Heat_cDNA_P Parameter: Temperature (deg C) Value: 42 vs. 22
  misc_feature: MA Experiment 20000111 PARAMETER Experiment Name: At_42deg_Heat_cDNA_P Parameter: Timepoint (hr) Value: 6
  misc_feature: MA Experiment 20000111 PARAMETER Experiment Name: At_42deg_Heat_cDNA_P Parameter: Tissue Value: Aerial
  misc_feature: MA Experiment ID: 20000112 Result: Down-regulated in Transcription
  misc_feature: MA Experiment 20000112 PARAMETER Experiment Name: At_42deg_Heat_cDNA_P Parameter: Temperature (deg C) Value: 42 vs. 22
  misc_feature: MA Experiment 20000112 PARAMETER Experiment Name: At_42deg_Heat_cDNA_P Parameter: Timepoint (hr) Value: 2
  misc_feature: MA Experiment 20000112 PARAMETER Experiment Name: At_42deg_Heat_cDNA_P Parameter: Tissue Value: Aerial
  misc_feature: MA Experiment ID: 20000113 Result: Down-regulated in Transcription
  misc_feature: MA Experiment 20000113 PARAMETER Experiment Name: At_42deg_Heat_cDNA_P Parameter: Temperature (deg C) Value: 42 vs. 22
  misc_feature: MA Experiment 20000113 PARAMETER Experiment Name: At_42deg_Heat_cDNA_P Parameter: Timepoint (hr) Value: 8
  misc_feature: MA Experiment 20000113 PARAMETER Experiment Name: At_42deg_Heat_cDNA_P Parameter: Tissue Value: Aerial
  misc_feature: MA Experiment ID: 20000173 Result: Down-regulated in Transcription
  misc_feature: MA Experiment 20000173 PARAMETER Experiment Name: At_42deg_Heat_P Parameter: Age (day) Value: 14
  misc_feature: MA Experiment 20000173 PARAMETER Experiment Name: At_42deg_Heat_P Parameter: Organism Value: A. thaliana
  misc_feature: MA Experiment 20000173 PARAMETER Experiment Name: At_42deg_Heat_P Parameter: Plant Line Value: WS
  misc_feature: MA Experiment 20000173 PARAMETER Experiment Name: At_42deg_Heat_P Parameter: Temperature (deg C) Value: 42 vs. 22
  misc_feature: MA Experiment 20000173 PARAMETER Experiment Name: At_42deg_Heat_P Parameter: Timepoint (hr) Value: 6
  misc_feature: MA Experiment 20000173 PARAMETER Experiment Name: At_42deg_Heat_P Parameter: Tissue Value: Aerial
  misc_feature: MA Experiment ID: 20000184 Result: Down-regulated in Transcription
  misc_feature: MA Experiment 20000184 PARAMETER Experiment Name: At_Shoots__P Parameter: Age (day) Value: 7
  misc_feature: MA Experiment 20000184 PARAMETER Experiment Name: At_Shoots__P Parameter: Tissue Value: Shoots vs. Whole Plant
  misc_feature: MA Experiment ID: 20000185 Result: Down-regulated in Transcription
  misc_feature: MA Experiment 20000185 PARAMETER Experiment Name: At_Roots__P Parameter: Age (day) Value: 7 vs. 21
  misc_feature: MA Experiment 20000185 PARAMETER Experiment Name: At_Roots__P Parameter: Organism Value: A. thaliana
  misc_feature: MA Experiment 20000185 PARAMETER Experiment Name: At_Roots__P Parameter: Tissue Value: Roots vs. Whole Plant
  misc_feature: MA Experiment ID: 20000211 Result: Up-regulated in Transcription
  misc_feature: MA Experiment 20000211 PARAMETER Experiment Name: At_0.001percent_MeJA__P Parameter: Age (day) Value: 14
  misc_feature: MA Experiment 20000211 PARAMETER Experiment Name: At_0.001percent_MeJA__P Parameter: Organism Value: A. thaliana
  misc_feature: MA Experiment 20000211 PARAMETER Experiment Name: At_0.001percent_MeJA__P Parameter: Plant Line Value: WS
  misc_feature: MA Experiment 20000211 PARAMETER Experiment Name: At_0.001percent_MeJA__P Parameter: Timepoint (hr) Value: 1
  misc_feature: MA Experiment 20000211 PARAMETER Experiment Name: At_0.001percent_MeJA__P Parameter: Tissue Value: Aerial
  misc_feature: MA Experiment 20000211 PARAMETER Experiment Name: At_0.001percent_MeJA__P Parameter: Treatment Value: 0.001percent MeJA vs. No Treatment
  misc_feature: MA Experiment ID: 20000213 Result: Up-regulated in Transcription
  misc_feature: MA Experiment 20000213 PARAMETER Experiment Name: At_4deg_Cold_P Parameter: Timepoint (hr) Value: 2
  misc_feature: MA Experiment ID: 20000224 Result: Up-regulated in Transcription
  misc_feature: MA Experiment ID: 20000286 Result: Up-regulated in Transcription
  misc_feature: MA Experiment 20000286 PARAMETER Experiment Name: At_Open_Flower_P Parameter: Age (day) Value: 21
  misc_feature: MA Experiment 20000286 PARAMETER Experiment Name: At_Open_Flower_P Parameter: Plant Line Value: WS
  misc_feature: MA Experiment 20000286 PARAMETER Experiment Name: At_Open_Flower_P Parameter: Tissue Value: Half Open vs. Whole Plant
  misc_feature: MA Experiment ID: 20000308 Result: Up-regulated in Transcription
  misc_feature: MA Experiment 20000308 PARAMETER Experiment Name: At_100mM_NaCl__P Parameter: Age (day) Value: 17
  misc_feature: MA Experiment 20000308 PARAMETER Experiment Name: At_100mM_NaCl__P Parameter: Organism Value: A. thaliana
  misc_feature: MA Experiment 20000308 PARAMETER Experiment Name: At_100mM_NaCl__P Parameter: Plant Line Value: WS
  misc_feature: MA Experiment 20000308 PARAMETER Experiment Name: At_100mM_NaCl__P Parameter: Timepoint (hr) Value: 72
  misc_feature: MA Experiment 20000308 PARAMETER Experiment Name: At_100mM_NaCl__P Parameter: Tissue Value: Whole Plant
  misc_feature: MA Experiment 20000308 PARAMETER Experiment Name: At_100mM_NaCl__P Parameter: Treatment Value: 100mM NaCl vs. No Treatment
  misc_feature: MA Experiment ID: 20000437 Result: Down-regulated in Transcription
  misc_feature: MA Experiment 20000437 PARAMETER Experiment Name: At_Drought_P Parameter: Age (day) Value: 8
  misc_feature: MA Experiment 20000437 PARAMETER Experiment Name: At_Drought_P Parameter: Organism Value: A. thaliana
  misc_feature: MA Experiment 20000437 PARAMETER Experiment Name: At_Drought_P Parameter: Plant Line Value: WS
  misc_feature: MA Experiment 20000437 PARAMETER Experiment Name: At_Drought_P Parameter: Timepoint (hr) Value: 24
  misc_feature: MA Experiment 20000437 PARAMETER Experiment Name: At_Drought_P Parameter: Tissue Value: Whole Plant
  misc_feature: MA Experiment 20000437 PARAMETER Experiment Name: At_Drought_P Parameter: Treatment Value: Drought vs. No Drought
  misc_feature: MA Experiment ID: 20000439 Result: Down-regulated in Transcription
  misc_feature: MA Experiment 20000439 PARAMETER Experiment Name: At_Roots__P Parameter: Age (day) Value: 14 vs. 21
  misc_feature: MA Experiment 20000439 PARAMETER Experiment Name: At_Roots__P Parameter: Organism Value: A. thaliana
  misc_feature: MA Experiment 20000439 PARAMETER Experiment Name: At_Roots__P Parameter: Tissue Value: Roots vs. Whole Plant
  misc_feature: MA Experiment ID: 20000452 Result: Up-regulated in Transcription
  misc_feature: MA Experiment 20000452 PARAMETER Experiment Name: At_CS6879_Shoots-Roots_P Parameter: Age (day) Value: 14
  misc_feature: MA Experiment 20000452 PARAMETER Experiment Name: At_CS6879_Shoots-Roots_P Parameter: Organism Value: A. thaliana
  misc_feature: MA Experiment 20000452 PARAMETER Experiment Name: At_CS6879_Shoots-Roots_P Parameter: Plant Line Value: CS6879 vs. WS
  misc_feature: MA Experiment 20000452 PARAMETER Experiment Name: At_CS6879_Shoots-Roots_P Parameter: Tissue Value: Shoots
  misc_feature: MA Experiment ID: 20000527 Result: Down-regulated in Transcription
  misc_feature: MA Experiment 20000527 PARAMETER Experiment Name: At_10percent_PEG_P Parameter: Age (day) Value: 20
  misc_feature: MA Experiment 20000527 PARAMETER Experiment Name: At_10percent_PEG_P Parameter: Organism Value: A. thaliana
  misc_feature: MA Experiment 20000527 PARAMETER Experiment Name: At_10percent_PEG_P Parameter: Plant Line Value: WS
  misc_feature: MA Experiment 20000527 PARAMETER Experiment Name: At_10percent_PEG_P Parameter: Timepoint (day) Value: 20
  misc_feature: MA Experiment 20000527 PARAMETER Experiment Name: At_10percent_PEG_P Parameter: Tissue Value: Whole Plant
  misc_feature: MA Experiment 20000527 PARAMETER Experiment Name: At_10percent_PEG_P Parameter: Treatment Value: 10percent PEG vs. No Treatment
  misc_feature: MA Experiment ID: 20000573 Result: Up-regulated in Transcription
  misc_feature: MA Experiment 20000573 PARAMETER Experiment Name: At_100uM_ABA_Mutants__P Parameter: Organism Value: A. thaliana
  misc_feature: MA Experiment 20000573 PARAMETER Experiment Name: At_100uM_ABA_Mutants__P Parameter: Plant Line Value: CS22 vs. Ler wt
  misc_feature: MA Experiment 20000573 PARAMETER Experiment Name: At_100uM_ABA_Mutants__P Parameter: Timepoint (hr) Value: N/A
  misc_feature: MA Experiment 20000573 PARAMETER Experiment Name: At_100uM_ABA_Mutants__P Parameter: Tissue Value: Whole Plant
  misc_feature: MA Experiment 20000573 PARAMETER Experiment Name: At_100uM_ABA_Mutants__P Parameter: Treatment Value: None
  misc_feature: MA Experiment ID: 20001247 Result: Down-regulated in Transcription
  misc_feature: MA Experiment 20001247 PARAMETER Experiment Name: At_Far-red-induction_P Parameter: Age (day) Value: 7
  misc_feature: MA Experiment 20001247 PARAMETER Experiment Name: At_Far-red-induction_P Parameter: Light Value: Far-red vs. White
  misc_feature: MA Experiment 20001247 PARAMETER Experiment Name: At_Far-red-induction_P Parameter: Organism Value: A. thaliana
  misc_feature: MA Experiment 20001247 PARAMETER Experiment Name: At_Far-red-induction_P Parameter: Plant Line Value: Columbia
  misc_feature: MA Experiment 20001247 PARAMETER Experiment Name: At_Far-red-induction_P Parameter: Timepoint (hr) Value: 1
  misc_feature: MA Experiment 20001247 PARAMETER Experiment Name: At_Far-red-induction_P Parameter: Tissue Value: Whole Plant
  misc_feature: MA Experiment ID: 20001248 Result: Down-regulated in Transcription
  misc_feature: MA Experiment 20001248 PARAMETER Experiment Name: At_Far-red-induction_P Parameter: Age (day) Value: 7
  misc_feature: MA Experiment 20001248 PARAMETER Experiment Name: At_Far-red-induction_P Parameter: Light Value: Far-red vs. White
  misc_feature: MA Experiment 20001248 PARAMETER Experiment Name: At_Far-red-induction_P Parameter: Organism Value: A. thaliana
  misc_feature: MA Experiment 20001248 PARAMETER Experiment Name: At_Far-red-induction_P Parameter: Plant Line Value: Columbia
  misc_feature: MA Experiment 20001248 PARAMETER Experiment Name: At_Far-red-induction_P Parameter: Timepoint (hr) Value: 4
  misc_feature: MA Experiment 20001248 PARAMETER Experiment Name: At_Far-red-induction_P Parameter: Tissue Value: Whole Plant
  misc_feature: MA Experiment ID: 20001450 Result: Down-regulated in Transcription
  misc_feature: MA Experiment 20001450 PARAMETER Experiment Name: At_Far-red-induction_P Parameter: Age (day) Value: 7
  misc_feature: MA Experiment 20001450 PARAMETER Experiment Name: At_Far-red-induction_P Parameter: Light Value: Far-red vs. White
  misc_feature: MA Experiment 20001450 PARAMETER Experiment Name: At_Far-red-induction_P Parameter: Organism Value: A. thaliana
  misc_feature: MA Experiment 20001450 PARAMETER Experiment Name: At_Far-red-induction_P Parameter: Plant Line Value: Columbia
  misc_feature: MA Experiment 20001450 PARAMETER Experiment Name: At_Far-red-induction_P Parameter: Timepoint (hr) Value: 8
  misc_feature: MA Experiment 20001450 PARAMETER Experiment Name: At_Far-red-induction_P Parameter: Tissue Value: Whole Plant
  misc_feature: MA Experiment ID: 20001451 Result: Down-regulated in Transcription
  misc_feature: MA Experiment 20001451 PARAMETER Experiment Name: At_Far-red-induction_P Parameter: Age (day) Value: 7
  misc_feature: MA Experiment 20001451 PARAMETER Experiment Name: At_Far-red-induction_P Parameter: Light Value: Far-red vs. White
  misc_feature: MA Experiment 20001451 PARAMETER Experiment Name: At_Far-red-induction_P Parameter: Organism Value: A. thaliana
  misc_feature: MA Experiment 20001451 PARAMETER Experiment Name: At_Far-red-induction_P Parameter: Plant Line Value: Columbia
  misc_feature: MA Experiment 20001451 PARAMETER Experiment Name: At_Far-red-induction_P Parameter: Timepoint (hr) Value: 24
  misc_feature: MA Experiment 20001451 PARAMETER Experiment Name: At_Far-red-induction_P Parameter: Tissue Value: Whole Plant
  misc_feature: MA Experiment ID: 20001555 Result: Down-regulated in Transcription
  misc_feature: MA Experiment 20001555 PARAMETER Experiment Name: At_Drought_Soil_Dry_P Parameter: Age (day) Value: 24
  misc_feature: MA Experiment 20001555 PARAMETER Experiment Name: At_Drought_Soil_Dry_P Parameter: Organism Value: A. thaliana
  misc_feature: MA Experiment 20001555 PARAMETER Experiment Name: At_Drought_Soil_Dry_P Parameter: Plant Line Value: WS
  misc_feature: MA Experiment 20001555 PARAMETER Experiment Name: At_Drought_Soil_Dry_P Parameter: Post Timepoint (hr) Value: None
  misc_feature: MA Experiment 20001555 PARAMETER Experiment Name: At_Drought_Soil_Dry_P Parameter: Post-Treatment Value: None
  misc_feature: MA Experiment 20001555 PARAMETER Experiment Name: At_Drought_Soil_Dry_P Parameter: Timepoint (day) Value: 10
  misc_feature: MA Experiment 20001555 PARAMETER Experiment Name: At_Drought_Soil_Dry_P Parameter: Treatment Value: Drought vs. No Drought
  misc_feature: MA Experiment ID: 20001558 Result: Down-regulated in Transcription
  misc_feature: MA Experiment 20001558 PARAMETER Experiment Name: At_Drought_Soil_Dry_P Parameter: Age (day) Value: 27
  misc_feature: MA Experiment 20001558 PARAMETER Experiment Name: At_Drought_Soil_Dry_P Parameter: Organism Value: A. thaliana
  misc_feature: MA Experiment 20001558 PARAMETER Experiment Name: At_Drought_Soil_Dry_P Parameter: Plant Line Value: WS
  misc_feature: MA Experiment 20001558 PARAMETER Experiment Name: At_Drought_Soil_Dry_P Parameter: Post Timepoint (hr) Value: 6
  misc_feature: MA Experiment 20001558 PARAMETER Experiment Name: At_Drought_Soil_Dry_P Parameter: Post-Treatment Value: Re-Water vs. No Drought
  misc_feature: MA Experiment 20001558 PARAMETER Experiment Name: At_Drought_Soil_Dry_P Parameter: Timepoint (day) Value: 13
  misc_feature: MA Experiment 20001558 PARAMETER Experiment Name: At_Drought_Soil_Dry_P Parameter: Treatment Value: Drought vs. No Drought
  misc_feature: MA Experiment ID: 20001757 Result: Up-regulated in Transcription
  misc_feature: MA Experiment 20001757 PARAMETER Experiment Name: At_50mM_NH4NO3_L-to-H_P Parameter: Timepoint (hr) Value: 6
  misc_feature: MA Experiment 20001757 PARAMETER Experiment Name: At_50mM_NH4NO3_L-to-H_P Parameter: Tissue Value: Leaf
  misc_feature: MA Experiment 20001757 PARAMETER Experiment Name: At_50mM_NH4NO3_L-to-H_P Parameter: Treatment Value: 50mM NH4NO3 vs 100mM Mannitol
  misc_feature: MA Experiment ID: 20001774 Result: Up-regulated in Transcription
  misc_feature: MA Experiment 20001774 PARAMETER Experiment Name: At_Far-red-enriched-adult_P Parameter: Age (day) Value: 31
  misc_feature: MA Experiment 20001774 PARAMETER Experiment Name: At_Far-red-enriched-adult_P Parameter: Light Value: Far-red enriched vs. White
  misc_feature: MA Experiment 20001774 PARAMETER Experiment Name: At_Far-red-enriched-adult_P Parameter: Organism Value: A. thaliana
  misc_feature: MA Experiment 20001774 PARAMETER Experiment Name: At_Far-red-enriched-adult_P Parameter: Plant Line Value: Columbia
  misc_feature: MA Experiment 20001774 PARAMETER Experiment Name: At_Far-red-enriched-adult_P Parameter: Timepoint (hr) Value: 72
  misc_feature: MA Experiment 20001774 PARAMETER Experiment Name: At_Far-red-enriched-adult_P Parameter: Tissue Value: Aerial
  misc_feature: MA Experiment ID: 20001911 Result: Down-regulated in Transcription
  misc_feature: MA Experiment 20001911 PARAMETER Experiment Name: At_Drought_Reproduction_P Parameter: Age (day) Value: 40
  misc_feature: MA Experiment 20001911 PARAMETER Experiment Name: At_Drought_Reproduction_P Parameter: Organism Value: A. thaliana
  misc_feature: MA Experiment 20001911 PARAMETER Experiment Name: At_Drought_Reproduction_P Parameter: Plant Line Value: WS
  misc_feature: MA Experiment 20001911 PARAMETER Experiment Name: At_Drought_Reproduction_P Parameter: Timepoint (day) Value: 10
  misc_feature: MA Experiment 20001911 PARAMETER Experiment Name: At_Drought_Reproduction_P Parameter: Tissue Value: Flowers
  misc_feature: MA Experiment 20001911 PARAMETER Experiment Name: At_Drought_Reproduction_P Parameter: Treatment Value: Drought vs. No Drought

SEQ ID NO: 45599 - protein, 904 aa, Arabidopsis thaliana; identical to SEQ ID NO: 44961
  peptide (1)..(904): Ceres Seq. ID no. 12559537
  misc_feature (114)..(205): Pfam Name: PLAT/LH2 domain Pfam Description: PLAT/LH2 domain
  misc_feature (114)..(205): Pfam Name: PLAT/LH2 domain Pfam Description: PLAT/LH2 domain
  misc_feature (114)..(205): Pfam Name: PLAT/LH2 domain Pfam Description: PLAT/LH2 domain
  misc_feature (75)..(903): Homolog of NCBI NO: 14589309 NR Description: lipoxygenase [Sesbania rostrata]
  misc_feature (145)..(359): Homolog of NCBI NO: 9714392 NR Description: lipoxygenase [Oryza sativa]
  misc_feature (311)..(904): Homolog of NCBI NO: 9714392 NR Description: lipoxygenase [Oryza sativa]
  misc_feature (119)..(904): Homolog of NCBI NO: 28411860 NR Description: putative lipoxygenase [Oryza sativa (japonica
  misc_feature (17)..(904): Homolog of NCBI NO: 34922538 NR Description: Lipoxygenase 2.3, chloroplast precursor
  misc_feature (75)..(903): Homolog of NCBI NO: 14589309 NR Description: lipoxygenase [Sesbania rostrata]
  misc_feature (311)..(904): Homolog of NCBI NO: 9714392 NR Description: lipoxygenase [Oryza sativa]
  misc_feature (17)..(904): Homolog of NCBI NO: 34922538 NR Description: Lipoxygenase 2.3, chloroplast precursor
  misc_feature (119)..(904): Homolog of NCBI NO: 28411860 NR Description: putative lipoxygenase [Oryza sativa (japonica
  misc_feature (311)..(904): Homolog of NCBI NO: 9714392 NR Description: lipoxygenase [Oryza sativa]
  misc_feature (145)..(359): Homolog of NCBI NO: 9714392 NR Description: lipoxygenase [Oryza sativa]
  misc_feature (75)..(903): Homolog of NCBI NO: 14589309 NR Description: lipoxygenase [Sesbania rostrata]
  misc_feature (24)..(904): Homolog of NCBI NO: 7433169 NR Description: probable lipoxygenase (EC 1.13.11.12) (clone H1)
  misc_feature (72)..(904): Homolog of NCBI NO: 7433168 NR Description: lipoxygenase (EC 1.13.11.12) loxC, chloroplast -
  misc_feature (125)..(904): Homolog of NCBI NO: 2826842 NR Description: loxc homologue [Lycopersicon pimpinellifolium]
  misc_feature (74)..(904): Homolog of NCBI NO: 7433160 NR Description: probable lipoxygenase (EC 1.13.11.12) CPRD46,
  misc_feature (103)..(904): Homolog of NCBI NO: 18461098 NR Description: lipoxygenase [Citrus jambhiri]
  misc_feature (24)..(904): Homolog of NCBI NO: 7433169 NR Description: probable lipoxygenase (EC 1.13.11.12) (clone H1)
  misc_feature (72)..(904): Homolog of NCBI NO: 7433168 NR Description: lipoxygenase (EC 1.13.11.12) loxC, chloroplast -
  misc_feature (125)..(904): Homolog of NCBI NO: 2826842 NR Description: loxc homologue [Lycopersicon pimpinellifolium]
  misc_feature (74)..(904): Homolog of NCBI NO: 7433160 NR Description: probable lipoxygenase (EC 1.13.11.12) CPRD46,
  misc_feature (103)..(904): Homolog of NCBI NO: 18461098 NR Description: lipoxygenase [Citrus jambhiri]
  misc_feature (17)..(904): Homolog of NCBI NO: 34922538 NR Description: Lipoxygenase 2.3, chloroplast precursor
  misc_feature (119)..(904): Homolog of NCBI NO: 28411860 NR Description: putative lipoxygenase [Oryza sativa (japonica
  misc_feature (145)..(359): Homolog of NCBI NO: 9714392 NR Description: lipoxygenase [Oryza sativa]
  misc_feature (103)..(904): Homolog of NCBI NO: 18461098 NR Description: lipoxygenase [Citrus jambhiri]
  misc_feature (74)..(904): Homolog of NCBI NO: 7433160 NR Description: probable lipoxygenase (EC 1.13.11.12) CPRD46,
  misc_feature (125)..(904): Homolog of NCBI NO: 2826842 NR Description: loxc homologue [Lycopersicon pimpinellifolium]
  misc_feature (72)..(904): Homolog of NCBI NO: 7433168 NR Description: lipoxygenase (EC 1.13.11.12) loxC, chloroplast -
  misc_feature (24)..(904): Homolog of NCBI NO: 7433169 NR Description: probable lipoxygenase (EC 1.13.11.12) (clone H1)

SEQ ID NO: 45600 - protein, 896 aa, Arabidopsis thaliana; identical to SEQ ID NO: 44962
  peptide (1)..(896): Ceres Seq. ID no. 12559538
  misc_feature (106)..(197): Pfam Name: PLAT/LH2 domain Pfam Description: PLAT/LH2 domain
  misc_feature (106)..(197): Pfam Name: PLAT/LH2 domain Pfam Description: PLAT/LH2 domain
  misc_feature (106)..(197): Pfam Name: PLAT/LH2 domain Pfam Description: PLAT/LH2 domain
  misc_feature (67)..(895): Homolog of NCBI NO: 14589309 NR Description: lipoxygenase [Sesbania rostrata]
  misc_feature (137)..(351): Homolog of NCBI NO: 9714392 NR Description: lipoxygenase [Oryza sativa]
  misc_feature (303)..(896): Homolog of NCBI NO: 9714392 NR Description: lipoxygenase [Oryza sativa]
  misc_feature (111)..(896): Homolog of NCBI NO: 28411860 NR Description: putative lipoxygenase [Oryza sativa (japonica
  misc_feature (9)..(896): Homolog of NCBI NO: 34922538 NR Description: Lipoxygenase 2.3, chloroplast precursor
  misc_feature (67)..(895): Homolog of NCBI NO: 14589309 NR Description: lipoxygenase [Sesbania rostrata]
  misc_feature (303)..(896): Homolog of NCBI NO: 9714392 NR Description: lipoxygenase [Oryza sativa]
  misc_feature (9)..(896): Homolog of NCBI NO: 34922538 NR Description: Lipoxygenase 2.3, chloroplast precursor
  misc_feature (111)..(896): Homolog of NCBI NO: 28411860 NR Description: putative lipoxygenase [Oryza sativa (japonica
  misc_feature (303)..(896): Homolog of NCBI NO: 9714392 NR Description: lipoxygenase [Oryza sativa]
  misc_feature (137)..(351): Homolog of NCBI NO: 9714392 NR Description: lipoxygenase [Oryza sativa]
  misc_feature (67)..(895): Homolog of NCBI NO: 14589309 NR Description: lipoxygenase [Sesbania rostrata]
  misc_feature (16)..(896): Homolog of NCBI NO: 7433169 NR Description: probable lipoxygenase (EC 1.13.11.12) (clone H1)
  misc_feature (64)..(896): Homolog of NCBI NO: 7433168 NR Description: lipoxygenase (EC 1.13.11.12) loxC, chloroplast -
  misc_feature (117)..(896): Homolog of NCBI NO: 2826842 NR Description: loxc homologue [Lycopersicon pimpinellifolium]
  misc_feature (66)..(896): Homolog of NCBI NO: 7433160 NR Description: probable lipoxygenase (EC 1.13.11.12) CPRD46,
  misc_feature (95)..(896): Homolog of NCBI NO: 18461098 NR Description: lipoxygenase [Citrus jambhiri]
  misc_feature (16)..(896): Homolog of NCBI NO: 7433169 NR Description: probable lipoxygenase (EC 1.13.11.12) (clone H1)
  misc_feature (64)..(896): Homolog of NCBI NO: 7433168 NR Description: lipoxygenase (EC 1.13.11.12) loxC, chloroplast -
  misc_feature (117)..(896): Homolog of NCBI NO: 2826842 NR Description: loxc homologue [Lycopersicon pimpinellifolium]
  misc_feature (66)..(896): Homolog of NCBI NO: 7433160 NR Description: probable lipoxygenase (EC 1.13.11.12) CPRD46,
  misc_feature (95)..(896): Homolog of NCBI NO: 18461098 NR Description: lipoxygenase [Citrus jambhiri]
  misc_feature (9)..(896): Homolog of NCBI NO: 34922538 NR Description: Lipoxygenase 2.3, chloroplast precursor
  misc_feature (111)..(896): Homolog of NCBI NO: 28411860 NR Description: putative lipoxygenase [Oryza sativa (japonica
  misc_feature (137)..(351): Homolog of NCBI NO: 9714392 NR Description: lipoxygenase [Oryza sativa]
  misc_feature (95)..(896): Homolog of NCBI NO: 18461098 NR Description: lipoxygenase [Citrus jambhiri]
  misc_feature (66)..(896): Homolog of NCBI NO: 7433160 NR Description: probable lipoxygenase (EC 1.13.11.12) CPRD46,
  misc_feature (117)..(896): Homolog of NCBI NO: 2826842 NR Description: loxc homologue [Lycopersicon pimpinellifolium]
  misc_feature (64)..(896): Homolog of NCBI NO: 7433168 NR Description: lipoxygenase (EC 1.13.11.12) loxC, chloroplast -
  misc_feature (16)..(896): Homolog of NCBI NO: 7433169 NR Description: probable lipoxygenase (EC 1.13.11.12) (clone H1)

SEQ ID NO: 45601 - protein, 754 aa, Arabidopsis thaliana; identical to SEQ ID NO: 44963
  peptide (1)..(754): Ceres Seq. ID no. 12559539
  misc_feature (1)..(55): Pfam Name: PLAT/LH2 domain Pfam Description: PLAT/LH2 domain
  misc_feature (1)..(55): Pfam Name: PLAT/LH2 domain Pfam Description: PLAT/LH2 domain
  misc_feature (1)..(55): Pfam Name: PLAT/LH2 domain Pfam Description: PLAT/LH2 domain
  misc_feature (1)..(753): Homolog of NCBI NO: 14589309 NR Description: lipoxygenase [Sesbania rostrata]
  misc_feature (1)..(209): Homolog of NCBI NO: 9714392 NR Description: lipoxygenase [Oryza sativa]
  misc_feature (161)..(754): Homolog of NCBI NO: 9714392 NR Description: lipoxygenase [Oryza sativa]
  misc_feature (1)..(754): Homolog of NCBI NO: 28411860 NR Description: putative lipoxygenase [Oryza sativa (japonica
  misc_feature (1)..(754): Homolog of NCBI NO: 34922538 NR Description: Lipoxygenase 2.3, chloroplast precursor
  misc_feature (1)..(753): Homolog of NCBI NO: 14589309 NR Description: lipoxygenase [Sesbania rostrata]
  misc_feature (161)..(754): Homolog of NCBI NO: 9714392 NR Description: lipoxygenase [Oryza sativa]
  misc_feature (1)..(754): Homolog of NCBI NO: 34922538 NR Description: Lipoxygenase 2.3, chloroplast precursor
  misc_feature (1)..(754): Homolog of NCBI NO: 28411860 NR Description: putative lipoxygenase [Oryza sativa (japonica
  misc_feature (161)..(754): Homolog of NCBI NO: 9714392 NR Description: lipoxygenase [Oryza sativa]
  misc_feature (1)..(209): Homolog of NCBI NO: 9714392 NR Description: lipoxygenase [Oryza sativa]
  misc_feature (1)..(753): Homolog of NCBI NO: 14589309 NR Description: lipoxygenase [Sesbania rostrata]
  misc_feature (1)..(754): Homolog of NCBI NO: 7433169 NR Description: probable lipoxygenase (EC 1.13.11.12) (clone H1)
  misc_feature (1)..(754): Homolog of NCBI NO: 7433168 NR Description: lipoxygenase (EC 1.13.11.12) loxC, chloroplast -
  misc_feature (1)..(754): Homolog of NCBI NO: 2826842 NR Description: loxc homologue [Lycopersicon pimpinellifolium]
  misc_feature (1)..(754): Homolog of NCBI NO: 7433160 NR Description: probable lipoxygenase (EC 1.13.11.12) CPRD46,
  misc_feature (1)..(754): Homolog of NCBI NO: 18461098 NR Description: lipoxygenase [Citrus jambhiri]
  misc_feature (1)..(754): Homolog of NCBI NO: 7433169 NR Description: probable lipoxygenase (EC 1.13.11.12) (clone H1)
  misc_feature (1)..(754): Homolog of NCBI NO: 7433168 NR Description: lipoxygenase (EC 1.13.11.12) loxC, chloroplast -
  misc_feature (1)..(754): Homolog of NCBI NO: 2826842 NR Description: loxc homologue [Lycopersicon pimpinellifolium]
  misc_feature (1)..(754): Homolog of NCBI NO: 7433160 NR Description: probable lipoxygenase (EC 1.13.11.12) CPRD46,
  misc_feature (1)..(754): Homolog of NCBI NO: 18461098 NR Description: lipoxygenase [Citrus jambhiri]
  misc_feature (1)..(754): Homolog of NCBI NO: 34922538 NR Description: Lipoxygenase 2.3, chloroplast precursor
  misc_feature (1)..(754): Homolog of NCBI NO: 28411860 NR Description: putative lipoxygenase [Oryza sativa (japonica
  misc_feature (1)..(209): Homolog of NCBI NO: 9714392 NR Description: lipoxygenase [Oryza sativa]
  misc_feature (1)..(754): Homolog of NCBI NO: 18461098 NR Description: lipoxygenase [Citrus jambhiri]
  misc_feature (1)..(754): Homolog of NCBI NO: 7433160 NR Description: probable lipoxygenase (EC 1.13.11.12) CPRD46,
  misc_feature (1)..(754): Homolog of NCBI NO: 2826842 NR Description: loxc homologue [Lycopersicon pimpinellifolium]
  misc_feature (1)..(754): Homolog of NCBI NO: 7433168 NR Description: lipoxygenase (EC 1.13.11.12) loxC, chloroplast -
  misc_feature (1)..(754): Homolog of NCBI NO: 7433169 NR Description: probable lipoxygenase (EC 1.13.11.12) (clone H1)

SEQ ID NO: 45602 - DNA, 1511 bp, Arabidopsis thaliana
  misc_feature (1)..(1511): Ceres Seq. ID no. 13646397
  misc_feature: MA Experiment ID: 20000306 Result: Up-regulated in Transcription
  misc_feature: MA Experiment 20000306 PARAMETER Experiment Name: At_Germinating_Seeds_Sub_P Parameter: Age (hr) Value: 6 vs. 0
  misc_feature: MA Experiment 20000306 PARAMETER Experiment Name: At_Germinating_Seeds_Sub_P Parameter: Organism Value: A. thaliana
  misc_feature: MA Experiment 20000306 PARAMETER Experiment Name: At_Germinating_Seeds_Sub_P Parameter: Plant Line Value: WS
  misc_feature: MA Experiment 20000306 PARAMETER Experiment Name: At_Germinating_Seeds_Sub_P Parameter: Tissue Value: Germinating Seeds
  misc_feature: MA Experiment ID: 20000307 Result: Up-regulated in Transcription
  misc_feature: MA Experiment 20000307 PARAMETER Experiment Name: At_Germinating_Seeds_Sub_P Parameter: Age (hr) Value: 24 vs. 0
  misc_feature: MA Experiment 20000307 PARAMETER Experiment Name: At_Germinating_Seeds_Sub_P Parameter: Organism Value: A. thaliana
  misc_feature: MA Experiment 20000307 PARAMETER Experiment Name: At_Germinating_Seeds_Sub_P Parameter: Plant Line Value: WS
  misc_feature: MA Experiment 20000307 PARAMETER Experiment Name: At_Germinating_Seeds_Sub_P Parameter: Tissue Value: Germinating Seeds
  misc_feature: MA Experiment ID: 20000314 Result: Up-regulated in Transcription
  misc_feature: MA Experiment 20000314 PARAMETER Experiment Name: At_14day_Shoots-Roots_Sub_P Parameter: Age (day) Value: 14
  misc_feature: MA Experiment 20000314 PARAMETER Experiment Name: At_14day_Shoots-Roots_Sub_P Parameter: Organism Value: A. thaliana
  misc_feature: MA Experiment 20000314 PARAMETER Experiment Name: At_14day_Shoots-Roots_Sub_P Parameter: Plant Line Value: WS
  misc_feature: MA Experiment 20000314 PARAMETER Experiment Name: At_14day_Shoots-Roots_Sub_P Parameter: Tissue Value: Roots vs. Whole Plant
aaacttttgtctctttttaactctcttaactttcgtttcttctcctaccttcttttaccaacctttcctttctcttacacacatatatatatatacatatatagagagagagaagaggacaaagagttgaaagatgaagactctcatgtcttcatagaaacaagtgatatgtgcgctaagaaagaagaagaagaagaagaagaagacagttctgaagccatgaacaacatacaaaattaccaaaatgacctcttctttcaccaactcatctctcatcatcaccatcatcatcatgatccttctcaatctgaaactttgggagcatccggtaacgttggatctggtttcactatcttctctcaagattccgtctctccaatatggtctctacctccacctacctcgatccaaccaccatttgatcagtttcctcctccttcttcttctccagcatctttctacggaagtttcttcaacagaagtcgagctcatcatcagggattacagttcgggtacgagggttttggtggagccacgtcagcagcacatcatcatcatgaacaacttcggatcttatcggaagctttaggtccggtagtacaagccgggtccggtccttttgggttacaagctgagttagggaagatgacagcacaagagatcatggacgctaaagctttggctgcttcaaagagtcatagtgaagctgagagaagaagaagagagagaatcaataatcatctcgctaagctccgtagcatattacccaacaccaccaaaacggataaagcgtcgttactagctgaagtgatccaacatgtgaaagagttgaagagagagacttcagtgatctcagagacaaatcttgtcccaacggaaagcgatgagttaacggtagctttcacggaggaggaagaaaccggagatggcagatttgtaattaaagcgtcgctttgctgtgaagacaggtcggatctcttgcctgacatgattaaaacattgaaagctatgcgtctcaaaacgctcaaggcggagataaccaccgttgggggacgagtcaagaacgttttgtttgttaccggagaagagagctccggtgaggaagtggaggaagagtactgtatagggacgattgaggaagcttagaaagcggtgatggagaagagcaatgtagaggaatcatcttcttctggaaatgctaagagacagagaatgagtagtcacaacactatcactatcgtcgaacaacagcaacaatataatcagaggtaatcaattttttacttaaatcgcttttttttttttttactttcggtgtatctactacgtgtgttgtttgctggttatggaaatgaatgttgtacgtcacgttatactatagatatatgtgtgtttgtgtgtatgtataacggaagtatttgtatccgttgtggtcttggacttttggtttggttctaagatacttatttttaaaaaaaaaaaaaaaaaaaactcgagggggggcccggtac

SEQ ID NO: 45603 - protein, 381 aa, Arabidopsis thaliana
  peptide (1)..(381): Ceres Seq. ID no. 13646398
  misc_feature (229)..(278): Pfam Name: Helix-loop-helix DNA-binding domain Pfam Description: Helix-loop-helix DNA-binding domain
  misc_feature (223)..(361): Homolog of NCBI NO: 33111975 NR Description: putative bHLH131 transcription factor
  misc_feature (225)..(381): Homolog of NCBI NO: 15225658 NR Description: bHLH protein family [Arabidopsis thaliana]
  misc_feature (167)..(381): Homolog of NCBI NO: 34904034 NR Description: P0665D10.15 [Oryza sativa (japonica
  misc_feature (197)..(381): Homolog of NCBI NO: 34896028 NR Description: ESTs C26093(C11622),AU090634(C12429) correspond a region of the predicted gene.~Similar to Arabidopsis thaliana
  misc_feature (202)..(381): Homolog of NCBI NO: 32129332 NR Description: putative DNA binding protein
  misc_feature (221)..(381): Homolog of NCBI NO: 15229004 NR Description: bHLH protein family [Arabidopsis thaliana]
  misc_feature (213)..(381): Homolog of NCBI NO: 18491261 NR Description: At2g41130/T3K9.10 [Arabidopsis thaliana]
  misc_feature (213)..(381): Homolog of NCBI NO: 15226839 NR Description: bHLH protein family [Arabidopsis thaliana]
  misc_feature (116)..(373): Homolog of NCBI NO: 15230869 NR Description: bHLH protein family [Arabidopsis thaliana]
  misc_feature (57)..(381): Homolog of NCBI NO: 18409132 NR Description: bHLH protein family [Arabidopsis thaliana]
KLLSLFNSLNFRFFSYLLLPTFPFSYTHIYIYIYREREEDKELKDEDSHVFIETSDMCAKKEEEEEEEDSSEAMNNIQNYQNDLFFHQLISHHHHHHHDPSQSETLGASGNVGSGFTIFSQDSVSPIWSLPPPTSIQPPFDQFPPPSSSPASFYGSFFNRSRAHHQGLQFGYEGFGGATSAAHHHHEQLRILSEALGPVVQAGSGPFGLQAELGKMTAQEIMDAKALAASKSHSEAERRRRERINNHLAKLRSILPNTTKTDKASLLAEVIQHVKELKRETSVISETNLVPTESDELTVAFTEEEETGDGRFVIKASLCCEDRSDLLPDMIKTLKAMRLKTLKAEITTVGGRVKNVLFVTGEESSGEEVEEEYCIGTIEEA

SEQ ID NO: 45604 - protein, 325 aa, Arabidopsis thaliana
  peptide (1)..(325): Ceres Seq. ID no. 13646399
  misc_feature (173)..(222): Pfam Name: Helix-loop-helix DNA-binding domain Pfam Description: Helix-loop-helix DNA-binding domain
  misc_feature (167)..(305): Homolog of NCBI NO: 33111975 NR Description: putative bHLH131 transcription factor
  misc_feature (169)..(325): Homolog of NCBI NO: 15225658 NR Description: bHLH protein family [Arabidopsis thaliana]
  misc_feature (111)..(325): Homolog of NCBI NO: 34904034 NR Description: P0665D10.15 [Oryza sativa (japonica
  misc_feature (141)..(325): Homolog of NCBI NO: 34896028 NR Description: ESTs C26093(C11622),AU090634(C12429) correspond a region of the predicted gene.~Similar to Arabidopsis thaliana
  misc_feature (146)..(325): Homolog of NCBI NO: 32129332 NR Description: putative DNA binding protein
  misc_feature (165)..(325): Homolog of NCBI NO: 15229004 NR Description: bHLH protein family [Arabidopsis thaliana]
  misc_feature (157)..(325): Homolog of NCBI NO: 18491261 NR Description: At2g41130/T3K9.10 [Arabidopsis thaliana]
  misc_feature (157)..(325): Homolog of NCBI NO: 15226839 NR Description: bHLH protein family [Arabidopsis thaliana]
  misc_feature (60)..(317): Homolog of NCBI NO: 15230869 NR Description: bHLH protein family [Arabidopsis thaliana]
  misc_feature (1)..(325): Homolog of NCBI NO: 18409132 NR Description: bHLH protein family [Arabidopsis thaliana]
MCAKKEEEEEEEDSSEAMNNIQNYQNDLFFHQLISHHHHHHHDPSQSETLGASGNVGSGFTIFSQDSVSPIWSLPPPTSIQPPFDQFPPPSSSPASFYGSFFNRSRAHHQGLQFGYEGFGGATSAAHHHHEQLRILSEALGPVVQAGSGPFGLQAELGKMTAQEIMDAKALAASKSHSEAERRRRERINNHLAKLRSILPNTTKTDKASLLAEVIQHVKELKRETSVISETNLVPTESDELTVAFTEEEETGDGRFVIKASLCCEDRSDLLPDMIKTLKAMRLKTLKAEITTVGGRVKNVLFVTGEESSGEEVEEEYCIGTIEEA

SEQ ID NO: 45605 - protein, 308 aa, Arabidopsis thaliana
  peptide (1)..(308): Ceres Seq. ID no. 13646400
  misc_feature (156)..(205): Pfam Name: Helix-loop-helix DNA-binding domain Pfam Description: Helix-loop-helix DNA-binding domain
  misc_feature (150)..(288): Homolog of NCBI NO: 33111975 NR Description: putative bHLH131 transcription factor
  misc_feature (152)..(308): Homolog of NCBI NO: 15225658 NR Description: bHLH protein family [Arabidopsis thaliana]
  misc_feature (94)..(308): Homolog of NCBI NO: 34904034 NR Description: P0665D10.15 [Oryza sativa (japonica
  misc_feature (124)..(308): Homolog of NCBI NO: 34896028 NR Description: ESTs C26093(C11622),AU090634(C12429) correspond a region of the predicted gene.~Similar to Arabidopsis thaliana
  misc_feature (129)..(308): Homolog of NCBI NO: 32129332 NR Description: putative DNA binding protein
  misc_feature (148)..(308): Homolog of NCBI NO: 15229004 NR Description: bHLH protein family [Arabidopsis thaliana]
  misc_feature (140)..(308): Homolog of NCBI NO: 18491261 NR Description: At2g41130/T3K9.10 [Arabidopsis thaliana]
  misc_feature (140)..(308): Homolog of NCBI NO: 15226839 NR Description: bHLH protein family [Arabidopsis thaliana]
  misc_feature (43)..(300): Homolog of NCBI NO: 15230869 NR Description: bHLH protein family [Arabidopsis thaliana]
  misc_feature (1)..(308): Homolog of NCBI NO: 18409132 NR Description: bHLH protein family [Arabidopsis thaliana]
MNNIQNYQNDLFFHQLISHHHHHHHDPSQSETLGASGNVGSGFTIFSQDSVSPIWSLPPPTSIQPPFDQFPPPSSSPASFYGSFFNRSRAHHQGLQFGYEGFGGATSAAHHHHEQLRILSEALGPVVQAGSGPFGLQAELGKMTAQEIMDAKALAASKSHSEAERRRRERINNHLAKLRSILPNTTKTDKASLLAEVIQHVKELKRETSVISETNLVPTESDELTVAFTEEEETGDGRFVIKASLCCEDRSDLLPDMIKTLKAMRLKTLKAEITTVGGRVKNVLFVTGEESSGEEVEEEYCIGTIEEA

SEQ ID NO: 45606 - DNA, 2745 bp, Arabidopsis thaliana
  misc_feature (1)..(2745): Ceres Seq. ID no. 13591675
  misc_feature: MA Experiment ID: 20000185 Result: Down-regulated in Transcription
  misc_feature: MA Experiment 20000185 PARAMETER Experiment Name: At_Roots__P Parameter: Age (day) Value: 7 vs. 21
  misc_feature: MA Experiment 20000185 PARAMETER Experiment Name: At_Roots__P Parameter: Organism Value: A. thaliana
  misc_feature: MA Experiment 20000185 PARAMETER Experiment Name: At_Roots__P Parameter: Tissue Value: Roots vs. Whole Plant
  misc_feature: MA Experiment ID: 20000234 Result: Down-regulated in Transcription
  misc_feature: MA Experiment 20000234 PARAMETER Experiment Name: At_Siliques_P Parameter: Age (day) Value: 21
  misc_feature: MA Experiment 20000234 PARAMETER Experiment Name: At_Siliques_P Parameter: Organism Value: A. thaliana
  misc_feature: MA Experiment 20000234 PARAMETER Experiment Name: At_Siliques_P Parameter: Plant Line Value: WS
  misc_feature: MA Experiment 20000234 PARAMETER Experiment Name: At_Siliques_P Parameter: Tissue Value: Less Than 5mm Siliques vs. Whole Plant
  misc_feature: MA Experiment ID: 20000286 Result: Down-regulated in Transcription
  misc_feature: MA Experiment 20000286 PARAMETER Experiment Name: At_Open_Flower_P Parameter: Age (day) Value: 21
  misc_feature: MA Experiment 20000286 PARAMETER Experiment Name: At_Open_Flower_P Parameter: Plant Line Value: WS
  misc_feature: MA Experiment 20000286 PARAMETER Experiment Name: At_Open_Flower_P Parameter: Tissue Value: Half Open vs. Whole Plant
  misc_feature: MA Experiment ID: 20000445 Result: Down-regulated in Transcription
  misc_feature: MA Experiment 20000445 PARAMETER Experiment Name: At_100uM_NAA__P Parameter: Age (day) Value: 14
  misc_feature: MA Experiment 20000445 PARAMETER Experiment Name: At_100uM_NAA__P Parameter: Organism Value: A. thaliana
  misc_feature: MA Experiment 20000445 PARAMETER Experiment Name: At_100uM_NAA__P Parameter: Plant Line Value: WS
  misc_feature: MA Experiment 20000445 PARAMETER Experiment Name: At_100uM_NAA__P Parameter: Timepoint (hr) Value: 6
  misc_feature: MA Experiment 20000445 PARAMETER Experiment Name: At_100uM_NAA__P Parameter: Tissue Value: Aerial
  misc_feature: MA Experiment 20000445 PARAMETER Experiment Name: At_100uM_NAA__P Parameter: Treatment Value: 100uM NAA vs. No Treatment
  misc_feature: MA Experiment ID: 20000496 Result: Up-regulated in Transcription
  misc_feature: MA Experiment 20000496 PARAMETER Experiment Name: At_Guard_Cells_P Parameter: Harvest Date Value: 7/19/2002
  misc_feature: MA Experiment 20000496 PARAMETER Experiment Name: At_Guard_Cells_P Parameter: Organism Value: Canola
  misc_feature: MA Experiment 20000496 PARAMETER Experiment Name: At_Guard_Cells_P Parameter: Tissue Value: Guard Cells vs. Leaves
  misc_feature: MA Experiment ID: 20000709 Result: Down-regulated in Transcription
  misc_feature: MA Experiment 20000709 PARAMETER Experiment Name: At_15mM_NH4NO3_L-to-H_P Parameter: Age (hr) Value: 14
  misc_feature: MA Experiment 20000709 PARAMETER Experiment Name: At_15mM_NH4NO3_L-to-H_P Parameter: Organism Value: A. thaliana
  misc_feature: MA Experiment 20000709 PARAMETER Experiment Name: At_15mM_NH4NO3_L-to-H_P Parameter: Plant Line Value: WS
  misc_feature: MA Experiment 20000709 PARAMETER Experiment Name: At_15mM_NH4NO3_L-to-H_P Parameter: Timepoint (hr) Value: 4
  misc_feature: MA Experiment 20000709 PARAMETER Experiment Name: At_15mM_NH4NO3_L-to-H_P Parameter: Tissue Value: Aerial
  misc_feature: MA Experiment 20000709 PARAMETER Experiment Name: At_15mM_NH4NO3_L-to-H_P Parameter: Treatment Value: 15mM NH4NO3 vs. 30mM Mannitol
  misc_feature: MA Experiment ID: 20001451 Result: Up-regulated in Transcription
  misc_feature: MA Experiment 20001451 PARAMETER Experiment Name: At_Far-red-induction_P Parameter: Age (day) Value: 7
  misc_feature: MA Experiment 20001451 PARAMETER Experiment Name: At_Far-red-induction_P Parameter: Light Value: Far-red vs. White
  misc_feature: MA Experiment 20001451 PARAMETER Experiment Name: At_Far-red-induction_P Parameter: Organism Value: A. thaliana
  misc_feature: MA Experiment 20001451 PARAMETER Experiment Name: At_Far-red-induction_P Parameter: Plant Line Value: Columbia
  misc_feature: MA Experiment 20001451 PARAMETER Experiment Name: At_Far-red-induction_P Parameter: Timepoint (hr) Value: 24
  misc_feature: MA Experiment 20001451 PARAMETER Experiment Name: At_Far-red-induction_P Parameter: Tissue Value: Whole Plant
  misc_feature: MA Experiment ID: 20001557 Result: Up-regulated in Transcription
  misc_feature: MA Experiment 20001557 PARAMETER Experiment Name: At_Drought_Soil_Dry_P Parameter: Age (day) Value: 27
  misc_feature: MA Experiment 20001557 PARAMETER Experiment Name: At_Drought_Soil_Dry_P Parameter: Organism Value: A. thaliana
  misc_feature: MA Experiment 20001557 PARAMETER Experiment Name: At_Drought_Soil_Dry_P Parameter: Plant Line Value: WS
  misc_feature: MA Experiment 20001557 PARAMETER Experiment Name: At_Drought_Soil_Dry_P Parameter: Post Timepoint (hr) Value: 3
  misc_feature: MA Experiment 20001557 PARAMETER Experiment Name: At_Drought_Soil_Dry_P Parameter: Post-Treatment Value: Re-Water vs. No Drought
  misc_feature: MA Experiment 20001557 PARAMETER Experiment Name: At_Drought_Soil_Dry_P Parameter: Timepoint (day) Value: 13
  misc_feature: MA Experiment 20001557 PARAMETER Experiment Name: At_Drought_Soil_Dry_P Parameter: Treatment Value: Drought vs. No Drought
  misc_feature: MA Experiment ID: 20001756 Result: Down-regulated in Transcription
  misc_feature: MA Experiment 20001756 PARAMETER Experiment Name: At_50mM_NH4NO3_L-to-H_P Parameter: Timepoint (hr) Value: 4
  misc_feature: MA Experiment 20001756 PARAMETER Experiment Name: At_50mM_NH4NO3_L-to-H_P Parameter: Tissue Value: Leaf
  misc_feature: MA Experiment 20001756 PARAMETER Experiment Name: At_50mM_NH4NO3_L-to-H_P Parameter: Treatment Value: 50mM NH4NO3 vs 100mM Mannitol
  misc_feature: MA Experiment ID: 20001757 Result: Up-regulated in Transcription
  misc_feature: MA Experiment 20001757 PARAMETER Experiment Name: At_50mM_NH4NO3_L-to-H_P Parameter: Timepoint (hr) Value: 6
  misc_feature: MA Experiment 20001757 PARAMETER Experiment Name: At_50mM_NH4NO3_L-to-H_P Parameter: Tissue Value: Leaf
  misc_feature: MA Experiment 20001757 PARAMETER Experiment Name: At_50mM_NH4NO3_L-to-H_P Parameter: Treatment Value: 50mM NH4NO3 vs 100mM Mannitol
  misc_feature: MA Experiment ID: 20001761 Result: Up-regulated in Transcription
  misc_feature: MA Experiment 20001761 PARAMETER Experiment Name: At_50mM_NH4NO3_L-to-H_P Parameter: Timepoint (hr) Value: 4
  misc_feature: MA Experiment 20001761 PARAMETER Experiment Name: At_50mM_NH4NO3_L-to-H_P Parameter: Tissue Value: Siliques
  misc_feature: MA Experiment 20001761 PARAMETER Experiment Name: At_50mM_NH4NO3_L-to-H_P Parameter: Treatment Value: 50mM NH4NO3 vs 100mM Mannitol
attcgacccgtcttgaaacacggaccaaggagtctgacatgtgtgcgagtcaacgggtgagtaaacccgtaaggcgcaaggaagctgattggcgggatccctcgcgggtgcaccgccgaccgaccttgatcttctgagaagggttcgagtgtgagcatgcctgtcgggacccgaaagatggtgaactatgcctgagcggggtaaagccagaggaaactctggtggaagcccgcagcgatactgacgtgcaaatcgttcgtctgacttgggtataggggcgaaagactaatcgaaccatctagtagctggttccccccgaagtttccctcaggatagctggagctcggacgcgagttctatcgggtaaagccaatgattagaggcattgggggcgcaacgccctcgacctattctcaaactttaaataggtaggacgtgtcggctgctttgttgagccgtcacacggaatcgagagctccaagtgggccatttttggtaagcagaactggcgatgcgggatgaaccggaagccgggttacggtgcccaactgcgcgctaacctagaacccacaaagggtgttggtcgattaagacagcaggacggtggtcatggaagtcgaaatccgctaaggagtgtgtaacaactcacctgccgaatcaactagccccgaaaatggatggcgcttaagcgcgcgacctatacccggccgtcggggcaagagccaggcctcgatgagtaggagggcgcggcagtcgctgcaaaacctagggcgcgagcccgggcagagcggccgtcggtgcagatcttggtggtagtagcaaatattcaaatgagaactttgaaggccgaagaggggaaaggttccatgtgaacggcacttgcacatgggttattcgatcctaagagtcgggggaaacccgtctgatagcgcttaagcgcgaacttcgaaaggggatttggttaaaattccggaaccgggacgtggcggttgacggcaacgttagggagtccggagacgtcggcgggggcctcgggaagagttatcttttctgtttaacagcctgcccaccctggaaacggctcagccggaggtagggtccagcggctggaagagcaccgcacgtcgcgtggtgtccggtgcgcccccggcggcccttgaaaatccggaggaccgagtgccgctcacgcccggtcgtactcataaccgcatcaggtctccaaggtgaacagcctctggtcgatggaacaatgtaggcaagggaagtcggcaaaatggatccgtaacttcgggaaaaggattggctctgagggctgggctcgggggtcccagttccgaacccgtcggctgtcagcggactgctcgagctgctttcgcggcgagagcgggtcgccgcgtgccggccgggggacggactgggaacggctctctcgggagctttacccgggcgtcgaacagtcagctcagaactggtacggacaaggggaatccgactgtttaattaaaacaaagcattgcgatggtccctgcggatgctaacgcaatgtgatttctgcccagtgctctgaatgtcaaagtgaagaaattcaaccaagcgcgggtaaacggtgggagtaactatgactctcttaaggtagccaaatgcctcgtcatctaattagtgacgcgcatgaatggattaacgagattcccactgtccctgtctactatccagcgaaaccacagccaagggaacgggcttggcagaatcagcggggaaagaagaccctgttgagcttgactctagtccgactttgtgaaatgacttgagaggtgtaggataagtgggagcttcggcgcaagtgaaataccactacttttaacgttattttacttactccgtgaatcggaggcggggtacaacccctgtttttggtcccaaggctcgcttcggcgggtcgatccgggcggaggacattgtcaggtggggagtttggctggggcggcacatctgttaaaagataacgcaggtgtcctaagatgagctcaacgagaacagaaatctcgtgtggaacaaaagggtaaaagcttgtttgattctgattttcagtacgaatacgaaccgtgaaagcgtggcctatcgatcctttagaccttcggaatttgaagctagaggtgtcagaaaagttaccacagggataactggcttgtggcagccaagcgttcatagcgacgttgctttttgatccttcgatgtcggctcttcctatcattgtgaagcagaattcaccaagtgttggattgttcacccaccaatagggaacgtgagctgggtttagaccgtcgtgagacaggttagttttaccctactgatgcccgcgtcgcgatagtaattcaacctagtacgagaggaaccgttgattcgcacaattggtcatcgcgcttggttgaaaagccagtggcgcgaagctaccgtgcgctggattatgactgaacgcctctaagtcagaatccgggctagaagcgacgcatgcgcccgccgcccgattgccgaccctcagtaggagcttaggctcccaaaggcacgtgtcgttggctaagtccgttcggcggaagcgtcgtttggaccgccttgaattataattaccaccgagcggcgggtagaatcctttgcagacgacttaaatacgcgacggggtattgtaagtggcagagtggccttgctgccacgatccactgagattcagccctttgtcgctaagattcg

SEQ ID NO: 45607 - protein, 98 aa, Arabidopsis thaliana
  peptide (1)..(98): Ceres Seq. ID no. 13591676
MEQCRQGKSAKWIRNFGKRIGSEGWARGSQFRTRRLSADCSSCFRGESGSPRAGRGTDWERLSRELYPGVEQSAQNWYGQGESDCLIKTKHCDGPCGC

SEQ ID NO: 45608 - protein, 55 aa, Arabidopsis thaliana
  peptide (1)..(55): Ceres Seq. ID no. 13591677
  misc_feature (1)..(41): Homolog of NCBI NO: 34876464 NR Description: similar to putative transcription factor [Rattus
  misc_feature (1)..(39): Homolog of NCBI NO: 5531330 NR Description: putative transcription factor [Periplaneta
  misc_feature (1)..(41): Homolog of NCBI NO: 34876464 NR Description: similar to putative transcription factor [Rattus
  misc_feature (1)..(39): Homolog of NCBI NO: 5531330 NR Description: putative transcription factor [Periplaneta
  misc_feature (1)..(41): Homolog of NCBI NO: 34876464 NR Description: similar to putative transcription factor [Rattus
  misc_feature (1)..(39): Homolog of NCBI NO: 5531330 NR Description: putative transcription factor [Periplaneta
  misc_feature (1)..(41): Homolog of NCBI NO: 34876464 NR Description: similar to putative transcription factor [Rattus
  misc_feature (1)..(39): Homolog of NCBI NO: 5531330 NR Description: putative transcription factor [Periplaneta
  misc_feature (1)..(41): Homolog of NCBI NO: 34876464 NR Description: similar to putative transcription factor [Rattus
  misc_feature (1)..(39): Homolog of NCBI NO: 5531330 NR Description: putative transcription factor [Periplaneta
MPRHLISDAHEWINEIPTVPVYYPAKPQPRERAWQNQRGKKTLLSLTLVRLCEMT

SEQ ID NO: 45609 - DNA, 2211 bp, Arabidopsis thaliana
  misc_feature (1)..(2211): Ceres Seq. ID no. 14302809
  misc_feature: MA Experiment ID: 20000182 Result: Up-regulated in Transcription
  misc_feature: MA Experiment 20000182 PARAMETER Experiment Name: At_2mM_SA_P Parameter: Age (day) Value: 14
  misc_feature: MA Experiment 20000182 PARAMETER Experiment Name: At_2mM_SA_P Parameter: Organism Value: A. thaliana
  misc_feature: MA Experiment 20000182 PARAMETER Experiment Name: At_2mM_SA_P Parameter: Plant Line Value: WS
  misc_feature: MA Experiment 20000182 PARAMETER Experiment Name: At_2mM_SA_P Parameter: Timepoint (hr) Value: 6
  misc_feature: MA Experiment 20000182 PARAMETER Experiment Name: At_2mM_SA_P Parameter: Tissue Value: Aerial
  misc_feature: MA Experiment 20000182 PARAMETER Experiment Name: At_2mM_SA_P Parameter: Treatment Value: 2mM SA vs. No Treatment
  misc_feature: MA Experiment ID: 20000184 Result: Down-regulated in Transcription
  misc_feature: MA Experiment 20000184 PARAMETER Experiment Name: At_Shoots__P Parameter: Age (day) Value: 7
  misc_feature: MA Experiment 20000184 PARAMETER Experiment Name: At_Shoots__P Parameter: Tissue Value: Shoots vs. Whole Plant
  misc_feature: MA Experiment ID: 20000437 Result: Up-regulated in Transcription
  misc_feature: MA Experiment 20000437 PARAMETER Experiment Name: At_Drought_P Parameter: Age (day) Value: 8
  misc_feature: MA Experiment 20000437 PARAMETER Experiment Name: At_Drought_P Parameter: Organism Value: A. thaliana
  misc_feature: MA Experiment 20000437 PARAMETER Experiment Name: At_Drought_P Parameter: Plant Line Value: WS
  misc_feature: MA Experiment 20000437 PARAMETER Experiment Name: At_Drought_P Parameter: Timepoint (hr) Value: 24
  misc_feature: MA Experiment 20000437 PARAMETER Experiment Name: At_Drought_P Parameter: Tissue Value: Whole Plant
  misc_feature: MA Experiment 20000437 PARAMETER Experiment Name: At_Drought_P Parameter: Treatment Value: Drought vs. No Drought
  misc_feature: MA Experiment ID: 20000438 Result: Down-regulated in Transcription
  misc_feature: MA Experiment 20000438 PARAMETER Experiment Name: At_Shoots__P Parameter: Age (day) Value: 14
  misc_feature: MA Experiment 20000438 PARAMETER Experiment Name: At_Shoots__P Parameter: Tissue Value: Shoots vs. Whole Plant
  misc_feature: MA Experiment ID: 20001247 Result: Up-regulated in Transcription
  misc_feature: MA Experiment 20001247 PARAMETER Experiment Name: At_Far-red-induction_P Parameter: Age (day) Value: 7
  misc_feature: MA Experiment 20001247 PARAMETER Experiment Name: At_Far-red-induction_P Parameter: Light Value: Far-red vs. White
  misc_feature: MA Experiment 20001247 PARAMETER Experiment Name: At_Far-red-induction_P Parameter: Organism Value: A. thaliana
  misc_feature: MA Experiment 20001247 PARAMETER Experiment Name: At_Far-red-induction_P Parameter: Plant Line Value: Columbia
  misc_feature: MA Experiment 20001247 PARAMETER Experiment Name: At_Far-red-induction_P Parameter: Timepoint (hr) Value: 1
  misc_feature: MA Experiment 20001247 PARAMETER Experiment Name: At_Far-red-induction_P Parameter: Tissue Value: Whole Plant
aacttaaacggcgtttactgcttcaagataaaatacgctttgcccaaaaaacgttattagttcgtaatccgtttttgctctcccttttgagatcttttaattaaaaaaattccgttttaagtgaatgcgtgtaagcaacagttcgaattcgaagcgagagctaaaatcaaaatctctctgatttgttgttttgttgatgttttatgaagtgatttgcattagattggattgaaatggctacggagcctacaaggagctggttccagatacggcagcagaaaccggataaatcaagccctactaaaaagggacaagagggaaatgtgaagaatcttgggagacctcctatgaatgatgcaccatctaatgctactaaacagaaagttgctgcagcgaagcaatatatcgagaatcattataaaattcagaagaagagtctccaggaaagaaaagagcgtcggagcatcttggaacaaaacctagctgatgctgatgttactgttgaagacaagatggatatattaaagaactttgagaaaaaggaaatggagtatatgcgtctacaaagacagaaaatgggggttgatgactttgaactgcttagcatcattggccggggtgctttcggtgaggtgagaatttgtaaagaaaaatctactggaagcgtatatgcaatgaaaaagttaaagaaatccgagatgcttcgacgagggcaggtggaacatgttaaagctgaaagaaatgtgcttgcagaagtggatagccctttcattgtcaagctttgttactctttccaagatgatgagcatttgtatcttattatggaatacctccctggaggtgatatgatgacactgctgatgcgaaaggataccttacgggaagatgagactcggttttatgttgcgcagacaattctggctattgagtctatccataagcataattacgtccacagggatataaagcctgataatttattgattactcgaaacggccatatcaagctttcagattttggattgagcaagtctctggaaagcaaaaattttccagattttaaggcggagcttgttgacaggagtacaaagcctgcagcagaacatgatagactctccaagcctccttctgcacctaggagaactcagcaggaacagcttttacattggcaacaaaacagaaggaccctggctttttctacagtaggaactcccgattacattgcccctgaggtgctgctgaagaaagggtatggaatggagtgtgattggtggtctcttggagcaatcatgttcgagatgcttgtagggtttccgccattctattccgaagaacctttggcaacatgtagaaagtttatctctgcagattgtaaactggaaaacctgcttgaagttccctgatgaagctaagctctccatcgaggtaaaagatctcatccgaagactgctctgcaatgtcgaacagaggcttgggaccaaaggagttcacgaaatcaaagcacacccttggtttaggggagtcgaatgggaacggctatatgagtcaaatgctccatatataccacaagtgaagcatgagcttgatacccaaaactttgaaaagtttgatgaggtaccatctactagccaaacttcttcaaagtctagcccttggagaaagatgatctcatccaaagatgcaaatttccttggttatacattcaagaatctggagatagttgatgaacaccatatccctggcatggcggaactgaagcggaagagtaagacagcaaataaaccatctctcaaaacactcttcgaaacaccatatcctccttctgagaatcaagccttaaaggatttgcttgattcacctatttactctgaaggctctagagggtcttccggatcaccattttcacgaccgaatcaatcacaggcccggagatgatcaaaagggaaaatctaaaagtgattaagaacaaacaaagtaaaagtaaaaaaaaaggtagtcattgttcttcagttgcaaattttcatcttttcatacatatatactctgtaatgtaaaaaaaaaacagtgaacatccgaaagagaatcaaaaccaaaatgcatataggaaactttataggtatacaaacatattccaatgtttctgtgatccccaattatctaaccttgtaagctcttttatttttatttttgcttataaatatttacatacat

SEQ ID NO: 45610 - protein, 389 aa, Arabidopsis thaliana
  peptide (1)..(389): Ceres Seq. ID no. 14302810
  misc_feature (120)..(377): Pfam Name: Protein kinase domain Pfam Description: Protein kinase domain
  misc_feature (37)..(377): Homolog of NCBI NO: 25287691 NR Description: hypothetical protein [imported] - Arabidopsis
  misc_feature (37)..(377): Homolog of NCBI NO: 15219591 NR Description: protein kinase, putative [Arabidopsis thaliana]
  misc_feature (4)..(377): Homolog of NCBI NO: 15225358 NR Description: protein kinase, putative [Arabidopsis thaliana]
  misc_feature (4)..(377): Homolog of NCBI NO: 1076632 NR Description: protein kinase PKTL7 (EC 2.7.1.-) - common
  misc_feature (4)..(377): Homolog of NCBI NO: 22331282 NR Description: protein kinase, putative [Arabidopsis thaliana]
  misc_feature (4)..(377): Homolog of NCBI NO: 30682806 NR Description: protein kinase [Arabidopsis thaliana]
  misc_feature (4)..(377): Homolog of NCBI NO: 37535354 NR Description: putative protein kinase [Oryza sativa (japonica
  misc_feature (1)..(377): Homolog of NCBI NO: 7339534 NR Description: protein kinase MK6 [Mesembryanthemum crystallinum]
  misc_feature (1)..(377): Homolog of NCBI NO: 25287693 NR Description: protein kinase T5I8.9 protein - Arabidopsis
  misc_feature (1)..(377): Homolog of NCBI NO: 15221465 NR Description: protein kinase, putative [Arabidopsis thaliana]
MATEPTRSWFQIRQQKPDKSSPTKKGQEGNVKNLGRPPMNDAPSNATKQKVAAAKQYIENHYKIQKKSLQERKERRSILEQNLADADVTVEDKMDILKNFEKKEMEYMRLQRQKMGVDDFELLSIIGRGAFGEVRICKEKSTGSVYAMKKLKKSEMLRRGQVEHVKAERNVLAEVDSPFIVKLCYSFQDDEHLYLIMEYLPGGDMMTLLMRKDTLREDETRFYVAQTILAIESIHKHNYVHRDIKPDNLLITRNGHIKLSDFGLSKSLESKNFPDFKAELVDRSTKPAAEHDRLSKPPSAPRRTQQEQLLHWQQNRRTLAFSTVGTPDYIAPEVLLKKGYGMECDWWSLGAIMFEMLVGFPPFYSEEPLATCRKFISADCKLENLLEVP

SEQ ID NO: 45611 - protein, 351 aa, Arabidopsis thaliana
  peptide (1)..(351): Ceres Seq. ID no. 14302811
  misc_feature (82)..(339): Pfam Name: Protein kinase domain Pfam Description: Protein kinase domain
  misc_feature (1)..(339): Homolog of NCBI NO: 25287691 NR Description: hypothetical protein [imported] - Arabidopsis
  misc_feature (1)..(339): Homolog of NCBI NO: 15219591 NR Description: protein kinase, putative [Arabidopsis thaliana]
  misc_feature (1)..(339): Homolog of NCBI NO: 15225358 NR Description: protein kinase, putative [Arabidopsis thaliana]
  misc_feature (1)..(339): Homolog of NCBI NO: 1076632 NR Description: protein kinase PKTL7 (EC 2.7.1.-) - common
  misc_feature (1)..(339): Homolog of NCBI NO: 22331282 NR Description: protein kinase, putative [Arabidopsis thaliana]
  misc_feature (1)..(339): Homolog of NCBI NO: 30682806 NR Description: protein kinase [Arabidopsis thaliana]
  misc_feature (1)..(339): Homolog of NCBI NO: 37535354 NR Description: putative protein kinase [Oryza sativa (japonica
  misc_feature (1)..(339): Homolog of NCBI NO: 7339534 NR Description: protein kinase MK6 [Mesembryanthemum crystallinum]
  misc_feature (1)..(339): Homolog of NCBI NO: 25287693 NR Description: protein kinase T5I8.9 protein - Arabidopsis
  misc_feature (1)..(339): Homolog of NCBI NO: 15221465 NR Description: protein kinase, putative [Arabidopsis thaliana]
MNDAPSNATKQKVAAAKQYIENHYKIQKKSLQERKERRSILEQNLADADVTVEDKMDILKNFEKKEMEYMRLQRQKMGVDDFELLSIIGRGAFGEVRICKEKSTGSVYAMKKLKKSEMLRRGQVEHVKAERNVLAEVDSPFIVKLCYSFQDDEHLYLIMEYLPGGDMMTLLMRKDTLREDETRFYVAQTILAIESIHKHNYVHRDIKPDNLLITRNGHIKLSDFGLSKSLESKNFPDFKAELVDRSTKPAAEHDRLSKPPSAPRRTQQEQLLHWQQNRRTLAFSTVGTPDYIAPEVLLKKGYGMECDWWSLGAIMFEMLVGFPPFYSEEPLATCRKFISADCKLENLLEVP

SEQ ID NO: 45612 - protein, 296 aa, Arabidopsis thaliana
  peptide (1)..(296): Ceres Seq. ID no. 14302812
  misc_feature (27)..(284): Pfam Name: Protein kinase domain Pfam Description: Protein kinase domain
  misc_feature (1)..(284): Homolog of NCBI NO: 25287691 NR Description: hypothetical protein [imported] - Arabidopsis
  misc_feature (1)..(284): Homolog of NCBI NO: 15219591 NR Description: protein kinase, putative [Arabidopsis thaliana]
  misc_feature (1)..(284): Homolog of NCBI NO: 15225358 NR Description: protein kinase, putative [Arabidopsis thaliana]
  misc_feature (1)..(284): Homolog of NCBI NO: 1076632 NR Description: protein kinase PKTL7 (EC 2.7.1.-) - common
  misc_feature (1)..(284): Homolog of NCBI NO: 22331282 NR Description: protein kinase, putative [Arabidopsis thaliana]
  misc_feature (1)..(284): Homolog of NCBI NO: 30682806 NR Description: protein kinase [Arabidopsis thaliana]
  misc_feature (1)..(284): Homolog of NCBI NO: 37535354 NR Description: putative protein kinase [Oryza sativa (japonica
  misc_feature (1)..(284): Homolog of NCBI NO: 7339534 NR Description: protein kinase MK6 [Mesembryanthemum crystallinum]
  misc_feature (1)..(284): Homolog of NCBI NO: 25287693 NR Description: protein kinase T5I8.9 protein - Arabidopsis
  misc_feature (1)..(284): Homolog of NCBI NO: 15221465 NR Description: protein kinase, putative [Arabidopsis thaliana]
MDILKNFEKKEMEYMRLQRQKMGVDDFELLSIIGRGAFGEVRICKEKSTGSVYAMKKLKKSEMLRRGQVEHVKAERNVLAEVDSPFIVKLCYSFQDDEHLYLIMEYLPGGDMMTLLMRKDTLREDETRFYVAQTILAIESIHKHNYVHRDIKPDNLLITRNGHIKLSDFGLSKSLESKNFPDFKAELVDRSTKPAAEHDRLSKPPSAPRRTQQEQLLHWQQNRRTLAFSTVGTPDYIAPEVLLKKGYGMECDWWSLGAIMFEMLVGFPPFYSEEPLATCRKFISADCKLENLLEVP

SEQ ID NO: 45613 - DNA, 2745 bp, Arabidopsis thaliana; identical to SEQ ID NO: 45606
  misc_feature (1)..(2745): Ceres Seq. ID no. 13591675
  misc_feature: MA Experiment ID: 20000185 Result: Down-regulated in Transcription
  misc_feature: MA Experiment 20000185 PARAMETER Experiment Name: At_Roots__P Parameter: Age (day) Value: 7 vs. 21
  misc_feature: MA Experiment 20000185 PARAMETER Experiment Name: At_Roots__P Parameter: Organism Value: A. thaliana
  misc_feature: MA Experiment 20000185 PARAMETER Experiment Name: At_Roots__P Parameter: Tissue Value: Roots vs. Whole Plant
  misc_feature: MA Experiment ID: 20000234 Result: Down-regulated in Transcription
  misc_feature: MA Experiment 20000234 PARAMETER Experiment Name: At_Siliques_P Parameter: Age (day) Value: 21
  misc_feature: MA Experiment 20000234 PARAMETER Experiment Name: At_Siliques_P Parameter: Organism Value: A. thaliana
  misc_feature: MA Experiment 20000234 PARAMETER Experiment Name: At_Siliques_P Parameter: Plant Line Value: WS
  misc_feature: MA Experiment 20000234 PARAMETER Experiment Name: At_Siliques_P Parameter: Tissue Value: Less Than 5mm Siliques vs. Whole Plant
  misc_feature: MA Experiment ID: 20000286 Result: Down-regulated in Transcription
  misc_feature: MA Experiment 20000286 PARAMETER Experiment Name: At_Open_Flower_P Parameter: Age (day) Value: 21
  misc_feature: MA Experiment 20000286 PARAMETER Experiment Name: At_Open_Flower_P Parameter: Plant Line Value: WS
  misc_feature: MA Experiment 20000286 PARAMETER Experiment Name: At_Open_Flower_P Parameter: Tissue Value: Half Open vs. Whole Plant
  misc_feature: MA Experiment ID: 20000445 Result: Down-regulated in Transcription
  misc_feature: MA Experiment 20000445 PARAMETER Experiment Name: At_100uM_NAA__P Parameter: Age (day) Value: 14
  misc_feature: MA Experiment 20000445 PARAMETER Experiment Name: At_100uM_NAA__P Parameter: Organism Value: A. thaliana
  misc_feature: MA Experiment 20000445 PARAMETER Experiment Name: At_100uM_NAA__P Parameter: Plant Line Value: WS
  misc_feature: MA Experiment 20000445 PARAMETER Experiment Name: At_100uM_NAA__P Parameter: Timepoint (hr) Value: 6
  misc_feature: MA Experiment 20000445 PARAMETER Experiment Name: At_100uM_NAA__P Parameter: Tissue Value: Aerial
  misc_feature: MA Experiment 20000445 PARAMETER Experiment Name: At_100uM_NAA__P Parameter: Treatment Value: 100uM NAA vs. No Treatment
  misc_feature: MA Experiment ID: 20000496 Result: Up-regulated in Transcription
  misc_feature: MA Experiment 20000496 PARAMETER Experiment Name: At_Guard_Cells_P Parameter: Harvest Date Value: 7/19/2002
  misc_feature: MA Experiment 20000496 PARAMETER Experiment Name: At_Guard_Cells_P Parameter: Organism Value: Canola
  misc_feature: MA Experiment 20000496 PARAMETER Experiment Name: At_Guard_Cells_P Parameter: Tissue Value: Guard Cells vs. Leaves
  misc_feature: MA Experiment ID: 20000709 Result: Down-regulated in Transcription
  misc_feature: MA Experiment 20000709 PARAMETER Experiment Name: At_15mM_NH4NO3_L-to-H_P Parameter: Age (hr) Value: 14
  misc_feature: MA Experiment 20000709 PARAMETER Experiment Name: At_15mM_NH4NO3_L-to-H_P Parameter: Organism Value: A. thaliana
  misc_feature: MA Experiment 20000709 PARAMETER Experiment Name: At_15mM_NH4NO3_L-to-H_P Parameter: Plant Line Value: WS
  misc_feature: MA Experiment 20000709 PARAMETER Experiment Name: At_15mM_NH4NO3_L-to-H_P Parameter: Timepoint (hr) Value: 4
  misc_feature: MA Experiment 20000709 PARAMETER Experiment Name: At_15mM_NH4NO3_L-to-H_P Parameter: Tissue Value: Aerial
  misc_feature: MA Experiment 20000709 PARAMETER Experiment Name: At_15mM_NH4NO3_L-to-H_P Parameter: Treatment Value: 15mM NH4NO3 vs. 30mM Mannitol
  misc_feature: MA Experiment ID: 20001451 Result: Up-regulated in Transcription
  misc_feature: MA Experiment 20001451 PARAMETER Experiment Name: At_Far-red-induction_P Parameter: Age (day) Value: 7
  misc_feature: MA Experiment 20001451 PARAMETER Experiment Name: At_Far-red-induction_P Parameter: Light Value: Far-red vs. White
  misc_feature: MA Experiment 20001451 PARAMETER Experiment Name: At_Far-red-induction_P Parameter: Organism Value: A. thaliana
  misc_feature: MA Experiment 20001451 PARAMETER Experiment Name: At_Far-red-induction_P Parameter: Plant Line Value: Columbia
  misc_feature: MA Experiment 20001451 PARAMETER Experiment Name: At_Far-red-induction_P Parameter: Timepoint (hr) Value: 24
  misc_feature: MA Experiment 20001451 PARAMETER Experiment Name: At_Far-red-induction_P Parameter: Tissue Value: Whole Plant
  misc_feature: MA Experiment ID: 20001557 Result: Up-regulated in Transcription
  misc_feature: MA Experiment 20001557 PARAMETER Experiment Name: At_Drought_Soil_Dry_P Parameter: Age (day) Value: 27
  misc_feature: MA Experiment 20001557 PARAMETER Experiment Name: At_Drought_Soil_Dry_P Parameter: Organism Value: A. thaliana
  misc_feature: MA Experiment 20001557 PARAMETER Experiment Name: At_Drought_Soil_Dry_P Parameter: Plant Line Value: WS
  misc_feature: MA Experiment 20001557 PARAMETER Experiment Name: At_Drought_Soil_Dry_P Parameter: Post Timepoint (hr) Value: 3
  misc_feature: MA Experiment 20001557 PARAMETER Experiment Name: At_Drought_Soil_Dry_P Parameter: Post-Treatment Value: Re-Water vs. No Drought
  misc_feature: MA Experiment 20001557 PARAMETER Experiment Name: At_Drought_Soil_Dry_P Parameter: Timepoint (day) Value: 13
  misc_feature: MA Experiment 20001557 PARAMETER Experiment Name: At_Drought_Soil_Dry_P Parameter: Treatment Value: Drought vs. No Drought
  misc_feature: MA Experiment ID: 20001756 Result: Down-regulated in Transcription
  misc_feature: MA Experiment 20001756 PARAMETER Experiment Name: At_50mM_NH4NO3_L-to-H_P Parameter: Timepoint (hr) Value: 4
  misc_feature: MA Experiment 20001756 PARAMETER Experiment Name: At_50mM_NH4NO3_L-to-H_P Parameter: Tissue Value: Leaf
  misc_feature: MA Experiment 20001756 PARAMETER Experiment Name: At_50mM_NH4NO3_L-to-H_P Parameter: Treatment Value: 50mM NH4NO3 vs 100mM Mannitol
  misc_feature: MA Experiment ID: 20001757 Result: Up-regulated in Transcription
  misc_feature: MA Experiment 20001757 PARAMETER Experiment Name: At_50mM_NH4NO3_L-to-H_P Parameter: Timepoint (hr) Value: 6
  misc_feature: MA Experiment 20001757 PARAMETER Experiment Name: At_50mM_NH4NO3_L-to-H_P Parameter: Tissue Value: Leaf
  misc_feature: MA Experiment 20001757 PARAMETER Experiment Name: At_50mM_NH4NO3_L-to-H_P Parameter: Treatment Value: 50mM NH4NO3 vs 100mM Mannitol
  misc_feature: MA Experiment ID: 20001761 Result: Up-regulated in Transcription
  misc_feature: MA Experiment 20001761 PARAMETER Experiment Name: At_50mM_NH4NO3_L-to-H_P Parameter: Timepoint (hr) Value: 4
  misc_feature: MA Experiment 20001761 PARAMETER Experiment Name: At_50mM_NH4NO3_L-to-H_P Parameter: Tissue Value: Siliques
  misc_feature: MA Experiment 20001761 PARAMETER Experiment Name: At_50mM_NH4NO3_L-to-H_P Parameter: Treatment Value: 50mM NH4NO3 vs 100mM Mannitol

SEQ ID NO: 45614 - protein, 98 aa, Arabidopsis thaliana; identical to SEQ ID NO: 45607
  peptide (1)..(98): Ceres Seq. ID no. 13591676

SEQ ID NO: 45615 - protein, 55 aa, Arabidopsis thaliana; identical to SEQ ID NO: 45608
  peptide (1)..(55): Ceres Seq. ID no. 13591677
  misc_feature (1)..(41): Homolog of NCBI NO: 34876464 NR Description: similar to putative transcription factor [Rattus
  misc_feature (1)..(39): Homolog of NCBI NO: 5531330 NR Description: putative transcription factor [Periplaneta
  misc_feature (1)..(41): Homolog of NCBI NO: 34876464 NR Description: similar to putative transcription factor [Rattus
  misc_feature (1)..(39): Homolog of NCBI NO: 5531330 NR Description: putative transcription factor [Periplaneta
  misc_feature (1)..(41): Homolog of NCBI NO: 34876464 NR Description: similar to putative transcription factor [Rattus
  misc_feature (1)..(39): Homolog of NCBI NO: 5531330 NR Description: putative transcription factor [Periplaneta
  misc_feature (1)..(41): Homolog of NCBI NO: 34876464 NR Description: similar to putative transcription factor [Rattus
  misc_feature (1)..(39): Homolog of NCBI NO: 5531330 NR Description: putative transcription factor [Periplaneta
  misc_feature (1)..(41): Homolog of NCBI NO: 34876464 NR Description: similar to putative transcription factor [Rattus
  misc_feature (1)..(39): Homolog of NCBI NO: 5531330 NR Description: putative transcription factor [Periplaneta

SEQ ID NO: 45616 - DNA, 2045 bp, Arabidopsis thaliana; identical to SEQ ID NO: 45453
  misc_feature (1)..(2045): Ceres Seq. ID no. 13646591
  misc_feature: MA Experiment ID: 20000171 Result: Up-regulated in Transcription
  misc_feature: MA Experiment 20000171 PARAMETER Experiment Name: At_42deg_Heat_P Parameter: Age (day) Value: 14
  misc_feature: MA Experiment 20000171 PARAMETER Experiment Name: At_42deg_Heat_P Parameter: Organism Value: A. thaliana
  misc_feature: MA Experiment 20000171 PARAMETER Experiment Name: At_42deg_Heat_P Parameter: Plant Line Value: WS
  misc_feature: MA Experiment 20000171 PARAMETER Experiment Name: At_42deg_Heat_P Parameter: Temperature (deg C) Value: 42 vs. 22
  misc_feature: MA Experiment 20000171 PARAMETER Experiment Name: At_42deg_Heat_P Parameter: Timepoint (hr) Value: 1
  misc_feature: MA Experiment 20000171 PARAMETER Experiment Name: At_42deg_Heat_P Parameter: Tissue Value: Aerial
  misc_feature: MA Experiment ID: 20000173 Result: Up-regulated in Transcription
  misc_feature: MA Experiment 20000173 PARAMETER Experiment Name: At_42deg_Heat_P Parameter: Age (day) Value: 14
  misc_feature: MA Experiment 20000173 PARAMETER Experiment Name: At_42deg_Heat_P Parameter: Organism Value: A. thaliana
  misc_feature: MA Experiment 20000173 PARAMETER Experiment Name: At_42deg_Heat_P Parameter: Plant Line Value: WS
  misc_feature: MA Experiment 20000173 PARAMETER Experiment Name: At_42deg_Heat_P Parameter: Temperature (deg C) Value: 42 vs. 22
  misc_feature: MA Experiment 20000173 PARAMETER Experiment Name: At_42deg_Heat_P Parameter: Timepoint (hr) Value: 6
  misc_feature: MA Experiment 20000173 PARAMETER Experiment Name: At_42deg_Heat_P Parameter: Tissue Value: Aerial
  misc_feature: MA Experiment ID: 20000185 Result: Up-regulated in Transcription
  misc_feature: MA Experiment 20000185 PARAMETER Experiment Name: At_Roots__P Parameter: Age (day) Value: 7 vs. 21
  misc_feature: MA Experiment 20000185 PARAMETER Experiment Name: At_Roots__P Parameter: Organism Value: A. thaliana
  misc_feature: MA Experiment 20000185 PARAMETER Experiment Name: At_Roots__P Parameter: Tissue Value: Roots vs. Whole Plant
  misc_feature: MA Experiment ID: 20000227 Result: Up-regulated in Transcription
  misc_feature: MA Experiment 20000227 PARAMETER Experiment Name: At_Root-Tips-vs-Tops_P Parameter: Tissue Value: Root Tips vs. Root Tops
  misc_feature: MA Experiment ID: 20000234 Result: Up-regulated in Transcription
  misc_feature: MA Experiment 20000234 PARAMETER Experiment Name: At_Siliques_P Parameter: Age (day) Value: 21
  misc_feature: MA Experiment 20000234 PARAMETER Experiment Name: At_Siliques_P Parameter: Organism Value: A. thaliana
  misc_feature: MA Experiment 20000234 PARAMETER Experiment Name: At_Siliques_P Parameter: Plant Line Value: WS
  misc_feature: MA Experiment 20000234 PARAMETER Experiment Name: At_Siliques_P Parameter: Tissue Value: Less Than 5mm Siliques vs. Whole Plant
  misc_feature: MA Experiment ID: 20000264 Result: Up-regulated in Transcription
  misc_feature: MA Experiment 20000264 PARAMETER Experiment Name: At_Open_Flower_P Parameter: Age (day) Value: 21
  misc_feature: MA Experiment 20000264 PARAMETER Experiment Name: At_Open_Flower_P Parameter: Plant Line Value: WS
  misc_feature: MA Experiment 20000264 PARAMETER Experiment Name: At_Open_Flower_P Parameter: Tissue Value: Open Flower vs. Whole Plant
  misc_feature: MA Experiment ID: 20001557 Result: Up-regulated in Transcription
  misc_feature: MA Experiment 20001557 PARAMETER Experiment Name: At_Drought_Soil_Dry_P Parameter: Age (day) Value: 27
  misc_feature: MA Experiment 20001557 PARAMETER Experiment Name: At_Drought_Soil_Dry_P Parameter: Organism Value: A. thaliana
  misc_feature: MA Experiment 20001557 PARAMETER Experiment Name: At_Drought_Soil_Dry_P Parameter: Plant Line Value: WS
  misc_feature: MA Experiment 20001557 PARAMETER Experiment Name: At_Drought_Soil_Dry_P Parameter: Post Timepoint (hr) Value: 3
  misc_feature: MA Experiment 20001557 PARAMETER Experiment Name: At_Drought_Soil_Dry_P Parameter: Post-Treatment Value: Re-Water vs. No Drought
  misc_feature: MA Experiment 20001557 PARAMETER Experiment Name: At_Drought_Soil_Dry_P Parameter: Timepoint (day) Value: 13
  misc_feature: MA Experiment 20001557 PARAMETER Experiment Name: At_Drought_Soil_Dry_P Parameter: Treatment Value: Drought vs. No Drought
  misc_feature: MA Experiment ID: 20001558 Result: Up-regulated in Transcription
  misc_feature: MA Experiment 20001558 PARAMETER Experiment Name: At_Drought_Soil_Dry_P Parameter: Age (day) Value: 27
  misc_feature: MA Experiment 20001558 PARAMETER Experiment Name: At_Drought_Soil_Dry_P Parameter: Organism Value: A. thaliana
  misc_feature: MA Experiment 20001558 PARAMETER Experiment Name: At_Drought_Soil_Dry_P Parameter: Plant Line Value: WS
  misc_feature: MA Experiment 20001558 PARAMETER Experiment Name: At_Drought_Soil_Dry_P Parameter: Post Timepoint (hr) Value: 6
  misc_feature: MA Experiment 20001558 PARAMETER Experiment Name: At_Drought_Soil_Dry_P Parameter: Post-Treatment Value: Re-Water vs. No Drought
  misc_feature: MA Experiment 20001558 PARAMETER Experiment Name: At_Drought_Soil_Dry_P Parameter: Timepoint (day) Value: 13
  misc_feature: MA Experiment 20001558 PARAMETER Experiment Name: At_Drought_Soil_Dry_P Parameter: Treatment Value: Drought vs. No Drought

SEQ ID NO: 45617 - protein, 549 aa, Arabidopsis thaliana; identical to SEQ ID NO: 45454
  peptide (1)..(549): Ceres Seq. ID no. 13646592
  misc_feature (39)..(525): Pfam Name: TCP-1/cpn60 chaperonin family Pfam Description: TCP-1/cpn60 chaperonin family
  misc_feature (39)..(525): Pfam Name: TCP-1/cpn60 chaperonin family Pfam Description: TCP-1/cpn60 chaperonin family
  misc_feature (10)..(537): Homolog of NCBI NO: 23478707 NR Description: T-complex protein 1 [Plasmodium yoelii yoelii]
  misc_feature (10)..(535): Homolog of NCBI NO: 1136741 NR Description: KIAA0002 [Homo sapiens]
  misc_feature (10)..(535): Homolog of NCBI NO: 9988062 NR Description: T-complex protein 1, theta subunit (TCP-1-theta)
  misc_feature (10)..(535): Homolog of NCBI NO: 37362194 NR Description: chaperonin containing TCP1, subunit 8 (theta)
  misc_feature (10)..(535): Homolog of NCBI NO: 29791676 NR Description: Similar to chaperonin containing TCP1, subunit 8
  misc_feature (10)..(537): Homolog of NCBI NO: 23478707 NR Description: T-complex protein 1 [Plasmodium yoelii yoelii]
  misc_feature (10)..(535): Homolog of NCBI NO: 9988062 NR Description: T-complex protein 1, theta subunit (TCP-1-theta)
  misc_feature (10)..(535): Homolog of NCBI NO: 29791676 NR Description: Similar to chaperonin containing TCP1, subunit 8
  misc_feature (1)..(549): Homolog of NCBI NO: 18396719 NR Description: chaperonin, putative [Arabidopsis thaliana]
  misc_feature (1)..(525): Homolog of NCBI NO: 6223641 NR Description: putative T-complex protein 1, theta subunit
  misc_feature (10)..(535): Homolog of NCBI NO: 28829459 NR Description: similar to Physarum polycephalum (Slime mold).
  misc_feature (11)..(535): Homolog of NCBI NO: 17066726 NR Description: CCT chaperonin theta subunit [Physarum
  misc_feature (10)..(535): Homolog of NCBI NO: 27924345 NR Description: Similar to chaperonin containing TCP1, subunit 8
  misc_feature (10)..(535): Homolog of NCBI NO: 37362194 NR Description: chaperonin containing TCP1, subunit 8 (theta)
  misc_feature (10)..(535): Homolog of NCBI NO: 1136741 NR Description: KIAA0002 [Homo sapiens]
  misc_feature (10)..(535): Homolog of NCBI NO: 27924345 NR Description: Similar to chaperonin containing TCP1, subunit 8
  misc_feature (11)..(535): Homolog of NCBI NO: 17066726 NR Description: CCT chaperonin theta subunit [Physarum
  misc_feature (10)..(535): Homolog of NCBI NO: 28829459 NR Description: similar to Physarum polycephalum (Slime mold).
  misc_feature (1)..(525): Homolog of NCBI NO: 6223641 NR Description: putative T-complex protein 1, theta subunit
  misc_feature (1)..(549): Homolog of NCBI NO: 18396719 NR Description: chaperonin, putative [Arabidopsis thaliana]

SEQ ID NO: 45618 - protein, 546 aa, Arabidopsis thaliana; identical to SEQ ID NO: 45455
  peptide (1)..(546): Ceres Seq. ID no. 13646593
  misc_feature (36)..(522): Pfam Name: TCP-1/cpn60 chaperonin family Pfam Description: TCP-1/cpn60 chaperonin family
  misc_feature (36)..(522): Pfam Name: TCP-1/cpn60 chaperonin family Pfam Description: TCP-1/cpn60 chaperonin family
  misc_feature (7)..(534): Homolog of NCBI NO: 23478707 NR Description: T-complex protein 1 [Plasmodium yoelii yoelii]
  misc_feature (7)..(532): Homolog of NCBI NO: 1136741 NR Description: KIAA0002 [Homo sapiens]
  misc_feature (7)..(532): Homolog of NCBI NO: 9988062 NR Description: T-complex protein 1, theta subunit (TCP-1-theta)
  misc_feature (7)..(532): Homolog of NCBI NO: 37362194 NR Description: chaperonin containing TCP1, subunit 8 (theta)
  misc_feature (7)..(532): Homolog of NCBI NO: 29791676 NR Description: Similar to chaperonin containing TCP1, subunit 8
  misc_feature (7)..(534): Homolog of NCBI NO: 23478707 NR Description: T-complex protein 1 [Plasmodium yoelii yoelii]
  misc_feature (7)..(532): Homolog of NCBI NO: 9988062 NR Description: T-complex protein 1, theta subunit (TCP-1-theta)
  misc_feature (7)..(532): Homolog of NCBI NO: 29791676 NR Description: Similar to chaperonin containing TCP1, subunit 8
  misc_feature (1)..(546): Homolog of NCBI NO: 18396719 NR Description: chaperonin, putative [Arabidopsis thaliana]
  misc_feature (1)..(522): Homolog of NCBI NO: 6223641 NR Description: putative T-complex protein 1, theta subunit
  misc_feature (7)..(532): Homolog of NCBI NO: 28829459 NR Description: similar to Physarum polycephalum (Slime mold).
  misc_feature (8)..(532): Homolog of NCBI NO: 17066726 NR Description: CCT chaperonin theta subunit [Physarum
  misc_feature (7)..(532): Homolog of NCBI NO: 27924345 NR Description: Similar to chaperonin containing TCP1, subunit 8
  misc_feature (7)..(532): Homolog of NCBI NO: 37362194 NR Description: chaperonin containing TCP1, subunit 8 (theta)
  misc_feature (7)..(532): Homolog of NCBI NO: 1136741 NR Description: KIAA0002 [Homo sapiens]
  misc_feature (7)..(532): Homolog of NCBI NO: 27924345 NR Description: Similar to chaperonin containing TCP1, subunit 8
  misc_feature (8)..(532): Homolog of NCBI NO: 17066726 NR Description: CCT chaperonin theta subunit [Physarum
  misc_feature (7)..(532): Homolog of NCBI NO: 28829459 NR Description: similar to Physarum polycephalum (Slime mold).
  misc_feature (1)..(522): Homolog of NCBI NO: 6223641 NR Description: putative T-complex protein 1, theta subunit
  misc_feature (1)..(546): Homolog of NCBI NO: 18396719 NR Description: chaperonin, putative [Arabidopsis thaliana]

SEQ ID NO: 45619 - protein, 544 aa, Arabidopsis thaliana; identical to SEQ ID NO: 45456
  peptide (1)..(544): Ceres Seq. ID no. 13646594
  misc_feature (34)..(520): Pfam Name: TCP-1/cpn60 chaperonin family Pfam Description: TCP-1/cpn60 chaperonin family
  misc_feature (34)..(520): Pfam Name: TCP-1/cpn60 chaperonin family Pfam Description: TCP-1/cpn60 chaperonin family
  misc_feature (5)..(532): Homolog of NCBI NO: 23478707 NR Description: T-complex protein 1 [Plasmodium yoelii yoelii]
  misc_feature (5)..(530): Homolog of NCBI NO: 1136741 NR Description: KIAA0002 [Homo sapiens]
  misc_feature (5)..(530): Homolog of NCBI NO: 9988062 NR Description: T-complex protein 1, theta subunit (TCP-1-theta)
  misc_feature (5)..(530): Homolog of NCBI NO: 37362194 NR Description: chaperonin containing TCP1, subunit 8 (theta)
  misc_feature (5)..(530): Homolog of NCBI NO: 29791676 NR Description: Similar to chaperonin containing TCP1, subunit 8
  misc_feature (5)..(532): Homolog of NCBI NO: 23478707 NR Description: T-complex protein 1 [Plasmodium yoelii yoelii]
  misc_feature (5)..(530): Homolog of NCBI NO: 9988062 NR Description: T-complex protein 1, theta subunit (TCP-1-theta)
  misc_feature (5)..(530): Homolog of NCBI NO: 29791676 NR Description: Similar to chaperonin containing TCP1, subunit 8
  misc_feature (1)..(544): Homolog of NCBI NO: 18396719 NR Description: chaperonin, putative [Arabidopsis thaliana]
  misc_feature (1)..(520): Homolog of NCBI NO: 6223641 NR Description: putative T-complex protein 1, theta subunit
  misc_feature (5)..(530): Homolog of NCBI NO: 28829459 NR Description: similar to Physarum polycephalum (Slime mold).
  misc_feature (6)..(530): Homolog of NCBI NO: 17066726 NR Description: CCT chaperonin theta subunit [Physarum
  misc_feature (5)..(530): Homolog of NCBI NO: 27924345 NR Description: Similar to chaperonin containing TCP1, subunit 8
  misc_feature (5)..(530): Homolog of NCBI NO: 37362194 NR Description: chaperonin containing TCP1, subunit 8 (theta)
  misc_feature (5)..(530): Homolog of NCBI NO: 1136741 NR Description: KIAA0002 [Homo sapiens]
  misc_feature (5)..(530): Homolog of NCBI NO: 27924345 NR Description: Similar to chaperonin containing TCP1, subunit 8
  misc_feature (6)..(530): Homolog of NCBI NO: 17066726 NR Description: CCT chaperonin theta subunit [Physarum
  misc_feature (5)..(530): Homolog of NCBI NO: 28829459 NR Description: similar to Physarum polycephalum (Slime mold).
  misc_feature (1)..(520): Homolog of NCBI NO: 6223641 NR Description: putative T-complex protein 1, theta subunit
  misc_feature (1)..(544): Homolog of NCBI NO: 18396719 NR Description: chaperonin, putative [Arabidopsis thaliana]

SEQ ID NO: 45620 - DNA, 2811 bp, Arabidopsis thaliana; identical to SEQ ID NO: 39321
  misc_feature (1)..(2811): Ceres Seq. ID no. 13491848
  misc_feature: MA Experiment ID: 108433 Result: Down-regulated in Transcription
  misc_feature: MA Experiment 108433 PARAMETER Experiment Name: At_rhl_Mutant2_cDNA_P Parameter: Age (day) Value: 7
  misc_feature: MA Experiment 108433 PARAMETER Experiment Name: At_rhl_Mutant2_cDNA_P Parameter: Organism Value: A. thaliana
  misc_feature: MA Experiment 108433 PARAMETER Experiment Name: At_rhl_Mutant2_cDNA_P Parameter: Plant Line Value: rhl Mutant vs. wt landsburg
  misc_feature: MA Experiment 108433 PARAMETER Experiment Name: At_rhl_Mutant2_cDNA_P Parameter: Tissue Value: Roots
  misc_feature: MA Experiment ID: 108462 Result: Down-regulated in Transcription
  misc_feature: MA Experiment 108462 PARAMETER Experiment Name: At_Germinating_Seeds_cDNA_P Parameter: Age (day) Value: 2 vs. 0
  misc_feature: MA Experiment 108462 PARAMETER Experiment Name: At_Germinating_Seeds_cDNA_P Parameter: Tissue Value: Germinating Seeds

SEQ ID NO: 45621 - protein, 808 aa, Arabidopsis thaliana; identical to SEQ ID NO: 39322
  peptide (1)..(808): Ceres Seq. ID no. 13491849
  misc_feature (252)..(545): Pfam Name: Dynamin central region Pfam Description: Dynamin central region
  misc_feature (252)..(545): Pfam Name: Dynamin central region Pfam Description: Dynamin central region
  misc_feature (12)..(546): Homolog of NCBI NO: 30048092 NR Description: DNM1 protein [Homo sapiens]
  misc_feature (663)..(756): Homolog of NCBI NO: 33416854 NR Description: Unknown (protein for MGC:66163) [Danio rerio]
  misc_feature (36)..(557): Homolog of NCBI NO: 33416854 NR Description: Unknown (protein for MGC:66163) [Danio rerio]
  misc_feature (649)..(756): Homolog of NCBI NO: 2689219 NR Description: dynamin like protein [Dictyostelium discoideum]
  misc_feature (37)..(538): Homolog of NCBI NO: 2689219 NR Description: dynamin like protein [Dictyostelium discoideum]
  misc_feature (12)..(546): Homolog of NCBI NO: 30048092 NR Description: DNM1 protein [Homo sapiens]
  misc_feature (36)..(557): Homolog of NCBI NO: 33416854 NR Description: Unknown (protein for MGC:66163) [Danio rerio]
  misc_feature (37)..(538): Homolog of NCBI NO: 2689219 NR Description: dynamin like protein [Dictyostelium discoideum]
  misc_feature (1)..(474): Homolog of NCBI NO: 14334428 NR Description: putative dynamin protein ADL2 [Arabidopsis
  misc_feature (17)..(373): Homolog of NCBI NO: 19386736 NR Description: putative dynamin-like protein ADL2
  misc_feature (570)..(808): Homolog of NCBI NO: 19386736 NR Description: putative dynamin-like protein ADL2
  misc_feature (410)..(575): Homolog of NCBI NO: 19386736 NR Description: putative dynamin-like protein ADL2
  misc_feature (21)..(802): Homolog of NCBI NO: 38346632 NR Description: OSJNBa0072D21.2 [Oryza sativa (japonica
  misc_feature (649)..(756): Homolog of NCBI NO: 2689219 NR Description: dynamin like protein [Dictyostelium discoideum]
  misc_feature (663)..(756): Homolog of NCBI NO: 33416854 NR Description: Unknown (protein for MGC:66163) [Danio rerio]
  misc_feature (21)..(802): Homolog of NCBI NO: 38346632 NR Description: OSJNBa0072D21.2 [Oryza sativa (japonica
  misc_feature (410)..(575): Homolog of NCBI NO: 19386736 NR Description: putative dynamin-like protein ADL2
  misc_feature (570)..(808): Homolog of NCBI NO: 19386736 NR Description: putative dynamin-like protein ADL2
  misc_feature (17)..(373): Homolog of NCBI NO: 19386736 NR Description: putative dynamin-like protein ADL2
  misc_feature (1)..(474): Homolog of NCBI NO: 14334428 NR Description: putative dynamin protein ADL2 [Arabidopsis

SEQ ID NO: 45622 - protein, 614 aa, Arabidopsis thaliana; identical to SEQ ID NO: 39323
  peptide (1)..(614): Ceres Seq. ID no. 13491850
  misc_feature (58)..(351): Pfam Name: Dynamin central region Pfam Description: Dynamin central region
  misc_feature (58)..(351): Pfam Name: Dynamin central region Pfam Description: Dynamin central region
  misc_feature (1)..(352): Homolog of NCBI NO: 30048092 NR Description: DNM1 protein [Homo sapiens]
  misc_feature (469)..(562): Homolog of NCBI NO: 33416854 NR Description: Unknown (protein for MGC:66163) [Danio rerio]
  misc_feature (1)..(363): Homolog of NCBI NO: 33416854 NR Description: Unknown (protein for MGC:66163) [Danio rerio]
  misc_feature (455)..(562): Homolog of NCBI NO: 2689219 NR Description: dynamin like protein [Dictyostelium discoideum]
  misc_feature (1)..(344): Homolog of NCBI NO: 2689219 NR Description: dynamin like protein [Dictyostelium discoideum]
  misc_feature (1)..(352): Homolog of NCBI NO: 30048092 NR Description: DNM1 protein [Homo sapiens]
  misc_feature (1)..(363): Homolog of NCBI NO: 33416854 NR Description: Unknown (protein for MGC:66163) [Danio rerio]
  misc_feature (1)..(344): Homolog of NCBI NO: 2689219 NR Description: dynamin like protein [Dictyostelium discoideum]
  misc_feature (1)..(280): Homolog of NCBI NO: 14334428 NR Description: putative dynamin protein ADL2 [Arabidopsis
  misc_feature (1)..(179): Homolog of NCBI NO: 19386736 NR Description: putative dynamin-like protein ADL2
  misc_feature (376)..(614): Homolog of NCBI NO: 19386736 NR Description: putative dynamin-like protein ADL2
  misc_feature (216)..(381): Homolog of NCBI NO: 19386736 NR Description: putative dynamin-like protein ADL2
  misc_feature (1)..(608): Homolog of NCBI NO: 38346632 NR Description: OSJNBa0072D21.2 [Oryza sativa (japonica
  misc_feature (455)..(562): Homolog of NCBI NO: 2689219 NR Description: dynamin like protein [Dictyostelium discoideum]
  misc_feature (469)..(562): Homolog of NCBI NO: 33416854 NR Description: Unknown (protein for MGC:66163) [Danio rerio]
  misc_feature (1)..(608): Homolog of NCBI NO: 38346632 NR Description: OSJNBa0072D21.2 [Oryza sativa (japonica
  misc_feature (216)..(381): Homolog of NCBI NO: 19386736 NR Description: putative dynamin-like protein ADL2
  misc_feature (376)..(614): Homolog of NCBI NO: 19386736 NR Description: putative dynamin-like protein ADL2
  misc_feature (1)..(179): Homolog of NCBI NO: 19386736 NR Description: putative dynamin-like protein ADL2
  misc_feature (1)..(280): Homolog of NCBI NO: 14334428 NR Description: putative dynamin protein ADL2 [Arabidopsis

SEQ ID NO: 45623 - protein, 563 aa, Arabidopsis thaliana; identical to SEQ ID NO: 39324
  peptide (1)..(563): Ceres Seq. ID no. 13491851
  misc_feature (7)..(300): Pfam Name: Dynamin central region Pfam Description: Dynamin central region
  misc_feature (7)..(300): Pfam Name: Dynamin central region Pfam Description: Dynamin central region
  misc_feature (1)..(301): Homolog of NCBI NO: 30048092 NR Description: DNM1 protein [Homo sapiens]
  misc_feature (418)..(511): Homolog of NCBI NO: 33416854 NR Description: Unknown (protein for MGC:66163) [Danio rerio]
  misc_feature (1)..(312): Homolog of NCBI NO: 33416854 NR Description: Unknown (protein for MGC:66163) [Danio rerio]
  misc_feature (404)..(511): Homolog of NCBI NO: 2689219 NR Description: dynamin like protein [Dictyostelium discoideum]
  misc_feature (1)..(293): Homolog of NCBI NO: 2689219 NR Description: dynamin like protein [Dictyostelium discoideum]
  misc_feature (1)..(301): Homolog of NCBI NO: 30048092 NR Description: DNM1 protein [Homo sapiens]
  misc_feature (1)..(312): Homolog of NCBI NO: 33416854 NR Description: Unknown (protein for MGC:66163) [Danio rerio]
  misc_feature (1)..(293): Homolog of NCBI NO: 2689219 NR Description: dynamin like protein [Dictyostelium discoideum]
  misc_feature (1)..(229): Homolog of NCBI NO: 14334428 NR Description: putative dynamin protein ADL2 [Arabidopsis
  misc_feature (1)..(128): Homolog of NCBI NO: 19386736 NR Description: putative dynamin-like protein ADL2
  misc_feature (325)..(563): Homolog of NCBI NO: 19386736 NR Description: putative dynamin-like protein ADL2
  misc_feature (165)..(330): Homolog of NCBI NO: 19386736 NR Description: putative dynamin-like protein ADL2
  misc_feature (1)..(557): Homolog of NCBI NO: 38346632 NR Description: OSJNBa0072D21.2 [Oryza sativa (japonica
  misc_feature (404)..(511): Homolog of NCBI NO: 2689219 NR Description: dynamin like protein [Dictyostelium discoideum]
  misc_feature (418)..(511): Homolog of NCBI NO: 33416854 NR Description: Unknown (protein for MGC:66163) [Danio rerio]
  misc_feature (1)..(557): Homolog of NCBI NO: 38346632 NR Description: OSJNBa0072D21.2 [Oryza sativa (japonica
  misc_feature (165)..(330): Homolog of NCBI NO: 19386736 NR Description: putative dynamin-like protein ADL2
  misc_feature (325)..(563): Homolog of NCBI NO: 19386736 NR Description: putative dynamin-like protein ADL2
  misc_feature (1)..(128): Homolog of NCBI NO: 19386736 NR Description: putative dynamin-like protein ADL2
  misc_feature (1)..(229): Homolog of NCBI NO: 14334428 NR Description: putative dynamin protein ADL2 [Arabidopsis

SEQ ID NO: 45624 - DNA, 1727 bp, Arabidopsis thaliana
  misc_feature (1)..(1727): Ceres Seq. ID no. 12559251
  misc_feature: MA Experiment ID: 20000234 Result: Up-regulated in Transcription
  misc_feature: MA Experiment 20000234 PARAMETER Experiment Name: At_Siliques_P Parameter: Age (day) Value: 21
  misc_feature: MA Experiment 20000234 PARAMETER Experiment Name: At_Siliques_P Parameter: Organism Value: A. thaliana
  misc_feature: MA Experiment 20000234 PARAMETER Experiment Name: At_Siliques_P Parameter: Plant Line Value: WS
  misc_feature: MA Experiment 20000234 PARAMETER Experiment Name: At_Siliques_P Parameter: Tissue Value: Less Than 5mm Siliques vs. Whole Plant
  misc_feature: MA Experiment ID: 20000264 Result: Up-regulated in Transcription
  misc_feature: MA Experiment 20000264 PARAMETER Experiment Name: At_Open_Flower_P Parameter: Age (day) Value: 21
  misc_feature: MA Experiment 20000264 PARAMETER Experiment Name: At_Open_Flower_P Parameter: Plant Line Value: WS
  misc_feature: MA Experiment 20000264 PARAMETER Experiment Name: At_Open_Flower_P Parameter: Tissue Value: Open Flower vs. Whole Plant
  misc_feature: MA Experiment ID: 20000265 Result: Up-regulated in Transcription
  misc_feature: MA Experiment 20000265 PARAMETER Experiment Name: At_Open_Flower_P Parameter: Age (day) Value: 21
  misc_feature: MA Experiment 20000265 PARAMETER Experiment Name: At_Open_Flower_P Parameter: Plant Line Value: WS
  misc_feature: MA Experiment 20000265 PARAMETER Experiment Name: At_Open_Flower_P Parameter: Tissue Value: Closed Flower vs. Whole Plant
agggtcagtctaattactctctcagcgtttctctttttggtcctcaaatcttcaccttcaagatcttcttcgtccctcgatctccgatttcaaatctcgtttctccgttcaagcaacctctctgaattcctagtctcacagcaggaattagtactcggcgaagcgatttctgcttcgatctctacatctgaagttccgatctgacgaaatttagggttcgtctgggtcgaagttaaataggaaaaagatttcgaattggcttgagaatggcggaatctagtggaagttggagagattcttataaaggaatgtcgtctgataacatcaagggtttggttttagcgttgtcttctagtttgttcattggtgctagtttcattgttaagaagaaagggcttaagaaagctgcgagtactggtactagggcaggtgttggtgggtattcttatctctacgagcctctttggtggattggcatgacgacaatgttacttggtgaaattgccaatttcgctgcttatgcatttgcgcctgctatacttgtcactcctctaggtgctgtcagtatcattatcagtgctgtcttagctcatattatattacgggaaaaactacatatctttggaattcttggctgtgccttatgtgttgtgggttccacaacaattgtcttacatgcccctcaagaacgtgaaattgactctgtgattgaagtttggaatcttgcaactgaaccagcattcatgttctatgcgagtctggtaattggggctgctgtatttctcattatccgttttgtgccccaatatgggcaaacaaatgtaatggtttacattggtatttgttcgctcgtgggatcattatcggtaatgagtgtaaaagcacttggaatagcattaaagctgaccttttcaggaacaaatcagttattttatcctcaaacatggatattcaccttggtcgtacttacttgtgtggtaacccaactgaactacttaaacaaggctcttgatacattcaatacagctatagtatctcctatatactacgtgatgttcacatctctaactattttggctagtgtcatcatgtttaaggactgggatcggcaaaacggtactcaaattgttacagaaatatgtggatttgttacaatactttcaggcacttttcttctccacagaacaaaggacatggtcgagggttcgtcggtaatattaccgttgcggataagcaagcatataaatgaagaagaaggcattccactcagacgccaagaatctctccggtcaccttaaaagctttttcgctctgttttctggtccactgcgataactgcaaaccagagaatcaaccttttttccttatctcgacttattatgaacatggaccatggttctgtctaacacttacaaatggttcaagaagatcgaagaaggaaagaggagcagcgaggatgagatcatcttctccaatatcggtaaatatgctgtgagttcaagcacacgccattagcacacacccacgcctaaacccttggtgtgacagttaaaattttataaacaagagatgggttttgcctaaattggtcttacaagcatctataactaaaggtttcaattcaagatttgcattattttttattgaatcttctatttttcttccttagttggtttgaagctttaaaccctttgaaaaacaagaaatggagactttgaaagttgacg

SEQ ID NO: 45625 - protein, 343 aa, Arabidopsis thaliana
  peptide (1)..(343): Ceres Seq. ID no. 12559252
  misc_feature (15)..(314): Pfam Name: Protein of unknown function (DUF803) Pfam Description: Protein of unknown function (DUF803)
  misc_feature (15)..(314): Pfam Name: Protein of unknown function (DUF803) Pfam Description: Protein of unknown function (DUF803)
  misc_feature (15)..(314): Homolog of NCBI NO: 26449939 NR Description: unknown protein [Arabidopsis thaliana]
  misc_feature (15)..(338): Homolog of NCBI NO: 30681265 NR Description: expressed protein [Arabidopsis thaliana]
  misc_feature (15)..(321): Homolog of NCBI NO: 21742149 NR Description: OSJNBa0069D17.4 [Oryza sativa (japonica
  misc_feature (15)..(316): Homolog of NCBI NO: 21593618 NR Description: unknown [Arabidopsis thaliana]
  misc_feature (15)..(316): Homolog of NCBI NO: 18414079 NR Description: expressed protein
  misc_feature (15)..(314): Homolog of NCBI NO: 26449939 NR Description: unknown protein [Arabidopsis thaliana]
  misc_feature (15)..(321): Homolog of NCBI NO: 21742149 NR Description: OSJNBa0069D17.4 [Oryza sativa (japonica
  misc_feature (15)..(316): Homolog of NCBI NO: 18414079 NR Description: expressed protein
  misc_feature (1)..(343): Homolog of NCBI NO: 18409942 NR Description: expressed protein
  misc_feature (1)..(314): Homolog of NCBI NO: 25406128 NR Description: unknown protein F17M19.5 [imported] - Arabidopsis
  misc_feature (1)..(343): Homolog of NCBI NO: 18399280 NR Description: expressed protein
  misc_feature (6)..(343): Homolog of NCBI NO: 20161440 NR Description: B1065E10.15 [Oryza sativa (japonica
  misc_feature (15)..(315): Homolog of NCBI NO: 15229534 NR Description: unknown protein; protein id: At3g23870.1
  misc_feature (15)..(316): Homolog of NCBI NO: 21593618 NR Description: unknown [Arabidopsis thaliana]
  misc_feature (15)..(338): Homolog of NCBI NO: 30681265 NR Description: expressed protein [Arabidopsis thaliana]
  misc_feature (15)..(315): Homolog of NCBI NO: 15229534 NR Description: unknown protein; protein id: At3g23870.1
  misc_feature (6)..(343): Homolog of NCBI NO: 20161440 NR Description: B1065E10.15 [Oryza sativa (japonica
  misc_feature (1)..(343): Homolog of NCBI NO: 18399280 NR Description: expressed protein
  misc_feature (1)..(314): Homolog of NCBI NO: 25406128 NR Description: unknown protein F17M19.5 [imported] - Arabidopsis
  misc_feature (1)..(343): Homolog of NCBI NO: 18409942 NR Description: expressed protein
MAESSGSWRDSYKGMSSDNIKGLVLALSSSLFIGASFIVKKKGLKKAASTGTRAGVGGYSYLYEPLWWIGMTTMLLGEIANFAAYAFAPAILVTPLGAVSIIISAVLAHIILREKLHIFGILGCALCVVGSTTIVLHAPQEREIDSVIEVWNLATEPAFMFYASLVIGAAVFLIIRFVPQYGQTNVMVYIGICSLVGSLSVMSVKALGIALKLTFSGTNQLFYPQTWIFTLVVLTCVVTQLNYLNKALDTFNTAIVSPIYYVMFTSLTILASVIMFKDWDRQNGTQIVTEICGFVTILSGTFLLHRTKDMVEGSSVILPLRISKHINEEEGIPLRRQESLRSP

SEQ ID NO: 45626 - protein, 329 aa, Arabidopsis thaliana
  peptide (1)..(329): Ceres Seq. ID no. 12559253
  misc_feature (1)..(300): Pfam Name: Protein of unknown function (DUF803) Pfam Description: Protein of unknown function (DUF803)
  misc_feature (1)..(300): Pfam Name: Protein of unknown function (DUF803) Pfam Description: Protein of unknown function (DUF803)
  misc_feature (1)..(300): Homolog of NCBI NO: 26449939 NR Description: unknown protein [Arabidopsis thaliana]
  misc_feature (1)..(324): Homolog of NCBI NO: 30681265 NR Description: expressed protein [Arabidopsis thaliana]
  misc_feature (1)..(307): Homolog of NCBI NO: 21742149 NR Description: OSJNBa0069D17.4 [Oryza sativa (japonica
  misc_feature (1)..(302): Homolog of NCBI NO: 21593618 NR Description: unknown [Arabidopsis thaliana]
  misc_feature (1)..(302): Homolog of NCBI NO: 18414079 NR Description: expressed protein
  misc_feature (1)..(300): Homolog of NCBI NO: 26449939 NR Description: unknown protein [Arabidopsis thaliana]
  misc_feature (1)..(307): Homolog of NCBI NO: 21742149 NR Description: OSJNBa0069D17.4 [Oryza sativa (japonica
  misc_feature (1)..(302): Homolog of NCBI NO: 18414079 NR Description: expressed protein
  misc_feature (1)..(329): Homolog of NCBI NO: 18409942 NR Description: expressed protein
  misc_feature (1)..(300): Homolog of NCBI NO: 25406128 NR Description: unknown protein F17M19.5 [imported] - Arabidopsis
  misc_feature (1)..(329): Homolog of NCBI NO: 18399280 NR Description: expressed protein
  misc_feature (1)..(329): Homolog of NCBI NO: 20161440 NR Description: B1065E10.15 [Oryza sativa (japonica
  misc_feature (1)..(301): Homolog of NCBI NO: 15229534 NR Description: unknown protein; protein id: At3g23870.1
  misc_feature (1)..(302): Homolog of NCBI NO: 21593618 NR Description: unknown [Arabidopsis thaliana]
  misc_feature (1)..(324): Homolog of NCBI NO: 30681265 NR Description: expressed protein [Arabidopsis thaliana]
  misc_feature (1)..(301): Homolog of NCBI NO: 15229534 NR Description: unknown protein; protein id: At3g23870.1
  misc_feature (1)..(329): Homolog of NCBI NO: 20161440 NR Description: B1065E10.15 [Oryza sativa (japonica
  misc_feature (1)..(329): Homolog of NCBI NO: 18399280 NR Description: expressed protein
  misc_feature (1)..(300): Homolog of NCBI NO: 25406128 NR Description: unknown protein F17M19.5 [imported] - Arabidopsis
  misc_feature (1)..(329): Homolog of NCBI NO: 18409942 NR Description: expressed protein
MSSDNIKGLVLALSSSLFIGASFIVKKKGLKKAASTGTRAGVGGYSYLYEPLWWIGMTTMLLGEIANFAAYAFAPAILVTPLGAVSIIISAVLAHIILREKLHIFGILGCALCVVGSTTIVLHAPQEREIDSVIEVWNLATEPAFMFYASLVIGAAVFLIIRFVPQYGQTNVMVYIGICSLVGSLSVMSVKALGIALKLTFSGTNQLFYPQTWIFTLVVLTCVVTQLNYLNKALDTFNTAIVSPIYYVMFTSLTILASVIMFKDWDRQNGTQIVTEICGFVTILSGTFLLHRTKDMVEGSSVILPLRISKHINEEEGIPLRRQESLRSP

SEQ ID NO: 45627 - protein, 273 aa, Arabidopsis thaliana
  peptide (1)..(273): Ceres Seq. ID no. 12559254
  misc_feature (1)..(244): Pfam Name: Protein of unknown function (DUF803) Pfam Description: Protein of unknown function (DUF803)
  misc_feature (1)..(244): Pfam Name: Protein of unknown function (DUF803) Pfam Description: Protein of unknown function (DUF803)
  misc_feature (1)..(244): Homolog of NCBI NO: 26449939 NR Description: unknown protein [Arabidopsis thaliana]
  misc_feature (1)..(268): Homolog of NCBI NO: 30681265 NR Description: expressed protein [Arabidopsis thaliana]
  misc_feature (1)..(251): Homolog of NCBI NO: 21742149 NR Description: OSJNBa0069D17.4 [Oryza sativa (japonica
  misc_feature (1)..(246): Homolog of NCBI NO: 21593618 NR Description: unknown [Arabidopsis thaliana]
  misc_feature (1)..(246): Homolog of NCBI NO: 18414079 NR Description: expressed protein
  misc_feature (1)..(244): Homolog of NCBI NO: 26449939 NR Description: unknown protein [Arabidopsis thaliana]
  misc_feature (1)..(251): Homolog of NCBI NO: 21742149 NR Description: OSJNBa0069D17.4 [Oryza sativa (japonica
  misc_feature (1)..(246): Homolog of NCBI NO: 18414079 NR Description: expressed protein
  misc_feature (1)..(273): Homolog of NCBI NO: 18409942 NR Description: expressed protein
  misc_feature (1)..(244): Homolog of NCBI NO: 25406128 NR Description: unknown protein F17M19.5 [imported] - Arabidopsis
  misc_feature (1)..(273): Homolog of NCBI NO: 18399280 NR Description: expressed protein
  misc_feature (1)..(273): Homolog of NCBI NO: 20161440 NR Description: B1065E10.15 [Oryza sativa (japonica
  misc_feature (1)..(245): Homolog of NCBI NO: 15229534 NR Description: unknown protein; protein id: At3g23870.1
  misc_feature (1)..(246): Homolog of NCBI NO: 21593618 NR Description: unknown [Arabidopsis thaliana]
  misc_feature (1)..(268): Homolog of NCBI NO: 30681265 NR Description: expressed protein [Arabidopsis thaliana]
  misc_feature (1)..(245): Homolog of NCBI NO: 15229534 NR Description: unknown protein; protein id: At3g23870.1
  misc_feature (1)..(273): Homolog of NCBI NO: 20161440 NR Description: B1065E10.15 [Oryza sativa (japonica
  misc_feature (1)..(273): Homolog of NCBI NO: 18399280 NR Description: expressed protein
  misc_feature (1)..(244): Homolog of NCBI NO: 25406128 NR Description: unknown protein F17M19.5 [imported] - Arabidopsis
  misc_feature (1)..(273): Homolog of NCBI NO: 18409942 NR Description: expressed protein
MTTMLLGEIANFAAYAFAPAILVTPLGAVSIIISAVLAHIILREKLHIFGILGCALCVVGSTTIVLHAPQEREIDSVIEVWNLATEPAFMFYASLVIGAAVFLIIRFVPQYGQTNVMVYIGICSLVGSLSVMSVKALGIALKLTFSGTNQLFYPQTWIFTLVVLTCVVTQLNYLNKALDTFNTAIVSPIYYVMFTSLTILASVIMFKDWDRQNGTQIVTEICGFVTILSGTFLLHRTKDMVEGSSVILPLRISKHINEEEGIPLRRQESLRSP

SEQ ID NO: 45628 - DNA, 1842 bp, Arabidopsis thaliana
  misc_feature (1)..(1842): Ceres Seq. ID no. 13646461
  misc_feature: MA Experiment ID: 20000171 Result: Up-regulated in Transcription
  misc_feature: MA Experiment 20000171 PARAMETER Experiment Name: At_42deg_Heat_P Parameter: Age (day) Value: 14
  misc_feature: MA Experiment 20000171 PARAMETER Experiment Name: At_42deg_Heat_P Parameter: Organism Value: A. thaliana
  misc_feature: MA Experiment 20000171 PARAMETER Experiment Name: At_42deg_Heat_P Parameter: Plant Line Value: WS
  misc_feature: MA Experiment 20000171 PARAMETER Experiment Name: At_42deg_Heat_P Parameter: Temperature (deg C) Value: 42 vs. 22
  misc_feature: MA Experiment 20000171 PARAMETER Experiment Name: At_42deg_Heat_P Parameter: Timepoint (hr) Value: 1
  misc_feature: MA Experiment 20000171 PARAMETER Experiment Name: At_42deg_Heat_P Parameter: Tissue Value: Aerial
  misc_feature: MA Experiment ID: 20000173 Result: Up-regulated in Transcription
  misc_feature: MA Experiment 20000173 PARAMETER Experiment Name: At_42deg_Heat_P Parameter: Age (day) Value: 14
  misc_feature: MA Experiment 20000173 PARAMETER Experiment Name: At_42deg_Heat_P Parameter: Organism Value: A. thaliana
  misc_feature: MA Experiment 20000173 PARAMETER Experiment Name: At_42deg_Heat_P Parameter: Plant Line Value: WS
  misc_feature: MA Experiment 20000173 PARAMETER Experiment Name: At_42deg_Heat_P Parameter: Temperature (deg C) Value: 42 vs. 22
  misc_feature: MA Experiment 20000173 PARAMETER Experiment Name: At_42deg_Heat_P Parameter: Timepoint (hr) Value: 6
  misc_feature: MA Experiment 20000173 PARAMETER Experiment Name: At_42deg_Heat_P Parameter: Tissue Value: Aerial
  misc_feature: MA Experiment ID: 20000185 Result: Up-regulated in Transcription
  misc_feature: MA Experiment 20000185 PARAMETER Experiment Name: At_Roots__P Parameter: Age (day) Value: 7 vs. 21
  misc_feature: MA Experiment 20000185 PARAMETER Experiment Name: At_Roots__P Parameter: Organism Value: A. thaliana
  misc_feature: MA Experiment 20000185 PARAMETER Experiment Name: At_Roots__P Parameter: Tissue Value: Roots vs. Whole Plant
  misc_feature: MA Experiment ID: 20000234 Result: Down-regulated in Transcription
  misc_feature: MA Experiment 20000234 PARAMETER Experiment Name: At_Siliques_P Parameter: Age (day) Value: 21
  misc_feature: MA Experiment 20000234 PARAMETER Experiment Name: At_Siliques_P Parameter: Organism Value: A. thaliana
  misc_feature: MA Experiment 20000234 PARAMETER Experiment Name: At_Siliques_P Parameter: Plant Line Value: WS
  misc_feature: MA Experiment 20000234 PARAMETER Experiment Name: At_Siliques_P Parameter: Tissue Value: Less Than 5mm Siliques vs. Whole Plant
  misc_feature: MA Experiment ID: 20000235 Result: Down-regulated in Transcription
  misc_feature: MA Experiment 20000235 PARAMETER Experiment Name: At_Siliques_P Parameter: Age (day) Value: 21
  misc_feature: MA Experiment 20000235 PARAMETER Experiment Name: At_Siliques_P Parameter: Organism Value: A. thaliana
  misc_feature: MA Experiment 20000235 PARAMETER Experiment Name: At_Siliques_P Parameter: Plant Line Value: WS
  misc_feature: MA Experiment 20000235 PARAMETER Experiment Name: At_Siliques_P Parameter: Tissue Value: 5-10mm Siliques vs. Whole Plant
  misc_feature: MA Experiment ID: 20000264 Result: Down-regulated in Transcription
  misc_feature: MA Experiment 20000264 PARAMETER Experiment Name: At_Open_Flower_P Parameter: Age (day) Value: 21
  misc_feature: MA Experiment 20000264 PARAMETER Experiment Name: At_Open_Flower_P Parameter: Plant Line Value: WS
  misc_feature: MA Experiment 20000264 PARAMETER Experiment Name: At_Open_Flower_P Parameter: Tissue Value: Open Flower vs. Whole Plant
  misc_feature: MA Experiment ID: 20000265 Result: Down-regulated in Transcription
  misc_feature: MA Experiment 20000265 PARAMETER Experiment Name: At_Open_Flower_P Parameter: Age (day) Value: 21
  misc_feature: MA Experiment 20000265 PARAMETER Experiment Name: At_Open_Flower_P Parameter: Plant Line Value: WS
  misc_feature: MA Experiment 20000265 PARAMETER Experiment Name: At_Open_Flower_P Parameter: Tissue Value: Closed Flower vs. Whole Plant
  misc_feature: MA Experiment ID: 20000286 Result: Down-regulated in Transcription
  misc_feature: MA Experiment 20000286 PARAMETER Experiment Name: At_Open_Flower_P Parameter: Age (day) Value: 21
  misc_feature: MA Experiment 20000286 PARAMETER Experiment Name: At_Open_Flower_P Parameter: Plant Line Value: WS
  misc_feature: MA Experiment 20000286 PARAMETER Experiment Name: At_Open_Flower_P Parameter: Tissue Value: Half Open vs. Whole Plant
  misc_feature: MA Experiment ID: 20000439 Result: Up-regulated in Transcription
  misc_feature: MA Experiment 20000439 PARAMETER Experiment Name: At_Roots__P Parameter: Age (day) Value: 14 vs. 21
  misc_feature: MA Experiment 20000439 PARAMETER Experiment Name: At_Roots__P Parameter: Organism Value: A. thaliana
  misc_feature: MA Experiment 20000439 PARAMETER Experiment Name: At_Roots__P Parameter: Tissue Value: Roots vs. Whole Plant
  misc_feature: MA Experiment ID: 20000451 Result: Down-regulated in Transcription
  misc_feature: MA Experiment 20000451 PARAMETER Experiment Name: At_CS6879_Shoots-Roots_P Parameter: Age (day) Value: 14
  misc_feature: MA Experiment 20000451 PARAMETER Experiment Name: At_CS6879_Shoots-Roots_P Parameter: Organism Value: A. thaliana
  misc_feature: MA Experiment 20000451 PARAMETER Experiment Name: At_CS6879_Shoots-Roots_P Parameter: Plant Line Value: CS6879 vs. WS
  misc_feature: MA Experiment 20000451 PARAMETER Experiment Name: At_CS6879_Shoots-Roots_P Parameter: Tissue Value: Roots
  misc_feature: MA Experiment ID: 20000794 Result: Down-regulated in Transcription
  misc_feature: MA Experiment 20000794 PARAMETER Experiment Name: At_Petals_P Parameter: Age (day) Value: 23-25 days
  misc_feature: MA Experiment 20000794 PARAMETER Experiment Name: At_Petals_P Parameter: Plant Line Value: WS
  misc_feature: MA Experiment 20000794 PARAMETER Experiment Name: At_Petals_P Parameter: Tissue Value: Petals vs. Whole plant
gatgagagatagacagagagggaaaacaactacacaagtcaaattttctgttctaaaaaagtaaaagaagtatggtggaggaaacgagctctggtggtggctcatcggcttctccgatcaaaaccatcgtcgttttggttcaggagaacaggtcgttcgatcacatgttaggttggttcaaggagcttaacccagaaatcgatggagtatccgaatccgaaccaagatccaacccactttctacatctgacccgaactctgctcaaatcttcttcggcaaagaatctcagaacattgatcctgatcccggtcactcttttcaggcgatctacgaacaagtgtttggaaaaccattcagcgacgagagtccgtacccggatccgaaaatgaacgggttcgtacaaaacgcagaggcgataacaaaagggatgtcggagaaagtagtgatgcaaggttttccgccggagaaacttccggtattcaaggaactagttcaagaattcgctgtctgcgatcggtggttctcgtcgttgccctcgtccacgcagcctaaccgactctacgtccacgcggcgacatcaaacggtgcgtttagtaatgacactaacacgcttgttcgtggctttcctcagaggacagtgttcgaatcacttgaagagagtggtttcacatttggaatttattaccaatcctttcctaattgcctcttttacaggaacatgaggaaactgaagtacgtggacaacttccatcaataccacttaagcttcaagaggcattgcaaagaagggaagcttccaaactatgtggttatagaaccaaggtacttcaagattttgtcggctccagctaatgatgaccatcccaaaaacgacgtcgttgaaggccaaaatctagtcaaagaaatctacgaagccttaagagctagtcctcagtggaacgagattctcttcgttgttgtttatgatgaacacggtggttattatgaccacgtccctactccagtcattggtgtcccaaatcctgatggtctagttggacctgagccctataactttaagtttgaccggcttggtgttagggttcctgctttgctaatctcgccttggatcgaacctggaacggtgttacacgagccaaatggaccagagccaacgtcgcagttcgaacattcatcaattccggcaacactgaagaaaatattcaacctcaagagctttcttacaaagcgtgacgaatgggctggaacactcgatgctgtcatcaaccggaccagcccaaggacggactgccccgtcacattaccggaacttcctagggcaagagacatagacattggaacacaagaagaagacgaagatctcactgattttcaaatcgaactgattcaagcagcggctgtactaaaaggagatcatatcaaagacatttacccgtttaagctcgcagataaaatgaaggttttggatgcggctaggtacgtagaagaagctttcactagattccatggtgagtccaagaaggctaaagaagaaggccgtgatgagcatgagatcgttgatctttctaaaggatctactcgtcactcgactcctaagtcttttgttcagaagttattctcgtgtttgatttgtgataattgatcttgagttgaaacagatttgatctctctgagatttggtgtatttctcggattttatgtgaagagcgtttgaaatttgatatttgtttgttttccaaattttatgttttacaaaaaaaaaaaaaaaaaaaactcgagggggggcccggtacccaattcgccctattgttaaacacaataaagttggaactggagggggg

SEQ ID NO: 45629 - protein, 523 aa, Arabidopsis thaliana
  peptide (1)..(523): Ceres Seq. ID no. 13646462
  misc_feature (16)..(397): Pfam Name: Phosphoesterase family Pfam Description: Phosphoesterase family
  misc_feature (1)..(514): Homolog of NCBI NO: 15222342 NR Description: phosphoesterase family [Arabidopsis thaliana]
  misc_feature (14)..(510): Homolog of NCBI NO: 34897344 NR Description: putative phospholipase [Oryza sativa]
  misc_feature (11)..(508): Homolog of NCBI NO: 20161866 NR Description: B1139B11.7 [Oryza sativa (japonica
  misc_feature (1)..(514): Homolog of NCBI NO: 21703147 NR Description: At1g07230/F10K1_4 [Arabidopsis thaliana]
  misc_feature (12)..(503): Homolog of NCBI NO: 15225806 NR Description: phosphoesterase family [Arabidopsis thaliana]
  misc_feature (11)..(521): Homolog of NCBI NO: 27573343 NR Description: putative phosphoesterase [Oryza sativa (japonica
  misc_feature (10)..(509): Homolog of NCBI NO: 18396579 NR Description: phosphoesterase family [Arabidopsis thaliana]
  misc_feature (1)..(520): Homolog of NCBI NO: 18396577 NR Description: phosphoesterase family [Arabidopsis thaliana]
  misc_feature (1)..(523): Homolog of NCBI NO: 17529016 NR Description: unknown protein [Arabidopsis thaliana]
  misc_feature (1)..(523): Homolog of NCBI NO: 15228577 NR Description: phosphoesterase family [Arabidopsis thaliana]
MVEETSSGGGSSASPIKTIVVLVQENRSFDHMLGWFKELNPEIDGVSESEPRSNPLSTSDPNSAQIFFGKESQNIDPDPGHSFQAIYEQVFGKPFSDESPYPDPKMNGFVQNAEAITKGMSEKVVMQGFPPEKLPVFKELVQEFAVCDRWFSSLPSSTQPNRLYVHAATSNGAFSNDTNTLVRGFPQRTVFESLEESGFTFGIYYQSFPNCLFYRNMRKLKYVDNFHQYHLSFKRHCKEGKLPNYVVIEPRYFKILSAPANDDHPKNDVVEGQNLVKEIYEALRASPQWNEILFVVVYDEHGGYYDHVPTPVIGVPNPDGLVGPEPYNFKFDRLGVRVPALLISPWIEPGTVLHEPNGPEPTSQFEHSSIPATLKKIFNLKSFLTKRDEWAGTLDAVINRTSPRTDCPVTLPELPRARDIDIGTQEEDEDLTDFQIELIQAAAVLKGDHIKDIYPFKLADKMKVLDAARYVEEAFTRFHGESKKAKEEGRDEHEIVDLSKGSTRHSTPKSFVQKLFSCLICDN

SEQ ID NO: 45630 - protein, 492 aa, Arabidopsis thaliana
  peptide (1)..(492): Ceres Seq. ID no. 13646463
  misc_feature (1)..(366): Pfam Name: Phosphoesterase family Pfam Description: Phosphoesterase family
  misc_feature (1)..(483): Homolog of NCBI NO: 15222342 NR Description: phosphoesterase family [Arabidopsis thaliana]
  misc_feature (1)..(479): Homolog of NCBI NO: 34897344 NR Description: putative phospholipase [Oryza sativa]
  misc_feature (1)..(477): Homolog of NCBI NO: 20161866 NR Description: B1139B11.7 [Oryza sativa (japonica
  misc_feature (1)..(483): Homolog of NCBI NO: 21703147 NR Description: At1g07230/F10K1_4 [Arabidopsis thaliana]
  misc_feature (1)..(472): Homolog of NCBI NO: 15225806 NR Description: phosphoesterase family [Arabidopsis thaliana]
  misc_feature (1)..(490): Homolog of NCBI NO: 27573343 NR Description: putative phosphoesterase [Oryza sativa (japonica
  misc_feature (1)..(478): Homolog of NCBI NO: 18396579 NR Description: phosphoesterase family [Arabidopsis thaliana]
  misc_feature (1)..(489): Homolog of NCBI NO: 18396577 NR Description: phosphoesterase family [Arabidopsis thaliana]
  misc_feature (1)..(492): Homolog of NCBI NO: 17529016 NR Description: unknown protein [Arabidopsis thaliana]
  misc_feature (1)..(492): Homolog of NCBI NO: 15228577 NR Description: phosphoesterase family [Arabidopsis thaliana]
MLGWFKELNPEIDGVSESEPRSNPLSTSDPNSAQIFFGKESQNIDPDPGHSFQAIYEQVFGKPFSDESPYPDPKMNGFVQNAEAITKGMSEKVVMQGFPPEKLPVFKELVQEFAVCDRWFSSLPSSTQPNRLYVHAATSNGAFSNDTNTLVRGFPQRTVFESLEESGFTFGIYYQSFPNCLFYRNMRKLKYVDNFHQYHLSFKRHCKEGKLPNYVVIEPRYFKILSAPANDDHPKNDVVEGQNLVKEIYEALRASPQWNEILFVVVYDEHGGYYDHVPTPVIGVPNPDGLVGPEPYNFKFDRLGVRVPALLISPWIEPGTVLHEPNGPEPTSQFEHSSIPATLKKIFNLKSFLTKRDEWAGTLDAVINRTSPRTDCPVTLPELPRARDIDIGTQEEDEDLTDFQIELIQAAAVLKGDHIKDIYPFKLADKMKVLDAARYVEEAFTRFHGESKKAKEEGRDEHEIVDLSKGSTRHSTPKSFVQKLFSCLICDN

SEQ ID NO: 45631 - protein, 418 aa, Arabidopsis thaliana
  peptide (1)..(418): Ceres Seq. ID no. 13646464
  misc_feature (1)..(292): Pfam Name: Phosphoesterase family Pfam Description: Phosphoesterase family
  misc_feature (1)..(409): Homolog of NCBI NO: 15222342 NR Description: phosphoesterase family [Arabidopsis thaliana]
  misc_feature (1)..(405): Homolog of NCBI NO: 34897344 NR Description: putative phospholipase [Oryza sativa]
  misc_feature (1)..(403): Homolog of NCBI NO: 20161866 NR Description: B1139B11.7 [Oryza sativa (japonica
  misc_feature (1)..(409): Homolog of NCBI NO: 21703147 NR Description: At1g07230/F10K1_4 [Arabidopsis thaliana]
  misc_feature (1)..(398): Homolog of NCBI NO: 15225806 NR Description: phosphoesterase family [Arabidopsis thaliana]
  misc_feature (1)..(416): Homolog of NCBI NO: 27573343 NR Description: putative phosphoesterase [Oryza sativa (japonica
  misc_feature (1)..(404): Homolog of NCBI NO: 18396579 NR Description: phosphoesterase family [Arabidopsis thaliana]
  misc_feature (1)..(415): Homolog of NCBI NO: 18396577 NR Description: phosphoesterase family [Arabidopsis thaliana]
  misc_feature (1)..(418): Homolog of NCBI NO: 17529016 NR Description: unknown protein [Arabidopsis thaliana]
  misc_feature (1)..(418): Homolog of NCBI NO: 15228577 NR Description: phosphoesterase family [Arabidopsis thaliana]
MNGFVQNAEAITKGMSEKVVMQGFPPEKLPVFKELVQEFAVCDRWFSSLPSSTQPNRLYVHAATSNGAFSNDTNTLVRGFPQRTVFESLEESGFTFGIYYQSFPNCLFYRNMRKLKYVDNFHQYHLSFKRHCKEGKLPNYVVIEPRYFKILSAPANDDHPKNDVVEGQNLVKEIYEALRASPQWNEILFVVVYDEHGGYYDHVPTPVIGVPNPDGLVGPEPYNFKFDRLGVRVPALLISPWIEPGTVLHEPNGPEPTSQFEHSSIPATLKKIFNLKSFLTKRDEWAGTLDAVINRTSPRTDCPVTLPELPRARDIDIGTQEEDEDLTDFQIELIQAAAVLKGDHIKDIYPFKLADKMKVLDAARYVEEAFTRFHGESKKAKEEGRDEHEIVDLSKGSTRHSTPKSFVQKLFSCLICDN

SEQ ID NO: 45632 - DNA, 1292 bp, Arabidopsis thaliana
  misc_feature (1)..(1292): Ceres Seq. ID no. 12559240
  misc_feature: MA Experiment ID: 20000171 Result: Down-regulated in Transcription
  misc_feature: MA Experiment 20000171 PARAMETER Experiment Name: At_42deg_Heat_P Parameter: Age (day) Value: 14
  misc_feature: MA Experiment 20000171 PARAMETER Experiment Name: At_42deg_Heat_P Parameter: Organism Value: A. thaliana
  misc_feature: MA Experiment 20000171 PARAMETER Experiment Name: At_42deg_Heat_P Parameter: Plant Line Value: WS
  misc_feature: MA Experiment 20000171 PARAMETER Experiment Name: At_42deg_Heat_P Parameter: Temperature (deg C) Value: 42 vs. 22
  misc_feature: MA Experiment 20000171 PARAMETER Experiment Name: At_42deg_Heat_P Parameter: Timepoint (hr) Value: 1
  misc_feature: MA Experiment 20000171 PARAMETER Experiment Name: At_42deg_Heat_P Parameter: Tissue Value: Aerial
  misc_feature: MA Experiment ID: 20000173 Result: Down-regulated in Transcription
  misc_feature: MA Experiment 20000173 PARAMETER Experiment Name: At_42deg_Heat_P Parameter: Age (day) Value: 14
  misc_feature: MA Experiment 20000173 PARAMETER Experiment Name: At_42deg_Heat_P Parameter: Organism Value: A. thaliana
  misc_feature: MA Experiment 20000173 PARAMETER Experiment Name: At_42deg_Heat_P Parameter: Plant Line Value: WS
  misc_feature: MA Experiment 20000173 PARAMETER Experiment Name: At_42deg_Heat_P Parameter: Temperature (deg C) Value: 42 vs. 22
  misc_feature: MA Experiment 20000173 PARAMETER Experiment Name: At_42deg_Heat_P Parameter: Timepoint (hr) Value: 6
  misc_feature: MA Experiment 20000173 PARAMETER Experiment Name: At_42deg_Heat_P Parameter: Tissue Value: Aerial
  misc_feature: MA Experiment ID: 20000227 Result: Down-regulated in Transcription
  misc_feature: MA Experiment 20000227 PARAMETER Experiment Name: At_Root-Tips-vs-Tops_P Parameter: Tissue Value: Root Tips vs. Root Tops
  misc_feature: MA Experiment ID: 20001558 Result: Down-regulated in Transcription
  misc_feature: MA Experiment 20001558 PARAMETER Experiment Name: At_Drought_Soil_Dry_P Parameter: Age (day) Value: 27
  misc_feature: MA Experiment 20001558 PARAMETER Experiment Name: At_Drought_Soil_Dry_P Parameter: Organism Value: A. thaliana
  misc_feature: MA Experiment 20001558 PARAMETER Experiment Name: At_Drought_Soil_Dry_P Parameter: Plant Line Value: WS
  misc_feature: MA Experiment 20001558 PARAMETER Experiment Name: At_Drought_Soil_Dry_P Parameter: Post Timepoint (hr) Value: 6
  misc_feature: MA Experiment 20001558 PARAMETER Experiment Name: At_Drought_Soil_Dry_P Parameter: Post-Treatment Value: Re-Water vs. No Drought
  misc_feature: MA Experiment 20001558 PARAMETER Experiment Name: At_Drought_Soil_Dry_P Parameter: Timepoint (day) Value: 13
  misc_feature: MA Experiment 20001558 PARAMETER Experiment Name: At_Drought_Soil_Dry_P Parameter: Treatment Value: Drought vs. No Drought
ttcttcttcttcttcttcttcttcatctggaaatcgatatacgattctcactctctacccgcgaaaaaacactaattgattcatatcctccgtcaaggataaatctgtgtttgattcaccatatctctttcttctccctccgcgctaagctacgacgcctacagatctggctggtaaaaatcacgcagatagagactctggcccgatgctctctttacccattgatccaggctttttctgatttctctttgttcctagaaaccattaagctcctacctctttctagttgatgctcgtgttctcttcactgtctatgactccagttgtgatccctcaaaatctccgtgtctttggccctggtttgaatccctctttcccttactgcattgctaatcacttcccttgattgagttgctccattccaactgaatcatctcaatctgcctctcccataagttcttattctgagtgatattggttgatgatttctacccacaagtagtgttcctgctttagacattcttgtataagattgtaaccaaaattatgtaaatctgagtcactcctagaatctccttgtctagtaagtttcccttaggaaatatcctttgagtctttcatctgtgaattctagtcagttctggtttatctgcaagatgctccaagagcagccggttgcgttgtcctttcggcctaactcatttaggcgccggtccatggaaacgggtgttgacagagatgacagggggtggactcagcttcacatcaaagctcgtgaaggcgatctcaaagctgttaaagagctccttgaccaaggagcagacgtgaacgctctagcttgtggacctaaatcaaaaggaatgactcctcttcaccttgctgccaaaggaggtcacatcgaagttatggacttgcttcttgaacgtggagccaacatggaagctagaacctctggtgcttgtggctggactcctctccatgctgcagctaaagaacggaaaagagaagctgtcaagtttcttgtggggaacggtgctttcttacctgatgatataaccgacagtaggttcaacccgccggttcagtactgtcacggcttggaatgggcttatgaagagaggaagaaactcagtgaagatacttctttatcttgtggagacacttcttgcagttctgcgaattgattcttgtcttttgttatctttcttgcaatggctcataagtcgaagagacacaaaaccaaaggtttgtaatcatgttgtattgaaatatgaaatgatacatttatcacc

SEQ ID NO: 45633 - protein, 175 aa, Arabidopsis thaliana
  peptide (1)..(175): Ceres Seq. ID no. 12559241
  misc_feature (30)..(62): Pfam Name: Ankyrin repeat Pfam Description: Ankyrin repeat
  misc_feature (21)..(127): Homolog of NCBI NO: 28274850 NR Description: ankyrin repeat protein E3_19 [synthetic construct]
  misc_feature (25)..(127): Homolog of NCBI NO: 28274854 NR Description: ankyrin repeat protein E4_8 [synthetic construct]
  misc_feature (25)..(134): Homolog of NCBI NO: 28274852 NR Description: ankyrin repeat protein E4_2 [synthetic construct]
  misc_feature (21)..(127): Homolog of NCBI NO: 28373666 NR Description: Chain A, Sank E3_5: An Artificial Ankyrin Repeat
  misc_feature (31)..(127): Homolog of NCBI NO: 28373837 NR Description: Chain A, 4ank: A Designed Ankyrin Repeat Protein
  misc_feature (31)..(128): Homolog of NCBI NO: 28373835 NR Description: Chain A, 3ank: A Designed Ankyrin Repeat Protein
  misc_feature (21)..(128): Homolog of NCBI NO: 28373837 NR Description: Chain A, 4ank: A Designed Ankyrin Repeat Protein
  misc_feature (1)..(175): Homolog of NCBI NO: 15240185 NR Description: putative protein
  misc_feature (1)..(175): Homolog of NCBI NO: 18415625 NR Description: putative protein
  misc_feature (1)..(175): Homolog of NCBI NO: 11357401 NR Description: hypothetical protein F13G24.40 - Arabidopsis
MLQEQPVALSFRPNSFRRRSMETGVDRDDRGWTQLHIKAREGDLKAVKELLDQGADVNALACGPKSKGMTPLHLAAKGGHIEVMDLLLERGANMEARTSGACGWTPLHAAAKERKREAVKFLVGNGAFLPDDITDSRFNPPVQYCHGLEWAYEERKKLSEDTSLSCGDTSCSSAN

SEQ ID NO: 45634 - protein, 155 aa, Arabidopsis thaliana
  peptide (1)..(155): Ceres Seq. ID no. 12559242
  misc_feature (10)..(42): Pfam Name: Ankyrin repeat Pfam Description: Ankyrin repeat
  misc_feature (1)..(107): Homolog of NCBI NO: 28274850 NR Description: ankyrin repeat protein E3_19 [synthetic construct]
  misc_feature (5)..(107): Homolog of NCBI NO: 28274854 NR Description: ankyrin repeat protein E4_8 [synthetic construct]
  misc_feature (5)..(114): Homolog of NCBI NO: 28274852 NR Description: ankyrin repeat protein E4_2 [synthetic construct]
  misc_feature (1)..(107): Homolog of NCBI NO: 28373666 NR Description: Chain A, Sank E3_5: An Artificial Ankyrin Repeat
  misc_feature (11)..(107): Homolog of NCBI NO: 28373837 NR Description: Chain A, 4ank: A Designed Ankyrin Repeat Protein
  misc_feature (11)..(108): Homolog of NCBI NO: 28373835 NR Description: Chain A, 3ank: A Designed Ankyrin Repeat Protein
  misc_feature (1)..(108): Homolog of NCBI NO: 28373837 NR Description: Chain A, 4ank: A Designed Ankyrin Repeat Protein
  misc_feature (1)..(155): Homolog of NCBI NO: 15240185 NR Description: putative protein
  misc_feature (1)..(155): Homolog of NCBI NO: 18415625 NR Description: putative protein
  misc_feature (1)..(155): Homolog of NCBI NO: 11357401 NR Description: hypothetical protein F13G24.40 - Arabidopsis
METGVDRDDRGWTQLHIKAREGDLKAVKELLDQGADVNALACGPKSKGMTPLHLAAKGGHIEVMDLLLERGANMEARTSGACGWTPLHAAAKERKREAVKFLVGNGAFLPDDITDSRFNPPVQYCHGLEWAYEERKKLSEDTSLSCGDTSCSSAN

SEQ ID NO: 45635 - protein, 107 aa, Arabidopsis thaliana
  peptide (1)..(107): Ceres Seq. ID no. 12559243
  misc_feature (1)..(59): Homolog of NCBI NO: 28274850 NR Description: ankyrin repeat protein E3_19 [synthetic construct]
  misc_feature (1)..(59): Homolog of NCBI NO: 28274854 NR Description: ankyrin repeat protein E4_8 [synthetic construct]
  misc_feature (1)..(66): Homolog of NCBI NO: 28274852 NR Description: ankyrin repeat protein E4_2 [synthetic construct]
  misc_feature (1)..(59): Homolog of NCBI NO: 28373666 NR Description: Chain A, Sank E3_5: An Artificial Ankyrin Repeat
  misc_feature (1)..(59): Homolog of NCBI NO: 28373837 NR Description: Chain A, 4ank: A Designed Ankyrin Repeat Protein
  misc_feature (1)..(60): Homolog of NCBI NO: 28373835 NR Description: Chain A, 3ank: A Designed Ankyrin Repeat Protein
  misc_feature (1)..(60): Homolog of NCBI NO: 28373837 NR Description: Chain A, 4ank: A Designed Ankyrin Repeat Protein
  misc_feature (1)..(107): Homolog of NCBI NO: 15240185 NR Description: putative protein
  misc_feature (1)..(107): Homolog of NCBI NO: 18415625 NR Description: putative protein
  misc_feature (1)..(107): Homolog of NCBI NO: 11357401 NR Description: hypothetical protein F13G24.40 - Arabidopsis
MTPLHLAAKGGHIEVMDLLLERGANMEARTSGACGWTPLHAAAKERKREAVKFLVGNGAFLPDDITDSRFNPPVQYCHGLEWAYEERKKLSEDTSLSCGDTSCSSAN

SEQ ID NO: 45636 - DNA, 2301 bp, Arabidopsis thaliana
  misc_feature (1)..(2301): Ceres Seq. ID no. 14309775
  misc_feature: MA Experiment ID: 20000234 Result: Up-regulated in Transcription
  misc_feature: MA Experiment 20000234 PARAMETER Experiment Name: At_Siliques_P Parameter: Age (day) Value: 21
  misc_feature: MA Experiment 20000234 PARAMETER Experiment Name: At_Siliques_P Parameter: Organism Value: A. thaliana
  misc_feature: MA Experiment 20000234 PARAMETER Experiment Name: At_Siliques_P Parameter: Plant Line Value: WS
  misc_feature: MA Experiment 20000234 PARAMETER Experiment Name: At_Siliques_P Parameter: Tissue Value: Less Than 5mm Siliques vs. Whole Plant
  misc_feature: MA Experiment ID: 20000235 Result: Up-regulated in Transcription
  misc_feature: MA Experiment 20000235 PARAMETER Experiment Name: At_Siliques_P Parameter: Age (day) Value: 21
  misc_feature: MA Experiment 20000235 PARAMETER Experiment Name: At_Siliques_P Parameter: Organism Value: A. thaliana
  misc_feature: MA Experiment 20000235 PARAMETER Experiment Name: At_Siliques_P Parameter: Plant Line Value: WS
  misc_feature: MA Experiment 20000235 PARAMETER Experiment Name: At_Siliques_P Parameter: Tissue Value: 5-10mm Siliques vs. Whole Plant
  misc_feature: MA Experiment ID: 20000264 Result: Up-regulated in Transcription
  misc_feature: MA Experiment 20000264 PARAMETER Experiment Name: At_Open_Flower_P Parameter: Age (day) Value: 21
  misc_feature: MA Experiment 20000264 PARAMETER Experiment Name: At_Open_Flower_P Parameter: Plant Line Value: WS
  misc_feature: MA Experiment 20000264 PARAMETER Experiment Name: At_Open_Flower_P Parameter: Tissue Value: Open Flower vs. Whole Plant
  misc_feature: MA Experiment ID: 20000439 Result: Up-regulated in Transcription
  misc_feature: MA Experiment 20000439 PARAMETER Experiment Name: At_Roots__P Parameter: Age (day) Value: 14 vs. 21
  misc_feature: MA Experiment 20000439 PARAMETER Experiment Name: At_Roots__P Parameter: Organism Value: A. thaliana
  misc_feature: MA Experiment 20000439 PARAMETER Experiment Name: At_Roots__P Parameter: Tissue Value: Roots vs. Whole Plant
  misc_feature: MA Experiment ID: 20000794 Result: Up-regulated in Transcription
  misc_feature: MA Experiment 20000794 PARAMETER Experiment Name: At_Petals_P Parameter: Age (day) Value: 23-25 days
  misc_feature: MA Experiment 20000794 PARAMETER Experiment Name: At_Petals_P Parameter: Plant Line Value: WS
  misc_feature: MA Experiment 20000794 PARAMETER Experiment Name: At_Petals_P Parameter: Tissue Value: Petals vs. Whole plant
gggccaaaccatttctcttattcatgtcctctgcagatctcattcttcttcagatcttgaagaaggaacgccacaacagaaacagcaaatggagaagatagctaaagatctctttgtatccttccactgctattgttcccgtaaagagataaattgtcgagacattttgctggaagacgcagacaaagttcgagccattaccgaatatgtttcatcttctgcaattgagaacttagtcgttggatctgcatcacgtaatggcttcatgagaagattcaagacggatttgccaacaacagtgtcaaaatcagctccagatttctgcaatgtttatgtcatttcaaaaggcaaaattgcttcagtacgaaatgcatcacgtcctgctccttaccaaaattcgatgcagcaatgtgaaattgacaatcatcacccacatactcctgacaaagcaccaaagtaccatgaccatcccaattctgcaggtagtacaccatctagaccgcgcaaatcagttgaagcagatagatcgccgttggtgaaaaggaagccatatggggacttctatgattcagatagtgacctttcgtttatcagtccgtcttctcatcgtgactctgacatttccttcatcagctcaggaagaccaagcgttgagcggtcttcctttagccttgattttcctgaatctgcaaggacttcaagaatgtcaacgagctcagagcaaagcattggctcaaatcgtttgggaattaagttcagtgatcctggtttccttaacgaatcctctacattctctgaagagagtggtagaacatcctcctattcatctcagagcttggatgatgttgaagctgaaatgaagaggctgcgtctagagctgaaacaaaccatggatatgtatagcacagcttgtaaagaagctttaagcgctagacaacaggcaacggagctgcaaaagctgagaaccgaagaggagagacggttggaagaagcaaaaagttcagaggaagcagcaatgtcaatagtggaaaaggagagagctaaagccaaagcagcgttggaagctgctgaagctgcaaagagattagcagaagtggaatctaaaagaaggttgactgcagagatgaagacaatgaaggaatcagattcattctctcgcggatttgttcggtataggaaatacacggttgaagaaatcgaagaagctacttcaaattttgcagagtctcaaaaggtaggagaaggaggctatggtcctgtctttagaggctttcttgatcacacaagtgttgctgttaaagttctacgcccagacgcagctcaagggagatcacagtttcagaaagaggttgaagtgttaagctgcataaggcatccaaacatggtgcttcttcttggagcttgtccagaatttgggattcttgtttatgaatacatggccaaaggaagtttagaagaccggcttttcatgcgaggaaacacaccgccgattacctggcagctacgtttcagaatcgctgctgagatcgccacgggactcctcttcctccaccagaccaaacctgaaccaattgtccacagagaccttaaaccaggaaatgttctgctcgattacaactatgtgagcaagatcagtgatgtcgggctagcgagattagtccctgcagtagcggaaaacgttacacagtacagagtcacttcagctgcaggaactttctgttacattgatcctgagtaccaacaaacaggaatgttgggtgtgaagtcagatgtttattctcttggaatcatgcttttgcagatcttaaccgcaaaacagccaatgggtttggcttattacgttgaacaagcgatcgaagaagggactcttaaggatatgcttgatccagcagtaccggactggcctatagaagaagctctatctttagcaaagctttcgcttcaatgcgcggaactaagaagaaaagatagacctgacctcgggaaagagatattgcctgagctcaatcggttaagagagataggtgaagagagtttagagagtgtgttttatgcaggaaatcaaggaaagtctccaaacactagccaagtctcgattccggaatctccagctgcagactctcaatcctagttttgatatgagggaagcaaatgtgctctaacactcaatttgcaggagttataaacaaaagcagagcaagtttctttgctgattagtgtatagcattagaggaatttggtattctgttaaataatcagttatgtaaccgcctttttgttaggcccataacggttttgaac

SEQ ID NO: 45637 - protein, 709 aa, Arabidopsis thaliana
  peptide (1)..(709): Ceres Seq. ID no. 14309776
  misc_feature (1)..(102): Pfam Name: Universal stress protein family Pfam Description: Universal stress protein family
  misc_feature (144)..(709): Homolog of NCBI NO: 8778472 NR Description: F1L3.25 [Arabidopsis thaliana]
  misc_feature (53)..(680): Homolog of NCBI NO: 15239600 NR Description: protein kinase family [Arabidopsis thaliana]
  misc_feature (232)..(678): Homolog of NCBI NO: 15239834 NR Description: protein kinase family [Arabidopsis thaliana]
  misc_feature (162)..(699): Homolog of NCBI NO: 15224129 NR Description: protein kinase family [Arabidopsis thaliana]
  misc_feature (1)..(680): Homolog of NCBI NO: 14719286 NR Description: serine threonine kinase 1 [Zea mays]
  misc_feature (1)..(695): Homolog of NCBI NO: 18092335 NR Description: serine threonine kinase [Zea mays]
  misc_feature (1)..(700): Homolog of NCBI NO: 30685668 NR Description: protein kinase family [Arabidopsis thaliana]
  misc_feature (1)..(700): Homolog of NCBI NO: 9293976 NR Description: Ser/Thr protein kinaseroteinase) [Arabidopsis
  misc_feature (182)..(698): Homolog of NCBI NO: 25518361 NR Description: hypothetical protein F17F16.3 [imported] -
  misc_feature (1)..(698): Homolog of NCBI NO: 15219360 NR Description: protein kinase family [Arabidopsis thaliana]
GQTISLIHVLCRSHSSSDLEEGTPQQKQQMEKIAKDLFVSFHCYCSRKEINCRDILLEDADKVRAITEYVSSSAIENLVVGSASRNGFMRRFKTDLPTTVSKSAPDFCNVYVISKGKIASVRNASRPAPYQNSMQQCEIDNHHPHTPDKAPKYHDHPNSAGSTPSRPRKSVEADRSPLVKRKPYGDFYDSDSDLSFISPSSHRDSDISFISSGRPSVERSSFSLDFPESARTSRMSTSSEQSIGSNRLGIKFSDPGFLNESSTFSEESGRTSSYSSQSLDDVEAEMKRLRLELKQTMDMYSTACKEALSARQQATELQKLRTEEERRLEEAKSSEEAAMSIVEKERAKAKAALEAAEAAKRLAEVESKRRLTAEMKTMKESDSFSRGFVRYRKYTVEEIEEATSNFAESQKVGEGGYGPVFRGFLDHTSVAVKVLRPDAAQGRSQFQKEVEVLSCIRHPNMVLLLGACPEFGILVYEYMAKGSLEDRLFMRGNTPPITWQLRFRIAAEIATGLLFLHQTKPEPIVHRDLKPGNVLLDYNYVSKISDVGLARLVPAVAENVTQYRVTSAAGTFCYIDPEYQQTGMLGVKSDVYSLGIMLLQILTAKQPMGLAYYVEQAIEEGTLKDMLDPAVPDWPIEEALSLAKLSLQCAELRRKDRPDLGKEILPELNRLREIGEESLESVFYAGNQGKSPNTSQVSIPESPAADSQS

SEQ ID NO: 45638 - protein, 680 aa, Arabidopsis thaliana
  peptide (1)..(680): Ceres Seq. ID no. 14309777
  misc_feature (1)..(73): Pfam Name: Universal stress protein family Pfam Description: Universal stress protein family
  misc_feature (115)..(680): Homolog of NCBI NO: 8778472 NR Description: F1L3.25 [Arabidopsis thaliana]
  misc_feature (24)..(651): Homolog of NCBI NO: 15239600 NR Description: protein kinase family [Arabidopsis thaliana]
  misc_feature (203)..(649): Homolog of NCBI NO: 15239834 NR Description: protein kinase family [Arabidopsis thaliana]
  misc_feature (133)..(670): Homolog of NCBI NO: 15224129 NR Description: protein kinase family [Arabidopsis thaliana]
  misc_feature (1)..(651): Homolog of NCBI NO: 14719286 NR Description: serine threonine kinase 1 [Zea mays]
  misc_feature (1)..(666): Homolog of NCBI NO: 18092335 NR Description: serine threonine kinase [Zea mays]
  misc_feature (1)..(671): Homolog of NCBI NO: 30685668 NR Description: protein kinase family [Arabidopsis thaliana]
  misc_feature (1)..(671): Homolog of NCBI NO: 9293976 NR Description: Ser/Thr protein kinaseroteinase) [Arabidopsis
  misc_feature (153)..(669): Homolog of NCBI NO: 25518361 NR Description: hypothetical protein F17F16.3 [imported] -
  misc_feature (1)..(669): Homolog of NCBI NO: 15219360 NR Description: protein kinase family [Arabidopsis thaliana]
MEKIAKDLFVSFHCYCSRKEINCRDILLEDADKVRAITEYVSSSAIENLVVGSASRNGFMRRFKTDLPTTVSKSAPDFCNVYVISKGKIASVRNASRPAPYQNSMQQCEIDNHHPHTPDKAPKYHDHPNSAGSTPSRPRKSVEADRSPLVKRKPYGDFYDSDSDLSFISPSSHRDSDISFISSGRPSVERSSFSLDFPESARTSRMSTSSEQSIGSNRLGIKFSDPGFLNESSTFSEESGRTSSYSSQSLDDVEAEMKRLRLELKQTMDMYSTACKEALSARQQATELQKLRTEEERRLEEAKSSEEAAMSIVEKERAKAKAALEAAEAAKRLAEVESKRRLTAEMKTMKESDSFSRGFVRYRKYTVEEIEEATSNFAESQKVGEGGYGPVFRGFLDHTSVAVKVLRPDAAQGRSQFQKEVEVLSCIRHPNMVLLLGACPEFGILVYEYMAKGSLEDRLFMRGNTPPITWQLRFRIAAEIATGLLFLHQTKPEPIVHRDLKPGNVLLDYNYVSKISDVGLARLVPAVAENVTQYRVTSAAGTFCYIDPEYQQTGMLGVKSDVYSLGIMLLQILTAKQPMGLAYYVEQAIEEGTLKDMLDPAVPDWPIEEALSLAKLSLQCAELRRKDRPDLGKEILPELNRLREIGEESLESVFYAGNQGKSPNTSQVSIPESPAADSQS

SEQ ID NO: 45639 - protein, 621 aa, Arabidopsis thaliana
  peptide (1)..(621): Ceres Seq. ID no. 14309778
  misc_feature (56)..(621): Homolog of NCBI NO: 8778472 NR Description: F1L3.25 [Arabidopsis thaliana]
  misc_feature (1)..(592): Homolog of NCBI NO: 15239600 NR Description: protein kinase family [Arabidopsis thaliana]
  misc_feature (144)..(590): Homolog of NCBI NO: 15239834 NR Description: protein kinase family [Arabidopsis thaliana]
  misc_feature (74)..(611): Homolog of NCBI NO: 15224129 NR Description: protein kinase family [Arabidopsis thaliana]
  misc_feature (1)..(592): Homolog of NCBI NO: 14719286 NR Description: serine threonine kinase 1 [Zea mays]
  misc_feature (1)..(607): Homolog of NCBI NO: 18092335 NR Description: serine threonine kinase [Zea mays]
  misc_feature (1)..(612): Homolog of NCBI NO: 30685668 NR Description: protein kinase family [Arabidopsis thaliana]
  misc_feature (1)..(612): Homolog of NCBI NO: 9293976 NR Description: Ser/Thr protein kinaseroteinase) [Arabidopsis
  misc_feature (94)..(610): Homolog of NCBI NO: 25518361 NR Description: hypothetical protein F17F16.3 [imported] -
  misc_feature (1)..(610): Homolog of NCBI NO: 15219360 NR Description: protein kinase family [Arabidopsis thaliana]
MRRFKTDLPTTVSKSAPDFCNVYVISKGKIASVRNASRPAPYQNSMQQCEIDNHHPHTPDKAPKYHDHPNSAGSTPSRPRKSVEADRSPLVKRKPYGDFYDSDSDLSFISPSSHRDSDISFISSGRPSVERSSFSLDFPESARTSRMSTSSEQSIGSNRLGIKFSDPGFLNESSTFSEESGRTSSYSSQSLDDVEAEMKRLRLELKQTMDMYSTACKEALSARQQATELQKLRTEEERRLEEAKSSEEAAMSIVEKERAKAKAALEAAEAAKRLAEVESKRRLTAEMKTMKESDSFSRGFVRYRKYTVEEIEEATSNFAESQKVGEGGYGPVFRGFLDHTSVAVKVLRPDAAQGRSQFQKEVEVLSCIRHPNMVLLLGACPEFGILVYEYMAKGSLEDRLFMRGNTPPITWQLRFRIAAEIATGLLFLHQTKPEPIVHRDLKPGNVLLDYNYVSKISDVGLARLVPAVAENVTQYRVTSAAGTFCYIDPEYQQTGMLGVKSDVYSLGIMLLQILTAKQPMGLAYYVEQAIEEGTLKDMLDPAVPDWPIEEALSLAKLSLQCAELRRKDRPDLGKEILPELNRLREIGEESLESVFYAGNQGKSPNTSQVSIPESPAADSQS

SEQ ID NO: 45640 - DNA, 2581 bp, Arabidopsis thaliana
  misc_feature (1)..(2581): Ceres Seq. ID no. 13646832
  misc_feature: MA Experiment ID: 108434 Result: Down-regulated in Transcription
  misc_feature: MA Experiment 108434 PARAMETER Experiment Name: At_Root_Tips_cDNA_P Parameter: Tissue Value: Root Tips
  misc_feature: MA Experiment ID: 108473 Result: Up-regulated in Transcription
  misc_feature: MA Experiment 108473 PARAMETER Experiment Name: At_Drought_Flowers_cDNA_P Parameter: Timepoint (hr) Value: 7 d
  misc_feature: MA Experiment 108473 PARAMETER Experiment Name: At_Drought_Flowers_cDNA_P Parameter: Tissue Value: Flower
  misc_feature: MA Experiment 108473 PARAMETER Experiment Name: At_Drought_Flowers_cDNA_P Parameter: Treatment Value: Drought vs. No Drought
  misc_feature: MA Experiment ID: 108561 Result: Up-regulated in Transcription
  misc_feature: MA Experiment 108561 PARAMETER Experiment Name: At_100uM_ABA_cDNA_P Parameter: Timepoint (hr) Value: 6
  misc_feature: MA Experiment 108561 PARAMETER Experiment Name: At_100uM_ABA_cDNA_P Parameter: Tissue Value: Aerial
  misc_feature: MA Experiment 108561 PARAMETER Experiment Name: At_100uM_ABA_cDNA_P Parameter: Treatment Value: 100uM ABA vs. No Treatment
  misc_feature: MA Experiment ID: 108595 Result: Up-regulated in Transcription
  misc_feature: MA Experiment 108595 PARAMETER Experiment Name: At_Ler-pi_Ovule_cDNA_P Parameter: Plant Line Value: null
  misc_feature: MA Experiment ID: 108605 Result: Up-regulated in Transcription
  misc_feature: MA Experiment 108605 PARAMETER Experiment Name: At_100uM_ABA_cDNA_P Parameter: Timepoint (hr) Value: 6
  misc_feature: MA Experiment 108605 PARAMETER Experiment Name: At_100uM_ABA_cDNA_P Parameter: Tissue Value: Aerial
  misc_feature: MA Experiment 108605 PARAMETER Experiment Name: At_100uM_ABA_cDNA_P Parameter: Treatment Value: 100uM ABA vs. No Treatment
  misc_feature: MA Experiment ID: 108607 Result: Up-regulated in Transcription
  misc_feature: MA Experiment 108607 PARAMETER Experiment Name: At_100uM_ABA_cDNA_P Parameter: Timepoint (hr) Value: 4
  misc_feature: MA Experiment 108607 PARAMETER Experiment Name: At_100uM_ABA_cDNA_P Parameter: Tissue Value: Aerial
  misc_feature: MA Experiment 108607 PARAMETER Experiment Name: At_100uM_ABA_cDNA_P Parameter: Treatment Value: 100uM ABA vs. No Treatment
  misc_feature: MA Experiment ID: 20000069 Result: Up-regulated in Transcription
  misc_feature: MA Experiment 20000069 PARAMETER Experiment Name: At_100uM_ABA_Mutants_cDNA_P Parameter: Plant Line Value: CS23
  misc_feature: MA Experiment 20000069 PARAMETER Experiment Name: At_100uM_ABA_Mutants_cDNA_P Parameter: Timepoint (hr) Value: 6
  misc_feature: MA Experiment 20000069 PARAMETER Experiment Name: At_100uM_ABA_Mutants_cDNA_P Parameter: Tissue Value: Aerial
  misc_feature: MA Experiment 20000069 PARAMETER Experiment Name: At_100uM_ABA_Mutants_cDNA_P Parameter: Treatment Value: 100uM ABA vs. No Treatment
  misc_feature: MA Experiment ID: 20000070 Result: Up-regulated in Transcription
  misc_feature: MA Experiment 20000070 PARAMETER Experiment Name: At_100uM_ABA_Mutants_cDNA_P Parameter: Plant Line Value: CS24
  misc_feature: MA Experiment 20000070 PARAMETER Experiment Name: At_100uM_ABA_Mutants_cDNA_P Parameter: Timepoint (hr) Value: 6
  misc_feature: MA Experiment 20000070 PARAMETER Experiment Name: At_100uM_ABA_Mutants_cDNA_P Parameter: Tissue Value: Aerial
  misc_feature: MA Experiment 20000070 PARAMETER Experiment Name: At_100uM_ABA_Mutants_cDNA_P Parameter: Treatment Value: 100uM ABA vs. No Treatment
  misc_feature: MA Experiment ID: 20000071 Result: Up-regulated in Transcription
  misc_feature: MA Experiment 20000071 PARAMETER Experiment Name: At_100uM_ABA_Mutants_cDNA_P Parameter: Plant Line Value: CS8104
  misc_feature: MA Experiment 20000071 PARAMETER Experiment Name: At_100uM_ABA_Mutants_cDNA_P Parameter: Timepoint (hr) Value: 6
  misc_feature: MA Experiment 20000071 PARAMETER Experiment Name: At_100uM_ABA_Mutants_cDNA_P Parameter: Tissue Value: Aerial
  misc_feature: MA Experiment 20000071 PARAMETER Experiment Name: At_100uM_ABA_Mutants_cDNA_P Parameter: Treatment Value: 100uM ABA vs. No Treatment
  misc_feature: MA Experiment ID: 20000086 Result: Up-regulated in Transcription
  misc_feature: MA Experiment 20000086 PARAMETER Experiment Name: At_100uM_ABA_Mutants_cDNA_P Parameter: Plant Line Value: CS22
  misc_feature: MA Experiment 20000086 PARAMETER Experiment Name: At_100uM_ABA_Mutants_cDNA_P Parameter: Timepoint (hr) Value: 6
  misc_feature: MA Experiment 20000086 PARAMETER Experiment Name: At_100uM_ABA_Mutants_cDNA_P Parameter: Tissue Value: Aerial
  misc_feature: MA Experiment 20000086 PARAMETER Experiment Name: At_100uM_ABA_Mutants_cDNA_P Parameter: Treatment Value: 100uM ABA vs. No Treatment
  misc_feature: MA Experiment ID: 20000087 Result: Up-regulated in Transcription
  misc_feature: MA Experiment 20000087 PARAMETER Experiment Name: At_100uM_ABA_Mutants_cDNA_P Parameter: Plant Line Value: WS
  misc_feature: MA Experiment 20000087 PARAMETER Experiment Name: At_100uM_ABA_Mutants_cDNA_P Parameter: Timepoint (hr) Value: 6
  misc_feature: MA Experiment 20000087 PARAMETER Experiment Name: At_100uM_ABA_Mutants_cDNA_P Parameter: Tissue Value: Aerial
  misc_feature: MA Experiment 20000087 PARAMETER Experiment Name: At_100uM_ABA_Mutants_cDNA_P Parameter: Treatment Value: 100uM ABA vs. No Treatment
  misc_feature: MA Experiment ID: 20000088 Result: Up-regulated in Transcription
  misc_feature: MA Experiment 20000088 PARAMETER Experiment Name: At_100uM_ABA_Mutants_cDNA_P Parameter: Plant Line Value: Landsberg
  misc_feature: MA Experiment 20000088 PARAMETER Experiment Name: At_100uM_ABA_Mutants_cDNA_P Parameter: Timepoint (hr) Value: 6
  misc_feature: MA Experiment 20000088 PARAMETER Experiment Name: At_100uM_ABA_Mutants_cDNA_P Parameter: Tissue Value: Aerial
  misc_feature: MA Experiment 20000088 PARAMETER Experiment Name: At_100uM_ABA_Mutants_cDNA_P Parameter: Treatment Value: 100uM ABA vs. No Treatment
  misc_feature: MA Experiment ID: 20000117 Result: Up-regulated in Transcription
  misc_feature: MA Experiment 20000117 PARAMETER Experiment Name: At_100uM_ABA_Mutants_cDNA_P Parameter: Plant Line Value: Columbia
  misc_feature: MA Experiment 20000117 PARAMETER Experiment Name: At_100uM_ABA_Mutants_cDNA_P Parameter: Timepoint (hr) Value: 6
  misc_feature: MA Experiment 20000117 PARAMETER Experiment Name: At_100uM_ABA_Mutants_cDNA_P Parameter: Tissue Value: Aerial
  misc_feature: MA Experiment 20000117 PARAMETER Experiment Name: At_100uM_ABA_Mutants_cDNA_P Parameter: Treatment Value: 100uM ABA vs. No Treatment
  misc_feature: MA Experiment ID: 20000179 Result: Up-regulated in Transcription
  misc_feature: MA Experiment 20000179 PARAMETER Experiment Name: At_Germinating_Seeds_P Parameter: Age (hr) Value: 6 vs. 0
  misc_feature: MA Experiment 20000179 PARAMETER Experiment Name: At_Germinating_Seeds_P Parameter: Tissue Value: Germinating Seeds
  misc_feature: MA Experiment ID: 20000185 Result: Up-regulated in Transcription
  misc_feature: MA Experiment 20000185 PARAMETER Experiment Name: At_Roots__P Parameter: Age (day) Value: 7 vs. 21
  misc_feature: MA Experiment 20000185 PARAMETER Experiment Name: At_Roots__P Parameter: Organism Value: A. thaliana
  misc_feature: MA Experiment 20000185 PARAMETER Experiment Name: At_Roots__P Parameter: Tissue Value: Roots vs. Whole Plant
  misc_feature: MA Experiment ID: 20000224 Result: Down-regulated in Transcription
  misc_feature: MA Experiment ID: 20000227 Result: Down-regulated in Transcription
  misc_feature: MA Experiment 20000227 PARAMETER Experiment Name: At_Root-Tips-vs-Tops_P Parameter: Tissue Value: Root Tips vs. Root Tops
  misc_feature: MA Experiment ID: 20000286 Result: Down-regulated in Transcription
  misc_feature: MA Experiment 20000286 PARAMETER Experiment Name: At_Open_Flower_P Parameter: Age (day) Value: 21
  misc_feature: MA Experiment 20000286 PARAMETER Experiment Name: At_Open_Flower_P Parameter: Plant Line Value: WS
  misc_feature: MA Experiment 20000286 PARAMETER Experiment Name: At_Open_Flower_P Parameter: Tissue Value: Half Open vs. Whole Plant
  misc_feature: MA Experiment ID: 20000437 Result: Up-regulated in Transcription
  misc_feature: MA Experiment 20000437 PARAMETER Experiment Name: At_Drought_P Parameter: Age (day) Value: 8
  misc_feature: MA Experiment 20000437 PARAMETER Experiment Name: At_Drought_P Parameter: Organism Value: A. thaliana
  misc_feature: MA Experiment 20000437 PARAMETER Experiment Name: At_Drought_P Parameter: Plant Line Value: WS
  misc_feature: MA Experiment 20000437 PARAMETER Experiment Name: At_Drought_P Parameter: Timepoint (hr) Value: 24
  misc_feature: MA Experiment 20000437 PARAMETER Experiment Name: At_Drought_P Parameter: Tissue Value: Whole Plant
  misc_feature: MA Experiment 20000437 PARAMETER Experiment Name: At_Drought_P Parameter: Treatment Value: Drought vs. No Drought
  misc_feature: MA Experiment ID: 20000439 Result: Up-regulated in Transcription
  misc_feature: MA Experiment 20000439 PARAMETER Experiment Name: At_Roots__P Parameter: Age (day) Value: 14 vs. 21
  misc_feature: MA Experiment 20000439 PARAMETER Experiment Name: At_Roots__P Parameter: Organism Value: A. thaliana
  misc_feature: MA Experiment 20000439 PARAMETER Experiment Name: At_Roots__P Parameter: Tissue Value: Roots vs. Whole Plant
  misc_feature: MA Experiment ID: 20000453 Result: Up-regulated in Transcription
  misc_feature: MA Experiment 20000453 PARAMETER Experiment Name: At_100uM_ABA_P Parameter: Age (day) Value: 15
  misc_feature: MA Experiment 20000453 PARAMETER Experiment Name: At_100uM_ABA_P Parameter: Organism Value: A. thaliana
  misc_feature: MA Experiment 20000453 PARAMETER Experiment Name: At_100uM_ABA_P Parameter: Plant Line Value: WS
  misc_feature: MA Experiment 20000453 PARAMETER Experiment Name: At_100uM_ABA_P Parameter: Timepoint (hr) Value: 24
  misc_feature: MA Experiment 20000453 PARAMETER Experiment Name: At_100uM_ABA_P Parameter: Tissue Value: Aerial
  misc_feature: MA Experiment 20000453 PARAMETER Experiment Name: At_100uM_ABA_P Parameter: Treatment Value: 100uM ABA vs. No Treatment
  misc_feature: MA Experiment ID: 20001554 Result: Up-regulated in Transcription
  misc_feature: MA Experiment 20001554 PARAMETER Experiment Name: At_Drought_Soil_Dry_P Parameter: Age (day) Value: 21
  misc_feature: MA Experiment 20001554 PARAMETER Experiment Name: At_Drought_Soil_Dry_P Parameter: Organism Value: A. thaliana
  misc_feature: MA Experiment 20001554 PARAMETER Experiment Name: At_Drought_Soil_Dry_P Parameter: Plant Line Value: WS
  misc_feature: MA Experiment 20001554 PARAMETER Experiment Name: At_Drought_Soil_Dry_P Parameter: Post Timepoint (hr) Value: None
  misc_feature: MA Experiment 20001554 PARAMETER Experiment Name: At_Drought_Soil_Dry_P Parameter: Post-Treatment Value: None
  misc_feature: MA Experiment 20001554 PARAMETER Experiment Name: At_Drought_Soil_Dry_P Parameter: Timepoint (day) Value: 7
  misc_feature: MA Experiment 20001554 PARAMETER Experiment Name: At_Drought_Soil_Dry_P Parameter: Treatment Value: Drought vs. No Drought
  misc_feature: MA Experiment ID: 20001555 Result: Up-regulated in Transcription
  misc_feature: MA Experiment 20001555 PARAMETER Experiment Name: At_Drought_Soil_Dry_P Parameter: Age (day) Value: 24
  misc_feature: MA Experiment 20001555 PARAMETER Experiment Name: At_Drought_Soil_Dry_P Parameter: Organism Value: A. thaliana
  misc_feature: MA Experiment 20001555 PARAMETER Experiment Name: At_Drought_Soil_Dry_P Parameter: Plant Line Value: WS
  misc_feature: MA Experiment 20001555 PARAMETER Experiment Name: At_Drought_Soil_Dry_P Parameter: Post Timepoint (hr) Value: None
  misc_feature: MA Experiment 20001555 PARAMETER Experiment Name: At_Drought_Soil_Dry_P Parameter: Post-Treatment Value: None
  misc_feature: MA Experiment 20001555 PARAMETER Experiment Name: At_Drought_Soil_Dry_P Parameter: Timepoint (day) Value: 10
  misc_feature: MA Experiment 20001555 PARAMETER Experiment Name: At_Drought_Soil_Dry_P Parameter: Treatment Value: Drought vs. No Drought
  misc_feature: MA Experiment ID: 20001559 Result: Up-regulated in Transcription
  misc_feature: MA Experiment 20001559 PARAMETER Experiment Name: At_Drought_Soil_Dry_P Parameter: Age (day) Value: 28
  misc_feature: MA Experiment 20001559 PARAMETER Experiment Name: At_Drought_Soil_Dry_P Parameter: Organism Value: A. thaliana
  misc_feature: MA Experiment 20001559 PARAMETER Experiment Name: At_Drought_Soil_Dry_P Parameter: Plant Line Value: WS
  misc_feature: MA Experiment 20001559 PARAMETER Experiment Name: At_Drought_Soil_Dry_P Parameter: Post Timepoint (hr) Value: 29
  misc_feature: MA Experiment 20001559 PARAMETER Experiment Name: At_Drought_Soil_Dry_P Parameter: Post-Treatment Value: Re-Water vs. No Drought
  misc_feature: MA Experiment 20001559 PARAMETER Experiment Name: At_Drought_Soil_Dry_P Parameter: Timepoint (day) Value: 14
  misc_feature: MA Experiment 20001559 PARAMETER Experiment Name: At_Drought_Soil_Dry_P Parameter: Treatment Value: Drought vs. No Drought
  misc_feature: MA Experiment ID: 20001905 Result: Up-regulated in Transcription
  misc_feature: MA Experiment 20001905 PARAMETER Experiment Name: At_Drought_Reproduction_P Parameter: Age (day) Value: 40
  misc_feature: MA Experiment 20001905 PARAMETER Experiment Name: At_Drought_Reproduction_P Parameter: Organism Value: A. thaliana
  misc_feature: MA Experiment 20001905 PARAMETER Experiment Name: At_Drought_Reproduction_P Parameter: Plant Line Value: WS
  misc_feature: MA Experiment 20001905 PARAMETER Experiment Name: At_Drought_Reproduction_P Parameter: Timepoint (day) Value: 10
  misc_feature: MA Experiment 20001905 PARAMETER Experiment Name: At_Drought_Reproduction_P Parameter: Tissue Value: Rosettes
  misc_feature: MA Experiment 20001905 PARAMETER Experiment Name: At_Drought_Reproduction_P Parameter: Treatment Value: Drought vs. No Drought
  misc_feature: MA Experiment ID: 20001906 Result: Up-regulated in Transcription
  misc_feature: MA Experiment 20001906 PARAMETER Experiment Name: At_Drought_Reproduction_P Parameter: Age (day) Value: 35
  misc_feature: MA Experiment 20001906 PARAMETER Experiment Name: At_Drought_Reproduction_P Parameter: Organism Value: A. thaliana
  misc_feature: MA Experiment 20001906 PARAMETER Experiment Name: At_Drought_Reproduction_P Parameter: Plant Line Value: WS
  misc_feature: MA Experiment 20001906 PARAMETER Experiment Name: At_Drought_Reproduction_P Parameter: Timepoint (day) Value: 5
  misc_feature: MA Experiment 20001906 PARAMETER Experiment Name: At_Drought_Reproduction_P Parameter: Tissue Value: Siliques
  misc_feature: MA Experiment 20001906 PARAMETER Experiment Name: At_Drought_Reproduction_P Parameter: Treatment Value: Drought vs. No Drought
  misc_feature: MA Experiment ID: 20001908 Result: Up-regulated in Transcription
  misc_feature: MA Experiment 20001908 PARAMETER Experiment Name: At_Drought_Reproduction_P Parameter: Age (day) Value: 40
  misc_feature: MA Experiment 20001908 PARAMETER Experiment Name: At_Drought_Reproduction_P Parameter: Organism Value: A. thaliana
  misc_feature: MA Experiment 20001908 PARAMETER Experiment Name: At_Drought_Reproduction_P Parameter: Plant Line Value: WS
  misc_feature: MA Experiment 20001908 PARAMETER Experiment Name: At_Drought_Reproduction_P Parameter: Timepoint (day) Value: 10
  misc_feature: MA Experiment 20001908 PARAMETER Experiment Name: At_Drought_Reproduction_P Parameter: Tissue Value: Siliques
  misc_feature: MA Experiment 20001908 PARAMETER Experiment Name: At_Drought_Reproduction_P Parameter: Treatment Value: Drought vs. No Drought
  misc_feature: MA Experiment ID: 20001911 Result: Up-regulated in Transcription
  misc_feature: MA Experiment 20001911 PARAMETER Experiment Name: At_Drought_Reproduction_P Parameter: Age (day) Value: 40
  misc_feature: MA Experiment 20001911 PARAMETER Experiment Name: At_Drought_Reproduction_P Parameter: Organism Value: A. thaliana
  misc_feature: MA Experiment 20001911 PARAMETER Experiment Name: At_Drought_Reproduction_P Parameter: Plant Line Value: WS
  misc_feature: MA Experiment 20001911 PARAMETER Experiment Name: At_Drought_Reproduction_P Parameter: Timepoint (day) Value: 10
  misc_feature: MA Experiment 20001911 PARAMETER Experiment Name: At_Drought_Reproduction_P Parameter: Tissue Value: Flowers
  misc_feature: MA Experiment 20001911 PARAMETER Experiment Name: At_Drought_Reproduction_P Parameter: Treatment Value: Drought vs. No Drought
gaaagcctctgagacgagtagaaggttctctctggtgaagaaaccaatgcatttcggcgacagcctgaaactgaaaagccatcgatcgaccgagaaagcgaaaagagagagagatgagactcgtcgtctcaagctgtctactagttgcagctccttttctctcctctctgttacgagtctcactcgccactgttgtcctcaattccatctccgcctcttttgccgatctcccagccaaatttgacggctccgtgaccaaaaacggaatctgtggagctctatacgtcgcagatcctctcgacggttgctcaccgcttctccacgccgccgcatccaactggacgcaacacagaactactaagttcgctttgataatcagaggcgaatgttcttttgaggataagctgctcaatgcccagaactcaggttttcaagctgtgattgtctatgacaacattgacaacgaagatctcatcgtcatgaaggtgaaccctcaggacattacagttgatgcagtcttcgtttcaaatgtcgccggtgagattttgagaaagtacgcgagaggccgagatggtgaatgctgccttaatccgccagacagagggagcgcttggactgtgttggccatctccttcttctctctccttcttatagtcactttcctgttgattgccttctttgcacccagacactggacccaatggcgagggaggcacaccaggaccatcaggttagatgcaaagctcgtccacacactcccctgcttcaccttcactgattctgctcaccacaaggccggggaaacatgtgctatatgtctcgaggattacagatttggagaaagcctcagacttctcccctgccaacatgcttttcacttgaattgcatcgactcttggttgacaaaatggggtacatcttgccctgtgtgcaagcatgacataagaaccgagactatgtcttctgaggtacataaacgagagagtccgagaacagatacaagtacgagtagatttgcctttgcccaatccagtcaaagccgttagagttattatcggcttagcagctgaacactcatatcagtgctcggttacctggatcaggtccaggtttgcatcttatattgaatggttaatcatggtgggataagtttaggtaaagggaccggatctgccatactggtcgtgctttgctggattcccagatcaaaaagatatgagttgctttgcctctttttctttgcatgtgtacatttacatacgctctgagtcatgtgtacatttgatcattgtgtgtgtgtgtgtgttatagattgaaaaaatgtgtgtgatagtacagatatgcaaacaaattgatagaaaacaaatgttggtctaatcagattttctctctccgatccaggcaaatctcaatgttatcttgttgataatttctttgcctaaagtttgtataatatgaatattgaatctgattcccttacatgggggaatggaatccattgaacgtggctttgattttgtcttgtctgtagtaataataagaaaagaacacgtcatcctcatctctacctaacgactcatccaatacgatgactcgttcatgggtttgttagttgcgcaattccatcaccaaaactttctattacatactcaacttcttttgattactaaattcagccaacatttccttctcatctctaatcagtgaacacgttttctatgcaggctttggggcctatcttaccatagctgtctaagaagactattatcttatattctttattgtagatttcatttacttgcgtatggaattggaaacaaatttctaattgttgaatcatataccattatttttatattggccatgcatgtgtataagtggaagatagaacaatattaaaacaatattattgtgtttggtcctatttattactctctgctctcttcctgaagcttcttcatctttttgtttgacaagaagaggtagagaagaagatgtctcaatcaatctcctccagcacaaaggcagaagaagttgttagtgtagatgtgagccaagccaagactctcctccagtctgggcatcaatatcttgacgttaggactcaggacgagtttaggagaggccattgtgaggcagctaagatcgtcaacattccctacatgctcaacacacctcaaggtagagtgaagaatcaagagttcttggagcaagtatcttctcttctaaacccagctgatgatatccttgtgggttgtcagagtggagccagatccttaaaagccacaactgaacttgttgctgcaggttacaagaaagtgagaaacgtgggaggtggctacttggcttgggtggatcacagctttcccatcaacacggaggaggaggagccatctgctaattaataatcttaagattctcttcttttcttaatcaaataatataactgcctgtgtgatgtagtaatcattttcaatttaaaattccagtttcttgtaatcaaaactttcgtgtaccaaattcaataaaagctgtgtttctctaaaaaaaaaaaaaaaaaaaactcgagggggggcccggt

SEQ ID NO: 45641 - protein, 310 aa, Arabidopsis thaliana
  peptide (1)..(310): Ceres Seq. ID no. 13646833
  misc_feature (47)..(149): Pfam Name: PA domain Pfam Description: PA domain
  misc_feature (1)..(239): Homolog of NCBI NO: 7487358 NR Description: hypothetical protein T22J18.16 - Arabidopsis
  misc_feature (47)..(303): Homolog of NCBI NO: 15219668 NR Description: integral membrane protein -related [Arabidopsis
  misc_feature (3)..(309): Homolog of NCBI NO: 15233945 NR Description: expressed protein [Arabidopsis thaliana]
  misc_feature (1)..(297): Homolog of NCBI NO: 15219930 NR Description: RING zinc finger protein -related [Arabidopsis
  misc_feature (1)..(279): Homolog of NCBI NO: 19071633 NR Description: putative integral membrane protein
  misc_feature (18)..(301): Homolog of NCBI NO: 6942149 NR Description: ReMembR-H2 protein JR702 [Arabidopsis thaliana]
  misc_feature (30)..(301): Homolog of NCBI NO: 25406132 NR Description: unknown protein F17M19.13 [imported] -
  misc_feature (18)..(301): Homolog of NCBI NO: 22330577 NR Description: expressed protein [Arabidopsis thaliana]
  misc_feature (27)..(281): Homolog of NCBI NO: 38637053 NR Description: putative ReMembR-H2 protein
  misc_feature (1)..(310): Homolog of NCBI NO: 15239276 NR Description: ReMembR-H2 protein JR700 (gb|AAF32325.1)
MRLVVSSCLLVAAPFLSSLLRVSLATVVLNSISASFADLPAKFDGSVTKNGICGALYVADPLDGCSPLLHAAASNWTQHRTTKFALIIRGECSFEDKLLNAQNSGFQAVIVYDNIDNEDLIVMKVNPQDITVDAVFVSNVAGEILRKYARGRDGECCLNPPDRGSAWTVLAISFFSLLLIVTFLLIAFFAPRHWTQWRGRHTRTIRLDAKLVHTLPCFTFTDSAHHKAGETCAICLEDYRFGESLRLLPCQHAFHLNCIDSWLTKWGTSCPVCKHDIRTETMSSEVHKRESPRTDTSTSRFAFAQSSQSR

SEQ ID NO: 45642 - protein, 188 aa, Arabidopsis thaliana
  peptide (1)..(188): Ceres Seq. ID no. 13646834
  misc_feature (110)..(151): Pfam Name: Zinc finger, C3HC4 type (RING finger) Pfam Description: Zinc finger, C3HC4 type (RING finger)
  misc_feature (1)..(117): Homolog of NCBI NO: 7487358 NR Description: hypothetical protein T22J18.16 - Arabidopsis
  misc_feature (1)..(181): Homolog of NCBI NO: 15219668 NR Description: integral membrane protein -related [Arabidopsis
  misc_feature (1)..(187): Homolog of NCBI NO: 15233945 NR Description: expressed protein [Arabidopsis thaliana]
  misc_feature (1)..(175): Homolog of NCBI NO: 15219930 NR Description: RING zinc finger protein -related [Arabidopsis
  misc_feature (1)..(157): Homolog of NCBI NO: 19071633 NR Description: putative integral membrane protein
  misc_feature (1)..(179): Homolog of NCBI NO: 6942149 NR Description: ReMembR-H2 protein JR702 [Arabidopsis thaliana]
  misc_feature (1)..(179): Homolog of NCBI NO: 25406132 NR Description: unknown protein F17M19.13 [imported] -
  misc_feature (1)..(179): Homolog of NCBI NO: 22330577 NR Description: expressed protein [Arabidopsis thaliana]
  misc_feature (1)..(159): Homolog of NCBI NO: 38637053 NR Description: putative ReMembR-H2 protein
  misc_feature (1)..(188): Homolog of NCBI NO: 15239276 NR Description: ReMembR-H2 protein JR700 (gb|AAF32325.1)
MKVNPQDITVDAVFVSNVAGEILRKYARGRDGECCLNPPDRGSAWTVLAISFFSLLLIVTFLLIAFFAPRHWTQWRGRHTRTIRLDAKLVHTLPCFTFTDSAHHKAGETCAICLEDYRFGESLRLLPCQHAFHLNCIDSWLTKWGTSCPVCKHDIRTETMSSEVHKRESPRTDTSTSRFAFAQSSQSR

SEQ ID NO: 45643 - DNA, 2038 bp, Arabidopsis thaliana
  misc_feature (1)..(2038): Ceres Seq. ID no. 13591671
  misc_feature: MA Experiment ID: 108434 Result: Up-regulated in Transcription
  misc_feature: MA Experiment 108434 PARAMETER Experiment Name: At_Root_Tips_cDNA_P Parameter: Tissue Value: Root Tips
  misc_feature: MA Experiment ID: 108595 Result: Down-regulated in Transcription
  misc_feature: MA Experiment 108595 PARAMETER Experiment Name: At_Ler-pi_Ovule_cDNA_P Parameter: Plant Line Value: null
  misc_feature: MA Experiment ID: 20000185 Result: Up-regulated in Transcription
  misc_feature: MA Experiment 20000185 PARAMETER Experiment Name: At_Roots__P Parameter: Age (day) Value: 7 vs. 21
  misc_feature: MA Experiment 20000185 PARAMETER Experiment Name: At_Roots__P Parameter: Organism Value: A. thaliana
  misc_feature: MA Experiment 20000185 PARAMETER Experiment Name: At_Roots__P Parameter: Tissue Value: Roots vs. Whole Plant
  misc_feature: MA Experiment ID: 20000439 Result: Up-regulated in Transcription
  misc_feature: MA Experiment 20000439 PARAMETER Experiment Name: At_Roots__P Parameter: Age (day) Value: 14 vs. 21
  misc_feature: MA Experiment 20000439 PARAMETER Experiment Name: At_Roots__P Parameter: Organism Value: A. thaliana
  misc_feature: MA Experiment 20000439 PARAMETER Experiment Name: At_Roots__P Parameter: Tissue Value: Roots vs. Whole Plant
  misc_feature: MA Experiment ID: 20000794 Result: Up-regulated in Transcription
  misc_feature: MA Experiment 20000794 PARAMETER Experiment Name: At_Petals_P Parameter: Age (day) Value: 23-25 days
  misc_feature: MA Experiment 20000794 PARAMETER Experiment Name: At_Petals_P Parameter: Plant Line Value: WS
  misc_feature: MA Experiment 20000794 PARAMETER Experiment Name: At_Petals_P Parameter: Tissue Value: Petals vs. Whole plant
gatctcaagtcgtctctgccatttttggctttttaatcaaaccctagagagattgagagagcgaagagaagccatcatcagccatggcgatgaagaatctactgtccctagctcgccgatctcagaggcgtttattcctcactcaagccacacgatcttcctcttcgttttcagctatcgattcggtgccggcttccgcatctccgacggctctatctccaccgccgccgcatcttatgccatacgaccacgcggctgagattataaaaaataagatcaagaagctcgagaatcctgataagaggttccttaaatacgcatctccacatccgatcctcgcttcccacaatcacatcttgtcagctccggagactcgtgtcactaccttgcccaatggtctacgagtcgctactgagtcaaatctctcggctaagaccgccaccgttggagtctggatcgacgctggatctcggtttgagtccgatgagaccaacggaacggctcattttttggagcatatgatattcaaaggcacggataggcgtacagtgagagcgttggaggaagagatcgaagatattggtggtcacctgaacgcgtatacatcgagggaacagaccacttattatgctaaggttttggattccaatgtgaaccaggctttggatgtcttggctgatatcctacagaattctaagttcgaggaacagagaattaaccgcgaacgagatgtcatcctcagggaaatgcaagaggtggagggacaaaccgatgaagtggttcttgaccatttacatgccactgcattccaatacacaccccttggaagaactattttgggacctgctcagaacgtcaaatcgatcaccagagaggatctacagaactacattaagactcactacactgcttccaggatggtgattgctgctgcaggagctgttaagcatgaggaagttgttgagcaagtgaagaagctatttaccaagttgtcgtctgatccaacaactacttctcaactggttgccaatgaacctgctagttttactggttctgaggtccgaatgattgatgacgacctaccccttgcacaatttgctgttgcctttgagggagcatcttggactgatccagattccgttgctcttatggttatgcaaactatgttgggttcgtggaacaaaaatgttggtggtggaaaacacgtgggttctgacctgacccagagggttgccattaatgaaatagcagaaagcataatggcattcaacactaactacaaggatactggactgttcggcgtttatgcagttgccaaggccgattgcttggatgatttatcatatgccattatgtatgaggtaaccaagctggcctaccgagtttcagacgctgatgtgacacgtgcacgaaatcagctgaaatcatcattgttacttcacatggatggaaccagcccaattgctgaagatattggtcgtcagctgctgacctatgggcgtagaatcccaaccgctgaactctttgctaggatcgatgctgttgatgccagcacggtaaaacgtgttgccaacaaatatatctatgacaaagacattgcaatctcagctattggtccaatccaagatttgccagactacaacaaattcagacgcagaacctactggaaccggtactaaggctctgaaataaaggtcactgaatcgcaaggttcgcccacggggagattccgtaggcggagagagcagaacgaggtgatgatggattcattatttttgagtttttcttactgtatcttcataatttaccatcatcgctggtaaaataagtgtaccatttactctttgtcctctactggaaaaatgctagagatcctctgtgtgtgttttttttgttctcttcataattttcccatacacatactaataagttctttgatgtttggttgaaaacttgaattggatacatttcatttcttcttgtgaaactctatcaattcacttgtgatttgatccagttgacaaatttattaagattc

SEQ ID NO: 45644 - protein, 531 aa, Arabidopsis thaliana
  peptide (1)..(531): Ceres Seq. ID no. 13591672
  misc_feature (260)..(446): Pfam Name: Peptidase M16 inactive domain Pfam Description: Peptidase M16 inactive domain
  misc_feature (260)..(446): Pfam Name: Peptidase M16 inactive domain Pfam Description: Peptidase M16 inactive domain
  misc_feature (91)..(530): Homolog of NCBI NO: 21357875 NR Description: CG3731-PB [Drosophila melanogaster]
  misc_feature (74)..(527): Homolog of NCBI NO: 34910490 NR Description: putative mitochondrial processing peptidase beta
  misc_feature (1)..(531): Homolog of NCBI NO: 477819 NR Description: ubiquinol-cytochrome-c reductase (EC 1.10.2.2)
  misc_feature (1)..(531): Homolog of NCBI NO: 587564 NR Description: mitochondrial processing peptidase [Solanum
  misc_feature (1)..(531): Homolog of NCBI NO: 477280 NR Description: ubiquinol-cytochrome-c reductase (EC 1.10.2.2)
  misc_feature (91)..(530): Homolog of NCBI NO: 21357875 NR Description: CG3731-PB [Drosophila melanogaster]
  misc_feature (1)..(531): Homolog of NCBI NO: 477819 NR Description: ubiquinol-cytochrome-c reductase (EC 1.10.2.2)
  misc_feature (1)..(531): Homolog of NCBI NO: 477280 NR Description: ubiquinol-cytochrome-c reductase (EC 1.10.2.2)
  misc_feature (1)..(531): Homolog of NCBI NO: 15232845 NR Description: mitochondrial processing peptidase -related
  misc_feature (1)..(503): Homolog of NCBI NO: 30678485 NR Description: mitochondrial processing peptidase -related
  misc_feature (1)..(531): Homolog of NCBI NO: 12802327 NR Description: mitochondrial processing peptidase beta subunit
  misc_feature (1)..(531): Homolog of NCBI NO: 13959067 NR Description: mitochondrial processing peptidase [Avicennia
  misc_feature (1)..(531): Homolog of NCBI NO: 587566 NR Description: mitochondrial processing peptidase [Solanum
  misc_feature (1)..(531): Homolog of NCBI NO: 587564 NR Description: mitochondrial processing peptidase [Solanum
  misc_feature (74)..(527): Homolog of NCBI NO: 34910490 NR Description: putative mitochondrial processing peptidase beta
  misc_feature (1)..(531): Homolog of NCBI NO: 587566 NR Description: mitochondrial processing peptidase [Solanum
  misc_feature (1)..(531): Homolog of NCBI NO: 13959067 NR Description: mitochondrial processing peptidase [Avicennia
  misc_feature (1)..(531): Homolog of NCBI NO: 12802327 NR Description: mitochondrial processing peptidase beta subunit
  misc_feature (1)..(503): Homolog of NCBI NO: 30678485 NR Description: mitochondrial processing peptidase -related
  misc_feature (1)..(531): Homolog of NCBI NO: 15232845 NR Description: mitochondrial processing peptidase -related
MAMKNLLSLARRSQRRLFLTQATRSSSSFSAIDSVPASASPTALSPPPPHLMPYDHAAEIIKNKIKKLENPDKRFLKYASPHPILASHNHILSAPETRVTTLPNGLRVATESNLSAKTATVGVWIDAGSRFESDETNGTAHFLEHMIFKGTDRRTVRALEEEIEDIGGHLNAYTSREQTTYYAKVLDSNVNQALDVLADILQNSKFEEQRINRERDVILREMQEVEGQTDEVVLDHLHATAFQYTPLGRTILGPAQNVKSITREDLQNYIKTHYTASRMVIAAAGAVKHEEVVEQVKKLFTKLSSDPTTTSQLVANEPASFTGSEVRMIDDDLPLAQFAVAFEGASWTDPDSVALMVMQTMLGSWNKNVGGGKHVGSDLTQRVAINEIAESIMAFNTNYKDTGLFGVYAVAKADCLDDLSYAIMYEVTKLAYRVSDADVTRARNQLKSSLLLHMDGTSPIAEDIGRQLLTYGRRIPTAELFARIDAVDASTVKRVANKYIYDKDIAISAIGPIQDLPDYNKFRRRTYWNRY

SEQ ID NO: 45645 - protein, 529 aa, Arabidopsis thaliana
  peptide (1)..(529): Ceres Seq. ID no. 13591673
  misc_feature (258)..(444): Pfam Name: Peptidase M16 inactive domain Pfam Description: Peptidase M16 inactive domain
  misc_feature (258)..(444): Pfam Name: Peptidase M16 inactive domain Pfam Description: Peptidase M16 inactive domain
  misc_feature (89)..(528): Homolog of NCBI NO: 21357875 NR Description: CG3731-PB [Drosophila melanogaster]
  misc_feature (72)..(525): Homolog of NCBI NO: 34910490 NR Description: putative mitochondrial processing peptidase beta
  misc_feature (1)..(529): Homolog of NCBI NO: 477819 NR Description: ubiquinol-cytochrome-c reductase (EC 1.10.2.2)
  misc_feature (1)..(529): Homolog of NCBI NO: 587564 NR Description: mitochondrial processing peptidase [Solanum
  misc_feature (1)..(529): Homolog of NCBI NO: 477280 NR Description: ubiquinol-cytochrome-c reductase (EC 1.10.2.2)
  misc_feature (89)..(528): Homolog of NCBI NO: 21357875 NR Description: CG3731-PB [Drosophila melanogaster]
  misc_feature (1)..(529): Homolog of NCBI NO: 477819 NR Description: ubiquinol-cytochrome-c reductase (EC 1.10.2.2)
  misc_feature (1)..(529): Homolog of NCBI NO: 477280 NR Description: ubiquinol-cytochrome-c reductase (EC 1.10.2.2)
  misc_feature (1)..(529): Homolog of NCBI NO: 15232845 NR Description: mitochondrial processing peptidase -related
  misc_feature (1)..(501): Homolog of NCBI NO: 30678485 NR Description: mitochondrial processing peptidase -related
  misc_feature (1)..(529): Homolog of NCBI NO: 12802327 NR Description: mitochondrial processing peptidase beta subunit
  misc_feature (1)..(529): Homolog of NCBI NO: 13959067 NR Description: mitochondrial processing peptidase [Avicennia
  misc_feature (1)..(529): Homolog of NCBI NO: 587566 NR Description: mitochondrial processing peptidase [Solanum
  misc_feature (1)..(529): Homolog of NCBI NO: 587564 NR Description: mitochondrial processing peptidase [Solanum
  misc_feature (72)..(525): Homolog of NCBI NO: 34910490 NR Description: putative mitochondrial processing peptidase beta
  misc_feature (1)..(529): Homolog of NCBI NO: 587566 NR Description: mitochondrial processing peptidase [Solanum
  misc_feature (1)..(529): Homolog of NCBI NO: 13959067 NR Description: mitochondrial processing peptidase [Avicennia
  misc_feature (1)..(529): Homolog of NCBI NO: 12802327 NR Description: mitochondrial processing peptidase beta subunit
  misc_feature (1)..(501): Homolog of NCBI NO: 30678485 NR Description: mitochondrial processing peptidase -related
  misc_feature (1)..(529): Homolog of NCBI NO: 15232845 NR Description: mitochondrial processing peptidase -related
MKNLLSLARRSQRRLFLTQATRSSSSFSAIDSVPASASPTALSPPPPHLMPYDHAAEIIKNKIKKLENPDKRFLKYASPHPILASHNHILSAPETRVTTLPNGLRVATESNLSAKTATVGVWIDAGSRFESDETNGTAHFLEHMIFKGTDRRTVRALEEEIEDIGGHLNAYTSREQTTYYAKVLDSNVNQALDVLADILQNSKFEEQRINRERDVILREMQEVEGQTDEVVLDHLHATAFQYTPLGRTILGPAQNVKSITREDLQNYIKTHYTASRMVIAAAGAVKHEEVVEQVKKLFTKLSSDPTTTSQLVANEPASFTGSEVRMIDDDLPLAQFAVAFEGASWTDPDSVALMVMQTMLGSWNKNVGGGKHVGSDLTQRVAINEIAESIMAFNTNYKDTGLFGVYAVAKADCLDDLSYAIMYEVTKLAYRVSDADVTRARNQLKSSLLLHMDGTSPIAEDIGRQLLTYGRRIPTAELFARIDAVDASTVKRVANKYIYDKDIAISAIGPIQDLPDYNKFRRRTYWNRY

SEQ ID NO: 45646 - protein, 480 aa, Arabidopsis thaliana
  peptide (1)..(480): Ceres Seq. ID no. 13591674
  misc_feature (209)..(395): Pfam Name: Peptidase M16 inactive domain Pfam Description: Peptidase M16 inactive domain
  misc_feature (209)..(395): Pfam Name: Peptidase M16 inactive domain Pfam Description: Peptidase M16 inactive domain
  misc_feature (40)..(479): Homolog of NCBI NO: 21357875 NR Description: CG3731-PB [Drosophila melanogaster]
  misc_feature (23)..(476): Homolog of NCBI NO: 34910490 NR Description: putative mitochondrial processing peptidase beta
  misc_feature (1)..(480): Homolog of NCBI NO: 477819 NR Description: ubiquinol-cytochrome-c reductase (EC 1.10.2.2)
  misc_feature (1)..(480): Homolog of NCBI NO: 587564 NR Description: mitochondrial processing peptidase [Solanum
  misc_feature (1)..(480): Homolog of NCBI NO: 477280 NR Description: ubiquinol-cytochrome-c reductase (EC 1.10.2.2)
  misc_feature (40)..(479): Homolog of NCBI NO: 21357875 NR Description: CG3731-PB [Drosophila melanogaster]
  misc_feature (1)..(480): Homolog of NCBI NO: 477819 NR Description: ubiquinol-cytochrome-c reductase (EC 1.10.2.2)
  misc_feature (1)..(480): Homolog of NCBI NO: 477280 NR Description: ubiquinol-cytochrome-c reductase (EC 1.10.2.2)
  misc_feature (1)..(480): Homolog of NCBI NO: 15232845 NR Description: mitochondrial processing peptidase -related
  misc_feature (1)..(452): Homolog of NCBI NO: 30678485 NR Description: mitochondrial processing peptidase -related
  misc_feature (1)..(480): Homolog of NCBI NO: 12802327 NR Description: mitochondrial processing peptidase beta subunit
  misc_feature (1)..(480): Homolog of NCBI NO: 13959067 NR Description: mitochondrial processing peptidase [Avicennia
  misc_feature (1)..(480): Homolog of NCBI NO: 587566 NR Description: mitochondrial processing peptidase [Solanum
  misc_feature (1)..(480): Homolog of NCBI NO: 587564 NR Description: mitochondrial processing peptidase [Solanum
  misc_feature (23)..(476): Homolog of NCBI NO: 34910490 NR Description: putative mitochondrial processing peptidase beta
  misc_feature (1)..(480): Homolog of NCBI NO: 587566 NR Description: mitochondrial processing peptidase [Solanum
  misc_feature (1)..(480): Homolog of NCBI NO: 13959067 NR Description: mitochondrial processing peptidase [Avicennia
  misc_feature (1)..(480): Homolog of NCBI NO: 12802327 NR Description: mitochondrial processing peptidase beta subunit
  misc_feature (1)..(452): Homolog of NCBI NO: 30678485 NR Description: mitochondrial processing peptidase -related
  misc_feature (1)..(480): Homolog of NCBI NO: 15232845 NR Description: mitochondrial processing peptidase -related
MPYDHAAEIIKNKIKKLENPDKRFLKYASPHPILASHNHILSAPETRVTTLPNGLRVATESNLSAKTATVGVWIDAGSRFESDETNGTAHFLEHMIFKGTDRRTVRALEEEIEDIGGHLNAYTSREQTTYYAKVLDSNVNQALDVLADILQNSKFEEQRINRERDVILREMQEVEGQTDEVVLDHLHATAFQYTPLGRTILGPAQNVKSITREDLQNYIKTHYTASRMVIAAAGAVKHEEVVEQVKKLFTKLSSDPTTTSQLVANEPASFTGSEVRMIDDDLPLAQFAVAFEGASWTDPDSVALMVMQTMLGSWNKNVGGGKHVGSDLTQRVAINEIAESIMAFNTNYKDTGLFGVYAVAKADCLDDLSYAIMYEVTKLAYRVSDADVTRARNQLKSSLLLHMDGTSPIAEDIGRQLLTYGRRIPTAELFARIDAVDASTVKRVANKYIYDKDIAISAIGPIQDLPDYNKFRRRTYWNRY

SEQ ID NO: 45647 - DNA, 2124 bp, Arabidopsis thaliana
  misc_feature (1)..(2124): Ceres Seq. ID no. 13592165
  misc_feature: MA Experiment ID: 20000090 Result: Up-regulated in Transcription
  misc_feature: MA Experiment ID: 20000182 Result: Up-regulated in Transcription
  misc_feature: MA Experiment 20000182 PARAMETER Experiment Name: At_2mM_SA_P Parameter: Age (day) Value: 14
  misc_feature: MA Experiment 20000182 PARAMETER Experiment Name: At_2mM_SA_P Parameter: Organism Value: A. thaliana
  misc_feature: MA Experiment 20000182 PARAMETER Experiment Name: At_2mM_SA_P Parameter: Plant Line Value: WS
  misc_feature: MA Experiment 20000182 PARAMETER Experiment Name: At_2mM_SA_P Parameter: Timepoint (hr) Value: 6
  misc_feature: MA Experiment 20000182 PARAMETER Experiment Name: At_2mM_SA_P Parameter: Tissue Value: Aerial
  misc_feature: MA Experiment 20000182 PARAMETER Experiment Name: At_2mM_SA_P Parameter: Treatment Value: 2mM SA vs. No Treatment
  misc_feature: MA Experiment ID: 20000224 Result: Up-regulated in Transcription
  misc_feature: MA Experiment ID: 20000234 Result: Down-regulated in Transcription
  misc_feature: MA Experiment 20000234 PARAMETER Experiment Name: At_Siliques_P Parameter: Age (day) Value: 21
  misc_feature: MA Experiment 20000234 PARAMETER Experiment Name: At_Siliques_P Parameter: Organism Value: A. thaliana
  misc_feature: MA Experiment 20000234 PARAMETER Experiment Name: At_Siliques_P Parameter: Plant Line Value: WS
  misc_feature: MA Experiment 20000234 PARAMETER Experiment Name: At_Siliques_P Parameter: Tissue Value: Less Than 5mm Siliques vs. Whole Plant
  misc_feature: MA Experiment ID: 20000264 Result: Down-regulated in Transcription
  misc_feature: MA Experiment 20000264 PARAMETER Experiment Name: At_Open_Flower_P Parameter: Age (day) Value: 21
  misc_feature: MA Experiment 20000264 PARAMETER Experiment Name: At_Open_Flower_P Parameter: Plant Line Value: WS
  misc_feature: MA Experiment 20000264 PARAMETER Experiment Name: At_Open_Flower_P Parameter: Tissue Value: Open Flower vs. Whole Plant
  misc_feature: MA Experiment ID: 20000265 Result: Down-regulated in Transcription
  misc_feature: MA Experiment 20000265 PARAMETER Experiment Name: At_Open_Flower_P Parameter: Age (day) Value: 21
  misc_feature: MA Experiment 20000265 PARAMETER Experiment Name: At_Open_Flower_P Parameter: Plant Line Value: WS
  misc_feature: MA Experiment 20000265 PARAMETER Experiment Name: At_Open_Flower_P Parameter: Tissue Value: Closed Flower vs. Whole Plant
  misc_feature: MA Experiment ID: 20000286 Result: Down-regulated in Transcription
  misc_feature: MA Experiment 20000286 PARAMETER Experiment Name: At_Open_Flower_P Parameter: Age (day) Value: 21
  misc_feature: MA Experiment 20000286 PARAMETER Experiment Name: At_Open_Flower_P Parameter: Plant Line Value: WS
  misc_feature: MA Experiment 20000286 PARAMETER Experiment Name: At_Open_Flower_P Parameter: Tissue Value: Half Open vs. Whole Plant
  misc_feature: MA Experiment ID: 20000495 Result: Up-regulated in Transcription
  misc_feature: MA Experiment 20000495 PARAMETER Experiment Name: At_Guard_Cells_P Parameter: Harvest Date Value: 8/2/2002
  misc_feature: MA Experiment 20000495 PARAMETER Experiment Name: At_Guard_Cells_P Parameter: Organism Value: A. thaliana
  misc_feature: MA Experiment 20000495 PARAMETER Experiment Name: At_Guard_Cells_P Parameter: Tissue Value: Guard Cells vs. Leaves
  misc_feature: MA Experiment ID: 20001451 Result: Up-regulated in Transcription
  misc_feature: MA Experiment 20001451 PARAMETER Experiment Name: At_Far-red-induction_P Parameter: Age (day) Value: 7
  misc_feature: MA Experiment 20001451 PARAMETER Experiment Name: At_Far-red-induction_P Parameter: Light Value: Far-red vs. White
  misc_feature: MA Experiment 20001451 PARAMETER Experiment Name: At_Far-red-induction_P Parameter: Organism Value: A. thaliana
  misc_feature: MA Experiment 20001451 PARAMETER Experiment Name: At_Far-red-induction_P Parameter: Plant Line Value: Columbia
  misc_feature: MA Experiment 20001451 PARAMETER Experiment Name: At_Far-red-induction_P Parameter: Timepoint (hr) Value: 24
  misc_feature: MA Experiment 20001451 PARAMETER Experiment Name: At_Far-red-induction_P Parameter: Tissue Value: Whole Plant
  misc_feature: MA Experiment ID: 20001558 Result: Down-regulated in Transcription
  misc_feature: MA Experiment 20001558 PARAMETER Experiment Name: At_Drought_Soil_Dry_P Parameter: Age (day) Value: 27
  misc_feature: MA Experiment 20001558 PARAMETER Experiment Name: At_Drought_Soil_Dry_P Parameter: Organism Value: A. thaliana
  misc_feature: MA Experiment 20001558 PARAMETER Experiment Name: At_Drought_Soil_Dry_P Parameter: Plant Line Value: WS
  misc_feature: MA Experiment 20001558 PARAMETER Experiment Name: At_Drought_Soil_Dry_P Parameter: Post Timepoint (hr) Value: 6
  misc_feature: MA Experiment 20001558 PARAMETER Experiment Name: At_Drought_Soil_Dry_P Parameter: Post-Treatment Value: Re-Water vs. No Drought
  misc_feature: MA Experiment 20001558 PARAMETER Experiment Name: At_Drought_Soil_Dry_P Parameter: Timepoint (day) Value: 13
  misc_feature: MA Experiment 20001558 PARAMETER Experiment Name: At_Drought_Soil_Dry_P Parameter: Treatment Value: Drought vs. No Drought
  misc_feature: MA Experiment ID: 20001911 Result: Up-regulated in Transcription
  misc_feature: MA Experiment 20001911 PARAMETER Experiment Name: At_Drought_Reproduction_P Parameter: Age (day) Value: 40
  misc_feature: MA Experiment 20001911 PARAMETER Experiment Name: At_Drought_Reproduction_P Parameter: Organism Value: A. thaliana
  misc_feature: MA Experiment 20001911 PARAMETER Experiment Name: At_Drought_Reproduction_P Parameter: Plant Line Value: WS
  misc_feature: MA Experiment 20001911 PARAMETER Experiment Name: At_Drought_Reproduction_P Parameter: Timepoint (day) Value: 10
  misc_feature: MA Experiment 20001911 PARAMETER Experiment Name: At_Drought_Reproduction_P Parameter: Tissue Value: Flowers
  misc_feature: MA Experiment 20001911 PARAMETER Experiment Name: At_Drought_Reproduction_P Parameter: Treatment Value: Drought vs. No Drought
gacgacaagagacgacctttgagactcgagaagctctctccaaaaacaaacgaaaagaagcgacttttgcctcttttggtctctccccttctccggagagatctgctctctctatctatctctcaatctgtaagaagaagattcccacttcagtaaaagccctaactttacttgggaaagttcttcatctatcatccttcaatcgtcatcatccatggctgatcaacaaaccctagattcctctactcctcctcctactcaatccgatgatctatctcactcccactctacttcctctactacttcagcttcttcttcctcagatccatcactcttgaggtctctctccttaagtcgactcaacgccggagctcctgagttcgttcctggtcgaactactcctccgctgcctcaacctccgaggatgattatcccgcctcctccgccgcacggtatgcttcatatgtatcaccaccagcctcctttcaatactccagttcttggtcctgttccaatccagccacacttggttcctgttcaaaatcaccaccctcatcatcgctttcatcagcatcatcatcacaatcgtcatcagaatcagcaatatgtcccggtgaggaatcacggagagtatcagcagcgtggtggtgtcggtggtgagcaggaaccggatttggtttcaaagaagaatgatcggagagatcatagtaagagagaatctaagaacgatcaagtgactgaaactggagcttctgtttctattgattcaaaaactggtttgcctgaagattctatccagaagattgtgaatcaggttgaatactatttcagtgacttgaacttggctactacagatcatctcatgagattcatttgcaaggatcctgaaggatatgtgcctattcatgttgttgcgtcgttcaagaaaattaaagctgtcattaacaataattctcagcttgccgcagtgctacagaactcagctaagctttttgttagtgaagatggaaagaaagtgagacgcataagtccgattactgagtcggctatagaagagcttcagtctcgcattattgttgctgagaatctccctgaggatcattgctaccaaaacctgatgaagattttttcaactgttggaagtgtgaagaacatccgtacctgccagcctcaaaataatggaagcggtgctccacccgcagcgagatcagcagctaaaagcgatggtacgcttttcagtaacaaggtccatgcttttgttgagtatgagattgttgagctagccgagagagcagttaccgagttaagtgaagcgggaaattggaggagcggtcttaaagtccggttgatgctaaagcatcagacgaaggaaccaaaacaaggtcaagggcgaggaagaaaaggacatgatgcagatgtagaacatgaggaagatgatgctacaacatccgagcagcagccgattgagaaacaatctgatgactgttctggggaatgggatacacatatgcaagagcagccaataggagaggatcaagggaatgagaaagcggctgggcagagaaaagggcgtaacagaggtagaggaaagggacgaggacgagggcaaccacaccagaaccaaaaccagaacaacaaccacagccataaccaaaaccacaaccacaatgggcgaggaaatcatcatcatcatcatcatcatcaagtgggaacacaaccttcgaacaatccaatgaacaacatggagcaaccaggcatggggaaacagcaaccacctggaccacgaatgcctgatgggaccagaggattctcaatgggacggggaaagccggttatggttcaggcagagtgatccagagctgttttgaaaaggaggtgatgtggaattgtgaatggtcaaaaagggagataaatagagagagagcaagagagaaagagagagatttatccttcccatggggattggctagttttgcagactttatatttgtcttacttacttcgaaatacttttcaattacgcttctcttacaaggaaacaacaaaaaaactacattttcctcatatagtgtacgtgtaatgaaacagcaatttcagttaatattttgtcctaaaagcttttct

SEQ ID NO: 45648 - protein, 545 aa, Arabidopsis thaliana
  peptide (1)..(545): Ceres Seq. ID no. 13592166
  misc_feature (197)..(256): Pfam Name: La domain Pfam Description: La domain
  misc_feature (152)..(484): Homolog of NCBI NO: 10177706 NR Description: contains similarity to RNA-binding
  misc_feature (152)..(485): Homolog of NCBI NO: 30694926 NR Description: RNA recognition motif (RRM)-containing protein
  misc_feature (180)..(416): Homolog of NCBI NO: 6449448 NR Description: RNA-binding protein homolog [Brassica napus]
  misc_feature (186)..(422): Homolog of NCBI NO: 34896588 NR Description: putative RNA-binding protein [Oryza sativa]
  misc_feature (179)..(471): Homolog of NCBI NO: 34394175 NR Description: putative RNA-binding protein homolog
  misc_feature (517)..(539): Homolog of NCBI NO: 15230287 NR Description: RNA-binding protein, putative [Arabidopsis
  misc_feature (182)..(475): Homolog of NCBI NO: 15230287 NR Description: RNA-binding protein, putative [Arabidopsis
  misc_feature (217)..(545): Homolog of NCBI NO: 15724224 NR Description: At2g43970/F6E13.10 [Arabidopsis thaliana]
  misc_feature (1)..(545): Homolog of NCBI NO: 30689565 NR Description: VirF-interacting protein FIP1 [Arabidopsis
  misc_feature (1)..(545): Homolog of NCBI NO: 18406414 NR Description: VirF-interacting protein FIP1 [Arabidopsis
MADQQTLDSSTPPPTQSDDLSHSHSTSSTTSASSSSDPSLLRSLSLSRLNAGAPEFVPGRTTPPLPQPPRMIIPPPPPHGMLHMYHHQPPFNTPVLGPVPIQPHLVPVQNHHPHHRFHQHHHHNRHQNQQYVPVRNHGEYQQRGGVGGEQEPDLVSKKNDRRDHSKRESKNDQVTETGASVSIDSKTGLPEDSIQKIVNQVEYYFSDLNLATTDHLMRFICKDPEGYVPIHVVASFKKIKAVINNNSQLAAVLQNSAKLFVSEDGKKVRRISPITESAIEELQSRIIVAENLPEDHCYQNLMKIFSTVGSVKNIRTCQPQNNGSGAPPAARSAAKSDGTLFSNKVHAFVEYEIVELAERAVTELSEAGNWRSGLKVRLMLKHQTKEPKQGQGRGRKGHDADVEHEEDDATTSEQQPIEKQSDDCSGEWDTHMQEQPIGEDQGNEKAAGQRKGRNRGRGKGRGRGQPHQNQNQNNNHSHNQNHNHNGRGNHHHHHHHQVGTQPSNNPMNNMEQPGMGKQQPPGPRMPDGTRGFSMGRGKPVMVQAE

SEQ ID NO: 45649 - protein, 475 aa, Arabidopsis thaliana
  peptide (1)..(475): Ceres Seq. ID no. 13592167
  misc_feature (127)..(186): Pfam Name: La domain Pfam Description: La domain
  misc_feature (82)..(414): Homolog of NCBI NO: 10177706 NR Description: contains similarity to RNA-binding
  misc_feature (82)..(415): Homolog of NCBI NO: 30694926 NR Description: RNA recognition motif (RRM)-containing protein
  misc_feature (110)..(346): Homolog of NCBI NO: 6449448 NR Description: RNA-binding protein homolog [Brassica napus]
  misc_feature (116)..(352): Homolog of NCBI NO: 34896588 NR Description: putative RNA-binding protein [Oryza sativa]
  misc_feature (109)..(401): Homolog of NCBI NO: 34394175 NR Description: putative RNA-binding protein homolog
  misc_feature (447)..(469): Homolog of NCBI NO: 15230287 NR Description: RNA-binding protein, putative [Arabidopsis
  misc_feature (112)..(405): Homolog of NCBI NO: 15230287 NR Description: RNA-binding protein, putative [Arabidopsis
  misc_feature (147)..(475): Homolog of NCBI NO: 15724224 NR Description: At2g43970/F6E13.10 [Arabidopsis thaliana]
  misc_feature (1)..(475): Homolog of NCBI NO: 30689565 NR Description: VirF-interacting protein FIP1 [Arabidopsis
  misc_feature (1)..(475): Homolog of NCBI NO: 18406414 NR Description: VirF-interacting protein FIP1 [Arabidopsis
MIIPPPPPHGMLHMYHHQPPFNTPVLGPVPIQPHLVPVQNHHPHHRFHQHHHHNRHQNQQYVPVRNHGEYQQRGGVGGEQEPDLVSKKNDRRDHSKRESKNDQVTETGASVSIDSKTGLPEDSIQKIVNQVEYYFSDLNLATTDHLMRFICKDPEGYVPIHVVASFKKIKAVINNNSQLAAVLQNSAKLFVSEDGKKVRRISPITESAIEELQSRIIVAENLPEDHCYQNLMKIFSTVGSVKNIRTCQPQNNGSGAPPAARSAAKSDGTLFSNKVHAFVEYEIVELAERAVTELSEAGNWRSGLKVRLMLKHQTKEPKQGQGRGRKGHDADVEHEEDDATTSEQQPIEKQSDDCSGEWDTHMQEQPIGEDQGNEKAAGQRKGRNRGRGKGRGRGQPHQNQNQNNNHSHNQNHNHNGRGNHHHHHHHQVGTQPSNNPMNNMEQPGMGKQQPPGPRMPDGTRGFSMGRGKPVMVQAE

SEQ ID NO: 45650 - protein, 465 aa, Arabidopsis thaliana
  peptide (1)..(465): Ceres Seq. ID no. 13592168
  misc_feature (117)..(176): Pfam Name: La domain Pfam Description: La domain
  misc_feature (72)..(404): Homolog of NCBI NO: 10177706 NR Description: contains similarity to RNA-binding
  misc_feature (72)..(405): Homolog of NCBI NO: 30694926 NR Description: RNA recognition motif (RRM)-containing protein
  misc_feature (100)..(336): Homolog of NCBI NO: 6449448 NR Description: RNA-binding protein homolog [Brassica napus]
  misc_feature (106)..(342): Homolog of NCBI NO: 34896588 NR Description: putative RNA-binding protein [Oryza sativa]
  misc_feature (99)..(391): Homolog of NCBI NO: 34394175 NR Description: putative RNA-binding protein homolog
  misc_feature (437)..(459): Homolog of NCBI NO: 15230287 NR Description: RNA-binding protein, putative [Arabidopsis
  misc_feature (102)..(395): Homolog of NCBI NO: 15230287 NR Description: RNA-binding protein, putative [Arabidopsis
  misc_feature (137)..(465): Homolog of NCBI NO: 15724224 NR Description: At2g43970/F6E13.10 [Arabidopsis thaliana]
  misc_feature (1)..(465): Homolog of NCBI NO: 30689565 NR Description: VirF-interacting protein FIP1 [Arabidopsis
  misc_feature (1)..(465): Homolog of NCBI NO: 18406414 NR Description: VirF-interacting protein FIP1 [Arabidopsis
MLHMYHHQPPFNTPVLGPVPIQPHLVPVQNHHPHHRFHQHHHHNRHQNQQYVPVRNHGEYQQRGGVGGEQEPDLVSKKNDRRDHSKRESKNDQVTETGASVSIDSKTGLPEDSIQKIVNQVEYYFSDLNLATTDHLMRFICKDPEGYVPIHVVASFKKIKAVINNNSQLAAVLQNSAKLFVSEDGKKVRRISPITESAIEELQSRIIVAENLPEDHCYQNLMKIFSTVGSVKNIRTCQPQNNGSGAPPAARSAAKSDGTLFSNKVHAFVEYEIVELAERAVTELSEAGNWRSGLKVRLMLKHQTKEPKQGQGRGRKGHDADVEHEEDDATTSEQQPIEKQSDDCSGEWDTHMQEQPIGEDQGNEKAAGQRKGRNRGRGKGRGRGQPHQNQNQNNNHSHNQNHNHNGRGNHHHHHHHQVGTQPSNNPMNNMEQPGMGKQQPPGPRMPDGTRGFSMGRGKPVMVQAE

SEQ ID NO: 45651 - DNA, 1754 bp, Arabidopsis thaliana
  misc_feature (1)..(1754): Ceres Seq. ID no. 13646835
  misc_feature: MA Experiment ID: 20000437 Result: Up-regulated in Transcription
  misc_feature: MA Experiment 20000437 PARAMETER Experiment Name: At_Drought_P Parameter: Age (day) Value: 8
  misc_feature: MA Experiment 20000437 PARAMETER Experiment Name: At_Drought_P Parameter: Organism Value: A. thaliana
  misc_feature: MA Experiment 20000437 PARAMETER Experiment Name: At_Drought_P Parameter: Plant Line Value: WS
  misc_feature: MA Experiment 20000437 PARAMETER Experiment Name: At_Drought_P Parameter: Timepoint (hr) Value: 24
  misc_feature: MA Experiment 20000437 PARAMETER Experiment Name: At_Drought_P Parameter: Tissue Value: Whole Plant
  misc_feature: MA Experiment 20000437 PARAMETER Experiment Name: At_Drought_P Parameter: Treatment Value: Drought vs. No Drought
  misc_feature: MA Experiment ID: 20001451 Result: Down-regulated in Transcription
  misc_feature: MA Experiment 20001451 PARAMETER Experiment Name: At_Far-red-induction_P Parameter: Age (day) Value: 7
  misc_feature: MA Experiment 20001451 PARAMETER Experiment Name: At_Far-red-induction_P Parameter: Light Value: Far-red vs. White
  misc_feature: MA Experiment 20001451 PARAMETER Experiment Name: At_Far-red-induction_P Parameter: Organism Value: A. thaliana
  misc_feature: MA Experiment 20001451 PARAMETER Experiment Name: At_Far-red-induction_P Parameter: Plant Line Value: Columbia
  misc_feature: MA Experiment 20001451 PARAMETER Experiment Name: At_Far-red-induction_P Parameter: Timepoint (hr) Value: 24
  misc_feature: MA Experiment 20001451 PARAMETER Experiment Name: At_Far-red-induction_P Parameter: Tissue Value: Whole Plant
  misc_feature: MA Experiment ID: 20001905 Result: Up-regulated in Transcription
  misc_feature: MA Experiment 20001905 PARAMETER Experiment Name: At_Drought_Reproduction_P Parameter: Age (day) Value: 40
  misc_feature: MA Experiment 20001905 PARAMETER Experiment Name: At_Drought_Reproduction_P Parameter: Organism Value: A. thaliana
  misc_feature: MA Experiment 20001905 PARAMETER Experiment Name: At_Drought_Reproduction_P Parameter: Plant Line Value: WS
  misc_feature: MA Experiment 20001905 PARAMETER Experiment Name: At_Drought_Reproduction_P Parameter: Timepoint (day) Value: 10
  misc_feature: MA Experiment 20001905 PARAMETER Experiment Name: At_Drought_Reproduction_P Parameter: Tissue Value: Rosettes
  misc_feature: MA Experiment 20001905 PARAMETER Experiment Name: At_Drought_Reproduction_P Parameter: Treatment Value: Drought vs. No Drought
ggaggtttcttttccccgcggcttaggacaatatgatccgaatcgttgaagaaactgtctccttgtgtctatgtttcgttttgatcccacattcctaaagctccagaaattgatcaaaatgggagaagctggtcaatccagagacggagaatctgtcacgcctcttgttggcggtggtaatggggacaatgcggttgcaccacaagtgtttaattctttaccagctcttaatgaagctgcttcttatataactcaagcaacgtcttacttagggagctgtttttctgactattcagtagaatatggtggcaaggatactatttcccacccccatgagttgttacgatcaacttccggagttgacgggaattccccagtgagtgtatgcatttcgcctggtgaaaggttttcaacttcttcagaggcatctacatctgatgccaacagcccgtcgagggaatctacagagattctgccacaggcaacaaatgcaatagtgacttcgaatcggttaaatttaaatggaatttcaatgttccaagggctcattgagcgggcacggaggactgttcgtggctcggcagatgacataggatggttacagcgtgccccggagatgcctcctgttgaagatggaactgataggttcaataaaattctggaagacatcgggcatggtgtacacaggcttccaaatacagtggtgtacttattggttccaggtcttttcagcaatcatggacctctatattttgtggatacgaaaacgaaattctcaaagatgggtttggcgtgtcatattgcgaagattcacagcgagtcctcggttgagaaaaatgcgagagagataaaggaatacatagaggaactctgttggggatctaataagcgggttctacttcttgggcatagcaaaggaggcatagatgcagctgctgctttatcactatactggcctgaactaaaggataaggtcgctgggttggtactggcgcagagtccatatggtggaagcccaatagctacagatatcctccgtgaaggacaactaggtgattacgtcaatttgagaaagatgatggagattctaatctccaaagtcataaagggtgacattcaagcattggaagatttaacatacgagagaagaaaagaattcttgaagaatcatccgcttccccgagaactccccacggtttcattccgcacagaagctagcattagcccagcggttctatccactttatcacacgtagcacacgctgaacttcctctgacaaaccaagccgcaaaactgccagtggtaatgccacttggtgctgcaatggctgcttgcgctcagctacttcaagtcagatacggtgaaaagagtgacgggctagtgacttgctgtgacgcagaggttcctggttctgtggttgttagacccaaacgtaaactagaccatgcctggatggtgtactcttccttgaacgaggttcctttagaagctgatgctgctcaagtttgtgaagcgctcttaactttgcttgtccaagttgagcaagagaggcaacaaaaactcgcaacaaaaatcgattgataaaccaaattgttttatttctactttcgtcttgagacttcaaattactgtatttgtttctatctttttgttttatttcttactaatttactatcaggtttgaatcacacgataacaaaaaaattattacaaacggtagattttatatttataagactacttaatttgcttc

SEQ ID NO: 45652 - protein, 503 aa, Arabidopsis thaliana
  peptide (1)..(503): Ceres Seq. ID no. 13646836
  misc_feature (17)..(203): Homolog of NCBI NO: 7486943 NR Description: hypothetical protein At2g44970 [imported] -
  misc_feature (222)..(503): Homolog of NCBI NO: 7486943 NR Description: hypothetical protein At2g44970 [imported] -
  misc_feature (1)..(503): Homolog of NCBI NO: 18377628 NR Description: unknown protein [Arabidopsis thaliana]
  misc_feature (1)..(503): Homolog of NCBI NO: 30689883 NR Description: expressed protein [Arabidopsis thaliana]
MFRFDPTFLKLQKLIKMGEAGQSRDGESVTPLVGGGNGDNAVAPQVFNSLPALNEAASYITQATSYLGSCFSDYSVEYGGKDTISHPHELLRSTSGVDGNSPVSVCISPGERFSTSSEASTSDANSPSRESTEILPQATNAIVTSNRLNLNGISMFQGLIERARRTVRGSADDIGWLQRAPEMPPVEDGTDRFNKILEDIGHGVHRLPNTVVYLLVPGLFSNHGPLYFVDTKTKFSKMGLACHIAKIHSESSVEKNAREIKEYIEELCWGSNKRVLLLGHSKGGIDAAAALSLYWPELKDKVAGLVLAQSPYGGSPIATDILREGQLGDYVNLRKMMEILISKVIKGDIQALEDLTYERRKEFLKNHPLPRELPTVSFRTEASISPAVLSTLSHVAHAELPLTNQAAKLPVVMPLGAAMAACAQLLQVRYGEKSDGLVTCCDAEVPGSVVVRPKRKLDHAWMVYSSLNEVPLEADAAQVCEALLTLLVQVEQERQQKLATKID

SEQ ID NO: 45653 - protein, 487 aa, Arabidopsis thaliana
  peptide (1)..(487): Ceres Seq. ID no. 13646837
  misc_feature (1)..(187): Homolog of NCBI NO: 7486943 NR Description: hypothetical protein At2g44970 [imported] -
  misc_feature (206)..(487): Homolog of NCBI NO: 7486943 NR Description: hypothetical protein At2g44970 [imported] -
  misc_feature (1)..(487): Homolog of NCBI NO: 18377628 NR Description: unknown protein [Arabidopsis thaliana]
  misc_feature (1)..(487): Homolog of NCBI NO: 30689883 NR Description: expressed protein [Arabidopsis thaliana]
MGEAGQSRDGESVTPLVGGGNGDNAVAPQVFNSLPALNEAASYITQATSYLGSCFSDYSVEYGGKDTISHPHELLRSTSGVDGNSPVSVCISPGERFSTSSEASTSDANSPSRESTEILPQATNAIVTSNRLNLNGISMFQGLIERARRTVRGSADDIGWLQRAPEMPPVEDGTDRFNKILEDIGHGVHRLPNTVVYLLVPGLFSNHGPLYFVDTKTKFSKMGLACHIAKIHSESSVEKNAREIKEYIEELCWGSNKRVLLLGHSKGGIDAAAALSLYWPELKDKVAGLVLAQSPYGGSPIATDILREGQLGDYVNLRKMMEILISKVIKGDIQALEDLTYERRKEFLKNHPLPRELPTVSFRTEASISPAVLSTLSHVAHAELPLTNQAAKLPVVMPLGAAMAACAQLLQVRYGEKSDGLVTCCDAEVPGSVVVRPKRKLDHAWMVYSSLNEVPLEADAAQVCEALLTLLVQVEQERQQKLATKID

SEQ ID NO: 45654 - protein, 349 aa, Arabidopsis thaliana
  peptide (1)..(349): Ceres Seq. ID no. 13646838
  misc_feature (1)..(49): Homolog of NCBI NO: 7486943 NR Description: hypothetical protein At2g44970 [imported] -
  misc_feature (68)..(349): Homolog of NCBI NO: 7486943 NR Description: hypothetical protein At2g44970 [imported] -
  misc_feature (1)..(349): Homolog of NCBI NO: 18377628 NR Description: unknown protein [Arabidopsis thaliana]
  misc_feature (1)..(349): Homolog of NCBI NO: 30689883 NR Description: expressed protein [Arabidopsis thaliana]
MFQGLIERARRTVRGSADDIGWLQRAPEMPPVEDGTDRFNKILEDIGHGVHRLPNTVVYLLVPGLFSNHGPLYFVDTKTKFSKMGLACHIAKIHSESSVEKNAREIKEYIEELCWGSNKRVLLLGHSKGGIDAAAALSLYWPELKDKVAGLVLAQSPYGGSPIATDILREGQLGDYVNLRKMMEILISKVIKGDIQALEDLTYERRKEFLKNHPLPRELPTVSFRTEASISPAVLSTLSHVAHAELPLTNQAAKLPVVMPLGAAMAACAQLLQVRYGEKSDGLVTCCDAEVPGSVVVRPKRKLDHAWMVYSSLNEVPLEADAAQVCEALLTLLVQVEQERQQKLATKID

SEQ ID NO: 45655 - DNA, 2456 bp, Arabidopsis thaliana
  misc_feature (1)..(2456): Ceres Seq. ID no. 13592201
  misc_feature: MA Experiment ID: 20000166 Result: Down-regulated in Transcription
  misc_feature: MA Experiment 20000166 PARAMETER Experiment Name: At_100uM_ABA_P Parameter: Age (day) Value: 14
  misc_feature: MA Experiment 20000166 PARAMETER Experiment Name: At_100uM_ABA_P Parameter: Organism Value: A. thaliana
  misc_feature: MA Experiment 20000166 PARAMETER Experiment Name: At_100uM_ABA_P Parameter: Plant Line Value: WS
  misc_feature: MA Experiment 20000166 PARAMETER Experiment Name: At_100uM_ABA_P Parameter: Timepoint (hr) Value: 1
  misc_feature: MA Experiment 20000166 PARAMETER Experiment Name: At_100uM_ABA_P Parameter: Tissue Value: Aerial
  misc_feature: MA Experiment 20000166 PARAMETER Experiment Name: At_100uM_ABA_P Parameter: Treatment Value: 100uM ABA vs. No Treatment
  misc_feature: MA Experiment ID: 20000169 Result: Up-regulated in Transcription
  misc_feature: MA Experiment 20000169 PARAMETER Experiment Name: At_100uM_ABA_P Parameter: Age (day) Value: 14
  misc_feature: MA Experiment 20000169 PARAMETER Experiment Name: At_100uM_ABA_P Parameter: Organism Value: A. thaliana
  misc_feature: MA Experiment 20000169 PARAMETER Experiment Name: At_100uM_ABA_P Parameter: Plant Line Value: WS
  misc_feature: MA Experiment 20000169 PARAMETER Experiment Name: At_100uM_ABA_P Parameter: Timepoint (hr) Value: 6
  misc_feature: MA Experiment 20000169 PARAMETER Experiment Name: At_100uM_ABA_P Parameter: Tissue Value: Aerial
  misc_feature: MA Experiment 20000169 PARAMETER Experiment Name: At_100uM_ABA_P Parameter: Treatment Value: 100uM ABA vs. No Treatment
  misc_feature: MA Experiment ID: 20000171 Result: Down-regulated in Transcription
  misc_feature: MA Experiment 20000171 PARAMETER Experiment Name: At_42deg_Heat_P Parameter: Age (day) Value: 14
  misc_feature: MA Experiment 20000171 PARAMETER Experiment Name: At_42deg_Heat_P Parameter: Organism Value: A. thaliana
  misc_feature: MA Experiment 20000171 PARAMETER Experiment Name: At_42deg_Heat_P Parameter: Plant Line Value: WS
  misc_feature: MA Experiment 20000171 PARAMETER Experiment Name: At_42deg_Heat_P Parameter: Temperature (deg C) Value: 42 vs. 22
  misc_feature: MA Experiment 20000171 PARAMETER Experiment Name: At_42deg_Heat_P Parameter: Timepoint (hr) Value: 1
  misc_feature: MA Experiment 20000171 PARAMETER Experiment Name: At_42deg_Heat_P Parameter: Tissue Value: Aerial
  misc_feature: MA Experiment ID: 20000173 Result: Down-regulated in Transcription
  misc_feature: MA Experiment 20000173 PARAMETER Experiment Name: At_42deg_Heat_P Parameter: Age (day) Value: 14
  misc_feature: MA Experiment 20000173 PARAMETER Experiment Name: At_42deg_Heat_P Parameter: Organism Value: A. thaliana
  misc_feature: MA Experiment 20000173 PARAMETER Experiment Name: At_42deg_Heat_P Parameter: Plant Line Value: WS
  misc_feature: MA Experiment 20000173 PARAMETER Experiment Name: At_42deg_Heat_P Parameter: Temperature (deg C) Value: 42 vs. 22
  misc_feature: MA Experiment 20000173 PARAMETER Experiment Name: At_42deg_Heat_P Parameter: Timepoint (hr) Value: 6
  misc_feature: MA Experiment 20000173 PARAMETER Experiment Name: At_42deg_Heat_P Parameter: Tissue Value: Aerial
  misc_feature: MA Experiment ID: 20000179 Result: Down-regulated in Transcription
  misc_feature: MA Experiment 20000179 PARAMETER Experiment Name: At_Germinating_Seeds_P Parameter: Age (hr) Value: 6 vs. 0
  misc_feature: MA Experiment 20000179 PARAMETER Experiment Name: At_Germinating_Seeds_P Parameter: Tissue Value: Germinating Seeds
  misc_feature: MA Experiment ID: 20000184 Result: Down-regulated in Transcription
  misc_feature: MA Experiment 20000184 PARAMETER Experiment Name: At_Shoots__P Parameter: Age (day) Value: 7
  misc_feature: MA Experiment 20000184 PARAMETER Experiment Name: At_Shoots__P Parameter: Tissue Value: Shoots vs. Whole Plant
  misc_feature: MA Experiment ID: 20000227 Result: Up-regulated in Transcription
  misc_feature: MA Experiment 20000227 PARAMETER Experiment Name: At_Root-Tips-vs-Tops_P Parameter: Tissue Value: Root Tips vs. Root Tops
  misc_feature: MA Experiment ID: 20000264 Result: Up-regulated in Transcription
  misc_feature: MA Experiment 20000264 PARAMETER Experiment Name: At_Open_Flower_P Parameter: Age (day) Value: 21
  misc_feature: MA Experiment 20000264 PARAMETER Experiment Name: At_Open_Flower_P Parameter: Plant Line Value: WS
  misc_feature: MA Experiment 20000264 PARAMETER Experiment Name: At_Open_Flower_P Parameter: Tissue Value: Open Flower vs. Whole Plant
  misc_feature: MA Experiment ID: 20000269 Result: Down-regulated in Transcription
  misc_feature: MA Experiment 20000269 PARAMETER Experiment Name: At_1mM_KNO3_L-vs-H_Roots_P Parameter: Age (day) Value: 7,10,12
  misc_feature: MA Experiment 20000269 PARAMETER Experiment Name: At_1mM_KNO3_L-vs-H_Roots_P Parameter: Organism Value: A. thaliana
  misc_feature: MA Experiment 20000269 PARAMETER Experiment Name: At_1mM_KNO3_L-vs-H_Roots_P Parameter: Plant Line Value: WS
  misc_feature: MA Experiment 20000269 PARAMETER Experiment Name: At_1mM_KNO3_L-vs-H_Roots_P Parameter: Timepoint (day) Value: 7,10,12
  misc_feature: MA Experiment 20000269 PARAMETER Experiment Name: At_1mM_KNO3_L-vs-H_Roots_P Parameter: Tissue Value: Roots
  misc_feature: MA Experiment 20000269 PARAMETER Experiment Name: At_1mM_KNO3_L-vs-H_Roots_P Parameter: Treatment Value: 1mM KNO3 vs. 50mM KNO3
  misc_feature: MA Experiment ID: 20000436 Result: Up-regulated in Transcription
  misc_feature: MA Experiment 20000436 PARAMETER Experiment Name: At_Drought_P Parameter: Age (day) Value: 7
  misc_feature: MA Experiment 20000436 PARAMETER Experiment Name: At_Drought_P Parameter: Organism Value: A. thaliana
  misc_feature: MA Experiment 20000436 PARAMETER Experiment Name: At_Drought_P Parameter: Plant Line Value: WS
  misc_feature: MA Experiment 20000436 PARAMETER Experiment Name: At_Drought_P Parameter: Timepoint (hr) Value: 12
  misc_feature: MA Experiment 20000436 PARAMETER Experiment Name: At_Drought_P Parameter: Tissue Value: Whole Plant
  misc_feature: MA Experiment 20000436 PARAMETER Experiment Name: At_Drought_P Parameter: Treatment Value: Drought vs. No Drought
  misc_feature: MA Experiment ID: 20000438 Result: Down-regulated in Transcription
  misc_feature: MA Experiment 20000438 PARAMETER Experiment Name: At_Shoots__P Parameter: Age (day) Value: 14
  misc_feature: MA Experiment 20000438 PARAMETER Experiment Name: At_Shoots__P Parameter: Tissue Value: Shoots vs. Whole Plant
  misc_feature: MA Experiment ID: 20000439 Result: Down-regulated in Transcription
  misc_feature: MA Experiment 20000439 PARAMETER Experiment Name: At_Roots__P Parameter: Age (day) Value: 14 vs. 21
  misc_feature: MA Experiment 20000439 PARAMETER Experiment Name: At_Roots__P Parameter: Organism Value: A. thaliana
  misc_feature: MA Experiment 20000439 PARAMETER Experiment Name: At_Roots__P Parameter: Tissue Value: Roots vs. Whole Plant
  misc_feature: MA Experiment ID: 20000441 Result: Up-regulated in Transcription
  misc_feature: MA Experiment 20000441 PARAMETER Experiment Name: At_1uM_BR-BRZ__P Parameter: Tissue Value: Shoot Apices
  misc_feature: MA Experiment 20000441 PARAMETER Experiment Name: At_1uM_BR-BRZ__P Parameter: Treatment Value: 1uM BR vs. No Treatment
  misc_feature: MA Experiment ID: 20000443 Result: Up-regulated in Transcription
  misc_feature: MA Experiment 20000443 PARAMETER Experiment Name: At_1uM_BR-BRZ__P Parameter: Tissue Value: Shoot Apices
  misc_feature: MA Experiment 20000443 PARAMETER Experiment Name: At_1uM_BR-BRZ__P Parameter: Treatment Value: 1uM BRZ vs. No Treatment
  misc_feature: MA Experiment ID: 20000453 Result: Up-regulated in Transcription
  misc_feature: MA Experiment 20000453 PARAMETER Experiment Name: At_100uM_ABA_P Parameter: Age (day) Value: 15
  misc_feature: MA Experiment 20000453 PARAMETER Experiment Name: At_100uM_ABA_P Parameter: Organism Value: A. thaliana
  misc_feature: MA Experiment 20000453 PARAMETER Experiment Name: At_100uM_ABA_P Parameter: Plant Line Value: WS
  misc_feature: MA Experiment 20000453 PARAMETER Experiment Name: At_100uM_ABA_P Parameter: Timepoint (hr) Value: 24
  misc_feature: MA Experiment 20000453 PARAMETER Experiment Name: At_100uM_ABA_P Parameter: Tissue Value: Aerial
  misc_feature: MA Experiment 20000453 PARAMETER Experiment Name: At_100uM_ABA_P Parameter: Treatment Value: 100uM ABA vs. No Treatment
  misc_feature: MA Experiment ID: 20000495 Result: Up-regulated in Transcription
  misc_feature: MA Experiment 20000495 PARAMETER Experiment Name: At_Guard_Cells_P Parameter: Harvest Date Value: 8/2/2002
  misc_feature: MA Experiment 20000495 PARAMETER Experiment Name: At_Guard_Cells_P Parameter: Organism Value: A. thaliana
  misc_feature: MA Experiment 20000495 PARAMETER Experiment Name: At_Guard_Cells_P Parameter: Tissue Value: Guard Cells vs. Leaves
  misc_feature: MA Experiment ID: 20000496 Result: Up-regulated in Transcription
  misc_feature: MA Experiment 20000496 PARAMETER Experiment Name: At_Guard_Cells_P Parameter: Harvest Date Value: 7/19/2002
  misc_feature: MA Experiment 20000496 PARAMETER Experiment Name: At_Guard_Cells_P Parameter: Organism Value: Canola
  misc_feature: MA Experiment 20000496 PARAMETER Experiment Name: At_Guard_Cells_P Parameter: Tissue Value: Guard Cells vs. Leaves
  misc_feature: MA Experiment ID: 20000573 Result: Up-regulated in Transcription
  misc_feature: MA Experiment 20000573 PARAMETER Experiment Name: At_100uM_ABA_Mutants__P Parameter: Organism Value: A. thaliana
  misc_feature: MA Experiment 20000573 PARAMETER Experiment Name: At_100uM_ABA_Mutants__P Parameter: Plant Line Value: CS22 vs. Ler wt
  misc_feature: MA Experiment 20000573 PARAMETER Experiment Name: At_100uM_ABA_Mutants__P Parameter: Timepoint (hr) Value: N/A
  misc_feature: MA Experiment 20000573 PARAMETER Experiment Name: At_100uM_ABA_Mutants__P Parameter: Tissue Value: Whole Plant
  misc_feature: MA Experiment 20000573 PARAMETER Experiment Name: At_100uM_ABA_Mutants__P Parameter: Treatment Value: None
  misc_feature: MA Experiment ID: 20000606 Result: Up-regulated in Transcription
  misc_feature: MA Experiment 20000606 PARAMETER Experiment Name: At_CS8548_Mutant_P Parameter: Age (day) Value: 14
  misc_feature: MA Experiment 20000606 PARAMETER Experiment Name: At_CS8548_Mutant_P Parameter: Plant Line Value: CS8548 vs. wt
  misc_feature: MA Experiment 20000606 PARAMETER Experiment Name: At_CS8548_Mutant_P Parameter: Tissue Value: Whole Plant
  misc_feature: MA Experiment ID: 20000794 Result: Up-regulated in Transcription
  misc_feature: MA Experiment 20000794 PARAMETER Experiment Name: At_Petals_P Parameter: Age (day) Value: 23-25 days
  misc_feature: MA Experiment 20000794 PARAMETER Experiment Name: At_Petals_P Parameter: Plant Line Value: WS
  misc_feature: MA Experiment 20000794 PARAMETER Experiment Name: At_Petals_P Parameter: Tissue Value: Petals vs. Whole plant
  misc_feature: MA Experiment ID: 20001247 Result: Up-regulated in Transcription
  misc_feature: MA Experiment 20001247 PARAMETER Experiment Name: At_Far-red-induction_P Parameter: Age (day) Value: 7
  misc_feature: MA Experiment 20001247 PARAMETER Experiment Name: At_Far-red-induction_P Parameter: Light Value: Far-red vs. White
  misc_feature: MA Experiment 20001247 PARAMETER Experiment Name: At_Far-red-induction_P Parameter: Organism Value: A. thaliana
  misc_feature: MA Experiment 20001247 PARAMETER Experiment Name: At_Far-red-induction_P Parameter: Plant Line Value: Columbia
  misc_feature: MA Experiment 20001247 PARAMETER Experiment Name: At_Far-red-induction_P Parameter: Timepoint (hr) Value: 1
  misc_feature: MA Experiment 20001247 PARAMETER Experiment Name: At_Far-red-induction_P Parameter: Tissue Value: Whole Plant
  misc_feature: MA Experiment ID: 20001248 Result: Up-regulated in Transcription
  misc_feature: MA Experiment 20001248 PARAMETER Experiment Name: At_Far-red-induction_P Parameter: Age (day) Value: 7
  misc_feature: MA Experiment 20001248 PARAMETER Experiment Name: At_Far-red-induction_P Parameter: Light Value: Far-red vs. White
  misc_feature: MA Experiment 20001248 PARAMETER Experiment Name: At_Far-red-induction_P Parameter: Organism Value: A. thaliana
  misc_feature: MA Experiment 20001248 PARAMETER Experiment Name: At_Far-red-induction_P Parameter: Plant Line Value: Columbia
  misc_feature: MA Experiment 20001248 PARAMETER Experiment Name: At_Far-red-induction_P Parameter: Timepoint (hr) Value: 4
  misc_feature: MA Experiment 20001248 PARAMETER Experiment Name: At_Far-red-induction_P Parameter: Tissue Value: Whole Plant
  misc_feature: MA Experiment ID: 20001450 Result: Up-regulated in Transcription
  misc_feature: MA Experiment 20001450 PARAMETER Experiment Name: At_Far-red-induction_P Parameter: Age (day) Value: 7
  misc_feature: MA Experiment 20001450 PARAMETER Experiment Name: At_Far-red-induction_P Parameter: Light Value: Far-red vs. White
  misc_feature: MA Experiment 20001450 PARAMETER Experiment Name: At_Far-red-induction_P Parameter: Organism Value: A. thaliana
  misc_feature: MA Experiment 20001450 PARAMETER Experiment Name: At_Far-red-induction_P Parameter: Plant Line Value: Columbia
  misc_feature: MA Experiment 20001450 PARAMETER Experiment Name: At_Far-red-induction_P Parameter: Timepoint (hr) Value: 8
  misc_feature: MA Experiment 20001450 PARAMETER Experiment Name: At_Far-red-induction_P Parameter: Tissue Value: Whole Plant
  misc_feature: MA Experiment ID: 20001451 Result: Up-regulated in Transcription
  misc_feature: MA Experiment 20001451 PARAMETER Experiment Name: At_Far-red-induction_P Parameter: Age (day) Value: 7
  misc_feature: MA Experiment 20001451 PARAMETER Experiment Name: At_Far-red-induction_P Parameter: Light Value: Far-red vs. White
  misc_feature: MA Experiment 20001451 PARAMETER Experiment Name: At_Far-red-induction_P Parameter: Organism Value: A. thaliana
  misc_feature: MA Experiment 20001451 PARAMETER Experiment Name: At_Far-red-induction_P Parameter: Plant Line Value: Columbia
  misc_feature: MA Experiment 20001451 PARAMETER Experiment Name: At_Far-red-induction_P Parameter: Timepoint (hr) Value: 24
  misc_feature: MA Experiment 20001451 PARAMETER Experiment Name: At_Far-red-induction_P Parameter: Tissue Value: Whole Plant
  misc_feature: MA Experiment ID: 20001554 Result: Up-regulated in Transcription
  misc_feature: MA Experiment 20001554 PARAMETER Experiment Name: At_Drought_Soil_Dry_P Parameter: Age (day) Value: 21
  misc_feature: MA Experiment 20001554 PARAMETER Experiment Name: At_Drought_Soil_Dry_P Parameter: Organism Value: A. thaliana
  misc_feature: MA Experiment 20001554 PARAMETER Experiment Name: At_Drought_Soil_Dry_P Parameter: Plant Line Value: WS
  misc_feature: MA Experiment 20001554 PARAMETER Experiment Name: At_Drought_Soil_Dry_P Parameter: Post Timepoint (hr) Value: None
  misc_feature: MA Experiment 20001554 PARAMETER Experiment Name: At_Drought_Soil_Dry_P Parameter: Post-Treatment Value: None
  misc_feature: MA Experiment 20001554 PARAMETER Experiment Name: At_Drought_Soil_Dry_P Parameter: Timepoint (day) Value: 7
  misc_feature: MA Experiment 20001554 PARAMETER Experiment Name: At_Drought_Soil_Dry_P Parameter: Treatment Value: Drought vs. No Drought
gatcccaagaaatcgaaacacaaagcaatgggctcttcttctccattaacaaggagaaacagagcaccaccatcctctgtttcctctgtttatctaatctttctctgtttcttcctctactttttaaatttctcaaacgctcaatcatcgccggttttcgcctgcgacgtagctgcaaacccttctctcgccgcctatggtttctgcaacaccgttttgaagatcgaataccgagtcgctgatctggtcgcgaggctcacgttgcaagaaaagatcgggtttttagtgagtaaagctaacggcgtgactcgtcttgggattccaacgtatgaatggtggtctgaagcacttcacggcgtttcttacatcggacccggcacgcatttttctagccaagttcccggagctacgagtttcccgcaggttatactcaccgccgcttctttcaacgtatctctgtttcaagccattggcaaggtcgtctcaacggaagcgagggcaatgtacaacgtgggattagccggactaacgtattggtcaccgaacgtgaacatattccgagatccaagatggggaagagggcaagagactccaggagaagatccattgctcgctagtaagtatgcttcagggtacgttaagggtcttcaagagactgacggtggcgattctaaccgtctcaaagtcgccgcctgctgcaaacactataccgcttacgatgtcgataattggaaaggcgtagaacgttacagtttcaacgccgtggtgactcaacaagatatggatgatacgtatcaaccaccgttcaagagttgtgtggttgatgggaatgtggcgagtgttatgtgttcttacaatcaagttaacggcaaaccgacatgcgctgatccagatctgctctctggtgttatccgcggtgaatggaaattaaatgggtacattgtttcagattgtgattcagtagatgtcttgtataagaaccaacactatacaaagactccagctgaagctgcagccatatctatattggcaggtttggatttaaactgtggttcattcttgggtcaacatacagaggaagcagttaagtcgggtttggtaaacgaggcagctatcgataaagcgatttcgaacaactttttgacccttatgcgtttaggattctttgatggaaacccaaagaaccaaatctatggcgggttaggtcctaccgacgtttgcacgtctgcgaatcaagagctagcagcagatgcagcaagacaaggcattgttctactcaagaatactggatgcttaccgctttctcctaaatcgatcaaaacactagccgtgattggaccaaacgcgaatgtcaccaaaacaatgattggaaactacgaaggcacgccgtgtaaatacacaacaccactacaaggactagccgggacggtatctacaacatatctaccaggctgctccaatgtagcttgtgctgtagcggatgtagccggcgccacgaaactagcagccactgcagatgtgtctgtgcttgtgatcggtgccgatcaatcaatcgaggcagagagccgagacagagtcgacctgcatcttcctggacagcaacaagagctggtgatccaagtggctaaagcagcaaaaggaccggtcttgctcgtcattatgtccggtggaggtttcgatattacattcgctaagaatgacccaaagatcgccggaattttgtgggttggttatcccggagaagccggtggtatcgccattgctgatatcatctttggccgttataatccaagtgggaaattaccgatgacgtggtatccacagtcgtatgtagagaaagttccgatgacaataatgaacatgagacccgataaagcaagcgggtatccgggtcggacttaccgattctacaccggagaaacagtatacgcattcggagatggactcagctacaccaaattcagtcacactttagtcaaagctccaagtctcgtttctctcggtctcgaagagaatcacgtttgccgatcatcggaatgtcaatcgctagacgcgatcggaccgcactgcgaaaacgctgtctccggcggtggatcggcgtttgaagttcatatcaaggtacgaaacggaggagatagagaagggattcacacggtgtttctattcacgacgccgccggcgattcacggatcgccgaggaagcatttggtaggattcgagaagattcgattggggaagagggaagaagcggtggttaggtttaaggtagagatatgtaaagatctgagtgtggttgatgagattgggaagaggaagattggtttgggaaagcatcttcttcatgtcggagatttaaaacattccttaagcattagaatctgattctatatttttatttgaggaagaaaaaaagaatattaatatgcttaagcttttgcaagttggaaaagaaaagt

SEQ ID NO: 45656 - protein, 793 aa, Arabidopsis thaliana
  peptide (1)..(793): Ceres Seq. ID no. 13592202
  misc_feature (423)..(653): Pfam Name: Glycosyl hydrolase family 3 C terminal domain Pfam Description: Glycosyl hydrolase family 3 C terminal domain
  misc_feature (423)..(653): Pfam Name: Glycosyl hydrolase family 3 C terminal domain Pfam Description: Glycosyl hydrolase family 3 C terminal domain
  misc_feature (423)..(653): Pfam Name: Glycosyl hydrolase family 3 C terminal domain Pfam Description: Glycosyl hydrolase family 3 C terminal domain
  misc_feature (32)..(218): Homolog of NCBI NO: 15238197 NR Description: glycosyl hydrolase family 3 [Arabidopsis
  misc_feature (193)..(791): Homolog of NCBI NO: 15238197 NR Description: glycosyl hydrolase family 3 [Arabidopsis
  misc_feature (49)..(790): Homolog of NCBI NO: 18025342 NR Description: beta-D-xylosidase [Hordeum vulgare]
  misc_feature (32)..(792): Homolog of NCBI NO: 25518461 NR Description: hypothetical protein T14P4.8 - Arabidopsis
  misc_feature (32)..(792): Homolog of NCBI NO: 18378991 NR Description: glycosyl hydrolase family 3 [Arabidopsis
  misc_feature (32)..(218): Homolog of NCBI NO: 15238197 NR Description: glycosyl hydrolase family 3 [Arabidopsis
  misc_feature (49)..(790): Homolog of NCBI NO: 18025342 NR Description: beta-D-xylosidase [Hordeum vulgare]
  misc_feature (32)..(792): Homolog of NCBI NO: 18378991 NR Description: glycosyl hydrolase family 3 [Arabidopsis
  misc_feature (32)..(792): Homolog of NCBI NO: 25518461 NR Description: hypothetical protein T14P4.8 - Arabidopsis
  misc_feature (49)..(790): Homolog of NCBI NO: 18025342 NR Description: beta-D-xylosidase [Hordeum vulgare]
  misc_feature (193)..(791): Homolog of NCBI NO: 15238197 NR Description: glycosyl hydrolase family 3 [Arabidopsis
  misc_feature (32)..(218): Homolog of NCBI NO: 15238197 NR Description: glycosyl hydrolase family 3 [Arabidopsis
  misc_feature (45)..(793): Homolog of NCBI NO: 18025340 NR Description: alpha-L-arabinofuranosidase/beta-D-xylosidase
  misc_feature (32)..(792): Homolog of NCBI NO: 15239867 NR Description: glycosyl hydrolase family 3 [Arabidopsis
  misc_feature (34)..(793): Homolog of NCBI NO: 32481073 NR Description: auxin-induced beta-glucosidase [Chenopodium
  misc_feature (35)..(793): Homolog of NCBI NO: 15230897 NR Description: glycosyl hydrolase family 3 [Arabidopsis thaliana]
  misc_feature (35)..(793): Homolog of NCBI NO: 25453520 NR Description: beta-1,4-xylosidase [imported] - Arabidopsis
  misc_feature (45)..(793): Homolog of NCBI NO: 18025340 NR Description: alpha-L-arabinofuranosidase/beta-D-xylosidase
  misc_feature (32)..(792): Homolog of NCBI NO: 15239867 NR Description: glycosyl hydrolase family 3 [Arabidopsis
  misc_feature (34)..(793): Homolog of NCBI NO: 32481073 NR Description: auxin-induced beta-glucosidase [Chenopodium
  misc_feature (35)..(793): Homolog of NCBI NO: 15230897 NR Description: glycosyl hydrolase family 3 [Arabidopsis thaliana]
  misc_feature (35)..(793): Homolog of NCBI NO: 25453520 NR Description: beta-1,4-xylosidase [imported] - Arabidopsis
  misc_feature (32)..(792): Homolog of NCBI NO: 18378991 NR Description: glycosyl hydrolase family 3 [Arabidopsis
  misc_feature (32)..(792): Homolog of NCBI NO: 25518461 NR Description: hypothetical protein T14P4.8 - Arabidopsis
  misc_feature (193)..(791): Homolog of NCBI NO: 15238197 NR Description: glycosyl hydrolase family 3 [Arabidopsis
  misc_feature (35)..(793): Homolog of NCBI NO: 25453520 NR Description: beta-1,4-xylosidase [imported] - Arabidopsis
  misc_feature (35)..(793): Homolog of NCBI NO: 15230897 NR Description: glycosyl hydrolase family 3 [Arabidopsis thaliana]
  misc_feature (34)..(793): Homolog of NCBI NO: 32481073 NR Description: auxin-induced beta-glucosidase [Chenopodium
  misc_feature (32)..(792): Homolog of NCBI NO: 15239867 NR Description: glycosyl hydrolase family 3 [Arabidopsis
  misc_feature (45)..(793): Homolog of NCBI NO: 18025340 NR Description: alpha-L-arabinofuranosidase/beta-D-xylosidase
DPKKSKHKAMGSSSPLTRRNRAPPSSVSSVYLIFLCFFLYFLNFSNAQSSPVFACDVAANPSLAAYGFCNTVLKIEYRVADLVARLTLQEKIGFLVSKANGVTRLGIPTYEWWSEALHGVSYIGPGTHFSSQVPGATSFPQVILTAASFNVSLFQAIGKVVSTEARAMYNVGLAGLTYWSPNVNIFRDPRWGRGQETPGEDPLLASKYASGYVKGLQETDGGDSNRLKVAACCKHYTAYDVDNWKGVERYSFNAVVTQQDMDDTYQPPFKSCVVDGNVASVMCSYNQVNGKPTCADPDLLSGVIRGEWKLNGYIVSDCDSVDVLYKNQHYTKTPAEAAAISILAGLDLNCGSFLGQHTEEAVKSGLVNEAAIDKAISNNFLTLMRLGFFDGNPKNQIYGGLGPTDVCTSANQELAADAARQGIVLLKNTGCLPLSPKSIKTLAVIGPNANVTKTMIGNYEGTPCKYTTPLQGLAGTVSTTYLPGCSNVACAVADVAGATKLAATADVSVLVIGADQSIEAESRDRVDLHLPGQQQELVIQVAKAAKGPVLLVIMSGGGFDITFAKNDPKIAGILWVGYPGEAGGIAIADIIFGRYNPSGKLPMTWYPQSYVEKVPMTIMNMRPDKASGYPGRTYRFYTGETVYAFGDGLSYTKFSHTLVKAPSLVSLGLEENHVCRSSECQSLDAIGPHCENAVSGGGSAFEVHIKVRNGGDREGIHTVFLFTTPPAIHGSPRKHLVGFEKIRLGKREEAVVRFKVEICKDLSVVDEIGKRKIGLGKHLLHVGDLKHSLSIRI

SEQ ID NO: 45657 - protein, 784 aa, Arabidopsis thaliana
  peptide (1)..(784): Ceres Seq. ID no. 13592203
  misc_feature (414)..(644): Pfam Name: Glycosyl hydrolase family 3 C terminal domain Pfam Description: Glycosyl hydrolase family 3 C terminal domain
  misc_feature (414)..(644): Pfam Name: Glycosyl hydrolase family 3 C terminal domain Pfam Description: Glycosyl hydrolase family 3 C terminal domain
  misc_feature (414)..(644): Pfam Name: Glycosyl hydrolase family 3 C terminal domain Pfam Description: Glycosyl hydrolase family 3 C terminal domain
  misc_feature (23)..(209): Homolog of NCBI NO: 15238197 NR Description: glycosyl hydrolase family 3 [Arabidopsis
  misc_feature (184)..(782): Homolog of NCBI NO: 15238197 NR Description: glycosyl hydrolase family 3 [Arabidopsis
  misc_feature (40)..(781): Homolog of NCBI NO: 18025342 NR Description: beta-D-xylosidase [Hordeum vulgare]
  misc_feature (23)..(783): Homolog of NCBI NO: 25518461 NR Description: hypothetical protein T14P4.8 - Arabidopsis
  misc_feature (23)..(783): Homolog of NCBI NO: 18378991 NR Description: glycosyl hydrolase family 3 [Arabidopsis
  misc_feature (23)..(209): Homolog of NCBI NO: 15238197 NR Description: glycosyl hydrolase family 3 [Arabidopsis
  misc_feature (40)..(781): Homolog of NCBI NO: 18025342 NR Description: beta-D-xylosidase [Hordeum vulgare]
  misc_feature (23)..(783): Homolog of NCBI NO: 18378991 NR Description: glycosyl hydrolase family 3 [Arabidopsis
  misc_feature (23)..(783): Homolog of NCBI NO: 25518461 NR Description: hypothetical protein T14P4.8 - Arabidopsis
  misc_feature (40)..(781): Homolog of NCBI NO: 18025342 NR Description: beta-D-xylosidase [Hordeum vulgare]
  misc_feature (184)..(782): Homolog of NCBI NO: 15238197 NR Description: glycosyl hydrolase family 3 [Arabidopsis
  misc_feature (23)..(209): Homolog of NCBI NO: 15238197 NR Description: glycosyl hydrolase family 3 [Arabidopsis
  misc_feature (36)..(784): Homolog of NCBI NO: 18025340 NR Description: alpha-L-arabinofuranosidase/beta-D-xylosidase
  misc_feature (23)..(783): Homolog of NCBI NO: 15239867 NR Description: glycosyl hydrolase family 3 [Arabidopsis
  misc_feature (25)..(784): Homolog of NCBI NO: 32481073 NR Description: auxin-induced beta-glucosidase [Chenopodium
  misc_feature (26)..(784): Homolog of NCBI NO: 15230897 NR Description: glycosyl hydrolase family 3 [Arabidopsis thaliana]
  misc_feature (26)..(784): Homolog of NCBI NO: 25453520 NR Description: beta-1,4-xylosidase [imported] - Arabidopsis
  misc_feature (36)..(784): Homolog of NCBI NO: 18025340 NR Description: alpha-L-arabinofuranosidase/beta-D-xylosidase
  misc_feature (23)..(783): Homolog of NCBI NO: 15239867 NR Description: glycosyl hydrolase family 3 [Arabidopsis
  misc_feature (25)..(784): Homolog of NCBI NO: 32481073 NR Description: auxin-induced beta-glucosidase [Chenopodium
  misc_feature (26)..(784): Homolog of NCBI NO: 15230897 NR Description: glycosyl hydrolase family 3 [Arabidopsis thaliana]
  misc_feature (26)..(784): Homolog of NCBI NO: 25453520 NR Description: beta-1,4-xylosidase [imported] - Arabidopsis
  misc_feature (23)..(783): Homolog of NCBI NO: 18378991 NR Description: glycosyl hydrolase family 3 [Arabidopsis
  misc_feature (23)..(783): Homolog of NCBI NO: 25518461 NR Description: hypothetical protein T14P4.8 - Arabidopsis
  misc_feature (184)..(782): Homolog of NCBI NO: 15238197 NR Description: glycosyl hydrolase family 3 [Arabidopsis
  misc_feature (26)..(784): Homolog of NCBI NO: 25453520 NR Description: beta-1,4-xylosidase [imported] - Arabidopsis
  misc_feature (26)..(784): Homolog of NCBI NO: 15230897 NR Description: glycosyl hydrolase family 3 [Arabidopsis thaliana]
  misc_feature (25)..(784): Homolog of NCBI NO: 32481073 NR Description: auxin-induced beta-glucosidase [Chenopodium
  misc_feature (23)..(783): Homolog of NCBI NO: 15239867 NR Description: glycosyl hydrolase family 3 [Arabidopsis
  misc_feature (36)..(784): Homolog of NCBI NO: 18025340 NR Description: alpha-L-arabinofuranosidase/beta-D-xylosidase
MGSSSPLTRRNRAPPSSVSSVYLIFLCFFLYFLNFSNAQSSPVFACDVAANPSLAAYGFCNTVLKIEYRVADLVARLTLQEKIGFLVSKANGVTRLGIPTYEWWSEALHGVSYIGPGTHFSSQVPGATSFPQVILTAASFNVSLFQAIGKVVSTEARAMYNVGLAGLTYWSPNVNIFRDPRWGRGQETPGEDPLLASKYASGYVKGLQETDGGDSNRLKVAACCKHYTAYDVDNWKGVERYSFNAVVTQQDMDDTYQPPFKSCVVDGNVASVMCSYNQVNGKPTCADPDLLSGVIRGEWKLNGYIVSDCDSVDVLYKNQHYTKTPAEAAAISILAGLDLNCGSFLGQHTEEAVKSGLVNEAAIDKAISNNFLTLMRLGFFDGNPKNQIYGGLGPTDVCTSANQELAADAARQGIVLLKNTGCLPLSPKSIKTLAVIGPNANVTKTMIGNYEGTPCKYTTPLQGLAGTVSTTYLPGCSNVACAVADVAGATKLAATADVSVLVIGADQSIEAESRDRVDLHLPGQQQELVIQVAKAAKGPVLLVIMSGGGFDITFAKNDPKIAGILWVGYPGEAGGIAIADIIFGRYNPSGKLPMTWYPQSYVEKVPMTIMNMRPDKASGYPGRTYRFYTGETVYAFGDGLSYTKFSHTLVKAPSLVSLGLEENHVCRSSECQSLDAIGPHCENAVSGGGSAFEVHIKVRNGGDREGIHTVFLFTTPPAIHGSPRKHLVGFEKIRLGKREEAVVRFKVEICKDLSVVDEIGKRKIGLGKHLLHVGDLKHSLSIRI

SEQ ID NO: 45658 - protein, 626 aa, Arabidopsis thaliana
  peptide (1)..(626): Ceres Seq. ID no. 13592204
  misc_feature (256)..(486): Pfam Name: Glycosyl hydrolase family 3 C terminal domain Pfam Description: Glycosyl hydrolase family 3 C terminal domain
  misc_feature (256)..(486): Pfam Name: Glycosyl hydrolase family 3 C terminal domain Pfam Description: Glycosyl hydrolase family 3 C terminal domain
  misc_feature (256)..(486): Pfam Name: Glycosyl hydrolase family 3 C terminal domain Pfam Description: Glycosyl hydrolase family 3 C terminal domain
  misc_feature (1)..(51): Homolog of NCBI NO: 15238197 NR Description: glycosyl hydrolase family 3 [Arabidopsis
  misc_feature (26)..(624): Homolog of NCBI NO: 15238197 NR Description: glycosyl hydrolase family 3 [Arabidopsis
  misc_feature (1)..(623): Homolog of NCBI NO: 18025342 NR Description: beta-D-xylosidase [Hordeum vulgare]
  misc_feature (1)..(625): Homolog of NCBI NO: 25518461 NR Description: hypothetical protein T14P4.8 - Arabidopsis
  misc_feature (1)..(625): Homolog of NCBI NO: 18378991 NR Description: glycosyl hydrolase family 3 [Arabidopsis
  misc_feature (1)..(51): Homolog of NCBI NO: 15238197 NR Description: glycosyl hydrolase family 3 [Arabidopsis
  misc_feature (1)..(623): Homolog of NCBI NO: 18025342 NR Description: beta-D-xylosidase [Hordeum vulgare]
  misc_feature (1)..(625): Homolog of NCBI NO: 18378991 NR Description: glycosyl hydrolase family 3 [Arabidopsis
  misc_feature (1)..(625): Homolog of NCBI NO: 25518461 NR Description: hypothetical protein T14P4.8 - Arabidopsis
  misc_feature (1)..(623): Homolog of NCBI NO: 18025342 NR Description: beta-D-xylosidase [Hordeum vulgare]
  misc_feature (26)..(624): Homolog of NCBI NO: 15238197 NR Description: glycosyl hydrolase family 3 [Arabidopsis
  misc_feature (1)..(51): Homolog of NCBI NO: 15238197 NR Description: glycosyl hydrolase family 3 [Arabidopsis
  misc_feature (1)..(626): Homolog of NCBI NO: 18025340 NR Description: alpha-L-arabinofuranosidase/beta-D-xylosidase
  misc_feature (1)..(625): Homolog of NCBI NO: 15239867 NR Description: glycosyl hydrolase family 3 [Arabidopsis
  misc_feature (1)..(626): Homolog of NCBI NO: 32481073 NR Description: auxin-induced beta-glucosidase [Chenopodium
  misc_feature (1)..(626): Homolog of NCBI NO: 15230897 NR Description: glycosyl hydrolase family 3 [Arabidopsis thaliana]
  misc_feature (1)..(626): Homolog of NCBI NO: 25453520 NR Description: beta-1,4-xylosidase [imported] - Arabidopsis
  misc_feature (1)..(626): Homolog of NCBI NO: 18025340 NR Description: alpha-L-arabinofuranosidase/beta-D-xylosidase
  misc_feature (1)..(625): Homolog of NCBI NO: 15239867 NR Description: glycosyl hydrolase family 3 [Arabidopsis
  misc_feature (1)..(626): Homolog of NCBI NO: 32481073 NR Description: auxin-induced beta-glucosidase [Chenopodium
  misc_feature (1)..(626): Homolog of NCBI NO: 15230897 NR Description: glycosyl hydrolase family 3 [Arabidopsis thaliana]
  misc_feature (1)..(626): Homolog of NCBI NO: 25453520 NR Description: beta-1,4-xylosidase [imported] - Arabidopsis
  misc_feature (1)..(625): Homolog of NCBI NO: 18378991 NR Description: glycosyl hydrolase family 3 [Arabidopsis
  misc_feature (1)..(625): Homolog of NCBI NO: 25518461 NR Description: hypothetical protein T14P4.8 - Arabidopsis
  misc_feature (26)..(624): Homolog of NCBI NO: 15238197 NR Description: glycosyl hydrolase family 3 [Arabidopsis
  misc_feature (1)..(626): Homolog of NCBI NO: 25453520 NR Description: beta-1,4-xylosidase [imported] - Arabidopsis
  misc_feature (1)..(626): Homolog of NCBI NO: 15230897 NR Description: glycosyl hydrolase family 3 [Arabidopsis thaliana]
  misc_feature (1)..(626): Homolog of NCBI NO: 32481073 NR Description: auxin-induced beta-glucosidase [Chenopodium
  misc_feature (1)..(625): Homolog of NCBI NO: 15239867 NR Description: glycosyl hydrolase family 3 [Arabidopsis
  misc_feature (1)..(626): Homolog of NCBI NO: 18025340 NR Description: alpha-L-arabinofuranosidase/beta-D-xylosidase
MYNVGLAGLTYWSPNVNIFRDPRWGRGQETPGEDPLLASKYASGYVKGLQETDGGDSNRLKVAACCKHYTAYDVDNWKGVERYSFNAVVTQQDMDDTYQPPFKSCVVDGNVASVMCSYNQVNGKPTCADPDLLSGVIRGEWKLNGYIVSDCDSVDVLYKNQHYTKTPAEAAAISILAGLDLNCGSFLGQHTEEAVKSGLVNEAAIDKAISNNFLTLMRLGFFDGNPKNQIYGGLGPTDVCTSANQELAADAARQGIVLLKNTGCLPLSPKSIKTLAVIGPNANVTKTMIGNYEGTPCKYTTPLQGLAGTVSTTYLPGCSNVACAVADVAGATKLAATADVSVLVIGADQSIEAESRDRVDLHLPGQQQELVIQVAKAAKGPVLLVIMSGGGFDITFAKNDPKIAGILWVGYPGEAGGIAIADIIFGRYNPSGKLPMTWYPQSYVEKVPMTIMNMRPDKASGYPGRTYRFYTGETVYAFGDGLSYTKFSHTLVKAPSLVSLGLEENHVCRSSECQSLDAIGPHCENAVSGGGSAFEVHIKVRNGGDREGIHTVFLFTTPPAIHGSPRKHLVGFEKIRLGKREEAVVRFKVEICKDLSVVDEIGKRKIGLGKHLLHVGDLKHSLSIRI

SEQ ID NO: 45659 - DNA, 1448 bp, Arabidopsis thaliana
  misc_feature (1)..(1448): Ceres Seq. ID no. 13646708
  misc_feature: MA Experiment ID: 20000173 Result: Down-regulated in Transcription
  misc_feature: MA Experiment 20000173 PARAMETER Experiment Name: At_42deg_Heat_P Parameter: Age (day) Value: 14
  misc_feature: MA Experiment 20000173 PARAMETER Experiment Name: At_42deg_Heat_P Parameter: Organism Value: A. thaliana
  misc_feature: MA Experiment 20000173 PARAMETER Experiment Name: At_42deg_Heat_P Parameter: Plant Line Value: WS
  misc_feature: MA Experiment 20000173 PARAMETER Experiment Name: At_42deg_Heat_P Parameter: Temperature (deg C) Value: 42 vs. 22
  misc_feature: MA Experiment 20000173 PARAMETER Experiment Name: At_42deg_Heat_P Parameter: Timepoint (hr) Value: 6
  misc_feature: MA Experiment 20000173 PARAMETER Experiment Name: At_42deg_Heat_P Parameter: Tissue Value: Aerial
  misc_feature: MA Experiment ID: 20000184 Result: Down-regulated in Transcription
  misc_feature: MA Experiment 20000184 PARAMETER Experiment Name: At_Shoots__P Parameter: Age (day) Value: 7
  misc_feature: MA Experiment 20000184 PARAMETER Experiment Name: At_Shoots__P Parameter: Tissue Value: Shoots vs. Whole Plant
  misc_feature: MA Experiment ID: 20000213 Result: Down-regulated in Transcription
  misc_feature: MA Experiment 20000213 PARAMETER Experiment Name: At_4deg_Cold_P Parameter: Timepoint (hr) Value: 2
  misc_feature: MA Experiment ID: 20000214 Result: Down-regulated in Transcription
  misc_feature: MA Experiment 20000214 PARAMETER Experiment Name: At_4deg_Cold_P Parameter: Timepoint (hr) Value: 6
  misc_feature: MA Experiment ID: 20000235 Result: Down-regulated in Transcription
  misc_feature: MA Experiment 20000235 PARAMETER Experiment Name: At_Siliques_P Parameter: Age (day) Value: 21
  misc_feature: MA Experiment 20000235 PARAMETER Experiment Name: At_Siliques_P Parameter: Organism Value: A. thaliana
  misc_feature: MA Experiment 20000235 PARAMETER Experiment Name: At_Siliques_P Parameter: Plant Line Value: WS
  misc_feature: MA Experiment 20000235 PARAMETER Experiment Name: At_Siliques_P Parameter: Tissue Value: 5-10mm Siliques vs. Whole Plant
  misc_feature: MA Experiment ID: 20000264 Result: Down-regulated in Transcription
  misc_feature: MA Experiment 20000264 PARAMETER Experiment Name: At_Open_Flower_P Parameter: Age (day) Value: 21
  misc_feature: MA Experiment 20000264 PARAMETER Experiment Name: At_Open_Flower_P Parameter: Plant Line Value: WS
  misc_feature: MA Experiment 20000264 PARAMETER Experiment Name: At_Open_Flower_P Parameter: Tissue Value: Open Flower vs. Whole Plant
  misc_feature: MA Experiment ID: 20001248 Result: Up-regulated in Transcription
  misc_feature: MA Experiment 20001248 PARAMETER Experiment Name: At_Far-red-induction_P Parameter: Age (day) Value: 7
  misc_feature: MA Experiment 20001248 PARAMETER Experiment Name: At_Far-red-induction_P Parameter: Light Value: Far-red vs. White
  misc_feature: MA Experiment 20001248 PARAMETER Experiment Name: At_Far-red-induction_P Parameter: Organism Value: A. thaliana
  misc_feature: MA Experiment 20001248 PARAMETER Experiment Name: At_Far-red-induction_P Parameter: Plant Line Value: Columbia
  misc_feature: MA Experiment 20001248 PARAMETER Experiment Name: At_Far-red-induction_P Parameter: Timepoint (hr) Value: 4
  misc_feature: MA Experiment 20001248 PARAMETER Experiment Name: At_Far-red-induction_P Parameter: Tissue Value: Whole Plant
  misc_feature: MA Experiment ID: 20001450 Result: Up-regulated in Transcription
  misc_feature: MA Experiment 20001450 PARAMETER Experiment Name: At_Far-red-induction_P Parameter: Age (day) Value: 7
  misc_feature: MA Experiment 20001450 PARAMETER Experiment Name: At_Far-red-induction_P Parameter: Light Value: Far-red vs. White
  misc_feature: MA Experiment 20001450 PARAMETER Experiment Name: At_Far-red-induction_P Parameter: Organism Value: A. thaliana
  misc_feature: MA Experiment 20001450 PARAMETER Experiment Name: At_Far-red-induction_P Parameter: Plant Line Value: Columbia
  misc_feature: MA Experiment 20001450 PARAMETER Experiment Name: At_Far-red-induction_P Parameter: Timepoint (hr) Value: 8
  misc_feature: MA Experiment 20001450 PARAMETER Experiment Name: At_Far-red-induction_P Parameter: Tissue Value: Whole Plant
  misc_feature: MA Experiment ID: 20001451 Result: Up-regulated in Transcription
  misc_feature: MA Experiment 20001451 PARAMETER Experiment Name: At_Far-red-induction_P Parameter: Age (day) Value: 7
  misc_feature: MA Experiment 20001451 PARAMETER Experiment Name: At_Far-red-induction_P Parameter: Light Value: Far-red vs. White
  misc_feature: MA Experiment 20001451 PARAMETER Experiment Name: At_Far-red-induction_P Parameter: Organism Value: A. thaliana
  misc_feature: MA Experiment 20001451 PARAMETER Experiment Name: At_Far-red-induction_P Parameter: Plant Line Value: Columbia
  misc_feature: MA Experiment 20001451 PARAMETER Experiment Name: At_Far-red-induction_P Parameter: Timepoint (hr) Value: 24
  misc_feature: MA Experiment 20001451 PARAMETER Experiment Name: At_Far-red-induction_P Parameter: Tissue Value: Whole Plant
  misc_feature: MA Experiment ID: 20001905 Result: Down-regulated in Transcription
  misc_feature: MA Experiment 20001905 PARAMETER Experiment Name: At_Drought_Reproduction_P Parameter: Age (day) Value: 40
  misc_feature: MA Experiment 20001905 PARAMETER Experiment Name: At_Drought_Reproduction_P Parameter: Organism Value: A. thaliana
  misc_feature: MA Experiment 20001905 PARAMETER Experiment Name: At_Drought_Reproduction_P Parameter: Plant Line Value: WS
  misc_feature: MA Experiment 20001905 PARAMETER Experiment Name: At_Drought_Reproduction_P Parameter: Timepoint (day) Value: 10
  misc_feature: MA Experiment 20001905 PARAMETER Experiment Name: At_Drought_Reproduction_P Parameter: Tissue Value: Rosettes
  misc_feature: MA Experiment 20001905 PARAMETER Experiment Name: At_Drought_Reproduction_P Parameter: Treatment Value: Drought vs. No Drought
gtactgtatgttgacaaattgaatagtctctgatgatttcgatcaaagagaagccacggggggagcggtagcacttaaaggacgaaagctgtgttagtattctctccactgtaaaggacaagatgtctcagaagcgaaatcttacttcttggatgagttctagggatcccgagattactccgagtaagtctcattgtaagaagcctaaggatgaaggaccaaccgaagagcacaacagtagaaatgccccttccaacaagtcagaacacgccgagccaagttcaaataccactgaattctctaaacttatggaaggcgttgtttttgtactttcgggctttgttaatcctgagaggagtacactgaggtcacaagccttgacaatgggagccacctatcaacctgactggaacgctggctctaccttgttgatttgtgcttttcctaacactccaaagttccgtcaagttgaaacaaatggtggaacaattatctcaaaggagtggataactgagtgttatgcgcagaagaagttggtagatatcgagcaataccttatgcatgctggaaaaccatggaggaaaagcagtagtccccaagatgctaatcgagaaaagagagaacacctgtctaaaaaaccagagaagcaagtagagaaaaaaacagaaacaaggggaacaccatctacctcatccaagaatagatcagcttgcaatcttgtgaaagagccattttctgttacagaggtgaagaaatgggccagggatgacctaagtcaaaccatctcatggcttgagagtcaggaggaaaaaccagaaccaggcgaaatcaagcgaatagctgcggaaggagtcttaacctgcttacaagacgccatagattctcttgaacagaagcaggacattggatcagttacagagctatggagctttgtccctcgtgtagtgaaggagcttggaaagatggaatcgtcttctaaaaaggaaaattcaacagcatcaaaggaagaagtttgcaaacaagcaaagtcgtggaaaaagatctacgaagctgagctagcaaaaccgggcgaagatgaatcgacctctcgggttgcttgtggctatgacagtgatatgaccgttgagatgactgaagaagagatcgaacttgcttataggaacgtttctttagagtgtctttagatcaaacttgtttcattttgcatatgatctcttaaggaattccaagaattcttgttatactcggtttgttcggtttgagtaggatgttattactgataaaaatttgaaattaatccggtctgcttggttcggaaagaatgtttctaattagaatttatttatgctggtttggattcgattgagagatgtaatcggttgcaattaataagtcggtttgatttgatagaaaaaaaaaaaaaaaaaaaactcgagggggggcccggt

SEQ ID NO: 45660 - protein, 353 aa, Arabidopsis thaliana
  peptide (1)..(353): Ceres Seq. ID no. 13646709
  misc_feature (13)..(216): Homolog of NCBI NO: 5454172 NR Description: X-ray repair cross complementing protein 1
  misc_feature (13)..(216): Homolog of NCBI NO: 40226177 NR Description: X-ray repair cross complementing protein 1 [Homo
  misc_feature (4)..(189): Homolog of NCBI NO: 33416536 NR Description: X-ray repair complementing defective repair in
  misc_feature (4)..(189): Homolog of NCBI NO: 6678613 NR Description: X-ray repair complementing defective repair in
  misc_feature (4)..(192): Homolog of NCBI NO: 2906008 NR Description: DNA repair protein XRCC1 [Cricetulus griseus]
  misc_feature (13)..(216): Homolog of NCBI NO: 9954649 NR Description: XRCC1 DNA repair protein [Homo sapiens]
  misc_feature (1)..(196): Homolog of NCBI NO: 27924221 NR Description: Similar to x-ray repair cross-complementing group
  misc_feature (1)..(200): Homolog of NCBI NO: 25406663 NR Description: probable DNA repair protein, 81467-82519
  misc_feature (1)..(353): Homolog of NCBI NO: 22330772 NR Description: DNA repair protein -related [Arabidopsis
  misc_feature (1)..(353): Homolog of NCBI NO: 11181954 NR Description: putative DNA repair protein XRCC1 [Arabidopsis
MSQKRNLTSWMSSRDPEITPSKSHCKKPKDEGPTEEHNSRNAPSNKSEHAEPSSNTTEFSKLMEGVVFVLSGFVNPERSTLRSQALTMGATYQPDWNAGSTLLICAFPNTPKFRQVETNGGTIISKEWITECYAQKKLVDIEQYLMHAGKPWRKSSSPQDANREKREHLSKKPEKQVEKKTETRGTPSTSSKNRSACNLVKEPFSVTEVKKWARDDLSQTISWLESQEEKPEPGEIKRIAAEGVLTCLQDAIDSLEQKQDIGSVTELWSFVPRVVKELGKMESSSKKENSTASKEEVCKQAKSWKKIYEAELAKPGEDESTSRVACGYDSDMTVEMTEEEIELAYRNVSLECL

SEQ ID NO: 45661 - protein, 343 aa, Arabidopsis thaliana
  peptide (1)..(343): Ceres Seq. ID no. 13646710
  misc_feature (3)..(206): Homolog of NCBI NO: 5454172 NR Description: X-ray repair cross complementing protein 1
  misc_feature (3)..(206): Homolog of NCBI NO: 40226177 NR Description: X-ray repair cross complementing protein 1 [Homo
  misc_feature (1)..(179): Homolog of NCBI NO: 33416536 NR Description: X-ray repair complementing defective repair in
  misc_feature (1)..(179): Homolog of NCBI NO: 6678613 NR Description: X-ray repair complementing defective repair in
  misc_feature (1)..(182): Homolog of NCBI NO: 2906008 NR Description: DNA repair protein XRCC1 [Cricetulus griseus]
  misc_feature (3)..(206): Homolog of NCBI NO: 9954649 NR Description: XRCC1 DNA repair protein [Homo sapiens]
  misc_feature (1)..(186): Homolog of NCBI NO: 27924221 NR Description: Similar to x-ray repair cross-complementing group
  misc_feature (1)..(190): Homolog of NCBI NO: 25406663 NR Description: probable DNA repair protein, 81467-82519
  misc_feature (1)..(343): Homolog of NCBI NO: 22330772 NR Description: DNA repair protein -related [Arabidopsis
  misc_feature (1)..(343): Homolog of NCBI NO: 11181954 NR Description: putative DNA repair protein XRCC1 [Arabidopsis
MSSRDPEITPSKSHCKKPKDEGPTEEHNSRNAPSNKSEHAEPSSNTTEFSKLMEGVVFVLSGFVNPERSTLRSQALTMGATYQPDWNAGSTLLICAFPNTPKFRQVETNGGTIISKEWITECYAQKKLVDIEQYLMHAGKPWRKSSSPQDANREKREHLSKKPEKQVEKKTETRGTPSTSSKNRSACNLVKEPFSVTEVKKWARDDLSQTISWLESQEEKPEPGEIKRIAAEGVLTCLQDAIDSLEQKQDIGSVTELWSFVPRVVKELGKMESSSKKENSTASKEEVCKQAKSWKKIYEAELAKPGEDESTSRVACGYDSDMTVEMTEEEIELAYRNVSLECL

SEQ ID NO: 45662 - protein, 291 aa, Arabidopsis thaliana
  peptide (1)..(291): Ceres Seq. ID no. 13646711
  misc_feature (1)..(154): Homolog of NCBI NO: 5454172 NR Description: X-ray repair cross complementing protein 1
  misc_feature (1)..(154): Homolog of NCBI NO: 40226177 NR Description: X-ray repair cross complementing protein 1 [Homo
  misc_feature (1)..(127): Homolog of NCBI NO: 33416536 NR Description: X-ray repair complementing defective repair in
  misc_feature (1)..(127): Homolog of NCBI NO: 6678613 NR Description: X-ray repair complementing defective repair in
  misc_feature (1)..(130): Homolog of NCBI NO: 2906008 NR Description: DNA repair protein XRCC1 [Cricetulus griseus]
  misc_feature (1)..(154): Homolog of NCBI NO: 9954649 NR Description: XRCC1 DNA repair protein [Homo sapiens]
  misc_feature (1)..(134): Homolog of NCBI NO: 27924221 NR Description: Similar to x-ray repair cross-complementing group
  misc_feature (1)..(138): Homolog of NCBI NO: 25406663 NR Description: probable DNA repair protein, 81467-82519
  misc_feature (1)..(291): Homolog of NCBI NO: 22330772 NR Description: DNA repair protein -related [Arabidopsis
  misc_feature (1)..(291): Homolog of NCBI NO: 11181954 NR Description: putative DNA repair protein XRCC1 [Arabidopsis
MEGVVFVLSGFVNPERSTLRSQALTMGATYQPDWNAGSTLLICAFPNTPKFRQVETNGGTIISKEWITECYAQKKLVDIEQYLMHAGKPWRKSSSPQDANREKREHLSKKPEKQVEKKTETRGTPSTSSKNRSACNLVKEPFSVTEVKKWARDDLSQTISWLESQEEKPEPGEIKRIAAEGVLTCLQDAIDSLEQKQDIGSVTELWSFVPRVVKELGKMESSSKKENSTASKEEVCKQAKSWKKIYEAELAKPGEDESTSRVACGYDSDMTVEMTEEEIELAYRNVSLECL

SEQ ID NO: 45663 - DNA, 1646 bp, Arabidopsis thaliana
  misc_feature (1)..(1646): Ceres Seq. ID no. 12604019
  misc_feature: MA Experiment ID: 20000307 Result: Up-regulated in Transcription
  misc_feature: MA Experiment 20000307 PARAMETER Experiment Name: At_Germinating_Seeds_Sub_P Parameter: Age (hr) Value: 24 vs. 0
  misc_feature: MA Experiment 20000307 PARAMETER Experiment Name: At_Germinating_Seeds_Sub_P Parameter: Organism Value: A. thaliana
  misc_feature: MA Experiment 20000307 PARAMETER Experiment Name: At_Germinating_Seeds_Sub_P Parameter: Plant Line Value: WS
  misc_feature: MA Experiment 20000307 PARAMETER Experiment Name: At_Germinating_Seeds_Sub_P Parameter: Tissue Value: Germinating Seeds
  misc_feature: MA Experiment ID: 20000315 Result: Down-regulated in Transcription
  misc_feature: MA Experiment 20000315 PARAMETER Experiment Name: At_14day_Shoots-Roots_Sub_P Parameter: Age (day) Value: 14
  misc_feature: MA Experiment 20000315 PARAMETER Experiment Name: At_14day_Shoots-Roots_Sub_P Parameter: Organism Value: A. thaliana
  misc_feature: MA Experiment 20000315 PARAMETER Experiment Name: At_14day_Shoots-Roots_Sub_P Parameter: Plant Line Value: WS
  misc_feature: MA Experiment 20000315 PARAMETER Experiment Name: At_14day_Shoots-Roots_Sub_P Parameter: Tissue Value: Shoots vs. Whole Plant
  misc_feature: MA Experiment ID: 20000328 Result: Down-regulated in Transcription
  misc_feature: MA Experiment 20000328 PARAMETER Experiment Name: At_42deg_Heat_Sub_P Parameter: Age (day) Value: 14
  misc_feature: MA Experiment 20000328 PARAMETER Experiment Name: At_42deg_Heat_Sub_P Parameter: Organism Value: A. thaliana
  misc_feature: MA Experiment 20000328 PARAMETER Experiment Name: At_42deg_Heat_Sub_P Parameter: Plant Line Value: WS
  misc_feature: MA Experiment 20000328 PARAMETER Experiment Name: At_42deg_Heat_Sub_P Parameter: Temperature (deg C) Value: 42 vs. 22
  misc_feature: MA Experiment 20000328 PARAMETER Experiment Name: At_42deg_Heat_Sub_P Parameter: Timepoint (hr) Value: 6
  misc_feature: MA Experiment 20000328 PARAMETER Experiment Name: At_42deg_Heat_Sub_P Parameter: Tissue Value: Aerial
  misc_feature: MA Experiment ID: 20000355 Result: Up-regulated in Transcription
  misc_feature: MA Experiment 20000355 PARAMETER Experiment Name: At_Siliques_Sub_P Parameter: Age (day) Value: 21
  misc_feature: MA Experiment 20000355 PARAMETER Experiment Name: At_Siliques_Sub_P Parameter: Organism Value: A. thaliana
  misc_feature: MA Experiment 20000355 PARAMETER Experiment Name: At_Siliques_Sub_P Parameter: Plant Line Value: WS
  misc_feature: MA Experiment 20000355 PARAMETER Experiment Name: At_Siliques_Sub_P Parameter: Tissue Value: Less Than 5mm Siliques vs. Whole Plant
  misc_feature: MA Experiment ID: 20000440 Result: Up-regulated in Transcription
  misc_feature: MA Experiment 20000440 PARAMETER Experiment Name: At_Closed-Flower__Sub_P Parameter: Tissue Value: Closed Flower vs. Whole Plant
tctctctctctctctatcttaactcaactattcagtttcaattttcaaatttcagaaaccattttctctctctatctctcttcttcttctttatctcagtaatggagacttcatcgacgatctcgatcggttcttgtttaaaagagcatcagaagatctacaaggaatggttcaacatcgccgattcagatggagatggtcgtgtttcgggtaacgatgctacaaagttcttcgcgatgtcaaagctttctcgccaggaactcaaacaggtttgggcagttgcggattcaaagcggcaaggatttctcggtttatcggactcgtctcattggcacaagaaggacatgaaattacttcagaccttctcaaaggctcaagtaagtggaaaattacatcttaaactgtttgaatcaagaggttctgatagtgtggaacttccagtgttggaaggactagaaaacgttgtatcaaagcagaaagtgtcaaaaacaaatgtggatgttgaagacaatgtagttaccaagccacaagtcacggcaaaaactccttggttcaaatcaaaatctattattaagccacaagtaaatgtggtgacaattgttgatggcttgaaaagattgtacactgaaaagctaaagcctttggaagtcacatatcggttcaatgattttgcatccccggtactggtgagtaatatccttactgtttcagaaacacttactagtagcgattttgatgccaaaccaatggtaatgcttttgggtcaatattccaccggaaaaacaacatttataaaacacttgctcggatgtgactacccaggagctcatatcggtccagagccaacaacagataggtttgtagttgcaatgagtggaccagatgagcggactatacctggaaataccatggctgttcaagctgacatgccatttaacggactaacaagctttggaggtgctttcctctcaaagttcgagtgttctcaaatgccgcatccggtcttggaccaaattactcttgtagacactcctggagttctttcaggagagaaacaaaggatgcaaaggagctatgacttcactggtgtcatctcatggtttgcatctaaatgcgacatgattctcctgctctttgatccccacaagcttgacatcagtgatgaattcaaacgtgtgataacatctctacgtggtaatgaagacaagatccgtgttgtcttaaacaaagctgaccaagttgatactcaacaaccgctttttctaaagctaatgagagtgtatggagcattgatgtggtcgcttggtaaagtcctgaacacaccagaggtcgtacgtgtctatattgggtccttcaatgacaaacccataaacgaagttgcagttggaccgattgggaaagaactctttgagaaagagcaaaatgatcttctagcagacttaatggacgtacccaagaaagcatgtgacagaaagattaatgagtttgtgaagcgagctcgatctgcaaagataaatgcatacataatgagtcaccttaagaaggaaatgccagcaatgatgggcaaatccaaagctcagcaacgtctcatggacaatctcgaagaagaatttggaaaggtgcgtaaaatatctcatttggtctag

SEQ ID NO: 45664 - protein, 547 aa, Arabidopsis thaliana
  peptide (1)..(547): Ceres Seq. ID no. 12604020
  misc_feature (52)..(80): Pfam Name: EF hand Pfam Description: EF hand
  misc_feature (198)..(542): Homolog of NCBI NO: 9956076 NR Description: similar to Homo sapiens Hpast (HPAST) mRNA with
  misc_feature (198)..(542): Homolog of NCBI NO: 7106303 NR Description: EH-domain containing 1 [Mus musculus]
  misc_feature (159)..(542): Homolog of NCBI NO: 17565132 NR Description: Receptor Mediated Endocytosis 1 RME-1 isoform 2,
  misc_feature (159)..(542): Homolog of NCBI NO: 7206819 NR Description: Receptor mediated endocytosis protein 1, isoform
  misc_feature (166)..(542): Homolog of NCBI NO: 17565130 NR Description: Receptor Mediated Endocytosis 1 isoform 1,
  misc_feature (115)..(546): Homolog of NCBI NO: 38345297 NR Description: OSJNBa0043A12.19 [Oryza sativa (japonica
  misc_feature (34)..(150): Homolog of NCBI NO: 9294546 NR Description: contains similarity to EH domain containing
  misc_feature (183)..(546): Homolog of NCBI NO: 9294546 NR Description: contains similarity to EH domain containing
  misc_feature (39)..(546): Homolog of NCBI NO: 18402561 NR Description: expressed protein
  misc_feature (34)..(547): Homolog of NCBI NO: 18412957 NR Description: score=11.7, E=0.66,N=1; protein id: At4g05520.1
SLSLYLNSTIQFQFSNFRNHFLSLSLFFFFISVMETSSTISIGSCLKEHQKIYKEWFNIADSDGDGRVSGNDATKFFAMSKLSRQELKQVWAVADSKRQGFLGLSDSSHWHKKDMKLLQTFSKAQVSGKLHLKLFESRGSDSVELPVLEGLENVVSKQKVSKTNVDVEDNVVTKPQVTAKTPWFKSKSIIKPQVNVVTIVDGLKRLYTEKLKPLEVTYRFNDFASPVLVSNILTVSETLTSSDFDAKPMVMLLGQYSTGKTTFIKHLLGCDYPGAHIGPEPTTDRFVVAMSGPDERTIPGNTMAVQADMPFNGLTSFGGAFLSKFECSQMPHPVLDQITLVDTPGVLSGEKQRMQRSYDFTGVISWFASKCDMILLLFDPHKLDISDEFKRVITSLRGNEDKIRVVLNKADQVDTQQPLFLKLMRVYGALMWSLGKVLNTPEVVRVYIGSFNDKPINEVAVGPIGKELFEKEQNDLLADLMDVPKKACDRKINEFVKRARSAKINAYIMSHLKKEMPAMMGKSKAQQRLMDNLEEEFGKVRKISHLV

SEQ ID NO: 45665 - protein, 514 aa, Arabidopsis thaliana
  peptide (1)..(514): Ceres Seq. ID no. 12604021
  misc_feature (19)..(47): Pfam Name: EF hand Pfam Description: EF hand
  misc_feature (165)..(509): Homolog of NCBI NO: 22477515 NR Description: EH-domain containing 1 [Mus musculus]
  misc_feature (165)..(509): Homolog of NCBI NO: 7106303 NR Description: EH-domain containing 1 [Mus musculus]
  misc_feature (126)..(509): Homolog of NCBI NO: 17565132 NR Description: Receptor Mediated Endocytosis 1 RME-1 isoform 2,
  misc_feature (126)..(509): Homolog of NCBI NO: 7206819 NR Description: Receptor mediated endocytosis protein 1, isoform
  misc_feature (133)..(509): Homolog of NCBI NO: 17565130 NR Description: Receptor Mediated Endocytosis 1 isoform 1,
  misc_feature (82)..(513): Homolog of NCBI NO: 38345297 NR Description: OSJNBa0043A12.19 [Oryza sativa (japonica
  misc_feature (1)..(117): Homolog of NCBI NO: 9294546 NR Description: contains similarity to EH domain containing
  misc_feature (150)..(513): Homolog of NCBI NO: 9294546 NR Description: contains similarity to EH domain containing
  misc_feature (6)..(513): Homolog of NCBI NO: 18402561 NR Description: expressed protein
  misc_feature (1)..(514): Homolog of NCBI NO: 18412957 NR Description: score=11.7, E=0.66,N=1; protein id: At4g05520.1
METSSTISIGSCLKEHQKIYKEWFNIADSDGDGRVSGNDATKFFAMSKLSRQELKQVWAVADSKRQGFLGLSDSSHWHKKDMKLLQTFSKAQVSGKLHLKLFESRGSDSVELPVLEGLENVVSKQKVSKTNVDVEDNVVTKPQVTAKTPWFKSKSIIKPQVNVVTIVDGLKRLYTEKLKPLEVTYRFNDFASPVLVSNILTVSETLTSSDFDAKPMVMLLGQYSTGKTTFIKHLLGCDYPGAHIGPEPTTDRFVVAMSGPDERTIPGNTMAVQADMPFNGLTSFGGAFLSKFECSQMPHPVLDQITLVDTPGVLSGEKQRMQRSYDFTGVISWFASKCDMILLLFDPHKLDISDEFKRVITSLRGNEDKIRVVLNKADQVDTQQPLFLKLMRVYGALMWSLGKVLNTPEVVRVYIGSFNDKPINEVAVGPIGKELFEKEQNDLLADLMDVPKKACDRKINEFVKRARSAKINAYIMSHLKKEMPAMMGKSKAQQRLMDNLEEEFGKVRKISHLV

SEQ ID NO: 45666 - protein, 469 aa, Arabidopsis thaliana
  peptide (1)..(469): Ceres Seq. ID no. 12604022
  misc_feature (120)..(464): Homolog of NCBI NO: 9956076 NR Description: similar to Homo sapiens Hpast (HPAST) mRNA with
  misc_feature (120)..(464): Homolog of NCBI NO: 7106303 NR Description: EH-domain containing 1 [Mus musculus]
  misc_feature (81)..(464): Homolog of NCBI NO: 17565132 NR Description: Receptor Mediated Endocytosis 1 RME-1 isoform 2,
  misc_feature (81)..(464): Homolog of NCBI NO: 7206819 NR Description: Receptor mediated endocytosis protein 1, isoform
  misc_feature (88)..(464): Homolog of NCBI NO: 17565130 NR Description: Receptor Mediated Endocytosis 1 isoform 1,
  misc_feature (37)..(468): Homolog of NCBI NO: 38345297 NR Description: OSJNBa0043A12.19 [Oryza sativa (japonica
  misc_feature (1)..(72): Homolog of NCBI NO: 9294546 NR Description: contains similarity to EH domain containing
  misc_feature (105)..(468): Homolog of NCBI NO: 9294546 NR Description: contains similarity to EH domain containing
  misc_feature (1)..(468): Homolog of NCBI NO: 18402561 NR Description: expressed protein
  misc_feature (1)..(469): Homolog of NCBI NO: 18412957 NR Description: score=11.7, E=0.66,N=1; protein id: At4g05520.1
MSKLSRQELKQVWAVADSKRQGFLGLSDSSHWHKKDMKLLQTFSKAQVSGKLHLKLFESRGSDSVELPVLEGLENVVSKQKVSKTNVDVEDNVVTKPQVTAKTPWFKSKSIIKPQVNVVTIVDGLKRLYTEKLKPLEVTYRFNDFASPVLVSNILTVSETLTSSDFDAKPMVMLLGQYSTGKTTFIKHLLGCDYPGAHIGPEPTTDRFVVAMSGPDERTIPGNTMAVQADMPFNGLTSFGGAFLSKFECSQMPHPVLDQITLVDTPGVLSGEKQRMQRSYDFTGVISWFASKCDMILLLFDPHKLDISDEFKRVITSLRGNEDKIRVVLNKADQVDTQQPLFLKLMRVYGALMWSLGKVLNTPEVVRVYIGSFNDKPINEVAVGPIGKELFEKEQNDLLADLMDVPKKACDRKINEFVKRARSAKINAYIMSHLKKEMPAMMGKSKAQQRLMDNLEEEFGKVRKISHLV

SEQ ID NO: 45667 - DNA, 1489 bp, Arabidopsis thaliana
  misc_feature (1)..(1489): Ceres Seq. ID no. 13593099
  misc_feature: MA Experiment ID: 20000179 Result: Down-regulated in Transcription
  misc_feature: MA Experiment 20000179 PARAMETER Experiment Name: At_Germinating_Seeds_P Parameter: Age (hr) Value: 6 vs. 0
  misc_feature: MA Experiment 20000179 PARAMETER Experiment Name: At_Germinating_Seeds_P Parameter: Tissue Value: Germinating Seeds
  misc_feature: MA Experiment ID: 20000180 Result: Down-regulated in Transcription
  misc_feature: MA Experiment 20000180 PARAMETER Experiment Name: At_Germinating_Seeds_P Parameter: Age (hr) Value: 24 vs. 0
  misc_feature: MA Experiment 20000180 PARAMETER Experiment Name: At_Germinating_Seeds_P Parameter: Tissue Value: Germinating Seeds
  misc_feature: MA Experiment ID: 20000235 Result: Up-regulated in Transcription
  misc_feature: MA Experiment 20000235 PARAMETER Experiment Name: At_Siliques_P Parameter: Age (day) Value: 21
  misc_feature: MA Experiment 20000235 PARAMETER Experiment Name: At_Siliques_P Parameter: Organism Value: A. thaliana
  misc_feature: MA Experiment 20000235 PARAMETER Experiment Name: At_Siliques_P Parameter: Plant Line Value: WS
  misc_feature: MA Experiment 20000235 PARAMETER Experiment Name: At_Siliques_P Parameter: Tissue Value: 5-10mm Siliques vs. Whole Plant
  misc_feature: MA Experiment ID: 20000264 Result: Up-regulated in Transcription
  misc_feature: MA Experiment 20000264 PARAMETER Experiment Name: At_Open_Flower_P Parameter: Age (day) Value: 21
  misc_feature: MA Experiment 20000264 PARAMETER Experiment Name: At_Open_Flower_P Parameter: Plant Line Value: WS
  misc_feature: MA Experiment 20000264 PARAMETER Experiment Name: At_Open_Flower_P Parameter: Tissue Value: Open Flower vs. Whole Plant
  misc_feature: MA Experiment ID: 20000265 Result: Up-regulated in Transcription
  misc_feature: MA Experiment 20000265 PARAMETER Experiment Name: At_Open_Flower_P Parameter: Age (day) Value: 21
  misc_feature: MA Experiment 20000265 PARAMETER Experiment Name: At_Open_Flower_P Parameter: Plant Line Value: WS
  misc_feature: MA Experiment 20000265 PARAMETER Experiment Name: At_Open_Flower_P Parameter: Tissue Value: Closed Flower vs. Whole Plant
  misc_feature: MA Experiment ID: 20000286 Result: Up-regulated in Transcription
  misc_feature: MA Experiment 20000286 PARAMETER Experiment Name: At_Open_Flower_P Parameter: Age (day) Value: 21
  misc_feature: MA Experiment 20000286 PARAMETER Experiment Name: At_Open_Flower_P Parameter: Plant Line Value: WS
  misc_feature: MA Experiment 20000286 PARAMETER Experiment Name: At_Open_Flower_P Parameter: Tissue Value: Half Open vs. Whole Plant
  misc_feature: MA Experiment ID: 20000439 Result: Down-regulated in Transcription
  misc_feature: MA Experiment 20000439 PARAMETER Experiment Name: At_Roots__P Parameter: Age (day) Value: 14 vs. 21
  misc_feature: MA Experiment 20000439 PARAMETER Experiment Name: At_Roots__P Parameter: Organism Value: A. thaliana
  misc_feature: MA Experiment 20000439 PARAMETER Experiment Name: At_Roots__P Parameter: Tissue Value: Roots vs. Whole Plant
  misc_feature: MA Experiment ID: 20000573 Result: Up-regulated in Transcription
  misc_feature: MA Experiment 20000573 PARAMETER Experiment Name: At_100uM_ABA_Mutants__P Parameter: Organism Value: A. thaliana
  misc_feature: MA Experiment 20000573 PARAMETER Experiment Name: At_100uM_ABA_Mutants__P Parameter: Plant Line Value: CS22 vs. Ler wt
  misc_feature: MA Experiment 20000573 PARAMETER Experiment Name: At_100uM_ABA_Mutants__P Parameter: Timepoint (hr) Value: N/A
  misc_feature: MA Experiment 20000573 PARAMETER Experiment Name: At_100uM_ABA_Mutants__P Parameter: Tissue Value: Whole Plant
  misc_feature: MA Experiment 20000573 PARAMETER Experiment Name: At_100uM_ABA_Mutants__P Parameter: Treatment Value: None
  misc_feature: MA Experiment ID: 20000794 Result: Up-regulated in Transcription
  misc_feature: MA Experiment 20000794 PARAMETER Experiment Name: At_Petals_P Parameter: Age (day) Value: 23-25 days
  misc_feature: MA Experiment 20000794 PARAMETER Experiment Name: At_Petals_P Parameter: Plant Line Value: WS
  misc_feature: MA Experiment 20000794 PARAMETER Experiment Name: At_Petals_P Parameter: Tissue Value: Petals vs. Whole plant
  misc_feature: MA Experiment ID: 20001248 Result: Down-regulated in Transcription
  misc_feature: MA Experiment 20001248 PARAMETER Experiment Name: At_Far-red-induction_P Parameter: Age (day) Value: 7
  misc_feature: MA Experiment 20001248 PARAMETER Experiment Name: At_Far-red-induction_P Parameter: Light Value: Far-red vs. White
  misc_feature: MA Experiment 20001248 PARAMETER Experiment Name: At_Far-red-induction_P Parameter: Organism Value: A. thaliana
  misc_feature: MA Experiment 20001248 PARAMETER Experiment Name: At_Far-red-induction_P Parameter: Plant Line Value: Columbia
  misc_feature: MA Experiment 20001248 PARAMETER Experiment Name: At_Far-red-induction_P Parameter: Timepoint (hr) Value: 4
  misc_feature: MA Experiment 20001248 PARAMETER Experiment Name: At_Far-red-induction_P Parameter: Tissue Value: Whole Plant
  misc_feature: MA Experiment ID: 20001457 Result: Down-regulated in Transcription
  misc_feature: MA Experiment 20001457 PARAMETER Experiment Name: At_50mM_NH4NO3_L-to-H_P Parameter: Age (day) Value: Undefined
  misc_feature: MA Experiment 20001457 PARAMETER Experiment Name: At_50mM_NH4NO3_L-to-H_P Parameter: Organism Value: Undefined
  misc_feature: MA Experiment 20001457 PARAMETER Experiment Name: At_50mM_NH4NO3_L-to-H_P Parameter: Plant Line Value: Undefined
  misc_feature: MA Experiment 20001457 PARAMETER Experiment Name: At_50mM_NH4NO3_L-to-H_P Parameter: Timepoint (hr) Value: 0.5
  misc_feature: MA Experiment 20001457 PARAMETER Experiment Name: At_50mM_NH4NO3_L-to-H_P Parameter: Tissue Value: Siliques
  misc_feature: MA Experiment 20001457 PARAMETER Experiment Name: At_50mM_NH4NO3_L-to-H_P Parameter: Treatment Value: 50mM NH4NO3 vs. 100mM Manitol
  misc_feature: MA Experiment ID: 20001759 Result: Down-regulated in Transcription
  misc_feature: MA Experiment 20001759 PARAMETER Experiment Name: At_50mM_NH4NO3_L-to-H_P Parameter: Timepoint (hr) Value: 1
  misc_feature: MA Experiment 20001759 PARAMETER Experiment Name: At_50mM_NH4NO3_L-to-H_P Parameter: Tissue Value: Siliques
  misc_feature: MA Experiment 20001759 PARAMETER Experiment Name: At_50mM_NH4NO3_L-to-H_P Parameter: Treatment Value: 50mM NH4NO3 vs 100mM Mannitol
  misc_feature: MA Experiment ID: 20001906 Result: Up-regulated in Transcription
  misc_feature: MA Experiment 20001906 PARAMETER Experiment Name: At_Drought_Reproduction_P Parameter: Age (day) Value: 35
  misc_feature: MA Experiment 20001906 PARAMETER Experiment Name: At_Drought_Reproduction_P Parameter: Organism Value: A. thaliana
  misc_feature: MA Experiment 20001906 PARAMETER Experiment Name: At_Drought_Reproduction_P Parameter: Plant Line Value: WS
  misc_feature: MA Experiment 20001906 PARAMETER Experiment Name: At_Drought_Reproduction_P Parameter: Timepoint (day) Value: 5
  misc_feature: MA Experiment 20001906 PARAMETER Experiment Name: At_Drought_Reproduction_P Parameter: Tissue Value: Siliques
  misc_feature: MA Experiment 20001906 PARAMETER Experiment Name: At_Drought_Reproduction_P Parameter: Treatment Value: Drought vs. No Drought
  misc_feature: MA Experiment ID: 20001907 Result: Up-regulated in Transcription
  misc_feature: MA Experiment 20001907 PARAMETER Experiment Name: At_Drought_Reproduction_P Parameter: Age (day) Value: 37
  misc_feature: MA Experiment 20001907 PARAMETER Experiment Name: At_Drought_Reproduction_P Parameter: Organism Value: A. thaliana
  misc_feature: MA Experiment 20001907 PARAMETER Experiment Name: At_Drought_Reproduction_P Parameter: Plant Line Value: WS
  misc_feature: MA Experiment 20001907 PARAMETER Experiment Name: At_Drought_Reproduction_P Parameter: Timepoint (day) Value: 7
  misc_feature: MA Experiment 20001907 PARAMETER Experiment Name: At_Drought_Reproduction_P Parameter: Tissue Value: Siliques
  misc_feature: MA Experiment 20001907 PARAMETER Experiment Name: At_Drought_Reproduction_P Parameter: Treatment Value: Drought vs. No Drought
  misc_feature: MA Experiment ID: 20001908 Result: Up-regulated in Transcription
  misc_feature: MA Experiment 20001908 PARAMETER Experiment Name: At_Drought_Reproduction_P Parameter: Age (day) Value: 40
  misc_feature: MA Experiment 20001908 PARAMETER Experiment Name: At_Drought_Reproduction_P Parameter: Organism Value: A. thaliana
  misc_feature: MA Experiment 20001908 PARAMETER Experiment Name: At_Drought_Reproduction_P Parameter: Plant Line Value: WS
  misc_feature: MA Experiment 20001908 PARAMETER Experiment Name: At_Drought_Reproduction_P Parameter: Timepoint (day) Value: 10
  misc_feature: MA Experiment 20001908 PARAMETER Experiment Name: At_Drought_Reproduction_P Parameter: Tissue Value: Siliques
  misc_feature: MA Experiment 20001908 PARAMETER Experiment Name: At_Drought_Reproduction_P Parameter: Treatment Value: Drought vs. No Drought
  misc_feature: MA Experiment ID: 20001911 Result: Up-regulated in Transcription
  misc_feature: MA Experiment 20001911 PARAMETER Experiment Name: At_Drought_Reproduction_P Parameter: Age (day) Value: 40
  misc_feature: MA Experiment 20001911 PARAMETER Experiment Name: At_Drought_Reproduction_P Parameter: Organism Value: A. thaliana
  misc_feature: MA Experiment 20001911 PARAMETER Experiment Name: At_Drought_Reproduction_P Parameter: Plant Line Value: WS
  misc_feature: MA Experiment 20001911 PARAMETER Experiment Name: At_Drought_Reproduction_P Parameter: Timepoint (day) Value: 10
  misc_feature: MA Experiment 20001911 PARAMETER Experiment Name: At_Drought_Reproduction_P Parameter: Tissue Value: Flowers
  misc_feature: MA Experiment 20001911 PARAMETER Experiment Name: At_Drought_Reproduction_P Parameter: Treatment Value: Drought vs. No Drought
ccccccccccscgaaaatgaatgttktgtttgtttttgtacggtggagagaagaacgaaaagatgatcaggtaaaaaatgaaacttggaaatcatgcaaagccacacctctcccttcaacacattcttacgtgtcctcttctcttcactccatatctcctttttattaccaaaaatatatatttcaatcccatttatatgtacgttctcttagacttatctctatatacccccttttaatttgtgtgctcttagcctttactctatagttttatatcatatcaatcgacatggcgaatgtggaccgtgatcggcgtgtgcatgtagaccgtactgacaaacgtgttcatcagccaaactacgaagatgatgtcggttttggtggctatggcggttatggtgctggttctgattataagagtcgcggcccctccactaaccaagtatttttgtggtctctttagtttttcttgtgttttcctatgatcacgctctccaaactatttgaagattttctgtaaattcattttaaacagaaagataaataaaatagtgaagaaccataggaatcgtacgttacgttaattatttccttttagttcttaagtcctaattaggattcctttaaaagatgcaacaatctaattgttcacaaaatgagtaaagtttgaaacagatttttatacaccacttgcatatgtttaacatggtgatgcatgcatggatcatatctagagatttatggttggatatatatttaacattttgatattagtttttaaaaaggtctgaataaacaacacttgttagataaactcgatataatcaatacatgcagatcttggcacttatagcaggagttcccattggtggcacactgctaaccctagctggactcactctagccggttcggtgatcggcttgctagtctccatacccctcttcctcctcttcagtccggtgatagtcccggcggctctcactattgggcttgctgtgacgggaatcttggcttctggtttgtttgggttgacgggtctgagctcggtctcgtgggtcctcaactacctccgtgggacgagtgatacagtgccagagcaattggactacgctaaacggcgtatggctgatgcggtaagctatgctggtatgaagggaaaagagatgggtcagtatgtgcaagataaggcgcatgaggctcgtgagactgagttcatgactgagacccatgagccgggtaaggccaggagaggctcataagctaatataaattgcgggagtcagttggaaaggcgataaatgtagttttacttttatgttccagtttctttcctcttttaagaatatctttgtctatatgtgtacgttcgttttgtcttgtccaaataaaaatccttgttagtgaaataagaaatgaaataaatatgttttcctttttgaaaaaaaaaaaaaaaaaaaaaaarctcgagggggggcccggtactcaatt

SEQ ID NO: 45668 - protein, 142 aa, Arabidopsis thaliana
  peptide (1)..(142): Ceres Seq. ID no. 15221199
  misc_feature (2)..(116): Pfam Name: Oleosin Pfam Description: Oleosin
  misc_feature (2)..(124): Homolog of NCBI NO: 266690 NR Description: Oleosin 18.2 kDa
  misc_feature (2)..(139): Homolog of NCBI NO: 82051 NR Description: lipid body-associated membrane protein - carrot
  misc_feature (1)..(126): Homolog of NCBI NO: 29243355 NR Description: oleosin [Corylus avellana]
  misc_feature (2)..(82): Homolog of NCBI NO: 99796 NR Description: major oleosin chain nap-I - rape (fragment)
  misc_feature (2)..(127): Homolog of NCBI NO: 15232141 NR Description: oleosin [Arabidopsis thaliana]
  misc_feature (2)..(134): Homolog of NCBI NO: 2129658 NR Description: oleosin, 21K - Arabidopsis thaliana
  misc_feature (2)..(134): Homolog of NCBI NO: 15242686 NR Description: oleosin [Arabidopsis thaliana]
  misc_feature (2)..(141): Homolog of NCBI NO: 1592686 NR Description: oleosin type4 [Arabidopsis thaliana]
  misc_feature (2)..(142): Homolog of NCBI NO: 21554017 NR Description: oleosin isoform [Arabidopsis thaliana]
  misc_feature (2)..(142): Homolog of NCBI NO: 15232227 NR Description: oleosin [Arabidopsis thaliana]
MQILALIAGVPIGGTLLTLAGLTLAGSVIGLLVSIPLFLLFSPVIVPAALTIGLAVTGILASGLFGLTGLSSVSWVLNYLRGTSDTVPEQLDYAKRRMADAVSYAGMKGKEMGQYVQDKAHEARETEFMTETHEPGKARRGS

SEQ ID NO: 45669 - protein, 88 aa, Arabidopsis thaliana
  peptide (1)..(88): Ceres Seq. ID no. 15221200
  misc_feature (4)..(4): Xaa is any aa, unknown or other
  misc_feature (9)..(9): Xaa is any aa, unknown or other
PPPXKMNVXFVFVRWREERKDDQVKNETWKSCKATPLPSTHSYVSSSLHSISPFYYQKYIFQSHLYVRSLRLISIYPLLICVLLAFTL

SEQ ID NO: 45670 - protein, 83 aa, Arabidopsis thaliana
  peptide (1)..(83): Ceres Seq. ID no. 15221201
  misc_feature (4)..(4): Xaa is any aa, unknown or other
MNVXFVFVRWREERKDDQVKNETWKSCKATPLPSTHSYVSSSLHSISPFYYQKYIFQSHLYVRSLRLISIYPLLICVLLAFTL

SEQ ID NO: 45671 - DNA, 1927 bp, Arabidopsis thaliana
  misc_feature (1)..(1927): Ceres Seq. ID no. 12561230
  misc_feature: MA Experiment ID: 20000227 Result: Down-regulated in Transcription
  misc_feature: MA Experiment 20000227 PARAMETER Experiment Name: At_Root-Tips-vs-Tops_P Parameter: Tissue Value: Root Tips vs. Root Tops
  misc_feature: MA Experiment ID: 20001451 Result: Down-regulated in Transcription
  misc_feature: MA Experiment 20001451 PARAMETER Experiment Name: At_Far-red-induction_P Parameter: Age (day) Value: 7
  misc_feature: MA Experiment 20001451 PARAMETER Experiment Name: At_Far-red-induction_P Parameter: Light Value: Far-red vs. White
  misc_feature: MA Experiment 20001451 PARAMETER Experiment Name: At_Far-red-induction_P Parameter: Organism Value: A. thaliana
  misc_feature: MA Experiment 20001451 PARAMETER Experiment Name: At_Far-red-induction_P Parameter: Plant Line Value: Columbia
  misc_feature: MA Experiment 20001451 PARAMETER Experiment Name: At_Far-red-induction_P Parameter: Timepoint (hr) Value: 24
  misc_feature: MA Experiment 20001451 PARAMETER Experiment Name: At_Far-red-induction_P Parameter: Tissue Value: Whole Plant
  misc_feature: MA Experiment ID: 20001560 Result: Down-regulated in Transcription
  misc_feature: MA Experiment 20001560 PARAMETER Experiment Name: At_Drought_Soil_Dry_P Parameter: Age (day) Value: 28
  misc_feature: MA Experiment 20001560 PARAMETER Experiment Name: At_Drought_Soil_Dry_P Parameter: Organism Value: A. thaliana
  misc_feature: MA Experiment 20001560 PARAMETER Experiment Name: At_Drought_Soil_Dry_P Parameter: Plant Line Value: WS
  misc_feature: MA Experiment 20001560 PARAMETER Experiment Name: At_Drought_Soil_Dry_P Parameter: Post Timepoint (hr) Value: None
  misc_feature: MA Experiment 20001560 PARAMETER Experiment Name: At_Drought_Soil_Dry_P Parameter: Post-Treatment Value: None
  misc_feature: MA Experiment 20001560 PARAMETER Experiment Name: At_Drought_Soil_Dry_P Parameter: Timepoint (day) Value: 14
  misc_feature: MA Experiment 20001560 PARAMETER Experiment Name: At_Drought_Soil_Dry_P Parameter: Treatment Value: Drought vs. No Drought
tcgatcaatcttcaactctcaaattgaagtttccatgggaggccacgaaggtttcagcaaccaacgcctctcctccgccacatggttctctcatttccgtgcttcagctctccgatctaaatcactgccccctccgtcctcgcagactgccgttcgctccacctctggcgactctctggttcgtcgcctcggccttttcgacctcatactgttgggcgtcggcgcttccatcggcgccggtgtcttcgtcgtcaccggaaccgtcgctcgcgatgctggacctggagtcacaatcagcttcttgctagctggagcatcgtgtgtgttgaacgctctctgttatgctgaactttcatctcgtttccctgctgttgttggtggagcttacatgtactcttactcagctttcaatgagatcacagcttttcttgttttcgttcaactcatgcttgactatcatattggcgccgctagtatctcccgtagcttggccagctatgctgttgctcttcttgagctttttccagccctcaagggctctattcctctctggatgggaagcggcaaagagctcttgggagggcttctctctttgaatattttggctcccattttacttgctctcttgacccttgttctatgccaaggtgtgcgagaatcttccgctgtcaactccgttatgactgctactaaggtcgtgatcgttctcgttgtgatttgtgccggtgcttttgaaattgatgtagcaaattggtctccttttgcgcctaatggttttaaagcagttctcactggagctactgttgtcttcttttcatatgttggatttgatgcagttgctaattctgctgaagaatcgaagaaccctcagcgcgatttgccaatcggaattatggggagccttctggtttgtatctcgctgtatattggcgtatgtttggtgctcaccgggatggtcccttttagcctcctcagcgaagatgctcctttagctgaagccttttcatcaaagggtatgaagttcgtctcaatcttaatcagtattggtgctgttgctggactcacaactactctgcttgttggtctttatgttcagtccaggttatatctgggacttggaagggatggtctattgccttcaatcttttccagaatacacccaactcttcatacacctcttcattctcaaatctggtgcggcattgtagctggcgttttagctggcatatttaatgtacatagtctttcccatattctgtctgttggtacattgactgggtattcagttgttgcggcttgtgttgtggcattgagactgaatgataaaaaagatagagagtcgtccaatagatggacatcaagttggcaggaaggcgtcatttgccttgttataattgcatgcagtggttttggtgctggcgtattttaccgtttcagtgcttcagttatatttattctcctctcagttggtgtggcagttgttgcttcagcagttcttcattatcgccaagcttatgctctgcctctaggttctgggtttagctgtcctggtgtacccattgtgccatccgtttgcattttcttcaacatcttcttatttgctcagttgcattatgaagcatggataagatttgttgttgtcagtgtgcttgcaactgccgtttatgccttgtatgggcagtaccacgcagatccgagcatgttggattatcagagggcacctgaaactgaaagcgacgcttagtaatgctacattatagttgtgttacttaaagccatttgtagagttgatagcaagtttctgcgtttcgtgagagacatactgtatgtcacatacatattcaggtcgagtttaaggattggatgggataaggcagttaaacattattgttgtaaagaagttaataaaagtatgcttgtgcatttc

SEQ ID NO: 45672 - protein, 580 aa, Arabidopsis thaliana
  peptide (1)..(580): Ceres Seq. ID no. 12561231
  misc_feature (51)..(438): Homolog of NCBI NO: 22330822 NR Description: putative cationic amino acid transporter
  misc_feature (484)..(563): Homolog of NCBI NO: 16078011 NR Description: similar to amino acid transporter [Bacillus
  misc_feature (33)..(438): Homolog of NCBI NO: 16078011 NR Description: similar to amino acid transporter [Bacillus
  misc_feature (484)..(563): Homolog of NCBI NO: 29828785 NR Description: putative cationic amino acid transporter
  misc_feature (251)..(438): Homolog of NCBI NO: 29828785 NR Description: putative cationic amino acid transporter
  misc_feature (58)..(268): Homolog of NCBI NO: 29828785 NR Description: putative cationic amino acid transporter
  misc_feature (364)..(570): Homolog of NCBI NO: 14140148 NR Description: putative protein [Oryza sativa]
  misc_feature (16)..(417): Homolog of NCBI NO: 14140148 NR Description: putative protein [Oryza sativa]
  misc_feature (12)..(580): Homolog of NCBI NO: 18390592 NR Description: expressed protein
  misc_feature (88)..(580): Homolog of NCBI NO: 25406885 NR Description: hypothetical protein [imported] - Arabidopsis
RSIFNSQIEVSMGGHEGFSNQRLSSATWFSHFRASALRSKSLPPPSSQTAVRSTSGDSLVRRLGLFDLILLGVGASIGAGVFVVTGTVARDAGPGVTISFLLAGASCVLNALCYAELSSRFPAVVGGAYMYSYSAFNEITAFLVFVQLMLDYHIGAASISRSLASYAVALLELFPALKGSIPLWMGSGKELLGGLLSLNILAPILLALLTLVLCQGVRESSAVNSVMTATKVVIVLVVICAGAFEIDVANWSPFAPNGFKAVLTGATVVFFSYVGFDAVANSAEESKNPQRDLPIGIMGSLLVCISLYIGVCLVLTGMVPFSLLSEDAPLAEAFSSKGMKFVSILISIGAVAGLTTTLLVGLYVQSRLYLGLGRDGLLPSIFSRIHPTLHTPLHSQIWCGIVAGVLAGIFNVHSLSHILSVGTLTGYSVVAACVVALRLNDKKDRESSNRWTSSWQEGVICLVIIACSGFGAGVFYRFSASVIFILLSVGVAVVASAVLHYRQAYALPLGSGFSCPGVPIVPSVCIFFNIFLFAQLHYEAWIRFVVVSVLATAVYALYGQYHADPSMLDYQRAPETESDA

SEQ ID NO: 45673 - protein, 569 aa, Arabidopsis thaliana
  peptide (1)..(569): Ceres Seq. ID no. 12561232
  misc_feature (40)..(427): Homolog of NCBI NO: 22330822 NR Description: putative cationic amino acid transporter
  misc_feature (473)..(552): Homolog of NCBI NO: 16078011 NR Description: similar to amino acid transporter [Bacillus
  misc_feature (22)..(427): Homolog of NCBI NO: 16078011 NR Description: similar to amino acid transporter [Bacillus
  misc_feature (473)..(552): Homolog of NCBI NO: 29828785 NR Description: putative cationic amino acid transporter
  misc_feature (240)..(427): Homolog of NCBI NO: 29828785 NR Description: putative cationic amino acid transporter
  misc_feature (47)..(257): Homolog of NCBI NO: 29828785 NR Description: putative cationic amino acid transporter
  misc_feature (353)..(559): Homolog of NCBI NO: 14140148 NR Description: putative protein [Oryza sativa]
  misc_feature (5)..(406): Homolog of NCBI NO: 14140148 NR Description: putative protein [Oryza sativa]
  misc_feature (1)..(569): Homolog of NCBI NO: 18390592 NR Description: expressed protein
  misc_feature (77)..(569): Homolog of NCBI NO: 25406885 NR Description: hypothetical protein [imported] - Arabidopsis
MGGHEGFSNQRLSSATWFSHFRASALRSKSLPPPSSQTAVRSTSGDSLVRRLGLFDLILLGVGASIGAGVFVVTGTVARDAGPGVTISFLLAGASCVLNALCYAELSSRFPAVVGGAYMYSYSAFNEITAFLVFVQLMLDYHIGAASISRSLASYAVALLELFPALKGSIPLWMGSGKELLGGLLSLNILAPILLALLTLVLCQGVRESSAVNSVMTATKVVIVLVVICAGAFEIDVANWSPFAPNGFKAVLTGATVVFFSYVGFDAVANSAEESKNPQRDLPIGIMGSLLVCISLYIGVCLVLTGMVPFSLLSEDAPLAEAFSSKGMKFVSILISIGAVAGLTTTLLVGLYVQSRLYLGLGRDGLLPSIFSRIHPTLHTPLHSQIWCGIVAGVLAGIFNVHSLSHILSVGTLTGYSVVAACVVALRLNDKKDRESSNRWTSSWQEGVICLVIIACSGFGAGVFYRFSASVIFILLSVGVAVVASAVLHYRQAYALPLGSGFSCPGVPIVPSVCIFFNIFLFAQLHYEAWIRFVVVSVLATAVYALYGQYHADPSMLDYQRAPETESDA

SEQ ID NO: 45674 - protein, 451 aa, Arabidopsis thaliana
  peptide (1)..(451): Ceres Seq. ID no. 12561233
  misc_feature (1)..(309): Homolog of NCBI NO: 22330822 NR Description: putative cationic amino acid transporter
  misc_feature (355)..(434): Homolog of NCBI NO: 16078011 NR Description: similar to amino acid transporter [Bacillus
  misc_feature (1)..(309): Homolog of NCBI NO: 16078011 NR Description: similar to amino acid transporter [Bacillus
  misc_feature (355)..(434): Homolog of NCBI NO: 29828785 NR Description: putative cationic amino acid transporter
  misc_feature (122)..(309): Homolog of NCBI NO: 29828785 NR Description: putative cationic amino acid transporter
  misc_feature (1)..(139): Homolog of NCBI NO: 29828785 NR Description: putative cationic amino acid transporter
  misc_feature (235)..(441): Homolog of NCBI NO: 14140148 NR Description: putative protein [Oryza sativa]
  misc_feature (1)..(288): Homolog of NCBI NO: 14140148 NR Description: putative protein [Oryza sativa]
  misc_feature (1)..(451): Homolog of NCBI NO: 18390592 NR Description: expressed protein
  misc_feature (1)..(451): Homolog of NCBI NO: 25406885 NR Description: hypothetical protein [imported] - Arabidopsis
MYSYSAFNEITAFLVFVQLMLDYHIGAASISRSLASYAVALLELFPALKGSIPLWMGSGKELLGGLLSLNILAPILLALLTLVLCQGVRESSAVNSVMTATKVVIVLVVICAGAFEIDVANWSPFAPNGFKAVLTGATVVFFSYVGFDAVANSAEESKNPQRDLPIGIMGSLLVCISLYIGVCLVLTGMVPFSLLSEDAPLAEAFSSKGMKFVSILISIGAVAGLTTTLLVGLYVQSRLYLGLGRDGLLPSIFSRIHPTLHTPLHSQIWCGIVAGVLAGIFNVHSLSHILSVGTLTGYSVVAACVVALRLNDKKDRESSNRWTSSWQEGVICLVIIACSGFGAGVFYRFSASVIFILLSVGVAVVASAVLHYRQAYALPLGSGFSCPGVPIVPSVCIFFNIFLFAQLHYEAWIRFVVVSVLATAVYALYGQYHADPSMLDYQRAPETESDA

SEQ ID NO: 45675 - DNA, 1288 bp, Arabidopsis thaliana
  misc_feature (1)..(1288): Ceres Seq. ID no. 13591723
  misc_feature: MA Experiment ID: 20000307 Result: Up-regulated in Transcription
  misc_feature: MA Experiment 20000307 PARAMETER Experiment Name: At_Germinating_Seeds_Sub_P Parameter: Age (hr) Value: 24 vs. 0
  misc_feature: MA Experiment 20000307 PARAMETER Experiment Name: At_Germinating_Seeds_Sub_P Parameter: Organism Value: A. thaliana
  misc_feature: MA Experiment 20000307 PARAMETER Experiment Name: At_Germinating_Seeds_Sub_P Parameter: Plant Line Value: WS
  misc_feature: MA Experiment 20000307 PARAMETER Experiment Name: At_Germinating_Seeds_Sub_P Parameter: Tissue Value: Germinating Seeds
  misc_feature: MA Experiment ID: 20000314 Result: Down-regulated in Transcription
  misc_feature: MA Experiment 20000314 PARAMETER Experiment Name: At_14day_Shoots-Roots_Sub_P Parameter: Age (day) Value: 14
  misc_feature: MA Experiment 20000314 PARAMETER Experiment Name: At_14day_Shoots-Roots_Sub_P Parameter: Organism Value: A. thaliana
  misc_feature: MA Experiment 20000314 PARAMETER Experiment Name: At_14day_Shoots-Roots_Sub_P Parameter: Plant Line Value: WS
  misc_feature: MA Experiment 20000314 PARAMETER Experiment Name: At_14day_Shoots-Roots_Sub_P Parameter: Tissue Value: Roots vs. Whole Plant
  misc_feature: MA Experiment ID: 20000315 Result: Down-regulated in Transcription
  misc_feature: MA Experiment 20000315 PARAMETER Experiment Name: At_14day_Shoots-Roots_Sub_P Parameter: Age (day) Value: 14
  misc_feature: MA Experiment 20000315 PARAMETER Experiment Name: At_14day_Shoots-Roots_Sub_P Parameter: Organism Value: A. thaliana
  misc_feature: MA Experiment 20000315 PARAMETER Experiment Name: At_14day_Shoots-Roots_Sub_P Parameter: Plant Line Value: WS
  misc_feature: MA Experiment 20000315 PARAMETER Experiment Name: At_14day_Shoots-Roots_Sub_P Parameter: Tissue Value: Shoots vs. Whole Plant
  misc_feature: MA Experiment ID: 20000328 Result: Up-regulated in Transcription
  misc_feature: MA Experiment 20000328 PARAMETER Experiment Name: At_42deg_Heat_Sub_P Parameter: Age (day) Value: 14
  misc_feature: MA Experiment 20000328 PARAMETER Experiment Name: At_42deg_Heat_Sub_P Parameter: Organism Value: A. thaliana
  misc_feature: MA Experiment 20000328 PARAMETER Experiment Name: At_42deg_Heat_Sub_P Parameter: Plant Line Value: WS
  misc_feature: MA Experiment 20000328 PARAMETER Experiment Name: At_42deg_Heat_Sub_P Parameter: Temperature (deg C) Value: 42 vs. 22
  misc_feature: MA Experiment 20000328 PARAMETER Experiment Name: At_42deg_Heat_Sub_P Parameter: Timepoint (hr) Value: 6
  misc_feature: MA Experiment 20000328 PARAMETER Experiment Name: At_42deg_Heat_Sub_P Parameter: Tissue Value: Aerial
gacagagggtattattgtcagattctccataagcctcttctctctctctcagagtgtggnggtttcatactatttatgtaaaaggaagcaacgggtgagaagaattaaaaagccgcaattttgggatcataagagttctcttcttcatctgtgattcattccgttgttacccgccaggcaccagccaccgtactttttctctctccggcaaaatccgagtctaaaaatgacgagtaaaagcaaaatcctgttcatcggaggaacgggttatatcgggaaatatatagtggaagcgagcgcaagatctggccacccaaccttagttctcgttcgaaattcgacgctcacaagcccttcacgatcctccaccatcgagaatttcaagaacctcggcgttcagtttctcctcggagaccttgacgaccatacgagtctcgtgaattcgataaagcaagcggatgtggtcatctctactgttgggcactccctcttgggacatcaatacaagatcatctccgccattaaagaagccggtaatgttaagagattctttccctccgagtttggaaatgacgtagaccgtgttttcactgtcgaaccggccaagtcagcctatgctacaaaggccaaaatccggcgaacaattgaggccgaaggaatcccatacacttatgtctcatgcaacttcttcgctggctacttcctcccaactctagctcagcctggtgctacttctgctccacgggataaggtcattgttttaggtgatgggaaccccaaagctgtgttcaacaaggaagaagacatcggaacttacacaatcaatgccgtagatgatccaagaactttgaacaagatcttatatattaggccaccaatgaacacttactcattcaatgatcttgtctcgctttgggagaacaagattggcaaaacacttgaaagaatctacgttccagaagaacaactcctcaaacagatcatagaatcatcacccccactcaacgtgatgctatccctttgtcactgcgttttcgtgaaaggaggacacacaagctttgaaatcgaaccttctttcggggtagaagcttctgagctttaccctgatgtcaaatacactactgttgatgaaatcctcaaccaatatgtctaaagctgagtgcttaacgagaatgactctccacaatttgtattttgggttttaaataagtggctattaacctgtctgtttctccggctaatcaaaccgaagtggtggtttattttgaatgtaaggctttagatccgg

SEQ ID NO: 45676 - protein, 308 aa, Arabidopsis thaliana
  peptide (1)..(308): Ceres Seq. ID no. 13591724
  misc_feature (2)..(308): Pfam Name: Isoflavone reductase Pfam Description: Isoflavone reductase
  misc_feature (1)..(308): Homolog of NCBI NO: 3243234 NR Description: isoflavone reductase related protein [Pyrus
  misc_feature (1)..(308): Homolog of NCBI NO: 19310585 NR Description: putative NAD(P)H oxidoreductase, isoflavone
  misc_feature (1)..(308): Homolog of NCBI NO: 15234993 NR Description: isoflavone reductase, putative [Arabidopsis
MTSKSKILFIGGTGYIGKYIVEASARSGHPTLVLVRNSTLTSPSRSSTIENFKNLGVQFLLGDLDDHTSLVNSIKQADVVISTVGHSLLGHQYKIISAIKEAGNVKRFFPSEFGNDVDRVFTVEPAKSAYATKAKIRRTIEAEGIPYTYVSCNFFAGYFLPTLAQPGATSAPRDKVIVLGDGNPKAVFNKEEDIGTYTINAVDDPRTLNKILYIRPPMNTYSFNDLVSLWENKIGKTLERIYVPEEQLLKQIIESSPPLNVMLSLCHCVFVKGGHTSFEIEPSFGVEASELYPDVKYTTVDEILNQYV

SEQ ID NO: 45677 - DNA, 1528 bp, Arabidopsis thaliana
  misc_feature (1)..(1528): Ceres Seq. ID no. 13646519
  misc_feature: MA Experiment ID: 20000185 Result: Up-regulated in Transcription
  misc_feature: MA Experiment 20000185 PARAMETER Experiment Name: At_Roots__P Parameter: Age (day) Value: 7 vs. 21
  misc_feature: MA Experiment 20000185 PARAMETER Experiment Name: At_Roots__P Parameter: Organism Value: A. thaliana
  misc_feature: MA Experiment 20000185 PARAMETER Experiment Name: At_Roots__P Parameter: Tissue Value: Roots vs. Whole Plant
  misc_feature: MA Experiment ID: 20000234 Result: Down-regulated in Transcription
  misc_feature: MA Experiment 20000234 PARAMETER Experiment Name: At_Siliques_P Parameter: Age (day) Value: 21
  misc_feature: MA Experiment 20000234 PARAMETER Experiment Name: At_Siliques_P Parameter: Organism Value: A. thaliana
  misc_feature: MA Experiment 20000234 PARAMETER Experiment Name: At_Siliques_P Parameter: Plant Line Value: WS
  misc_feature: MA Experiment 20000234 PARAMETER Experiment Name: At_Siliques_P Parameter: Tissue Value: Less Than 5mm Siliques vs. Whole Plant
  misc_feature: MA Experiment ID: 20000264 Result: Down-regulated in Transcription
  misc_feature: MA Experiment 20000264 PARAMETER Experiment Name: At_Open_Flower_P Parameter: Age (day) Value: 21
  misc_feature: MA Experiment 20000264 PARAMETER Experiment Name: At_Open_Flower_P Parameter: Plant Line Value: WS
  misc_feature: MA Experiment 20000264 PARAMETER Experiment Name: At_Open_Flower_P Parameter: Tissue Value: Open Flower vs. Whole Plant
  misc_feature: MA Experiment ID: 20000286 Result: Down-regulated in Transcription
  misc_feature: MA Experiment 20000286 PARAMETER Experiment Name: At_Open_Flower_P Parameter: Age (day) Value: 21
  misc_feature: MA Experiment 20000286 PARAMETER Experiment Name: At_Open_Flower_P Parameter: Plant Line Value: WS
  misc_feature: MA Experiment 20000286 PARAMETER Experiment Name: At_Open_Flower_P Parameter: Tissue Value: Half Open vs. Whole Plant
  misc_feature: MA Experiment ID: 20000438 Result: Up-regulated in Transcription
  misc_feature: MA Experiment 20000438 PARAMETER Experiment Name: At_Shoots__P Parameter: Age (day) Value: 14
  misc_feature: MA Experiment 20000438 PARAMETER Experiment Name: At_Shoots__P Parameter: Tissue Value: Shoots vs. Whole Plant
  misc_feature: MA Experiment ID: 20000439 Result: Up-regulated in Transcription
  misc_feature: MA Experiment 20000439 PARAMETER Experiment Name: At_Roots__P Parameter: Age (day) Value: 14 vs. 21
  misc_feature: MA Experiment 20000439 PARAMETER Experiment Name: At_Roots__P Parameter: Organism Value: A. thaliana
  misc_feature: MA Experiment 20000439 PARAMETER Experiment Name: At_Roots__P Parameter: Tissue Value: Roots vs. Whole Plant
  misc_feature: MA Experiment ID: 20000452 Result: Up-regulated in Transcription
  misc_feature: MA Experiment 20000452 PARAMETER Experiment Name: At_CS6879_Shoots-Roots_P Parameter: Age (day) Value: 14
  misc_feature: MA Experiment 20000452 PARAMETER Experiment Name: At_CS6879_Shoots-Roots_P Parameter: Organism Value: A. thaliana
  misc_feature: MA Experiment 20000452 PARAMETER Experiment Name: At_CS6879_Shoots-Roots_P Parameter: Plant Line Value: CS6879 vs. WS
  misc_feature: MA Experiment 20000452 PARAMETER Experiment Name: At_CS6879_Shoots-Roots_P Parameter: Tissue Value: Shoots
  misc_feature: MA Experiment ID: 20000453 Result: Down-regulated in Transcription
  misc_feature: MA Experiment 20000453 PARAMETER Experiment Name: At_100uM_ABA_P Parameter: Age (day) Value: 15
  misc_feature: MA Experiment 20000453 PARAMETER Experiment Name: At_100uM_ABA_P Parameter: Organism Value: A. thaliana
  misc_feature: MA Experiment 20000453 PARAMETER Experiment Name: At_100uM_ABA_P Parameter: Plant Line Value: WS
  misc_feature: MA Experiment 20000453 PARAMETER Experiment Name: At_100uM_ABA_P Parameter: Timepoint (hr) Value: 24
  misc_feature: MA Experiment 20000453 PARAMETER Experiment Name: At_100uM_ABA_P Parameter: Tissue Value: Aerial
  misc_feature: MA Experiment 20000453 PARAMETER Experiment Name: At_100uM_ABA_P Parameter: Treatment Value: 100uM ABA vs. No Treatment
  misc_feature: MA Experiment ID: 20000495 Result: Down-regulated in Transcription
  misc_feature: MA Experiment 20000495 PARAMETER Experiment Name: At_Guard_Cells_P Parameter: Harvest Date Value: 8/2/2002
  misc_feature: MA Experiment 20000495 PARAMETER Experiment Name: At_Guard_Cells_P Parameter: Organism Value: A. thaliana
  misc_feature: MA Experiment 20000495 PARAMETER Experiment Name: At_Guard_Cells_P Parameter: Tissue Value: Guard Cells vs. Leaves
  misc_feature: MA Experiment ID: 20000575 Result: Down-regulated in Transcription
  misc_feature: MA Experiment 20000575 PARAMETER Experiment Name: At_100uM_ABA_Mutants__P Parameter: Organism Value: A. thaliana
  misc_feature: MA Experiment 20000575 PARAMETER Experiment Name: At_100uM_ABA_Mutants__P Parameter: Plant Line Value: CS22
  misc_feature: MA Experiment 20000575 PARAMETER Experiment Name: At_100uM_ABA_Mutants__P Parameter: Timepoint (hr) Value: 6
  misc_feature: MA Experiment 20000575 PARAMETER Experiment Name: At_100uM_ABA_Mutants__P Parameter: Tissue Value: Whole Plant
  misc_feature: MA Experiment 20000575 PARAMETER Experiment Name: At_100uM_ABA_Mutants__P Parameter: Treatment Value: 1uM ABA vs. No Treatment
  misc_feature: MA Experiment ID: 20000794 Result: Down-regulated in Transcription
  misc_feature: MA Experiment 20000794 PARAMETER Experiment Name: At_Petals_P Parameter: Age (day) Value: 23-25 days
  misc_feature: MA Experiment 20000794 PARAMETER Experiment Name: At_Petals_P Parameter: Plant Line Value: WS
  misc_feature: MA Experiment 20000794 PARAMETER Experiment Name: At_Petals_P Parameter: Tissue Value: Petals vs. Whole plant
  misc_feature: MA Experiment ID: 20001248 Result: Down-regulated in Transcription
  misc_feature: MA Experiment 20001248 PARAMETER Experiment Name: At_Far-red-induction_P Parameter: Age (day) Value: 7
  misc_feature: MA Experiment 20001248 PARAMETER Experiment Name: At_Far-red-induction_P Parameter: Light Value: Far-red vs. White
  misc_feature: MA Experiment 20001248 PARAMETER Experiment Name: At_Far-red-induction_P Parameter: Organism Value: A. thaliana
  misc_feature: MA Experiment 20001248 PARAMETER Experiment Name: At_Far-red-induction_P Parameter: Plant Line Value: Columbia
  misc_feature: MA Experiment 20001248 PARAMETER Experiment Name: At_Far-red-induction_P Parameter: Timepoint (hr) Value: 4
  misc_feature: MA Experiment 20001248 PARAMETER Experiment Name: At_Far-red-induction_P Parameter: Tissue Value: Whole Plant
ggaggtttcccttcagaaatcagaaatggctcacatttggcttctaccacttatctttctcgtctgtattcttctggccgttttcaaccacaagaaacatccgaaatatcgacagtttccatgtcctcctggcttcccgatcataggaaacttacatcagatcggagaattaccgcatcagactctatggaaactctcaaagaagtatggtccggtgatgcatttgatgcttggaagagtcccaacagtcgtagtttcttcttcggatacagcaagacaagttttgagagttcatgacctccattgttgtactcgtccaagcttgtcagggccaagagagctttcgtacaactatctggacattgctttctctccttatgatgattattggaaagaagttaggaagctctgtgttcaagaacttttcagtactaaacaagttcactcgattcaacctattaaggacgaggaggtcaagaaaatgatcgattcaattgcggaatcagcctctcagaagaatccggttaacttgaacaataagtgtcttgaattaacagtaagtgtagtatgcaggacagcttttggggttagttttgagggaactgtgctcaacagtgacagattcaacaaaatagtccgcgaggcgctcgagatgttgggaagcttttctgccgcggattttattccgtatgtcggatggatcatcgatgtgttgacgggtttgcaaggaaggagagaaagaagcaagagagatctcaatgcattctttgaacaaatgtttgatttgcataaagagggaaagaaagaagggaatgaagattttgtggacttgctcttaaggttggagaaagaagaggcagttcttggaaatgataaacttacaagaaaccatatcaaagcaatcttgctggatgttctacttgcgggaatcgatacttctgcaataacaatgacatgggcaatgacagaacttgcaagaaatccacgagtgatgaagaaagttcaatctgaaataagaactcaaatggggaacagatcaatgataagtttcgaagacatggatcagctagagtatctgaaaatggtgatcaaagaaacatggaggctacatcctacaacacctcttttgcttccaagagaagcaatgtctgaatttgatatcaacggctacactattcctgtcaagacacggcttcatgtgaatgtttgggctattggtcgtgatcctgatacttggaaagaccctgaagtgtttctcccggagaggtttatggataataacattgatgcaaaaggacaacattttgagctgttaccgtttgggggcggtcggagaatctgtcctgcaatatacatggggacaacaatggttgagtttggtctagctaatctcttgtatcattttgactggaagttaccagaaggcgtggaggttaaagatatcgacgtggaagaagctcctggactcactgtaaacaagaaaaacgagctcctacttgtgccagagatgagaagatcgtgtggttga

SEQ ID NO: 45678 - protein, 508 aa, Arabidopsis thaliana
  peptide (1)..(508): Ceres Seq. ID no. 13646520
  misc_feature (9)..(501): Homolog of NCBI NO: 13878390 NR Description: Cytochrome P450 71B10
  misc_feature (9)..(501): Homolog of NCBI NO: 7430672 NR Description: probable cytochrome P450 At2g02580
  misc_feature (9)..(501): Homolog of NCBI NO: 18175891 NR Description: putative cytochrome P450 protein [Arabidopsis
  misc_feature (9)..(501): Homolog of NCBI NO: 15227003 NR Description: cytochrome P450 family [Arabidopsis thaliana]
  misc_feature (9)..(501): Homolog of NCBI NO: 15231541 NR Description: cytochrome P450 71B36 [Arabidopsis thaliana]
  misc_feature (9)..(501): Homolog of NCBI NO: 9294291 NR Description: cytochrome p450 [Arabidopsis thaliana]
  misc_feature (9)..(501): Homolog of NCBI NO: 15231542 NR Description: cytochrome p450 family [Arabidopsis thaliana]
  misc_feature (9)..(501): Homolog of NCBI NO: 15231537 NR Description: cytochrome p450 71B26 [Arabidopsis thaliana]
  misc_feature (9)..(501): Homolog of NCBI NO: 15231538 NR Description: cytochrome P450 family [Arabidopsis thaliana]
  misc_feature (9)..(508): Homolog of NCBI NO: 15231539 NR Description: cytochrome P450 family [Arabidopsis thaliana]
EVSLQKSEMAHIWLLPLIFLVCILLAVFNHKKHPKYRQFPCPPGFPIIGNLHQIGELPHQTLWKLSKKYGPVMHLMLGRVPTVVVSSSDTARQVLRVHDLHCCTRPSLSGPRELSYNYLDIAFSPYDDYWKEVRKLCVQELFSTKQVHSIQPIKDEEVKKMIDSIAESASQKNPVNLNNKCLELTVSVVCRTAFGVSFEGTVLNSDRFNKIVREALEMLGSFSAADFIPYVGWIIDVLTGLQGRRERSKRDLNAFFEQMFDLHKEGKKEGNEDFVDLLLRLEKEEAVLGNDKLTRNHIKAILLDVLLAGIDTSAITMTWAMTELARNPRVMKKVQSEIRTQMGNRSMISFEDMDQLEYLKMVIKETWRLHPTTPLLLPREAMSEFDINGYTIPVKTRLHVNVWAIGRDPDTWKDPEVFLPERFMDNNIDAKGQHFELLPFGGGRRICPAIYMGTTMVEFGLANLLYHFDWKLPEGVEVKDIDVEEAPGLTVNKKNELLLVPEMRRSCG

SEQ ID NO: 45679 - protein, 500 aa, Arabidopsis thaliana
  peptide (1)..(500): Ceres Seq. ID no. 13646521
  misc_feature (1)..(493): Homolog of NCBI NO: 13878390 NR Description: Cytochrome P450 71B10
  misc_feature (1)..(493): Homolog of NCBI NO: 7430672 NR Description: probable cytochrome P450 At2g02580
  misc_feature (1)..(493): Homolog of NCBI NO: 18175891 NR Description: putative cytochrome P450 protein [Arabidopsis
  misc_feature (1)..(493): Homolog of NCBI NO: 15227003 NR Description: cytochrome P450 family [Arabidopsis thaliana]
  misc_feature (1)..(493): Homolog of NCBI NO: 15231541 NR Description: cytochrome P450 71B36 [Arabidopsis thaliana]
  misc_feature (1)..(493): Homolog of NCBI NO: 9294291 NR Description: cytochrome p450 [Arabidopsis thaliana]
  misc_feature (1)..(493): Homolog of NCBI NO: 15231542 NR Description: cytochrome p450 family [Arabidopsis thaliana]
  misc_feature (1)..(493): Homolog of NCBI NO: 15231537 NR Description: cytochrome p450 71B26 [Arabidopsis thaliana]
  misc_feature (1)..(493): Homolog of NCBI NO: 15231538 NR Description: cytochrome P450 family [Arabidopsis thaliana]
  misc_feature (1)..(500): Homolog of NCBI NO: 15231539 NR Description: cytochrome P450 family [Arabidopsis thaliana]
MAHIWLLPLIFLVCILLAVFNHKKHPKYRQFPCPPGFPIIGNLHQIGELPHQTLWKLSKKYGPVMHLMLGRVPTVVVSSSDTARQVLRVHDLHCCTRPSLSGPRELSYNYLDIAFSPYDDYWKEVRKLCVQELFSTKQVHSIQPIKDEEVKKMIDSIAESASQKNPVNLNNKCLELTVSVVCRTAFGVSFEGTVLNSDRFNKIVREALEMLGSFSAADFIPYVGWIIDVLTGLQGRRERSKRDLNAFFEQMFDLHKEGKKEGNEDFVDLLLRLEKEEAVLGNDKLTRNHIKAILLDVLLAGIDTSAITMTWAMTELARNPRVMKKVQSEIRTQMGNRSMISFEDMDQLEYLKMVIKETWRLHPTTPLLLPREAMSEFDINGYTIPVKTRLHVNVWAIGRDPDTWKDPEVFLPERFMDNNIDAKGQHFELLPFGGGRRICPAIYMGTTMVEFGLANLLYHFDWKLPEGVEVKDIDVEEAPGLTVNKKNELLLVPEMRRSCG

SEQ ID NO: 45680 - protein, 436 aa, Arabidopsis thaliana
  peptide (1)..(436): Ceres Seq. ID no. 13646522
  misc_feature (1)..(429): Homolog of NCBI NO: 13878390 NR Description: Cytochrome P450 71B10
  misc_feature (1)..(429): Homolog of NCBI NO: 7430672 NR Description: probable cytochrome P450 At2g02580
  misc_feature (1)..(429): Homolog of NCBI NO: 18175891 NR Description: putative cytochrome P450 protein [Arabidopsis
  misc_feature (1)..(429): Homolog of NCBI NO: 15227003 NR Description: cytochrome P450 family [Arabidopsis thaliana]
  misc_feature (1)..(429): Homolog of NCBI NO: 15231541 NR Description: cytochrome P450 71B36 [Arabidopsis thaliana]
  misc_feature (1)..(429): Homolog of NCBI NO: 9294291 NR Description: cytochrome p450 [Arabidopsis thaliana]
  misc_feature (1)..(429): Homolog of NCBI NO: 15231542 NR Description: cytochrome p450 family [Arabidopsis thaliana]
  misc_feature (1)..(429): Homolog of NCBI NO: 15231537 NR Description: cytochrome p450 71B26 [Arabidopsis thaliana]
  misc_feature (1)..(429): Homolog of NCBI NO: 15231538 NR Description: cytochrome P450 family [Arabidopsis thaliana]
  misc_feature (1)..(436): Homolog of NCBI NO: 15231539 NR Description: cytochrome P450 family [Arabidopsis thaliana]
MHLMLGRVPTVVVSSSDTARQVLRVHDLHCCTRPSLSGPRELSYNYLDIAFSPYDDYWKEVRKLCVQELFSTKQVHSIQPIKDEEVKKMIDSIAESASQKNPVNLNNKCLELTVSVVCRTAFGVSFEGTVLNSDRFNKIVREALEMLGSFSAADFIPYVGWIIDVLTGLQGRRERSKRDLNAFFEQMFDLHKEGKKEGNEDFVDLLLRLEKEEAVLGNDKLTRNHIKAILLDVLLAGIDTSAITMTWAMTELARNPRVMKKVQSEIRTQMGNRSMISFEDMDQLEYLKMVIKETWRLHPTTPLLLPREAMSEFDINGYTIPVKTRLHVNVWAIGRDPDTWKDPEVFLPERFMDNNIDAKGQHFELLPFGGGRRICPAIYMGTTMVEFGLANLLYHFDWKLPEGVEVKDIDVEEAPGLTVNKKNELLLVPEMRRSCG

SEQ ID NO: 45681 - DNA, 1122 bp, Arabidopsis thaliana
  misc_feature (1)..(1122): Ceres Seq. ID no. 13591678
  misc_feature: MA Experiment ID: 20000307 Result: Up-regulated in Transcription
  misc_feature: MA Experiment 20000307 PARAMETER Experiment Name: At_Germinating_Seeds_Sub_P Parameter: Age (hr) Value: 24 vs. 0
  misc_feature: MA Experiment 20000307 PARAMETER Experiment Name: At_Germinating_Seeds_Sub_P Parameter: Organism Value: A. thaliana
  misc_feature: MA Experiment 20000307 PARAMETER Experiment Name: At_Germinating_Seeds_Sub_P Parameter: Plant Line Value: WS
  misc_feature: MA Experiment 20000307 PARAMETER Experiment Name: At_Germinating_Seeds_Sub_P Parameter: Tissue Value: Germinating Seeds
  misc_feature: MA Experiment ID: 20000315 Result: Up-regulated in Transcription
  misc_feature: MA Experiment 20000315 PARAMETER Experiment Name: At_14day_Shoots-Roots_Sub_P Parameter: Age (day) Value: 14
  misc_feature: MA Experiment 20000315 PARAMETER Experiment Name: At_14day_Shoots-Roots_Sub_P Parameter: Organism Value: A. thaliana
  misc_feature: MA Experiment 20000315 PARAMETER Experiment Name: At_14day_Shoots-Roots_Sub_P Parameter: Plant Line Value: WS
  misc_feature: MA Experiment 20000315 PARAMETER Experiment Name: At_14day_Shoots-Roots_Sub_P Parameter: Tissue Value: Shoots vs. Whole Plant
  misc_feature: MA Experiment ID: 20000328 Result: Up-regulated in Transcription
  misc_feature: MA Experiment 20000328 PARAMETER Experiment Name: At_42deg_Heat_Sub_P Parameter: Age (day) Value: 14
  misc_feature: MA Experiment 20000328 PARAMETER Experiment Name: At_42deg_Heat_Sub_P Parameter: Organism Value: A. thaliana
  misc_feature: MA Experiment 20000328 PARAMETER Experiment Name: At_42deg_Heat_Sub_P Parameter: Plant Line Value: WS
  misc_feature: MA Experiment 20000328 PARAMETER Experiment Name: At_42deg_Heat_Sub_P Parameter: Temperature (deg C) Value: 42 vs. 22
  misc_feature: MA Experiment 20000328 PARAMETER Experiment Name: At_42deg_Heat_Sub_P Parameter: Timepoint (hr) Value: 6
  misc_feature: MA Experiment 20000328 PARAMETER Experiment Name: At_42deg_Heat_Sub_P Parameter: Tissue Value: Aerial
  misc_feature: MA Experiment ID: 20000329 Result: Up-regulated in Transcription
  misc_feature: MA Experiment 20000329 PARAMETER Experiment Name: At_4deg_Cold_Sub_P Parameter: Age (day) Value: 14
  misc_feature: MA Experiment 20000329 PARAMETER Experiment Name: At_4deg_Cold_Sub_P Parameter: Organism Value: A. thaliana
  misc_feature: MA Experiment 20000329 PARAMETER Experiment Name: At_4deg_Cold_Sub_P Parameter: Plant Line Value: WS
  misc_feature: MA Experiment 20000329 PARAMETER Experiment Name: At_4deg_Cold_Sub_P Parameter: Temperature (deg C) Value: 4 vs. 22
  misc_feature: MA Experiment 20000329 PARAMETER Experiment Name: At_4deg_Cold_Sub_P Parameter: Timepoint (hr) Value: 6
  misc_feature: MA Experiment 20000329 PARAMETER Experiment Name: At_4deg_Cold_Sub_P Parameter: Tissue Value: Aerial
  misc_feature: MA Experiment ID: 20000332 Result: Up-regulated in Transcription
  misc_feature: MA Experiment 20000332 PARAMETER Experiment Name: At_4deg_Cold_Sub_P Parameter: Age (day) Value: 14
  misc_feature: MA Experiment 20000332 PARAMETER Experiment Name: At_4deg_Cold_Sub_P Parameter: Organism Value: A. thaliana
  misc_feature: MA Experiment 20000332 PARAMETER Experiment Name: At_4deg_Cold_Sub_P Parameter: Plant Line Value: WS
  misc_feature: MA Experiment 20000332 PARAMETER Experiment Name: At_4deg_Cold_Sub_P Parameter: Temperature (deg C) Value: 4 vs. 22
  misc_feature: MA Experiment 20000332 PARAMETER Experiment Name: At_4deg_Cold_Sub_P Parameter: Timepoint (hr) Value: 2
  misc_feature: MA Experiment 20000332 PARAMETER Experiment Name: At_4deg_Cold_Sub_P Parameter: Tissue Value: Aerial
  misc_feature: MA Experiment ID: 20000355 Result: Up-regulated in Transcription
  misc_feature: MA Experiment 20000355 PARAMETER Experiment Name: At_Siliques_Sub_P Parameter: Age (day) Value: 21
  misc_feature: MA Experiment 20000355 PARAMETER Experiment Name: At_Siliques_Sub_P Parameter: Organism Value: A. thaliana
  misc_feature: MA Experiment 20000355 PARAMETER Experiment Name: At_Siliques_Sub_P Parameter: Plant Line Value: WS
  misc_feature: MA Experiment 20000355 PARAMETER Experiment Name: At_Siliques_Sub_P Parameter: Tissue Value: Less Than 5mm Siliques vs. Whole Plant
  misc_feature: MA Experiment ID: 20000440 Result: Up-regulated in Transcription
  misc_feature: MA Experiment 20000440 PARAMETER Experiment Name: At_Closed-Flower__Sub_P Parameter: Tissue Value: Closed Flower vs. Whole Plant
  misc_feature: MA Experiment ID: 20001807 Result: Up-regulated in Transcription
  misc_feature: MA Experiment 20001807 PARAMETER Experiment Name: At_50mM_NH4NO3_L-to-H_Sub_P Parameter: Timepoint (hr) Value: 6
  misc_feature: MA Experiment 20001807 PARAMETER Experiment Name: At_50mM_NH4NO3_L-to-H_Sub_P Parameter: Tissue Value: Leaf
  misc_feature: MA Experiment 20001807 PARAMETER Experiment Name: At_50mM_NH4NO3_L-to-H_Sub_P Parameter: Treatment Value: 50mM NH4NO3 vs 100mM Mannitol
aaaaatcctcttaaaatctcataaagcccttcttatcttcttctcttctcctcaacttgaatacacagaaacaaaactgcttttgtctctcaagtcatttgtcttataaaaaggttctgttcttgaacaagggaaagaaacaaaaggctgataactcctgttttgtagattcctctgatattcagattcttacttctcaggaaaaccctaaagaaaatttctgtttttttttgagaaatatgaagatacaatgtgatgtgtgtgagaaagctccggccacgcttatatgttgtgctgatgaagctgctctctgcgctaaatgtgacgttgaggttcatgctgctaataaactcgctagcaaacaccaacgcctttttcttgactctctctcaactaaattccctccctgcgacatctgccttgagaaggcagctttcatattctgtgtagaggatagggctctgctctgcagagattgcgatgaggcgacccatgcgccaaatactcgctctgctaatcaccagaggttcttagccactggaatccgagttgctcttagttccactagttgcaatcaagaagtggaaaagaatcactttgacccatctaatcagcagagtctctctaaaccgccaactcagcaacccgctgctccatctcctttgtgggctaccgatgaattcttcagctactctgatcttgactgcagtaataaggagaaagagcaactcgatctcggggagctggattggcttgcagagatgggtctgtttggtgaccagcctgatcaagaggctctaccggtagccgaagttcccgagctttccttttcacatttggctcatgctcattcctacaacagacctatgaagtccaatgtacccaacaagaagcagaggcttgagtaccggtatgatgatgaagaagagcacttcctagtccccgacctaggctaaactatggatgaatctactaagctttataatatatagcacttgattcgcatagtcttcggctcttcgccttgctttctccatgatctgatatgtgtatcactgtaagtagcaggctaaaacttggaaaaaccttatcattttattagcaagtgaagccttaaattgc

SEQ ID NO: 45682 - protein, 238 aa, Arabidopsis thaliana
  peptide (1)..(238): Ceres Seq. ID no. 13591679
  misc_feature (52)..(99): Pfam Name: B-box zinc finger Pfam Description: B-box zinc finger
  misc_feature (1)..(142): Homolog of NCBI NO: 15222289 NR Description: CONSTANS B-box zinc finger family protein
  misc_feature (1)..(152): Homolog of NCBI NO: 34903708 NR Description: putative zinc-finger protein
  misc_feature (1)..(141): Homolog of NCBI NO: 18412037 NR Description: CONSTANS B-box zinc finger family protein
  misc_feature (1)..(141): Homolog of NCBI NO: 17433085 NR Description: Zinc finger protein constans-like 7
  misc_feature (1)..(141): Homolog of NCBI NO: 3618310 NR Description: zinc finger protein [Oryza sativa (japonica
  misc_feature (1)..(162): Homolog of NCBI NO: 3618314 NR Description: zinc finger protein [Oryza sativa (japonica
  misc_feature (1)..(166): Homolog of NCBI NO: 30679541 NR Description: salt-tolerance protein [Arabidopsis thaliana]
  misc_feature (1)..(238): Homolog of NCBI NO: 15221367 NR Description: salt-tolerance protein [Arabidopsis thaliana]
  misc_feature (1)..(238): Homolog of NCBI NO: 25408150 NR Description: hypothetical protein At2g31380 [imported] -
  misc_feature (1)..(238): Homolog of NCBI NO: 18402646 NR Description: salt tolerance-like protein [Arabidopsis
MKIQCDVCEKAPATLICCADEAALCAKCDVEVHAANKLASKHQRLFLDSLSTKFPPCDICLEKAAFIFCVEDRALLCRDCDEATHAPNTRSANHQRFLATGIRVALSSTSCNQEVEKNHFDPSNQQSLSKPPTQQPAAPSPLWATDEFFSYSDLDCSNKEKEQLDLGELDWLAEMGLFGDQPDQEALPVAEVPELSFSHLAHAHSYNRPMKSNVPNKKQRLEYRYDDEEEHFLVPDLG

SEQ ID NO: 45683 - DNA, 3301 bp, Arabidopsis thaliana
  misc_feature (1)..(3301): Ceres Seq. ID no. 12600421
  misc_feature: MA Experiment ID: 20000169 Result: Down-regulated in Transcription
  misc_feature: MA Experiment 20000169 PARAMETER Experiment Name: At_100uM_ABA_P Parameter: Age (day) Value: 14
  misc_feature: MA Experiment 20000169 PARAMETER Experiment Name: At_100uM_ABA_P Parameter: Organism Value: A. thaliana
  misc_feature: MA Experiment 20000169 PARAMETER Experiment Name: At_100uM_ABA_P Parameter: Plant Line Value: WS
  misc_feature: MA Experiment 20000169 PARAMETER Experiment Name: At_100uM_ABA_P Parameter: Timepoint (hr) Value: 6
  misc_feature: MA Experiment 20000169 PARAMETER Experiment Name: At_100uM_ABA_P Parameter: Tissue Value: Aerial
  misc_feature: MA Experiment 20000169 PARAMETER Experiment Name: At_100uM_ABA_P Parameter: Treatment Value: 100uM ABA vs. No Treatment
  misc_feature: MA Experiment ID: 20000234 Result: Up-regulated in Transcription
  misc_feature: MA Experiment 20000234 PARAMETER Experiment Name: At_Siliques_P Parameter: Age (day) Value: 21
  misc_feature: MA Experiment 20000234 PARAMETER Experiment Name: At_Siliques_P Parameter: Organism Value: A. thaliana
  misc_feature: MA Experiment 20000234 PARAMETER Experiment Name: At_Siliques_P Parameter: Plant Line Value: WS
  misc_feature: MA Experiment 20000234 PARAMETER Experiment Name: At_Siliques_P Parameter: Tissue Value: Less Than 5mm Siliques vs. Whole Plant
  misc_feature: MA Experiment ID: 20000437 Result: Down-regulated in Transcription
  misc_feature: MA Experiment 20000437 PARAMETER Experiment Name: At_Drought_P Parameter: Age (day) Value: 8
  misc_feature: MA Experiment 20000437 PARAMETER Experiment Name: At_Drought_P Parameter: Organism Value: A. thaliana
  misc_feature: MA Experiment 20000437 PARAMETER Experiment Name: At_Drought_P Parameter: Plant Line Value: WS
  misc_feature: MA Experiment 20000437 PARAMETER Experiment Name: At_Drought_P Parameter: Timepoint (hr) Value: 24
  misc_feature: MA Experiment 20000437 PARAMETER Experiment Name: At_Drought_P Parameter: Tissue Value: Whole Plant
  misc_feature: MA Experiment 20000437 PARAMETER Experiment Name: At_Drought_P Parameter: Treatment Value: Drought vs. No Drought
  misc_feature: MA Experiment ID: 20001558 Result: Up-regulated in Transcription
  misc_feature: MA Experiment 20001558 PARAMETER Experiment Name: At_Drought_Soil_Dry_P Parameter: Age (day) Value: 27
  misc_feature: MA Experiment 20001558 PARAMETER Experiment Name: At_Drought_Soil_Dry_P Parameter: Organism Value: A. thaliana
  misc_feature: MA Experiment 20001558 PARAMETER Experiment Name: At_Drought_Soil_Dry_P Parameter: Plant Line Value: WS
  misc_feature: MA Experiment 20001558 PARAMETER Experiment Name: At_Drought_Soil_Dry_P Parameter: Post Timepoint (hr) Value: 6
  misc_feature: MA Experiment 20001558 PARAMETER Experiment Name: At_Drought_Soil_Dry_P Parameter: Post-Treatment Value: Re-Water vs. No Drought
  misc_feature: MA Experiment 20001558 PARAMETER Experiment Name: At_Drought_Soil_Dry_P Parameter: Timepoint (day) Value: 13
  misc_feature: MA Experiment 20001558 PARAMETER Experiment Name: At_Drought_Soil_Dry_P Parameter: Treatment Value: Drought vs. No Drought
  misc_feature: MA Experiment ID: 20001560 Result: Up-regulated in Transcription
  misc_feature: MA Experiment 20001560 PARAMETER Experiment Name: At_Drought_Soil_Dry_P Parameter: Age (day) Value: 28
  misc_feature: MA Experiment 20001560 PARAMETER Experiment Name: At_Drought_Soil_Dry_P Parameter: Organism Value: A. thaliana
  misc_feature: MA Experiment 20001560 PARAMETER Experiment Name: At_Drought_Soil_Dry_P Parameter: Plant Line Value: WS
  misc_feature: MA Experiment 20001560 PARAMETER Experiment Name: At_Drought_Soil_Dry_P Parameter: Post Timepoint (hr) Value: None
  misc_feature: MA Experiment 20001560 PARAMETER Experiment Name: At_Drought_Soil_Dry_P Parameter: Post-Treatment Value: None
  misc_feature: MA Experiment 20001560 PARAMETER Experiment Name: At_Drought_Soil_Dry_P Parameter: Timepoint (day) Value: 14
  misc_feature: MA Experiment 20001560 PARAMETER Experiment Name: At_Drought_Soil_Dry_P Parameter: Treatment Value: Drought vs. No Drought
  misc_feature: MA Experiment ID: 20001757 Result: Up-regulated in Transcription
  misc_feature: MA Experiment 20001757 PARAMETER Experiment Name: At_50mM_NH4NO3_L-to-H_P Parameter: Timepoint (hr) Value: 6
  misc_feature: MA Experiment 20001757 PARAMETER Experiment Name: At_50mM_NH4NO3_L-to-H_P Parameter: Tissue Value: Leaf
  misc_feature: MA Experiment 20001757 PARAMETER Experiment Name: At_50mM_NH4NO3_L-to-H_P Parameter: Treatment Value: 50mM NH4NO3 vs 100mM Mannitol
gttcgcatctctatcttcttccgttgtctactgtttttcgttaaaccctacgattcttctttttttcaacgactgctcggatctttctcagtagagggaaccatgaatccctcactcgtcaccgccattaacgctccaatttcaccttctcctcggtctcctcttctttctcacttcctacctactttacctcaccgtttctccaagtctgagtgtctatctcgccgtcgttatcgagtttcgttccctcgtagctcagctgcttcctccgaccaactatcagtatctacgcaggcgaagaatcccggtatccatgggaataagaaggagctcactggattgcaaccgattgttgagaaaatgacaccgccggtgaggctagcgacttcagctgttgtattagcggcgtctttagctactggttacggccttgggctccgtttagccggctccaggaatattgcctttggtggggctgctgttgctggagccgccggtggagctgtcgtatatgcgttgaactctgctgtaccggaggtagctgctatcagtttgcataattatgttgccgaattcgaagatcctgcctctgtgacgaaagatgatgtagaaaagatcgctgataggtacggtgtcaacaaaggagacgaagcattccaggctgagatttgtgatatttattgccggtatgtaacttccgtgcttccaactgaaggacagtctcttaaaggggatgaagtggcgaagatagtcaagttcaaaaatgctttagggatagacgaacctgatgcagctgccatgcacatggagattggtcgcaggatttttaggcaaaggcttgagactggggagcgtgaaggtgatgcagaacagcgtcgggcatttatgaggcttgtatatgtttcagctcttgtgtttggagatgcttcatccttccttctaccttggaagcgagtattgaaggtcacagatgctcaggttgagattgctattcgtgaaaatgcaaagcagctgtatgccgaacggttaaaattagttggtagagatattaacgtagaaaaccttgtggaccttagaaaatcacaactatcattcaagctctctgatgagcttgctgaagacctgtttagagagcatacgagaaaagtagtcgtagagaacatttcatcggcactcagcatactcaaatcccgcacacgagcagcgaagagtttggcatctgtcgtggaagagcttgaaaaagtactggagtttaacaacctgctagtttccttgaaaagtcattcagaggcagatcaatttgcacgcggggttggccctatttctttgataggtgatgagtctgattttgagaggagaatggatgatttaaagctcctttatagagcatatgttacagatgctttatctggtgggcgcttagaagaaaataagctcgtggcaatgagccaacttagaaacatactcggtctgggaaaacgagaggctgaagctattagtgttgatgttacgtccaagtcttaccgtaaaagacttgctaacgctgtttctagtggtgaccttgaagcacaagacagtaaagcaaaataccttcaaaagctctgcgaagagctgcactttgatgcacagaaggcaggcgcaatccatgaagaaatctatcggcagaagcttcaacagtgtgttactgatggagagctgagcgatgacaatgttgctgctttattaaggttaagagttatgttgtgtattccccagcaaactgttgatacagctcatgcagaaatctgtggaaccatatttgaaaaggttgtcagggatgccatttcttctggagtggatggttatgatgctgaaactcgcaaatcagttagaaaggctgcacatggtcttcggttatccagagagactgccatgtctattgctagcaaagctgtccgtagggttttcacaaactatatcagacgagcaagagcagccgagaaccgtactgattcagcaaaggagctcaagaagatgattgctttcaacacgttggttgtgactgaaatggtggctgatatcaagggagaatcttctgataaggcacctgaggaggaccctgttcaagagaaagaagaagatgatgaagatgaagaatggggatcccttgaatcgctcagaaagacaagacccgacaaggaactcgctgagaaaatgggaaagcctggccagactgagataactctcaaagatgaccttcccgacagggacagaatagatctctacaaaacatacttgctctactgtgtaactggagaggtaacaagaatcccttttggcgcccagatcacaacaaagagagacgattcagagtacttgcttctaaatcagcttggtgggattctcggattgagttcgaaagaaatagtcaacattcacgtaggtttagccgagcaggcttttaggcaacaagctgaagtgattttagctgatgggcaattgacaaaggctagagtagagcagctagacgagttgcaaaaacaagttggtttgcctcagccacaagccgagaaggttatcaagaatataaccaccacaaaaatggcaaacgcgatagagaccgctgttaaccaaggaagactgaacataaagcagatacgggagctcaaggaggcaaatgtcagcctggacagcatgatcgctgtgagtctgagagagaaattattcaagaagacagtgagtgacatcttctcatcaggaactggtgaattcgatgaaaccgaagtctaccagacaatcccatccgatctcagtattgatgtggaaaaagccaaaagagttgtccatgatctcgctcagagtagattatcgaattcgctggtccaagccgtggcattactcaggcagagaaactctaaaggagtggtcttgtcgctgaatgatttgcttgcatgtgacaaagctgtgccggctgagccaatgtcatgggaggtctcagaggaattatctgatctatatgctatttattcaaagagtgatcccaaacccgcaccggaaaaagttttgaggctacaatatctgctgggaatagatgattcaactgcaactgccctccgtgaaatggaagatggagcattatcttctgctgcagaagagggcaatttcgtcttttaaatctttggagaaatcacttgagttattatgtattgtgttacggccgagggtggaaaaatgattttgaatttgaaatttgaccaaagtctgtgaaaattttgtatcagaaccataaacttgatatgattaatttgaaaatctgcaaacg

SEQ ID NO: 45684 - protein, 1050 aa, Arabidopsis thaliana
  peptide (1)..(1050): Ceres Seq. ID no. 12600422
  misc_feature (729)..(976): Homolog of NCBI NO: 13812316 NR Description: IAP100 protein [Guillardia theta]
  misc_feature (104)..(395): Homolog of NCBI NO: 37535630 NR Description: putative chloroplast inner envelope protein
  misc_feature (35)..(229): Homolog of NCBI NO: 25406948 NR Description: hypothetical protein [imported] - Arabidopsis
  misc_feature (35)..(284): Homolog of NCBI NO: 37535626 NR Description: putative chloroplast inner envelope protein
  misc_feature (276)..(1045): Homolog of NCBI NO: 37535626 NR Description: putative chloroplast inner envelope protein
  misc_feature (729)..(976): Homolog of NCBI NO: 13812316 NR Description: IAP100 protein [Guillardia theta]
  misc_feature (104)..(395): Homolog of NCBI NO: 37535630 NR Description: putative chloroplast inner envelope protein
  misc_feature (35)..(229): Homolog of NCBI NO: 25406948 NR Description: hypothetical protein [imported] - Arabidopsis
  misc_feature (35)..(284): Homolog of NCBI NO: 37535626 NR Description: putative chloroplast inner envelope protein
  misc_feature (276)..(1045): Homolog of NCBI NO: 37535626 NR Description: putative chloroplast inner envelope protein
VRISIFFRCLLFFVKPYDSSFFQRLLGSFSVEGTMNPSLVTAINAPISPSPRSPLLSHFLPTLPHRFSKSECLSRRRYRVSFPRSSAASSDQLSVSTQAKNPGIHGNKKELTGLQPIVEKMTPPVRLATSAVVLAASLATGYGLGLRLAGSRNIAFGGAAVAGAAGGAVVYALNSAVPEVAAISLHNYVAEFEDPASVTKDDVEKIADRYGVNKGDEAFQAEICDIYCRYVTSVLPTEGQSLKGDEVAKIVKFKNALGIDEPDAAAMHMEIGRRIFRQRLETGEREGDAEQRRAFMRLVYVSALVFGDASSFLLPWKRVLKVTDAQVEIAIRENAKQLYAERLKLVGRDINVENLVDLRKSQLSFKLSDELAEDLFREHTRKVVVENISSALSILKSRTRAAKSLASVVEELEKVLEFNNLLVSLKSHSEADQFARGVGPISLIGDESDFERRMDDLKLLYRAYVTDALSGGRLEENKLVAMSQLRNILGLGKREAEAISVDVTSKSYRKRLANAVSSGDLEAQDSKAKYLQKLCEELHFDAQKAGAIHEEIYRQKLQQCVTDGELSDDNVAALLRLRVMLCIPQQTVDTAHAEICGTIFEKVVRDAISSGVDGYDAETRKSVRKAAHGLRLSRETAMSIASKAVRRVFTNYIRRARAAENRTDSAKELKKMIAFNTLVVTEMVADIKGESSDKAPEEDPVQEKEEDDEDEEWGSLESLRKTRPDKELAEKMGKPGQTEITLKDDLPDRDRIDLYKTYLLYCVTGEVTRIPFGAQITTKRDDSEYLLLNQLGGILGLSSKEIVNIHVGLAEQAFRQQAEVILADGQLTKARVEQLDELQKQVGLPQPQAEKVIKNITTTKMANAIETAVNQGRLNIKQIRELKEANVSLDSMIAVSLREKLFKKTVSDIFSSGTGEFDETEVYQTIPSDLSIDVEKAKRVVHDLAQSRLSNSLVQAVALLRQRNSKGVVLSLNDLLACDKAVPAEPMSWEVSEELSDLYAIYSKSDPKPAPEKVLRLQYLLGIDDSTATALREMEDGALSSAAEEGNFVF

SEQ ID NO: 45685 - protein, 1016 aa, Arabidopsis thaliana
  peptide (1)..(1016): Ceres Seq. ID no. 12600423
  misc_feature (695)..(942): Homolog of NCBI NO: 13812316 NR Description: IAP100 protein [Guillardia theta]
  misc_feature (70)..(361): Homolog of NCBI NO: 37535630 NR Description: putative chloroplast inner envelope protein
  misc_feature (1)..(195): Homolog of NCBI NO: 25406948 NR Description: hypothetical protein [imported] - Arabidopsis
  misc_feature (1)..(250): Homolog of NCBI NO: 37535626 NR Description: putative chloroplast inner envelope protein
  misc_feature (242)..(1011): Homolog of NCBI NO: 37535626 NR Description: putative chloroplast inner envelope protein
  misc_feature (695)..(942): Homolog of NCBI NO: 13812316 NR Description: IAP100 protein [Guillardia theta]
  misc_feature (70)..(361): Homolog of NCBI NO: 37535630 NR Description: putative chloroplast inner envelope protein
  misc_feature (1)..(195): Homolog of NCBI NO: 25406948 NR Description: hypothetical protein [imported] - Arabidopsis
  misc_feature (1)..(250): Homolog of NCBI NO: 37535626 NR Description: putative chloroplast inner envelope protein
  misc_feature (242)..(1011): Homolog of NCBI NO: 37535626 NR Description: putative chloroplast inner envelope protein
MNPSLVTAINAPISPSPRSPLLSHFLPTLPHRFSKSECLSRRRYRVSFPRSSAASSDQLSVSTQAKNPGIHGNKKELTGLQPIVEKMTPPVRLATSAVVLAASLATGYGLGLRLAGSRNIAFGGAAVAGAAGGAVVYALNSAVPEVAAISLHNYVAEFEDPASVTKDDVEKIADRYGVNKGDEAFQAEICDIYCRYVTSVLPTEGQSLKGDEVAKIVKFKNALGIDEPDAAAMHMEIGRRIFRQRLETGEREGDAEQRRAFMRLVYVSALVFGDASSFLLPWKRVLKVTDAQVEIAIRENAKQLYAERLKLVGRDINVENLVDLRKSQLSFKLSDELAEDLFREHTRKVVVENISSALSILKSRTRAAKSLASVVEELEKVLEFNNLLVSLKSHSEADQFARGVGPISLIGDESDFERRMDDLKLLYRAYVTDALSGGRLEENKLVAMSQLRNILGLGKREAEAISVDVTSKSYRKRLANAVSSGDLEAQDSKAKYLQKLCEELHFDAQKAGAIHEEIYRQKLQQCVTDGELSDDNVAALLRLRVMLCIPQQTVDTAHAEICGTIFEKVVRDAISSGVDGYDAETRKSVRKAAHGLRLSRETAMSIASKAVRRVFTNYIRRARAAENRTDSAKELKKMIAFNTLVVTEMVADIKGESSDKAPEEDPVQEKEEDDEDEEWGSLESLRKTRPDKELAEKMGKPGQTEITLKDDLPDRDRIDLYKTYLLYCVTGEVTRIPFGAQITTKRDDSEYLLLNQLGGILGLSSKEIVNIHVGLAEQAFRQQAEVILADGQLTKARVEQLDELQKQVGLPQPQAEKVIKNITTTKMANAIETAVNQGRLNIKQIRELKEANVSLDSMIAVSLREKLFKKTVSDIFSSGTGEFDETEVYQTIPSDLSIDVEKAKRVVHDLAQSRLSNSLVQAVALLRQRNSKGVVLSLNDLLACDKAVPAEPMSWEVSEELSDLYAIYSKSDPKPAPEKVLRLQYLLGIDDSTATALREMEDGALSSAAEEGNFVF

SEQ ID NO: 45686 - protein, 930 aa, Arabidopsis thaliana
  peptide (1)..(930): Ceres Seq. ID no. 12600424
  misc_feature (609)..(856): Homolog of NCBI NO: 13812316 NR Description: IAP100 protein [Guillardia theta]
  misc_feature (1)..(275): Homolog of NCBI NO: 37535630 NR Description: putative chloroplast inner envelope protein
  misc_feature (1)..(109): Homolog of NCBI NO: 25406948 NR Description: hypothetical protein [imported] - Arabidopsis
  misc_feature (1)..(164): Homolog of NCBI NO: 37535626 NR Description: putative chloroplast inner envelope protein
  misc_feature (156)..(925): Homolog of NCBI NO: 37535626 NR Description: putative chloroplast inner envelope protein
  misc_feature (609)..(856): Homolog of NCBI NO: 13812316 NR Description: IAP100 protein [Guillardia theta]
  misc_feature (1)..(275): Homolog of NCBI NO: 37535630 NR Description: putative chloroplast inner envelope protein
  misc_feature (1)..(109): Homolog of NCBI NO: 25406948 NR Description: hypothetical protein [imported] - Arabidopsis
  misc_feature (1)..(164): Homolog of NCBI NO: 37535626 NR Description: putative chloroplast inner envelope protein
  misc_feature (156)..(925): Homolog of NCBI NO: 37535626 NR Description: putative chloroplast inner envelope protein
MTPPVRLATSAVVLAASLATGYGLGLRLAGSRNIAFGGAAVAGAAGGAVVYALNSAVPEVAAISLHNYVAEFEDPASVTKDDVEKIADRYGVNKGDEAFQAEICDIYCRYVTSVLPTEGQSLKGDEVAKIVKFKNALGIDEPDAAAMHMEIGRRIFRQRLETGEREGDAEQRRAFMRLVYVSALVFGDASSFLLPWKRVLKVTDAQVEIAIRENAKQLYAERLKLVGRDINVENLVDLRKSQLSFKLSDELAEDLFREHTRKVVVENISSALSILKSRTRAAKSLASVVEELEKVLEFNNLLVSLKSHSEADQFARGVGPISLIGDESDFERRMDDLKLLYRAYVTDALSGGRLEENKLVAMSQLRNILGLGKREAEAISVDVTSKSYRKRLANAVSSGDLEAQDSKAKYLQKLCEELHFDAQKAGAIHEEIYRQKLQQCVTDGELSDDNVAALLRLRVMLCIPQQTVDTAHAEICGTIFEKVVRDAISSGVDGYDAETRKSVRKAAHGLRLSRETAMSIASKAVRRVFTNYIRRARAAENRTDSAKELKKMIAFNTLVVTEMVADIKGESSDKAPEEDPVQEKEEDDEDEEWGSLESLRKTRPDKELAEKMGKPGQTEITLKDDLPDRDRIDLYKTYLLYCVTGEVTRIPFGAQITTKRDDSEYLLLNQLGGILGLSSKEIVNIHVGLAEQAFRQQAEVILADGQLTKARVEQLDELQKQVGLPQPQAEKVIKNITTTKMANAIETAVNQGRLNIKQIRELKEANVSLDSMIAVSLREKLFKKTVSDIFSSGTGEFDETEVYQTIPSDLSIDVEKAKRVVHDLAQSRLSNSLVQAVALLRQRNSKGVVLSLNDLLACDKAVPAEPMSWEVSEELSDLYAIYSKSDPKPAPEKVLRLQYLLGIDDSTATALREMEDGALSSAAEEGNFVF

SEQ ID NO: 45687 - DNA, 1357 bp, Arabidopsis thaliana
  misc_feature (1)..(1357): Ceres Seq. ID no. 13646545
  misc_feature: MA Experiment ID: 108462 Result: Up-regulated in Transcription
  misc_feature: MA Experiment 108462 PARAMETER Experiment Name: At_Germinating_Seeds_cDNA_P Parameter: Age (day) Value: 2 vs. 0
  misc_feature: MA Experiment 108462 PARAMETER Experiment Name: At_Germinating_Seeds_cDNA_P Parameter: Tissue Value: Germinating Seeds
  misc_feature: MA Experiment ID: 108463 Result: Up-regulated in Transcription
  misc_feature: MA Experiment 108463 PARAMETER Experiment Name: At_Germinating_Seeds_cDNA_P Parameter: Age (day) Value: 3 vs. 0
  misc_feature: MA Experiment 108463 PARAMETER Experiment Name: At_Germinating_Seeds_cDNA_P Parameter: Tissue Value: Germinating Seeds
  misc_feature: MA Experiment ID: 108574 Result: Down-regulated in Transcription
  misc_feature: MA Experiment 108574 PARAMETER Experiment Name: At_Wounding__cDNA_P Parameter: Timepoint (hr) Value: 1
  misc_feature: MA Experiment 108574 PARAMETER Experiment Name: At_Wounding__cDNA_P Parameter: Tissue Value: Aerial
  misc_feature: MA Experiment 108574 PARAMETER Experiment Name: At_Wounding__cDNA_P Parameter: Treatment Value: Wounding vs. No Wounding
  misc_feature: MA Experiment ID: 108577 Result: Down-regulated in Transcription
  misc_feature: MA Experiment 108577 PARAMETER Experiment Name: At_42deg_Heat_cDNA_P Parameter: Temperature (deg C) Value: 42 vs. 22
  misc_feature: MA Experiment 108577 PARAMETER Experiment Name: At_42deg_Heat_cDNA_P Parameter: Timepoint (hr) Value: 6
  misc_feature: MA Experiment 108577 PARAMETER Experiment Name: At_42deg_Heat_cDNA_P Parameter: Tissue Value: Aerial
  misc_feature: MA Experiment ID: 108595 Result: Down-regulated in Transcription
  misc_feature: MA Experiment 108595 PARAMETER Experiment Name: At_Ler-pi_Ovule_cDNA_P Parameter: Plant Line Value: null
  misc_feature: MA Experiment ID: 108607 Result: Down-regulated in Transcription
  misc_feature: MA Experiment 108607 PARAMETER Experiment Name: At_100uM_ABA_cDNA_P Parameter: Timepoint (hr) Value: 4
  misc_feature: MA Experiment 108607 PARAMETER Experiment Name: At_100uM_ABA_cDNA_P Parameter: Tissue Value: Aerial
  misc_feature: MA Experiment 108607 PARAMETER Experiment Name: At_100uM_ABA_cDNA_P Parameter: Treatment Value: 100uM ABA vs. No Treatment
  misc_feature: MA Experiment ID: 108668 Result: Down-regulated in Transcription
  misc_feature: MA Experiment 108668 PARAMETER Experiment Name: At_2mM_SA_cDNA_P Parameter: Plant Line Value: WS
  misc_feature: MA Experiment 108668 PARAMETER Experiment Name: At_2mM_SA_cDNA_P Parameter: Timepoint (hr) Value: 6
  misc_feature: MA Experiment 108668 PARAMETER Experiment Name: At_2mM_SA_cDNA_P Parameter: Treatment Value: 2mM SA vs. No Treatment
  misc_feature: MA Experiment ID: 20000112 Result: Down-regulated in Transcription
  misc_feature: MA Experiment 20000112 PARAMETER Experiment Name: At_42deg_Heat_cDNA_P Parameter: Temperature (deg C) Value: 42 vs. 22
  misc_feature: MA Experiment 20000112 PARAMETER Experiment Name: At_42deg_Heat_cDNA_P Parameter: Timepoint (hr) Value: 2
  misc_feature: MA Experiment 20000112 PARAMETER Experiment Name: At_42deg_Heat_cDNA_P Parameter: Tissue Value: Aerial
  misc_feature: MA Experiment ID: 20000180 Result: Up-regulated in Transcription
  misc_feature: MA Experiment 20000180 PARAMETER Experiment Name: At_Germinating_Seeds_P Parameter: Age (hr) Value: 24 vs. 0
  misc_feature: MA Experiment 20000180 PARAMETER Experiment Name: At_Germinating_Seeds_P Parameter: Tissue Value: Germinating Seeds
  misc_feature: MA Experiment ID: 20000185 Result: Down-regulated in Transcription
  misc_feature: MA Experiment 20000185 PARAMETER Experiment Name: At_Roots__P Parameter: Age (day) Value: 7 vs. 21
  misc_feature: MA Experiment 20000185 PARAMETER Experiment Name: At_Roots__P Parameter: Organism Value: A. thaliana
  misc_feature: MA Experiment 20000185 PARAMETER Experiment Name: At_Roots__P Parameter: Tissue Value: Roots vs. Whole Plant
  misc_feature: MA Experiment ID: 20000224 Result: Down-regulated in Transcription
  misc_feature: MA Experiment ID: 20000235 Result: Down-regulated in Transcription
  misc_feature: MA Experiment 20000235 PARAMETER Experiment Name: At_Siliques_P Parameter: Age (day) Value: 21
  misc_feature: MA Experiment 20000235 PARAMETER Experiment Name: At_Siliques_P Parameter: Organism Value: A. thaliana
  misc_feature: MA Experiment 20000235 PARAMETER Experiment Name: At_Siliques_P Parameter: Plant Line Value: WS
  misc_feature: MA Experiment 20000235 PARAMETER Experiment Name: At_Siliques_P Parameter: Tissue Value: 5-10mm Siliques vs. Whole Plant
  misc_feature: MA Experiment ID: 20000264 Result: Down-regulated in Transcription
  misc_feature: MA Experiment 20000264 PARAMETER Experiment Name: At_Open_Flower_P Parameter: Age (day) Value: 21
  misc_feature: MA Experiment 20000264 PARAMETER Experiment Name: At_Open_Flower_P Parameter: Plant Line Value: WS
  misc_feature: MA Experiment 20000264 PARAMETER Experiment Name: At_Open_Flower_P Parameter: Tissue Value: Open Flower vs. Whole Plant
  misc_feature: MA Experiment ID: 20000438 Result: Up-regulated in Transcription
  misc_feature: MA Experiment 20000438 PARAMETER Experiment Name: At_Shoots__P Parameter: Age (day) Value: 14
  misc_feature: MA Experiment 20000438 PARAMETER Experiment Name: At_Shoots__P Parameter: Tissue Value: Shoots vs. Whole Plant
  misc_feature: MA Experiment ID: 20000439 Result: Down-regulated in Transcription
  misc_feature: MA Experiment 20000439 PARAMETER Experiment Name: At_Roots__P Parameter: Age (day) Value: 14 vs. 21
  misc_feature: MA Experiment 20000439 PARAMETER Experiment Name: At_Roots__P Parameter: Organism Value: A. thaliana
  misc_feature: MA Experiment 20000439 PARAMETER Experiment Name: At_Roots__P Parameter: Tissue Value: Roots vs. Whole Plant
  misc_feature: MA Experiment ID: 20001555 Result: Down-regulated in Transcription
  misc_feature: MA Experiment 20001555 PARAMETER Experiment Name: At_Drought_Soil_Dry_P Parameter: Age (day) Value: 24
  misc_feature: MA Experiment 20001555 PARAMETER Experiment Name: At_Drought_Soil_Dry_P Parameter: Organism Value: A. thaliana
  misc_feature: MA Experiment 20001555 PARAMETER Experiment Name: At_Drought_Soil_Dry_P Parameter: Plant Line Value: WS
  misc_feature: MA Experiment 20001555 PARAMETER Experiment Name: At_Drought_Soil_Dry_P Parameter: Post Timepoint (hr) Value: None
  misc_feature: MA Experiment 20001555 PARAMETER Experiment Name: At_Drought_Soil_Dry_P Parameter: Post-Treatment Value: None
  misc_feature: MA Experiment 20001555 PARAMETER Experiment Name: At_Drought_Soil_Dry_P Parameter: Timepoint (day) Value: 10
  misc_feature: MA Experiment 20001555 PARAMETER Experiment Name: At_Drought_Soil_Dry_P Parameter: Treatment Value: Drought vs. No Drought
  misc_feature: MA Experiment ID: 20001556 Result: Down-regulated in Transcription
  misc_feature: MA Experiment 20001556 PARAMETER Experiment Name: At_Drought_Soil_Dry_P Parameter: Age (day) Value: 26
  misc_feature: MA Experiment 20001556 PARAMETER Experiment Name: At_Drought_Soil_Dry_P Parameter: Organism Value: A. thaliana
  misc_feature: MA Experiment 20001556 PARAMETER Experiment Name: At_Drought_Soil_Dry_P Parameter: Plant Line Value: WS
  misc_feature: MA Experiment 20001556 PARAMETER Experiment Name: At_Drought_Soil_Dry_P Parameter: Post Timepoint (hr) Value: None
  misc_feature: MA Experiment 20001556 PARAMETER Experiment Name: At_Drought_Soil_Dry_P Parameter: Post-Treatment Value: None
  misc_feature: MA Experiment 20001556 PARAMETER Experiment Name: At_Drought_Soil_Dry_P Parameter: Timepoint (day) Value: 12
  misc_feature: MA Experiment 20001556 PARAMETER Experiment Name: At_Drought_Soil_Dry_P Parameter: Treatment Value: Drought vs. No Drought
  misc_feature: MA Experiment ID: 20001559 Result: Down-regulated in Transcription
  misc_feature: MA Experiment 20001559 PARAMETER Experiment Name: At_Drought_Soil_Dry_P Parameter: Age (day) Value: 28
  misc_feature: MA Experiment 20001559 PARAMETER Experiment Name: At_Drought_Soil_Dry_P Parameter: Organism Value: A. thaliana
  misc_feature: MA Experiment 20001559 PARAMETER Experiment Name: At_Drought_Soil_Dry_P Parameter: Plant Line Value: WS
  misc_feature: MA Experiment 20001559 PARAMETER Experiment Name: At_Drought_Soil_Dry_P Parameter: Post Timepoint (hr) Value: 29
  misc_feature: MA Experiment 20001559 PARAMETER Experiment Name: At_Drought_Soil_Dry_P Parameter: Post-Treatment Value: Re-Water vs. No Drought
  misc_feature: MA Experiment 20001559 PARAMETER Experiment Name: At_Drought_Soil_Dry_P Parameter: Timepoint (day) Value: 14
  misc_feature: MA Experiment 20001559 PARAMETER Experiment Name: At_Drought_Soil_Dry_P Parameter: Treatment Value: Drought vs. No Drought
  misc_feature: MA Experiment ID: 20001757 Result: Up-regulated in Transcription
  misc_feature: MA Experiment 20001757 PARAMETER Experiment Name: At_50mM_NH4NO3_L-to-H_P Parameter: Timepoint (hr) Value: 6
  misc_feature: MA Experiment 20001757 PARAMETER Experiment Name: At_50mM_NH4NO3_L-to-H_P Parameter: Tissue Value: Leaf
  misc_feature: MA Experiment 20001757 PARAMETER Experiment Name: At_50mM_NH4NO3_L-to-H_P Parameter: Treatment Value: 50mM NH4NO3 vs 100mM Mannitol
  misc_feature: MA Experiment ID: 20001906 Result: Down-regulated in Transcription
  misc_feature: MA Experiment 20001906 PARAMETER Experiment Name: At_Drought_Reproduction_P Parameter: Age (day) Value: 35
  misc_feature: MA Experiment 20001906 PARAMETER Experiment Name: At_Drought_Reproduction_P Parameter: Organism Value: A. thaliana
  misc_feature: MA Experiment 20001906 PARAMETER Experiment Name: At_Drought_Reproduction_P Parameter: Plant Line Value: WS
  misc_feature: MA Experiment 20001906 PARAMETER Experiment Name: At_Drought_Reproduction_P Parameter: Timepoint (day) Value: 5
  misc_feature: MA Experiment 20001906 PARAMETER Experiment Name: At_Drought_Reproduction_P Parameter: Tissue Value: Siliques
  misc_feature: MA Experiment 20001906 PARAMETER Experiment Name: At_Drought_Reproduction_P Parameter: Treatment Value: Drought vs. No Drought
  misc_feature: MA Experiment ID: 20001911 Result: Down-regulated in Transcription
  misc_feature: MA Experiment 20001911 PARAMETER Experiment Name: At_Drought_Reproduction_P Parameter: Age (day) Value: 40
  misc_feature: MA Experiment 20001911 PARAMETER Experiment Name: At_Drought_Reproduction_P Parameter: Organism Value: A. thaliana
  misc_feature: MA Experiment 20001911 PARAMETER Experiment Name: At_Drought_Reproduction_P Parameter: Plant Line Value: WS
  misc_feature: MA Experiment 20001911 PARAMETER Experiment Name: At_Drought_Reproduction_P Parameter: Timepoint (day) Value: 10
  misc_feature: MA Experiment 20001911 PARAMETER Experiment Name: At_Drought_Reproduction_P Parameter: Tissue Value: Flowers
  misc_feature: MA Experiment 20001911 PARAMETER Experiment Name: At_Drought_Reproduction_P Parameter: Treatment Value: Drought vs. No Drought
atttgtgatattttattacacatctcttccagtctctcactctttgtccctctctctttctctattactctgtctcctctgttccggcgatgttccaacacgcgccttcttccatttccctcatcatcatcttcctcttcaccattctatcacccgtttcacctgaaccggtcacagtccagccattccgggtcaaatcatccccacccgcaaccatacccgctttcccggagcaatccgatttctccggctgcccactcgattaaccagaagacctcttccacggcatcaagtcagcttgcagcggcaaaaagctccacaaaggaaaatgttgccccgtactaggcgcgtggctctactctgcttactcaaccactgctctaagccgttcgatttccgccgccgcaagaaactcatcctcctcctccgccgcggtaacgactcctgaagaagatatgcctttgcttcccgatgactcggagacttgcgttgacggattagggaaatctctgaggcagagagggattgagctcactagaccgaacgagacttgcgacgtcgtttactgctactgtggaatcagattgcatccgttgagctgttccgaggcttttagagtgaatgatgaagggagactcgttggagacgagagagttgatagattagagactgattgtttgagtggaagccacaacaatgctgatggattctcacctcttcttggttgcaacaagtgcttgaacagtctctataagctaaatccgaagaaaacttcagggacaagaaacccatcaaaggaagaccgaaacagaacagcaaagatgcacaacaaagactgtgtcctcatgggtctcacttggcttctcgctaagaaccgtactgcttatttccccactgtcacttctgtcctccgagccgtcatgctgaaccacgatggcgtgccacgttcatgtgctctcggcagcgacggcatgcctttagccgtcgattcttccgaattctccaacggctcgccaacttcacttcagtatccgcaccacttggtccacttcttactttacagcgttatcacattagtcctaataaggtcgtggtgacgtggcacaccatggttggatttgattgtgacgtggagcacgtggcattacgtggttggttgagagaagtgaaattcagatagagagaaagagagagggctttggttctgtctttgtaaattagttttttggtgtcgttgttgttttagtagccatgttctttaacattttattacatcaaaaaaatcttgttgtattttgtcaattaaatattgaaaaatcacaatttgaaaatatttcaacaatattttcggtcatat

SEQ ID NO: 45688 - protein, 213 aa, Arabidopsis thaliana
  peptide (1)..(213): Ceres Seq. ID no. 13646546
  misc_feature (1)..(115): Homolog of NCBI NO: 18417127 NR Description: expressed protein [Arabidopsis thaliana]
  misc_feature (1)..(115): Homolog of NCBI NO: 21593735 NR Description: unknown [Arabidopsis thaliana]
  misc_feature (1)..(189): Homolog of NCBI NO: 21593735 NR Description: unknown [Arabidopsis thaliana]
  misc_feature (1)..(189): Homolog of NCBI NO: 18417127 NR Description: expressed protein [Arabidopsis thaliana]
  misc_feature (1)..(189): Homolog of NCBI NO: 34394002 NR Description: unknown protein [Oryza sativa (japonica
  misc_feature (1)..(213): Homolog of NCBI NO: 18401752 NR Description: expressed protein [Arabidopsis thaliana]
  misc_feature (1)..(115): Homolog of NCBI NO: 18417127 NR Description: expressed protein [Arabidopsis thaliana]
  misc_feature (1)..(115): Homolog of NCBI NO: 21593735 NR Description: unknown [Arabidopsis thaliana]
  misc_feature (1)..(189): Homolog of NCBI NO: 21593735 NR Description: unknown [Arabidopsis thaliana]
  misc_feature (1)..(189): Homolog of NCBI NO: 18417127 NR Description: expressed protein [Arabidopsis thaliana]
  misc_feature (1)..(189): Homolog of NCBI NO: 34394002 NR Description: unknown protein [Oryza sativa (japonica
  misc_feature (1)..(213): Homolog of NCBI NO: 18401752 NR Description: expressed protein [Arabidopsis thaliana]
MPLLPDDSETCVDGLGKSLRQRGIELTRPNETCDVVYCYCGIRLHPLSCSEAFRVNDEGRLVGDERVDRLETDCLSGSHNNADGFSPLLGCNKCLNSLYKLNPKKTSGTRNPSKEDRNRTAKMHNKDCVLMGLTWLLAKNRTAYFPTVTSVLRAVMLNHDGVPRSCALGSDGMPLAVDSSEFSNGSPTSLQYPHHLVHFLLYSVITLVLIRSW

SEQ ID NO: 45689 - protein, 114 aa, Arabidopsis thaliana
  peptide (1)..(114): Ceres Seq. ID no. 13646547
ICDILLHISSSLSLFVPLSFSITLSPLFRRCSNTRLLPFPSSSSSSSPFYHPFHLNRSQSSHSGSNHPHPQPYPLSRSNPISPAAHSINQKTSSTASSQLAAAKSSTKENVAPY

SEQ ID NO: 45690 - DNA, 1710 bp, Arabidopsis thaliana
  misc_feature (1)..(1710): Ceres Seq. ID no. 13576229
  misc_feature: MA Experiment ID: 20000214 Result: Down-regulated in Transcription
  misc_feature: MA Experiment 20000214 PARAMETER Experiment Name: At_4deg_Cold_P Parameter: Timepoint (hr) Value: 6
  misc_feature: MA Experiment ID: 20000437 Result: Down-regulated in Transcription
  misc_feature: MA Experiment 20000437 PARAMETER Experiment Name: At_Drought_P Parameter: Age (day) Value: 8
  misc_feature: MA Experiment 20000437 PARAMETER Experiment Name: At_Drought_P Parameter: Organism Value: A. thaliana
  misc_feature: MA Experiment 20000437 PARAMETER Experiment Name: At_Drought_P Parameter: Plant Line Value: WS
  misc_feature: MA Experiment 20000437 PARAMETER Experiment Name: At_Drought_P Parameter: Timepoint (hr) Value: 24
  misc_feature: MA Experiment 20000437 PARAMETER Experiment Name: At_Drought_P Parameter: Tissue Value: Whole Plant
  misc_feature: MA Experiment 20000437 PARAMETER Experiment Name: At_Drought_P Parameter: Treatment Value: Drought vs. No Drought
  misc_feature: MA Experiment ID: 20000794 Result: Down-regulated in Transcription
  misc_feature: MA Experiment 20000794 PARAMETER Experiment Name: At_Petals_P Parameter: Age (day) Value: 23-25 days
  misc_feature: MA Experiment 20000794 PARAMETER Experiment Name: At_Petals_P Parameter: Plant Line Value: WS
  misc_feature: MA Experiment 20000794 PARAMETER Experiment Name: At_Petals_P Parameter: Tissue Value: Petals vs. Whole plant
  misc_feature: MA Experiment ID: 20001905 Result: Down-regulated in Transcription
  misc_feature: MA Experiment 20001905 PARAMETER Experiment Name: At_Drought_Reproduction_P Parameter: Age (day) Value: 40
  misc_feature: MA Experiment 20001905 PARAMETER Experiment Name: At_Drought_Reproduction_P Parameter: Organism Value: A. thaliana
  misc_feature: MA Experiment 20001905 PARAMETER Experiment Name: At_Drought_Reproduction_P Parameter: Plant Line Value: WS
  misc_feature: MA Experiment 20001905 PARAMETER Experiment Name: At_Drought_Reproduction_P Parameter: Timepoint (day) Value: 10
  misc_feature: MA Experiment 20001905 PARAMETER Experiment Name: At_Drought_Reproduction_P Parameter: Tissue Value: Rosettes
  misc_feature: MA Experiment 20001905 PARAMETER Experiment Name: At_Drought_Reproduction_P Parameter: Treatment Value: Drought vs. No Drought
ggaagagcactccccagtctcagtggtgcggtgaggagagcttcgttgtcttccccattgcaattagggttttcaaaacgggtaatcgaattcggtggtgctcggctttgaaattgaggatgagatcctttccacttccttctacctgctgacaatgggcaactgcggtactagagacgaggctgccgtcttcactcctcaagctcaagcccaacagctccagaagaagcactcccgatccgtctcagatctgagcgatccatccactcctcgcttccgagacgactctcgcactcctatttcgtatgcccaagtcatcccctttactttgtttgagcttgagaccatcaccaagagcttccgcccagattatatactcggagaaggtggtttcggtaccgtctacaagggttacattgatgacaatctccgcgtcggcctcaagtctctccctgttgccgtcaaggtccttaacaaggagggactccagggtcaccgtgaatggcttacagaggtcaacttcctcggccaactccgtcatcccaacctcgtcaagcttattggttactgctgcgaggacgatcaccgattacttgtttatgagttcatgctgcgaggcagtcttgagaatcacctatttcgaaaaaccacagctccgctatcttggtctagaaggatgatgattgctcttggagctgcgaaaggccttgctttcctccacaatgctgaaagaccggttatttatagggatttcaagacttccaatatactgcttgactccgactacaccgccaagctttcagattttggcttagctaaagctggaccccagggtgatgaaacccatgtatcaactcgagttatgggtacttatggctatgctgccccagaatatgtgatgactggacacttgacggccagaagtgatgtatacagctttggagttgttcttctagagatgttgacaggaagaaaatcagtggataagacaagacctagcaaagagcagaacttggttgattgggctcggccaaagctgaatgataaaagaaaactgctgcagataattgacccaagactggagaaccaatactctgtcagggcagctcagaaggcatgcagcttggcgtattattgtcttagccagaacccgaaagctaggccattgatgagcgatgtggttgagactttggaacctttgcagtgtactggtgatgccctgatcccttgtgcaactactgcagctggagctgcatttgcaatgggaggggtgcctgattacagaatgcaccggaggtttgcaaagaacgttgggccaggtgcaatttgccggtcacccaatccaaattattcaccgggtggacctgcagcatgcagagttcggtgattagtgtcaagtgtatataatccgtttcgctgtgtctccttttccgtaatttctctcagagccaaacatctggttgctaaaaatcgtggatgcacgttgtttttgttgttgttgatgctgctgtttattgccactttactgtgttgatctgtctagagtcttgtatgattatgaatgagtgtggttcttgtttaatccgcactctgatgcagtatgcttgtagtagtcgacacttattcactccaaggtgaattttttttgtgtaagcagatatggttttctaacaaaaaaaaaaaaaaaaaaaactcgagggggggcccggt

SEQ ID NO: 45691 - protein, 410 aa, Arabidopsis thaliana
  peptide (1)..(410): Ceres Seq. ID no. 13576230
  misc_feature (69)..(346): Pfam Name: Protein kinase domain Pfam Description: Protein kinase domain
  misc_feature (69)..(346): Pfam Name: Protein kinase domain Pfam Description: Protein kinase domain
  misc_feature (17)..(118): Homolog of NCBI NO: 27436752 NR Description: Putative serine/threonine protein kinase
  misc_feature (109)..(354): Homolog of NCBI NO: 27436752 NR Description: Putative serine/threonine protein kinase
  misc_feature (1)..(358): Homolog of NCBI NO: 15241220 NR Description: protein kinase, putative [Arabidopsis thaliana]
  misc_feature (9)..(355): Homolog of NCBI NO: 19423982 NR Description: putative protein kinase [Arabidopsis thaliana]
  misc_feature (15)..(350): Homolog of NCBI NO: 30013675 NR Description: Avr9/Cf-9 rapidly elicited protein 264 [Nicotiana
  misc_feature (17)..(118): Homolog of NCBI NO: 27436752 NR Description: Putative serine/threonine protein kinase
  misc_feature (1)..(358): Homolog of NCBI NO: 15241220 NR Description: protein kinase, putative [Arabidopsis thaliana]
  misc_feature (15)..(350): Homolog of NCBI NO: 30013675 NR Description: Avr9/Cf-9 rapidly elicited protein 264 [Nicotiana
  misc_feature (1)..(410): Homolog of NCBI NO: 30679085 NR Description: protein kinase family [Arabidopsis thaliana]
  misc_feature (1)..(410): Homolog of NCBI NO: 9542860 NR Description: protein kinase-like protein [Arabidopsis thaliana]
  misc_feature (15)..(361): Homolog of NCBI NO: 15225019 NR Description: protein kinase, putative [Arabidopsis thaliana]
  misc_feature (9)..(355): Homolog of NCBI NO: 22325532 NR Description: protein kinase, putative [Arabidopsis thaliana]
  misc_feature (9)..(355): Homolog of NCBI NO: 25287636 NR Description: probable protein kinase [imported] - Arabidopsis
  misc_feature (9)..(355): Homolog of NCBI NO: 19423982 NR Description: putative protein kinase [Arabidopsis thaliana]
  misc_feature (109)..(354): Homolog of NCBI NO: 27436752 NR Description: Putative serine/threonine protein kinase
  misc_feature (9)..(355): Homolog of NCBI NO: 25287636 NR Description: probable protein kinase [imported] - Arabidopsis
  misc_feature (9)..(355): Homolog of NCBI NO: 22325532 NR Description: protein kinase, putative [Arabidopsis thaliana]
  misc_feature (15)..(361): Homolog of NCBI NO: 15225019 NR Description: protein kinase, putative [Arabidopsis thaliana]
  misc_feature (1)..(410): Homolog of NCBI NO: 9542860 NR Description: protein kinase-like protein [Arabidopsis thaliana]
  misc_feature (1)..(410): Homolog of NCBI NO: 30679085 NR Description: protein kinase family [Arabidopsis thaliana]
MGNCGTRDEAAVFTPQAQAQQLQKKHSRSVSDLSDPSTPRFRDDSRTPISYAQVIPFTLFELETITKSFRPDYILGEGGFGTVYKGYIDDNLRVGLKSLPVAVKVLNKEGLQGHREWLTEVNFLGQLRHPNLVKLIGYCCEDDHRLLVYEFMLRGSLENHLFRKTTAPLSWSRRMMIALGAAKGLAFLHNAERPVIYRDFKTSNILLDSDYTAKLSDFGLAKAGPQGDETHVSTRVMGTYGYAAPEYVMTGHLTARSDVYSFGVVLLEMLTGRKSVDKTRPSKEQNLVDWARPKLNDKRKLLQIIDPRLENQYSVRAAQKACSLAYYCLSQNPKARPLMSDVVETLEPLQCTGDALIPCATTAAGAAFAMGGVPDYRMHRRFAKNVGPGAICRSPNPNYSPGGPAACRVR

SEQ ID NO: 45692 - protein, 259 aa, Arabidopsis thaliana
  peptide (1)..(259): Ceres Seq. ID no. 13576231
  misc_feature (1)..(195): Pfam Name: Protein kinase domain Pfam Description: Protein kinase domain
  misc_feature (1)..(195): Pfam Name: Protein kinase domain Pfam Description: Protein kinase domain
  misc_feature (1)..(199): Homolog of NCBI NO: 22773239 NR Description: Putative protein kinase [Oryza sativa (japonica
  misc_feature (1)..(203): Homolog of NCBI NO: 27436752 NR Description: Putative serine/threonine protein kinase
  misc_feature (1)..(207): Homolog of NCBI NO: 15241220 NR Description: protein kinase, putative [Arabidopsis thaliana]
  misc_feature (1)..(204): Homolog of NCBI NO: 19423982 NR Description: putative protein kinase [Arabidopsis thaliana]
  misc_feature (1)..(199): Homolog of NCBI NO: 30013675 NR Description: Avr9/Cf-9 rapidly elicited protein 264 [Nicotiana
  misc_feature (1)..(199): Homolog of NCBI NO: 22773239 NR Description: Putative protein kinase [Oryza sativa (japonica
  misc_feature (1)..(207): Homolog of NCBI NO: 15241220 NR Description: protein kinase, putative [Arabidopsis thaliana]
  misc_feature (1)..(199): Homolog of NCBI NO: 30013675 NR Description: Avr9/Cf-9 rapidly elicited protein 264 [Nicotiana
  misc_feature (1)..(259): Homolog of NCBI NO: 30679085 NR Description: protein kinase family [Arabidopsis thaliana]
  misc_feature (1)..(259): Homolog of NCBI NO: 9542860 NR Description: protein kinase-like protein [Arabidopsis thaliana]
  misc_feature (1)..(210): Homolog of NCBI NO: 15225019 NR Description: protein kinase, putative [Arabidopsis thaliana]
  misc_feature (1)..(204): Homolog of NCBI NO: 22325532 NR Description: protein kinase, putative [Arabidopsis thaliana]
  misc_feature (1)..(204): Homolog of NCBI NO: 25287636 NR Description: probable protein kinase [imported] - Arabidopsis
  misc_feature (1)..(204): Homolog of NCBI NO: 19423982 NR Description: putative protein kinase [Arabidopsis thaliana]
  misc_feature (1)..(203): Homolog of NCBI NO: 27436752 NR Description: Putative serine/threonine protein kinase
  misc_feature (1)..(204): Homolog of NCBI NO: 25287636 NR Description: probable protein kinase [imported] - Arabidopsis
  misc_feature (1)..(204): Homolog of NCBI NO: 22325532 NR Description: protein kinase, putative [Arabidopsis thaliana]
  misc_feature (1)..(210): Homolog of NCBI NO: 15225019 NR Description: protein kinase, putative [Arabidopsis thaliana]
  misc_feature (1)..(259): Homolog of NCBI NO: 9542860 NR Description: protein kinase-like protein [Arabidopsis thaliana]
  misc_feature (1)..(259): Homolog of NCBI NO: 30679085 NR Description: protein kinase family [Arabidopsis thaliana]
MLRGSLENHLFRKTTAPLSWSRRMMIALGAAKGLAFLHNAERPVIYRDFKTSNILLDSDYTAKLSDFGLAKAGPQGDETHVSTRVMGTYGYAAPEYVMTGHLTARSDVYSFGVVLLEMLTGRKSVDKTRPSKEQNLVDWARPKLNDKRKLLQIIDPRLENQYSVRAAQKACSLAYYCLSQNPKARPLMSDVVETLEPLQCTGDALIPCATTAAGAAFAMGGVPDYRMHRRFAKNVGPGAICRSPNPNYSPGGPAACRVR

SEQ ID NO: 45693 - protein, 236 aa, Arabidopsis thaliana
  peptide (1)..(236): Ceres Seq. ID no. 13576232
  misc_feature (1)..(172): Pfam Name: Protein kinase domain Pfam Description: Protein kinase domain
  misc_feature (1)..(172): Pfam Name: Protein kinase domain Pfam Description: Protein kinase domain
  misc_feature (1)..(176): Homolog of NCBI NO: 22773239 NR Description: Putative protein kinase [Oryza sativa (japonica
  misc_feature (1)..(180): Homolog of NCBI NO: 27436752 NR Description: Putative serine/threonine protein kinase
  misc_feature (1)..(184): Homolog of NCBI NO: 15241220 NR Description: protein kinase, putative [Arabidopsis thaliana]
  misc_feature (1)..(181): Homolog of NCBI NO: 19423982 NR Description: putative protein kinase [Arabidopsis thaliana]
  misc_feature (1)..(176): Homolog of NCBI NO: 30013675 NR Description: Avr9/Cf-9 rapidly elicited protein 264 [Nicotiana
  misc_feature (1)..(176): Homolog of NCBI NO: 22773239 NR Description: Putative protein kinase [Oryza sativa (japonica
  misc_feature (1)..(184): Homolog of NCBI NO: 15241220 NR Description: protein kinase, putative [Arabidopsis thaliana]
  misc_feature (1)..(176): Homolog of NCBI NO: 30013675 NR Description: Avr9/Cf-9 rapidly elicited protein 264 [Nicotiana
  misc_feature (1)..(236): Homolog of NCBI NO: 30679085 NR Description: protein kinase family [Arabidopsis thaliana]
  misc_feature (1)..(236): Homolog of NCBI NO: 9542860 NR Description: protein kinase-like protein [Arabidopsis thaliana]
  misc_feature (1)..(187): Homolog of NCBI NO: 15225019 NR Description: protein kinase, putative [Arabidopsis thaliana]
  misc_feature (1)..(181): Homolog of NCBI NO: 22325532 NR Description: protein kinase, putative [Arabidopsis thaliana]
  misc_feature (1)..(181): Homolog of NCBI NO: 25287636 NR Description: probable protein kinase [imported] - Arabidopsis
  misc_feature (1)..(181): Homolog of NCBI NO: 19423982 NR Description: putative protein kinase [Arabidopsis thaliana]
  misc_feature (1)..(180): Homolog of NCBI NO: 27436752 NR Description: Putative serine/threonine protein kinase
  misc_feature (1)..(181): Homolog of NCBI NO: 25287636 NR Description: probable protein kinase [imported] - Arabidopsis
  misc_feature (1)..(181): Homolog of NCBI NO: 22325532 NR Description: protein kinase, putative [Arabidopsis thaliana]
  misc_feature (1)..(187): Homolog of NCBI NO: 15225019 NR Description: protein kinase, putative [Arabidopsis thaliana]
  misc_feature (1)..(236): Homolog of NCBI NO: 9542860 NR Description: protein kinase-like protein [Arabidopsis thaliana]
  misc_feature (1)..(236): Homolog of NCBI NO: 30679085 NR Description: protein kinase family [Arabidopsis thaliana]
MMIALGAAKGLAFLHNAERPVIYRDFKTSNILLDSDYTAKLSDFGLAKAGPQGDETHVSTRVMGTYGYAAPEYVMTGHLTARSDVYSFGVVLLEMLTGRKSVDKTRPSKEQNLVDWARPKLNDKRKLLQIIDPRLENQYSVRAAQKACSLAYYCLSQNPKARPLMSDVVETLEPLQCTGDALIPCATTAAGAAFAMGGVPDYRMHRRFAKNVGPGAICRSPNPNYSPGGPAACRVR

SEQ ID NO: 45694 - DNA, 2496 bp, Arabidopsis thaliana; identical to SEQ ID NO: 30796
  misc_feature (1)..(2496): Ceres Seq. ID no. 12561218
  misc_feature: MA Experiment ID: 108434 Result: Down-regulated in Transcription
  misc_feature: MA Experiment 108434 PARAMETER Experiment Name: At_Root_Tips_cDNA_P Parameter: Tissue Value: Root Tips
  misc_feature: MA Experiment ID: 108585 Result: Up-regulated in Transcription
  misc_feature: MA Experiment 108585 PARAMETER Experiment Name: At_5mM_NaNP_cDNA_P Parameter: Timepoint (hr) Value: 6
  misc_feature: MA Experiment 108585 PARAMETER Experiment Name: At_5mM_NaNP_cDNA_P Parameter: Tissue Value: Aerial
  misc_feature: MA Experiment 108585 PARAMETER Experiment Name: At_5mM_NaNP_cDNA_P Parameter: Treatment Value: null
  misc_feature: MA Experiment ID: 108668 Result: Up-regulated in Transcription
  misc_feature: MA Experiment 108668 PARAMETER Experiment Name: At_2mM_SA_cDNA_P Parameter: Plant Line Value: WS
  misc_feature: MA Experiment 108668 PARAMETER Experiment Name: At_2mM_SA_cDNA_P Parameter: Timepoint (hr) Value: 6
  misc_feature: MA Experiment 108668 PARAMETER Experiment Name: At_2mM_SA_cDNA_P Parameter: Treatment Value: 2mM SA vs. No Treatment
  misc_feature: MA Experiment ID: 20000182 Result: Up-regulated in Transcription
  misc_feature: MA Experiment 20000182 PARAMETER Experiment Name: At_2mM_SA_P Parameter: Age (day) Value: 14
  misc_feature: MA Experiment 20000182 PARAMETER Experiment Name: At_2mM_SA_P Parameter: Organism Value: A. thaliana
  misc_feature: MA Experiment 20000182 PARAMETER Experiment Name: At_2mM_SA_P Parameter: Plant Line Value: WS
  misc_feature: MA Experiment 20000182 PARAMETER Experiment Name: At_2mM_SA_P Parameter: Timepoint (hr) Value: 6
  misc_feature: MA Experiment 20000182 PARAMETER Experiment Name: At_2mM_SA_P Parameter: Tissue Value: Aerial
  misc_feature: MA Experiment 20000182 PARAMETER Experiment Name: At_2mM_SA_P Parameter: Treatment Value: 2mM SA vs. No Treatment
  misc_feature: MA Experiment ID: 20000234 Result: Down-regulated in Transcription
  misc_feature: MA Experiment 20000234 PARAMETER Experiment Name: At_Siliques_P Parameter: Age (day) Value: 21
  misc_feature: MA Experiment 20000234 PARAMETER Experiment Name: At_Siliques_P Parameter: Organism Value: A. thaliana
  misc_feature: MA Experiment 20000234 PARAMETER Experiment Name: At_Siliques_P Parameter: Plant Line Value: WS
  misc_feature: MA Experiment 20000234 PARAMETER Experiment Name: At_Siliques_P Parameter: Tissue Value: Less Than 5mm Siliques vs. Whole Plant
  misc_feature: MA Experiment ID: 20000235 Result: Down-regulated in Transcription
  misc_feature: MA Experiment 20000235 PARAMETER Experiment Name: At_Siliques_P Parameter: Age (day) Value: 21
  misc_feature: MA Experiment 20000235 PARAMETER Experiment Name: At_Siliques_P Parameter: Organism Value: A. thaliana
  misc_feature: MA Experiment 20000235 PARAMETER Experiment Name: At_Siliques_P Parameter: Plant Line Value: WS
  misc_feature: MA Experiment 20000235 PARAMETER Experiment Name: At_Siliques_P Parameter: Tissue Value: 5-10mm Siliques vs. Whole Plant
  misc_feature: MA Experiment ID: 20000265 Result: Down-regulated in Transcription
  misc_feature: MA Experiment 20000265 PARAMETER Experiment Name: At_Open_Flower_P Parameter: Age (day) Value: 21
  misc_feature: MA Experiment 20000265 PARAMETER Experiment Name: At_Open_Flower_P Parameter: Plant Line Value: WS
  misc_feature: MA Experiment 20000265 PARAMETER Experiment Name: At_Open_Flower_P Parameter: Tissue Value: Closed Flower vs. Whole Plant

SEQ ID NO: 45695 - protein, 615 aa, Arabidopsis thaliana; identical to SEQ ID NO: 30797
  peptide (1)..(615): Ceres Seq. ID no. 12561219
  misc_feature (11)..(615): Homolog of NCBI NO: 13897310 NR Description: SERK2 protein [Zea mays]
  misc_feature (1)..(615): Homolog of NCBI NO: 15081616 NR Description: At1g71830/F14O23_24 [Arabidopsis thaliana]
  misc_feature (1)..(615): Homolog of NCBI NO: 15217584 NR Description: protein kinase, putative
  misc_feature (145)..(177): Homolog of NCBI NO: 7488244 NR Description: protein kinase homolog F17M5.190 - Arabidopsis
  misc_feature (9)..(615): Homolog of NCBI NO: 14573457 NR Description: somatic embryogenesis receptor-like kinase 2
  misc_feature (9)..(615): Homolog of NCBI NO: 24935324 NR Description: somatic embryogenesis receptor kinase 1 [Medicago
  misc_feature (9)..(615): Homolog of NCBI NO: 15218543 NR Description: somatic embryogenesis receptor-like kinase,
  misc_feature (1)..(615): Homolog of NCBI NO: 30678986 NR Description: leucine-rich repeat protein kinase family
  misc_feature (29)..(109): Homolog of NCBI NO: 7488244 NR Description: protein kinase homolog F17M5.190 - Arabidopsis
  misc_feature (171)..(615): Homolog of NCBI NO: 7488244 NR Description: protein kinase homolog F17M5.190 - Arabidopsis
  misc_feature (11)..(615): Homolog of NCBI NO: 13897310 NR Description: SERK2 protein [Zea mays]
  misc_feature (1)..(615): Homolog of NCBI NO: 15081616 NR Description: At1g71830/F14O23_24 [Arabidopsis thaliana]
  misc_feature (1)..(615): Homolog of NCBI NO: 15217584 NR Description: protein kinase, putative
  misc_feature (145)..(177): Homolog of NCBI NO: 7488244 NR Description: protein kinase homolog F17M5.190 - Arabidopsis
  misc_feature (9)..(615): Homolog of NCBI NO: 14573457 NR Description: somatic embryogenesis receptor-like kinase 2
  misc_feature (9)..(615): Homolog of NCBI NO: 24935324 NR Description: somatic embryogenesis receptor kinase 1 [Medicago
  misc_feature (9)..(615): Homolog of NCBI NO: 15218543 NR Description: somatic embryogenesis receptor-like kinase,
  misc_feature (1)..(615): Homolog of NCBI NO: 30678986 NR Description: leucine-rich repeat protein kinase family
  misc_feature (29)..(109): Homolog of NCBI NO: 7488244 NR Description: protein kinase homolog F17M5.190 - Arabidopsis
  misc_feature (171)..(615): Homolog of NCBI NO: 7488244 NR Description: protein kinase homolog F17M5.190 - Arabidopsis

SEQ ID NO: 45696 - protein, 610 aa, Arabidopsis thaliana; identical to SEQ ID NO: 30798
  peptide (1)..(610): Ceres Seq. ID no. 12561220
  misc_feature (6)..(610): Homolog of NCBI NO: 13897310 NR Description: SERK2 protein [Zea mays]
  misc_feature (1)..(610): Homolog of NCBI NO: 15081616 NR Description: At1g71830/F14O23_24 [Arabidopsis thaliana]
  misc_feature (1)..(610): Homolog of NCBI NO: 15217584 NR Description: protein kinase, putative
  misc_feature (140)..(172): Homolog of NCBI NO: 7488244 NR Description: protein kinase homolog F17M5.190 - Arabidopsis
  misc_feature (4)..(610): Homolog of NCBI NO: 14573457 NR Description: somatic embryogenesis receptor-like kinase 2
  misc_feature (4)..(610): Homolog of NCBI NO: 24935324 NR Description: somatic embryogenesis receptor kinase 1 [Medicago
  misc_feature (4)..(610): Homolog of NCBI NO: 15218543 NR Description: somatic embryogenesis receptor-like kinase,
  misc_feature (1)..(610): Homolog of NCBI NO: 30678986 NR Description: leucine-rich repeat protein kinase family
  misc_feature (24)..(104): Homolog of NCBI NO: 7488244 NR Description: protein kinase homolog F17M5.190 - Arabidopsis
  misc_feature (166)..(610): Homolog of NCBI NO: 7488244 NR Description: protein kinase homolog F17M5.190 - Arabidopsis
  misc_feature (6)..(610): Homolog of NCBI NO: 13897310 NR Description: SERK2 protein [Zea mays]
  misc_feature (1)..(610): Homolog of NCBI NO: 15081616 NR Description: At1g71830/F14O23_24 [Arabidopsis thaliana]
  misc_feature (1)..(610): Homolog of NCBI NO: 15217584 NR Description: protein kinase, putative
  misc_feature (140)..(172): Homolog of NCBI NO: 7488244 NR Description: protein kinase homolog F17M5.190 - Arabidopsis
  misc_feature (4)..(610): Homolog of NCBI NO: 14573457 NR Description: somatic embryogenesis receptor-like kinase 2
  misc_feature (4)..(610): Homolog of NCBI NO: 24935324 NR Description: somatic embryogenesis receptor kinase 1 [Medicago
  misc_feature (4)..(610): Homolog of NCBI NO: 15218543 NR Description: somatic embryogenesis receptor-like kinase,
  misc_feature (1)..(610): Homolog of NCBI NO: 30678986 NR Description: leucine-rich repeat protein kinase family
  misc_feature (24)..(104): Homolog of NCBI NO: 7488244 NR Description: protein kinase homolog F17M5.190 - Arabidopsis
  misc_feature (166)..(610): Homolog of NCBI NO: 7488244 NR Description: protein kinase homolog F17M5.190 - Arabidopsis

SEQ ID NO: 45697 - protein, 530 aa, Arabidopsis thaliana; identical to SEQ ID NO: 30799
  peptide (1)..(530): Ceres Seq. ID no. 12561221
  misc_feature (1)..(530): Homolog of NCBI NO: 13897310 NR Description: SERK2 protein [Zea mays]
  misc_feature (1)..(530): Homolog of NCBI NO: 15081616 NR Description: At1g71830/F14O23_24 [Arabidopsis thaliana]
  misc_feature (1)..(530): Homolog of NCBI NO: 15217584 NR Description: protein kinase, putative
  misc_feature (60)..(92): Homolog of NCBI NO: 7488244 NR Description: protein kinase homolog F17M5.190 - Arabidopsis
  misc_feature (1)..(530): Homolog of NCBI NO: 14573457 NR Description: somatic embryogenesis receptor-like kinase 2
  misc_feature (1)..(530): Homolog of NCBI NO: 24935324 NR Description: somatic embryogenesis receptor kinase 1 [Medicago
  misc_feature (1)..(530): Homolog of NCBI NO: 15218543 NR Description: somatic embryogenesis receptor-like kinase,
  misc_feature (1)..(530): Homolog of NCBI NO: 30678986 NR Description: leucine-rich repeat protein kinase family
  misc_feature (1)..(24): Homolog of NCBI NO: 7488244 NR Description: protein kinase homolog F17M5.190 - Arabidopsis
  misc_feature (86)..(530): Homolog of NCBI NO: 7488244 NR Description: protein kinase homolog F17M5.190 - Arabidopsis
  misc_feature (1)..(530): Homolog of NCBI NO: 13897310 NR Description: SERK2 protein [Zea mays]
  misc_feature (1)..(530): Homolog of NCBI NO: 15081616 NR Description: At1g71830/F14O23_24 [Arabidopsis thaliana]
  misc_feature (1)..(530): Homolog of NCBI NO: 15217584 NR Description: protein kinase, putative
  misc_feature (60)..(92): Homolog of NCBI NO: 7488244 NR Description: protein kinase homolog F17M5.190 - Arabidopsis
  misc_feature (1)..(530): Homolog of NCBI NO: 14573457 NR Description: somatic embryogenesis receptor-like kinase 2
  misc_feature (1)..(530): Homolog of NCBI NO: 24935324 NR Description: somatic embryogenesis receptor kinase 1 [Medicago
  misc_feature (1)..(530): Homolog of NCBI NO: 15218543 NR Description: somatic embryogenesis receptor-like kinase,
  misc_feature (1)..(530): Homolog of NCBI NO: 30678986 NR Description: leucine-rich repeat protein kinase family
  misc_feature (1)..(24): Homolog of NCBI NO: 7488244 NR Description: protein kinase homolog F17M5.190 - Arabidopsis
  misc_feature (86)..(530): Homolog of NCBI NO: 7488244 NR Description: protein kinase homolog F17M5.190 - Arabidopsis

SEQ ID NO: 45698 - DNA, 1840 bp, Arabidopsis thaliana
  misc_feature (1)..(1840): Ceres Seq. ID no. 15174451
  misc_feature: MA Experiment ID: 20000184 Result: Down-regulated in Transcription
  misc_feature: MA Experiment 20000184 PARAMETER Experiment Name: At_Shoots__P Parameter: Age (day) Value: 7
  misc_feature: MA Experiment 20000184 PARAMETER Experiment Name: At_Shoots__P Parameter: Tissue Value: Shoots vs. Whole Plant
  misc_feature: MA Experiment ID: 20000495 Result: Up-regulated in Transcription
  misc_feature: MA Experiment 20000495 PARAMETER Experiment Name: At_Guard_Cells_P Parameter: Harvest Date Value: 8/2/2002
  misc_feature: MA Experiment 20000495 PARAMETER Experiment Name: At_Guard_Cells_P Parameter: Organism Value: A. thaliana
  misc_feature: MA Experiment 20000495 PARAMETER Experiment Name: At_Guard_Cells_P Parameter: Tissue Value: Guard Cells vs. Leaves
  misc_feature: MA Experiment ID: 20000794 Result: Up-regulated in Transcription
  misc_feature: MA Experiment 20000794 PARAMETER Experiment Name: At_Petals_P Parameter: Age (day) Value: 23-25 days
  misc_feature: MA Experiment 20000794 PARAMETER Experiment Name: At_Petals_P Parameter: Plant Line Value: WS
  misc_feature: MA Experiment 20000794 PARAMETER Experiment Name: At_Petals_P Parameter: Tissue Value: Petals vs. Whole plant
gattcatttcaaaatgatactggaatggaagataatgcaagccattctacaactaatcagactgatgaaagcgaaaatcagtttccaaacgtggattttgcaagcccagcaaaactgaagcggcagattttacgtcaggaaaggagaggtcaacgaactttagagctgatccgacaagaaaaggaaactgatgagcagatgcaagaagcagccattcagaagtcaatgagctttgaaaactcagtcatagggaaatacagtatatggaggagagactatgagagcccaaatgctgatgctatcttgaagcttatgagagaccagatcataatggcaaaagcatatgcaaatattgccaaatcaaaaaatgtaaccaatctgtacgttttcttgatgcagcagtgtggagaaaataaacgtgttataggtaaagcaacctctgatgctgaccttccttcaagcgctcttgatcaagcaaaagccatgggccatgcactctctcttgcaaaagacgagttatatgactgccatgaacttgcaaaaaagttccgggccatccttcagtccactgaacgcaaagtagatggactgaagaaaaagggaaccttcttaattcagctagctgccaaaacatttcccaagccattgcattgcctgagtctgcagctagcggcagactattttattctaggtttcaatgaagaggatgcagtgaaagaggatgtcagtcaaaagaagcttgaagatccttcgctctatcactatgcgatcttttcggataacgttctggctacatcagtggtggtgaactccactgtcttgaatgcaaaggaaccgcagaggcatgtgttccatatagtaactgacaaactgaattttggtgcaatgaagatgtggtttcgcatcaatgctcctgctgatgcgacgattcaagttgaaaacataaatgatttcaagtggctgaactcctcttactgctctgttctacggcagcttgaatctgcaaggctgaaagaatactatttcaaagcaaatcatccttcatcaatctcagctggcgcagataatctaaagtaccgcaacccaaagtatctatcgatgctgaatcatctcagattctaccttcctgaggtttatccgaagctggagaagattctgtttctagacgatgacattgtggtgcagaaggacctggcaccactatgggaaatagacatgcaaggaaaagtgaatggtgcggtggagacgtgcaaggagagcttccacagatttgacaagtacctcaacttctcaaatccaaagatttcagagaattttgacgctggtgcttgtgggtgggcatttgggatgaatatgtttgacctgaaagagtggaggaaacggaacattacagggatatatcactattggcaagacttgaatgaagacagaacactgtggaagctgggatcgttgccaccggggctgataacattttacaacctgacgaatgcaatggagaggagctggcacgtactagggctgggatatgacccagcgctaaaccaaacagcaatagagaatgcagcggtagtgcattacaatgggaactacaagccatggctgggtttagcattcgccaagtacaaaccgtactggtccaagtacgttgagtacgacaacccttatctccgacggtgcgacatcaatgaatgaatgaagagatggtggaggtagtatacatgatgaagcactcaaaggaaactaaataagtaaaaattgttttcagtttaccataatactaggaatcagcagacaatcacacatgacgattaattaaatagaatctcttgtttttctc

SEQ ID NO: 45699 - protein, 564 aa, Arabidopsis thaliana
  peptide (1)..(564): Ceres Seq. ID no. 15174452
  misc_feature (100)..(563): Homolog of NCBI NO: 18399484 NR Description: glycosyltransferase family 8 [Arabidopsis
  misc_feature (51)..(563): Homolog of NCBI NO: 38423965 NR Description: putative glycosyltransferase
  misc_feature (99)..(563): Homolog of NCBI NO: 18422837 NR Description: glycosyltransferase family 8 [Arabidopsis
  misc_feature (99)..(563): Homolog of NCBI NO: 10177914 NR Description: emb|CAB71043.1~gene_id:MCA23.10~strong similarity
  misc_feature (11)..(501): Homolog of NCBI NO: 14517362 NR Description: AT3g61130/T20K12_30 [Arabidopsis thaliana]
  misc_feature (43)..(564): Homolog of NCBI NO: 37533460 NR Description: hypothetical protein [Oryza sativa (japonica
  misc_feature (35)..(564): Homolog of NCBI NO: 7271113 NR Description: 68 kDa protein [Cicer arietinum]
  misc_feature (11)..(564): Homolog of NCBI NO: 15233046 NR Description: glycosyltransferase family 8 [Arabidopsis
  misc_feature (1)..(564): Homolog of NCBI NO: 30691875 NR Description: glycosyltransferase family 8 [Arabidopsis
  misc_feature (1)..(564): Homolog of NCBI NO: 7485958 NR Description: hypothetical protein F22I13.40 - Arabidopsis
DSFQNDTGMEDNASHSTTNQTDESENQFPNVDFASPAKLKRQILRQERRGQRTLELIRQEKETDEQMQEAAIQKSMSFENSVIGKYSIWRRDYESPNADAILKLMRDQIIMAKAYANIAKSKNVTNLYVFLMQQCGENKRVIGKATSDADLPSSALDQAKAMGHALSLAKDELYDCHELAKKFRAILQSTERKVDGLKKKGTFLIQLAAKTFPKPLHCLSLQLAADYFILGFNEEDAVKEDVSQKKLEDPSLYHYAIFSDNVLATSVVVNSTVLNAKEPQRHVFHIVTDKLNFGAMKMWFRINAPADATIQVENINDFKWLNSSYCSVLRQLESARLKEYYFKANHPSSISAGADNLKYRNPKYLSMLNHLRFYLPEVYPKLEKILFLDDDIVVQKDLAPLWEIDMQGKVNGAVETCKESFHRFDKYLNFSNPKISENFDAGACGWAFGMNMFDLKEWRKRNITGIYHYWQDLNEDRTLWKLGSLPPGLITFYNLTNAMERSWHVLGLGYDPALNQTAIENAAVVHYNGNYKPWLGLAFAKYKPYWSKYVEYDNPYLRRCDINE

SEQ ID NO: 45700 - protein, 556 aa, Arabidopsis thaliana
  peptide (1)..(556): Ceres Seq. ID no. 15174453
  misc_feature (92)..(555): Homolog of NCBI NO: 18399484 NR Description: glycosyltransferase family 8 [Arabidopsis
  misc_feature (43)..(555): Homolog of NCBI NO: 38423965 NR Description: putative glycosyltransferase
  misc_feature (91)..(555): Homolog of NCBI NO: 18422837 NR Description: glycosyltransferase family 8 [Arabidopsis
  misc_feature (91)..(555): Homolog of NCBI NO: 10177914 NR Description: emb|CAB71043.1~gene_id:MCA23.10~strong similarity
  misc_feature (3)..(493): Homolog of NCBI NO: 14517362 NR Description: AT3g61130/T20K12_30 [Arabidopsis thaliana]
  misc_feature (35)..(556): Homolog of NCBI NO: 37533460 NR Description: hypothetical protein [Oryza sativa (japonica
  misc_feature (27)..(556): Homolog of NCBI NO: 7271113 NR Description: 68 kDa protein [Cicer arietinum]
  misc_feature (3)..(556): Homolog of NCBI NO: 15233046 NR Description: glycosyltransferase family 8 [Arabidopsis
  misc_feature (1)..(556): Homolog of NCBI NO: 30691875 NR Description: glycosyltransferase family 8 [Arabidopsis
  misc_feature (1)..(556): Homolog of NCBI NO: 7485958 NR Description: hypothetical protein F22I13.40 - Arabidopsis
MEDNASHSTTNQTDESENQFPNVDFASPAKLKRQILRQERRGQRTLELIRQEKETDEQMQEAAIQKSMSFENSVIGKYSIWRRDYESPNADAILKLMRDQIIMAKAYANIAKSKNVTNLYVFLMQQCGENKRVIGKATSDADLPSSALDQAKAMGHALSLAKDELYDCHELAKKFRAILQSTERKVDGLKKKGTFLIQLAAKTFPKPLHCLSLQLAADYFILGFNEEDAVKEDVSQKKLEDPSLYHYAIFSDNVLATSVVVNSTVLNAKEPQRHVFHIVTDKLNFGAMKMWFRINAPADATIQVENINDFKWLNSSYCSVLRQLESARLKEYYFKANHPSSISAGADNLKYRNPKYLSMLNHLRFYLPEVYPKLEKILFLDDDIVVQKDLAPLWEIDMQGKVNGAVETCKESFHRFDKYLNFSNPKISENFDAGACGWAFGMNMFDLKEWRKRNITGIYHYWQDLNEDRTLWKLGSLPPGLITFYNLTNAMERSWHVLGLGYDPALNQTAIENAAVVHYNGNYKPWLGLAFAKYKPYWSKYVEYDNPYLRRCDINE

SEQ ID NO: 45701 - protein, 498 aa, Arabidopsis thaliana
  peptide (1)..(498): Ceres Seq. ID no. 15174454
  misc_feature (34)..(497): Homolog of NCBI NO: 18399484 NR Description: glycosyltransferase family 8 [Arabidopsis
  misc_feature (1)..(497): Homolog of NCBI NO: 38423965 NR Description: putative glycosyltransferase
  misc_feature (33)..(497): Homolog of NCBI NO: 18422837 NR Description: glycosyltransferase family 8 [Arabidopsis
  misc_feature (33)..(497): Homolog of NCBI NO: 10177914 NR Description: emb|CAB71043.1~gene_id:MCA23.10~strong similarity
  misc_feature (1)..(435): Homolog of NCBI NO: 14517362 NR Description: AT3g61130/T20K12_30 [Arabidopsis thaliana]
  misc_feature (1)..(498): Homolog of NCBI NO: 37533460 NR Description: hypothetical protein [Oryza sativa (japonica
  misc_feature (1)..(498): Homolog of NCBI NO: 7271113 NR Description: 68 kDa protein [Cicer arietinum]
  misc_feature (1)..(498): Homolog of NCBI NO: 15233046 NR Description: glycosyltransferase family 8 [Arabidopsis
  misc_feature (1)..(498): Homolog of NCBI NO: 30691875 NR Description: glycosyltransferase family 8 [Arabidopsis
  misc_feature (1)..(498): Homolog of NCBI NO: 7485958 NR Description: hypothetical protein F22I13.40 - Arabidopsis
MQEAAIQKSMSFENSVIGKYSIWRRDYESPNADAILKLMRDQIIMAKAYANIAKSKNVTNLYVFLMQQCGENKRVIGKATSDADLPSSALDQAKAMGHALSLAKDELYDCHELAKKFRAILQSTERKVDGLKKKGTFLIQLAAKTFPKPLHCLSLQLAADYFILGFNEEDAVKEDVSQKKLEDPSLYHYAIFSDNVLATSVVVNSTVLNAKEPQRHVFHIVTDKLNFGAMKMWFRINAPADATIQVENINDFKWLNSSYCSVLRQLESARLKEYYFKANHPSSISAGADNLKYRNPKYLSMLNHLRFYLPEVYPKLEKILFLDDDIVVQKDLAPLWEIDMQGKVNGAVETCKESFHRFDKYLNFSNPKISENFDAGACGWAFGMNMFDLKEWRKRNITGIYHYWQDLNEDRTLWKLGSLPPGLITFYNLTNAMERSWHVLGLGYDPALNQTAIENAAVVHYNGNYKPWLGLAFAKYKPYWSKYVEYDNPYLRRCDINE

SEQ ID NO: 45702 - DNA, 2076 bp, Arabidopsis thaliana
  misc_feature (1)..(2076): Ceres Seq. ID no. 13576225
  misc_feature: MA Experiment ID: 20000315 Result: Down-regulated in Transcription
  misc_feature: MA Experiment 20000315 PARAMETER Experiment Name: At_14day_Shoots-Roots_Sub_P Parameter: Age (day) Value: 14
  misc_feature: MA Experiment 20000315 PARAMETER Experiment Name: At_14day_Shoots-Roots_Sub_P Parameter: Organism Value: A. thaliana
  misc_feature: MA Experiment 20000315 PARAMETER Experiment Name: At_14day_Shoots-Roots_Sub_P Parameter: Plant Line Value: WS
  misc_feature: MA Experiment 20000315 PARAMETER Experiment Name: At_14day_Shoots-Roots_Sub_P Parameter: Tissue Value: Shoots vs. Whole Plant
  misc_feature: MA Experiment ID: 20000327 Result: Down-regulated in Transcription
  misc_feature: MA Experiment 20000327 PARAMETER Experiment Name: At_42deg_Heat_Sub_P Parameter: Age (day) Value: 14
  misc_feature: MA Experiment 20000327 PARAMETER Experiment Name: At_42deg_Heat_Sub_P Parameter: Organism Value: A. thaliana
  misc_feature: MA Experiment 20000327 PARAMETER Experiment Name: At_42deg_Heat_Sub_P Parameter: Plant Line Value: WS
  misc_feature: MA Experiment 20000327 PARAMETER Experiment Name: At_42deg_Heat_Sub_P Parameter: Temperature (deg C) Value: 42 vs. 22
  misc_feature: MA Experiment 20000327 PARAMETER Experiment Name: At_42deg_Heat_Sub_P Parameter: Timepoint (hr) Value: 1
  misc_feature: MA Experiment 20000327 PARAMETER Experiment Name: At_42deg_Heat_Sub_P Parameter: Tissue Value: Aerial
atggctcagtcgtcgttggtggcggcggcggggagaagcggaagggttatcggcgattatgcggtgggtcgacaaatcgggtcggggtcgttttccgtggtttgggaagggaggcatcttgttcatggcaccgtcgttgctatcaaggagatcgctatggctcggcttaataagaagttgcaagagagtctcatgtcggagattatcatcttaaggaagattaatcatcctaacatcattcgctttatcgacatgatcgaggctcccgggaagataaatttggtgttggagtactgtaaaggtggtgatctgtctatgtatattcacaaacatggaagtgttcctgaagctactgctaagcattttatgctgcagttagcggctggcttacaagttcttcgtgacaataatatcattcaccgcgatttaaagcctcaggttctttcgttcttgaaacagaatcttcttctatccacagatgataatgatgcagctctgaagattgccgattttggatttgcaagatcgttgcagcctaggggtttggcagaaactttatgtggttcaccactgtatatggccccagagattatgcagcttcaaaaatatgatgcaaagttgctccagaacattataagatcaactgaattacattttccagcagactgtagagatttgagtaccgactgtaaagatctatgccagaagctactgcgtcgtaatccagtggaacgtttgacgtttgaagagttttttcatcatcctttcctttcagacaaacaatcatatgatttcacaaggagtagattagattcacgaactatgaacgattttcattcatcaggaagcagtccctcaagaaatatagaagaaatttctcaagaagacgggttgccgttctttttagatgatgattctagtggacctgagggaagcccttcatcttttaaacatacttccccgatgaagtcatcttacggatttagtgttgaaagaagggaggcagcattaagtcctttgaaaaacatggatctttcttccagatatagtagagtcagtcatagagcagaaaccaataatttcaagtttgagggccatagattatcagatagaagccaattcaaaccgtcaagcttacctgattccagatcatttagtacccaaggaagaggggattctccagactcaatggatcaagattatgttctgatatctggaccaccggttgatataccatcatcttcatctggttctccgaagcctttcaattacccattcaaatcacattctcctcctgtagagttcatcaagagaaatgtaactaatttaacggctcctatgccaatagctagtgctactggcaacaaccttagtcgatttggaagcttggagagtcagaattgtatcccgggtacttcccatgggtctctggatcttgtagatgcttttgaacagccatcaactaacagcttgacaagaatccggtctttgcaaaagtgtgcagctgcaatagcagaattggttcatgaaaggggtgaaaatggtaagcatttagaagctttctcgatccaactggtgattcttgcaatttggaatcaagcactacacatctgtcatactcaggcagtctcgggtatagaaggaagcctgctccaagacattaacagagtaggaagaaatatcagccacggaggatcagagaagttattgcctcagattcagaaagaatttgtccaggaagtggagcgtgctgaagaacttgccaagtttgttgaatctgataatgcaaagatgccggatgcaatggagatgatacttcaagcagctcttgctcttggcataagtggaggagtagatgaagtgatgggagacgcagagaacgcaggaaacctctactcaaaagcggtgcgtttgttagtcttccttgcagtggaggcgcagacgctgattctcaatccacctttaacactcacaaactcagtaaggtatcgactcagaacatatattgactcactcataaccagattgaaacatctgcaatcacatagaagaacttcatatcctcagaagcaatga

SEQ ID NO: 45703 - protein, 691 aa, Arabidopsis thaliana
  peptide (1)..(691): Ceres Seq. ID no. 13576226
  misc_feature (20)..(257): Pfam Name: Protein kinase domain Pfam Description: Protein kinase domain
  misc_feature (272)..(691): Homolog of NCBI NO: 25408568 NR Description: hypothetical protein At2g37850 [imported] -
  misc_feature (272)..(691): Homolog of NCBI NO: 30687278 NR Description: protein kinase family [Arabidopsis thaliana]
  misc_feature (174)..(206): Homolog of NCBI NO: 30687278 NR Description: protein kinase family [Arabidopsis thaliana]
  misc_feature (206)..(563): Homolog of NCBI NO: 30687278 NR Description: protein kinase family [Arabidopsis thaliana]
  misc_feature (272)..(691): Homolog of NCBI NO: 30687274 NR Description: protein kinase family [Arabidopsis thaliana]
  misc_feature (272)..(691): Homolog of NCBI NO: 20268768 NR Description: unknown protein [Arabidopsis thaliana]
  misc_feature (13)..(206): Homolog of NCBI NO: 20268768 NR Description: unknown protein [Arabidopsis thaliana]
  misc_feature (206)..(563): Homolog of NCBI NO: 20268768 NR Description: unknown protein [Arabidopsis thaliana]
  misc_feature (13)..(206): Homolog of NCBI NO: 30687274 NR Description: protein kinase family [Arabidopsis thaliana]
  misc_feature (206)..(563): Homolog of NCBI NO: 30687274 NR Description: protein kinase family [Arabidopsis thaliana]
MAQSSLVAAAGRSGRVIGDYAVGRQIGSGSFSVVWEGRHLVHGTVVAIKEIAMARLNKKLQESLMSEIIILRKINHPNIIRFIDMIEAPGKINLVLEYCKGGDLSMYIHKHGSVPEATAKHFMLQLAAGLQVLRDNNIIHRDLKPQVLSFLKQNLLLSTDDNDAALKIADFGFARSLQPRGLAETLCGSPLYMAPEIMQLQKYDAKLLQNIIRSTELHFPADCRDLSTDCKDLCQKLLRRNPVERLTFEEFFHHPFLSDKQSYDFTRSRLDSRTMNDFHSSGSSPSRNIEEISQEDGLPFFLDDDSSGPEGSPSSFKHTSPMKSSYGFSVERREAALSPLKNMDLSSRYSRVSHRAETNNFKFEGHRLSDRSQFKPSSLPDSRSFSTQGRGDSPDSMDQDYVLISGPPVDIPSSSSGSPKPFNYPFKSHSPPVEFIKRNVTNLTAPMPIASATGNNLSRFGSLESQNCIPGTSHGSLDLVDAFEQPSTNSLTRIRSLQKCAAAIAELVHERGENGKHLEAFSIQLVILAIWNQALHICHTQAVSGIEGSLLQDINRVGRNISHGGSEKLLPQIQKEFVQEVERAEELAKFVESDNAKMPDAMEMILQAALALGISGGVDEVMGDAENAGNLYSKAVRLLVFLAVEAQTLILNPPLTLTNSVRYRLRTYIDSLITRLKHLQSHRRTSYPQKQ

SEQ ID NO: 45704 - protein, 639 aa, Arabidopsis thaliana
  peptide (1)..(639): Ceres Seq. ID no. 13576227
  misc_feature (1)..(205): Pfam Name: Protein kinase domain Pfam Description: Protein kinase domain
  misc_feature (220)..(639): Homolog of NCBI NO: 25408568 NR Description: hypothetical protein At2g37850 [imported] -
  misc_feature (220)..(639): Homolog of NCBI NO: 30687278 NR Description: protein kinase family [Arabidopsis thaliana]
  misc_feature (122)..(154): Homolog of NCBI NO: 30687278 NR Description: protein kinase family [Arabidopsis thaliana]
  misc_feature (154)..(511): Homolog of NCBI NO: 30687278 NR Description: protein kinase family [Arabidopsis thaliana]
  misc_feature (220)..(639): Homolog of NCBI NO: 30687274 NR Description: protein kinase family [Arabidopsis thaliana]
  misc_feature (220)..(639): Homolog of NCBI NO: 20268768 NR Description: unknown protein [Arabidopsis thaliana]
  misc_feature (1)..(154): Homolog of NCBI NO: 20268768 NR Description: unknown protein [Arabidopsis thaliana]
  misc_feature (154)..(511): Homolog of NCBI NO: 20268768 NR Description: unknown protein [Arabidopsis thaliana]
  misc_feature (1)..(154): Homolog of NCBI NO: 30687274 NR Description: protein kinase family [Arabidopsis thaliana]
  misc_feature (154)..(511): Homolog of NCBI NO: 30687274 NR Description: protein kinase family [Arabidopsis thaliana]
MARLNKKLQESLMSEIIILRKINHPNIIRFIDMIEAPGKINLVLEYCKGGDLSMYIHKHGSVPEATAKHFMLQLAAGLQVLRDNNIIHRDLKPQVLSFLKQNLLLSTDDNDAALKIADFGFARSLQPRGLAETLCGSPLYMAPEIMQLQKYDAKLLQNIIRSTELHFPADCRDLSTDCKDLCQKLLRRNPVERLTFEEFFHHPFLSDKQSYDFTRSRLDSRTMNDFHSSGSSPSRNIEEISQEDGLPFFLDDDSSGPEGSPSSFKHTSPMKSSYGFSVERREAALSPLKNMDLSSRYSRVSHRAETNNFKFEGHRLSDRSQFKPSSLPDSRSFSTQGRGDSPDSMDQDYVLISGPPVDIPSSSSGSPKPFNYPFKSHSPPVEFIKRNVTNLTAPMPIASATGNNLSRFGSLESQNCIPGTSHGSLDLVDAFEQPSTNSLTRIRSLQKCAAAIAELVHERGENGKHLEAFSIQLVILAIWNQALHICHTQAVSGIEGSLLQDINRVGRNISHGGSEKLLPQIQKEFVQEVERAEELAKFVESDNAKMPDAMEMILQAALALGISGGVDEVMGDAENAGNLYSKAVRLLVFLAVEAQTLILNPPLTLTNSVRYRLRTYIDSLITRLKHLQSHRRTSYPQKQ

SEQ ID NO: 45705 - protein, 627 aa, Arabidopsis thaliana
  peptide (1)..(627): Ceres Seq. ID no. 13576228
  misc_feature (1)..(193): Pfam Name: Protein kinase domain Pfam Description: Protein kinase domain
  misc_feature (208)..(627): Homolog of NCBI NO: 25408568 NR Description: hypothetical protein At2g37850 [imported] -
  misc_feature (208)..(627): Homolog of NCBI NO: 30687278 NR Description: protein kinase family [Arabidopsis thaliana]
  misc_feature (110)..(142): Homolog of NCBI NO: 30687278 NR Description: protein kinase family [Arabidopsis thaliana]
  misc_feature (142)..(499): Homolog of NCBI NO: 30687278 NR Description: protein kinase family [Arabidopsis thaliana]
  misc_feature (208)..(627): Homolog of NCBI NO: 30687274 NR Description: protein kinase family [Arabidopsis thaliana]
  misc_feature (208)..(627): Homolog of NCBI NO: 20268768 NR Description: unknown protein [Arabidopsis thaliana]
  misc_feature (1)..(142): Homolog of NCBI NO: 20268768 NR Description: unknown protein [Arabidopsis thaliana]
  misc_feature (142)..(499): Homolog of NCBI NO: 20268768 NR Description: unknown protein [Arabidopsis thaliana]
  misc_feature (1)..(142): Homolog of NCBI NO: 30687274 NR Description: protein kinase family [Arabidopsis thaliana]
  misc_feature (142)..(499): Homolog of NCBI NO: 30687274 NR Description: protein kinase family [Arabidopsis thaliana]
MSEIIILRKINHPNIIRFIDMIEAPGKINLVLEYCKGGDLSMYIHKHGSVPEATAKHFMLQLAAGLQVLRDNNIIHRDLKPQVLSFLKQNLLLSTDDNDAALKIADFGFARSLQPRGLAETLCGSPLYMAPEIMQLQKYDAKLLQNIIRSTELHFPADCRDLSTDCKDLCQKLLRRNPVERLTFEEFFHHPFLSDKQSYDFTRSRLDSRTMNDFHSSGSSPSRNIEEISQEDGLPFFLDDDSSGPEGSPSSFKHTSPMKSSYGFSVERREAALSPLKNMDLSSRYSRVSHRAETNNFKFEGHRLSDRSQFKPSSLPDSRSFSTQGRGDSPDSMDQDYVLISGPPVDIPSSSSGSPKPFNYPFKSHSPPVEFIKRNVTNLTAPMPIASATGNNLSRFGSLESQNCIPGTSHGSLDLVDAFEQPSTNSLTRIRSLQKCAAAIAELVHERGENGKHLEAFSIQLVILAIWNQALHICHTQAVSGIEGSLLQDINRVGRNISHGGSEKLLPQIQKEFVQEVERAEELAKFVESDNAKMPDAMEMILQAALALGISGGVDEVMGDAENAGNLYSKAVRLLVFLAVEAQTLILNPPLTLTNSVRYRLRTYIDSLITRLKHLQSHRRTSYPQKQ

SEQ ID NO: 45706 - DNA, 1434 bp, Arabidopsis thaliana
  misc_feature (1)..(1434): Ceres Seq. ID no. 13646405
  misc_feature: MA Experiment ID: 20000184 Result: Down-regulated in Transcription
  misc_feature: MA Experiment 20000184 PARAMETER Experiment Name: At_Shoots__P Parameter: Age (day) Value: 7
  misc_feature: MA Experiment 20000184 PARAMETER Experiment Name: At_Shoots__P Parameter: Tissue Value: Shoots vs. Whole Plant
  misc_feature: MA Experiment ID: 20001248 Result: Up-regulated in Transcription
  misc_feature: MA Experiment 20001248 PARAMETER Experiment Name: At_Far-red-induction_P Parameter: Age (day) Value: 7
  misc_feature: MA Experiment 20001248 PARAMETER Experiment Name: At_Far-red-induction_P Parameter: Light Value: Far-red vs. White
  misc_feature: MA Experiment 20001248 PARAMETER Experiment Name: At_Far-red-induction_P Parameter: Organism Value: A. thaliana
  misc_feature: MA Experiment 20001248 PARAMETER Experiment Name: At_Far-red-induction_P Parameter: Plant Line Value: Columbia
  misc_feature: MA Experiment 20001248 PARAMETER Experiment Name: At_Far-red-induction_P Parameter: Timepoint (hr) Value: 4
  misc_feature: MA Experiment 20001248 PARAMETER Experiment Name: At_Far-red-induction_P Parameter: Tissue Value: Whole Plant
  misc_feature: MA Experiment ID: 20001451 Result: Up-regulated in Transcription
  misc_feature: MA Experiment 20001451 PARAMETER Experiment Name: At_Far-red-induction_P Parameter: Age (day) Value: 7
  misc_feature: MA Experiment 20001451 PARAMETER Experiment Name: At_Far-red-induction_P Parameter: Light Value: Far-red vs. White
  misc_feature: MA Experiment 20001451 PARAMETER Experiment Name: At_Far-red-induction_P Parameter: Organism Value: A. thaliana
  misc_feature: MA Experiment 20001451 PARAMETER Experiment Name: At_Far-red-induction_P Parameter: Plant Line Value: Columbia
  misc_feature: MA Experiment 20001451 PARAMETER Experiment Name: At_Far-red-induction_P Parameter: Timepoint (hr) Value: 24
  misc_feature: MA Experiment 20001451 PARAMETER Experiment Name: At_Far-red-induction_P Parameter: Tissue Value: Whole Plant
ggtacgaaacagactagttgcgaaacgcgaaagaacaagattcgacaaaagctaaaaataaaataaaagaagaagcaaaaccctagagctcaaggtaatcgccgtcgatttctcaatctctcaccggcgattacatgccgatgaaagttgtacaatagctgctgtaagagagagatttatcaggtatttttagaatcatgtatagagacagaggaacggtgaattcgagacctgaagttgtggatcgtaaacggatcaacgacgctcttgaacgtccttctccttcaacctctcgtcaagttaacggcaaaggcaaaggaaccgttacggcggcgacgacgacggcgaacttgattgggaagcagcagtcgaataacatcaaccatagagattctcgttctgcttctctctcgaagaacaatacggtttctgatgatgaatcagacacagatagtgaagaatcagatgtgagtggttctgatggagaggacacttcatggatatcttggttttgtaatctaagaggaaacgagttcttttgtgaagttgatgatgattacattcaagatgacttcaacttgtgtggactcagcagtctagttccctactacgagtacgctcttgatttgattttggatgttgaatcttctcagggagagatgtttacagaggaacagaatgaattgatcgagtcagcagctgagatgttgtatggactgattcatgctcgttacatattgactagcaaaggattggcagcaatgttagacaaatacaaaaactatgactttggaagatgtccaagagtttattgctgtggccaaccttgtcttccggttggtcaatcagacttaccgcgatctagcactgtgaagatatattgcgcgaaatgcgaagacatttattacccacgatcaaagtatcaaggcaacattgatggagcttactttgggacaacgtttccacatctgttcctgatgacttatgggcatctcaagccagcgaaggcaacacaaaactatgttcaaagagtgtttgggttcaaattacacaaaccgtgaaggaagtttgacgacaaaacccaaggatcaagatcatggcgttggaatggaactgagaaaagaagagacgtgtgtgaacagaaacggaaaataaaacgcactgtaatcacacgaatggtgaagagagcattcatgtctctatttgtcttcaggtacatacacattagaagaaagcaaaagcatggttagaaagaaaaaaaacacgaaaatcttttaatgagtttgttaaacttgaacatgtatttttctaccttcggtaaacttttttattttgtttcttttctcagtgtctgatttagtcatttatcnnaaaaaaaaaaaaaaaaaaaaaaaaaaaaaaagaaaaaaaaaaaaaaaaactcgagggggggcc

SEQ ID NO: 45707 - protein, 287 aa, Arabidopsis thaliana
  peptide (1)..(287): Ceres Seq. ID no. 13646406
  misc_feature (97)..(275): Pfam Name: Casein kinase II regulatory subunit Pfam Description: Casein kinase II regulatory subunit
  misc_feature (15)..(287): Homolog of NCBI NO: 11527002 NR Description: protein kinase CK2 regulatory subunit CK2B2 [Zea
  misc_feature (1)..(285): Homolog of NCBI NO: 15224934 NR Description: casein kinase II beta chain, putative
  misc_feature (1)..(287): Homolog of NCBI NO: 11527000 NR Description: protein kinase CK2 regulatory subunit CK2B1 [Zea
  misc_feature (68)..(287): Homolog of NCBI NO: 29367573 NR Description: possible protein kinase CK2 regulatory subunit
  misc_feature (15)..(287): Homolog of NCBI NO: 34901776 NR Description: OJ1058_B11.17 [Oryza sativa (japonica
  misc_feature (2)..(286): Homolog of NCBI NO: 37536920 NR Description: putative casein kinase II beta subunit
  misc_feature (1)..(287): Homolog of NCBI NO: 11527004 NR Description: protein kinase CK2 regulatory subunit CK2B3 [Zea
  misc_feature (1)..(286): Homolog of NCBI NO: 21261784 NR Description: protein kinase Ck2 regulatory subunit 2
  misc_feature (1)..(287): Homolog of NCBI NO: 15236597 NR Description: casein kinase II beta chain, putative
  misc_feature (1)..(287): Homolog of NCBI NO: 15238013 NR Description: casein kinase II beta chain, putative
MYRDRGTVNSRPEVVDRKRINDALERPSPSTSRQVNGKGKGTVTAATTTANLIGKQQSNNINHRDSRSASLSKNNTVSDDESDTDSEESDVSGSDGEDTSWISWFCNLRGNEFFCEVDDDYIQDDFNLCGLSSLVPYYEYALDLILDVESSQGEMFTEEQNELIESAAEMLYGLIHARYILTSKGLAAMLDKYKNYDFGRCPRVYCCGQPCLPVGQSDLPRSSTVKIYCAKCEDIYYPRSKYQGNIDGAYFGTTFPHLFLMTYGHLKPAKATQNYVQRVFGFKLHKP

SEQ ID NO: 45708 - DNA, 2482 bp, Arabidopsis thaliana
  misc_feature (1)..(2482): Ceres Seq. ID no. 14309739
  misc_feature: MA Experiment ID: 20000438 Result: Up-regulated in Transcription
  misc_feature: MA Experiment 20000438 PARAMETER Experiment Name: At_Shoots__P Parameter: Age (day) Value: 14
  misc_feature: MA Experiment 20000438 PARAMETER Experiment Name: At_Shoots__P Parameter: Tissue Value: Shoots vs. Whole Plant
  misc_feature: MA Experiment ID: 20000794 Result: Up-regulated in Transcription
  misc_feature: MA Experiment 20000794 PARAMETER Experiment Name: At_Petals_P Parameter: Age (day) Value: 23-25 days
  misc_feature: MA Experiment 20000794 PARAMETER Experiment Name: At_Petals_P Parameter: Plant Line Value: WS
  misc_feature: MA Experiment 20000794 PARAMETER Experiment Name: At_Petals_P Parameter: Tissue Value: Petals vs. Whole plant
  misc_feature: MA Experiment ID: 20001248 Result: Down-regulated in Transcription
  misc_feature: MA Experiment 20001248 PARAMETER Experiment Name: At_Far-red-induction_P Parameter: Age (day) Value: 7
  misc_feature: MA Experiment 20001248 PARAMETER Experiment Name: At_Far-red-induction_P Parameter: Light Value: Far-red vs. White
  misc_feature: MA Experiment 20001248 PARAMETER Experiment Name: At_Far-red-induction_P Parameter: Organism Value: A. thaliana
  misc_feature: MA Experiment 20001248 PARAMETER Experiment Name: At_Far-red-induction_P Parameter: Plant Line Value: Columbia
  misc_feature: MA Experiment 20001248 PARAMETER Experiment Name: At_Far-red-induction_P Parameter: Timepoint (hr) Value: 4
  misc_feature: MA Experiment 20001248 PARAMETER Experiment Name: At_Far-red-induction_P Parameter: Tissue Value: Whole Plant
gaagtaagtaaccaaaaacgcttctaatctttcgtttacaacaaatatctctctctctctcgctctctctttcttcttcttcatcttctttcatggctgttactggctgggcaatcacaatctgaattctttcttcctccttgtctctctgattttcgccgagttttgggggctcttgttgttacacgatgagtctggtggttggtcagtctctgggtttaactctagtcggtgatggtctttcgttacgcaattccaaaataaatgtcggaaaatcaaagtttttctcggtaaatcggaggagattggcgcgtgcggccctggtacaagctaggcctaaggaagacggagcggcggcaagtccttccccatcgtcgagaccggcgtcagttgtgcagtaccgacgagctgatctcgcggatgatcttcaagccgaggcacgagctttgggtcgtgctattgatgcttctatttactctccggagctcatcgccaggaaacatggctctcagcctttcaaggctttgcggagaagtttggagatattgggagctttgggtggtttcgctttgaaattggggattgaccagaagcagggcaacttagagaagaacatgaagaagagagcaatcgagctccggcggatcttcactcgtctcggacctacttttgttaaattgggtcaaggtttgtccacccgacccgacctctgtccacccgattaccttgaagaacttgcagagcttcaggatgctttgccaaccttccctgatgcagaggcatttgcttgcattgagagagagttggatttgtcgctagagaccattttctcgtctgtatctcctgagccaatcgcagcagctagtcttggccaggtttacaaagctcagctgaggtattcaggtcaggttgttgctgtcaaagttcaacgccctgggatcgaagaagccattggccttgatttttaccttattagaggagttgggaaactcattaacaagtatgtagacttcatcactaccgatgtccttacccttatcgatgagttcgcctgcagagtttatcaggagctaaactatgtccaggaggcccaaaatgccagaaggtttaaaaaattgtatgcagataaagcagatgttcttgtgcctgatatattctgggattacacgagccgcaaggtgctaacaatggaatgggttgagggaactaaactgaatgagcaacttgccattgagagtcagggattgaaggttctggatctcgtgaatacaggaatccagtgtagcctaaggcaactcttggagtatggctttttccatgctgaccctcatcctggtaatctcttggcaacacctgatggaaaacttgcctttctagactttggcatgatgagtgagacaccagaggaagctagatttgctatcataggccatgttgtccatttagtgaaccgagattatgaagccatggcacgagattactatgctctgaagttcttgtcccctgatgtggatgttactcctatcataccagctctcagagacttctttgacgatgcacttaattataccgtgagcgagctcaatttcaaaactttggttgatggtctaggtgctgtcttctaccagtatccatttaatgtcccgccctactatgctttgattttgaggtcgcttactgtgcttgaaggtttggcactctacgcagatcctaatttcaaagtactagctgcttcatacccatattttgccaaaaggcttctcactgatccaaacccgtatctaagagatgcccttatcgagctactattcaaagacggaaaatttaggtggaatagactcgagaaccttctacaacagggaagtaaagatagagacttctcagcaaaggatgctctacaaccagttttgaagcttttgctggatccaaatggcgaagaacttcgattgttagtaattaaagaagctgtacgagtcagtgaagcaattgcgctgggcactgttgttgatacatacaattcccttcctgagtttctgagatctcttgtcttcaatggaaatgggaatggccctcttacaatgagtaccgcggaacttcaaagtacgcttgagcttcgggatcaggtctccagaatctggggccttcttcaatcttcagaaagctttgatcctgctattttgcaaccaatactacaggtgttacaacaaccagaggcacgaagacttggaggacgtgttgcaggcggtgtaggccaacgtcttgcagctcggtttctgcaacaacttcttcgagccacaacaccatcttctgcaccatcccaataggtcctcttttcttctcagtgaaatggtaaattgtatattaaggcgagacactcgcaaaccacagaattgtttcatgttacagtaatatagtatcattctttctctttgtattgtactagtgaaaaaggaccaaagtataaccaatgagaaatacctcc

SEQ ID NO: 45709 - protein, 711 aa, Arabidopsis thaliana
  peptide (1)..(711): Ceres Seq. ID no. 14309740
  misc_feature (204)..(323): Pfam Name: ABC1 family Pfam Description: ABC1 family
  misc_feature (96)..(586): Homolog of NCBI NO: 17228088 NR Description: hypothetical protein [Nostoc sp. PCC 7120]
  misc_feature (95)..(586): Homolog of NCBI NO: 23129126 NR Description: hypothetical protein [Nostoc punctiforme]
  misc_feature (92)..(596): Homolog of NCBI NO: 37523981 NR Description: hypothetical protein gll4412 [Gloeobacter
  misc_feature (87)..(697): Homolog of NCBI NO: 33867054 NR Description: possible protein kinase: ABC1 family
  misc_feature (96)..(597): Homolog of NCBI NO: 37522693 NR Description: hypothetical protein glr3124 [Gloeobacter
  misc_feature (96)..(710): Homolog of NCBI NO: 16331408 NR Description: ABC1-like [Synechocystis sp. PCC 6803]
  misc_feature (96)..(702): Homolog of NCBI NO: 22298493 NR Description: ORF_ID:tll0950~hypothetical protein
  misc_feature (95)..(708): Homolog of NCBI NO: 17232452 NR Description: hypothetical protein [Nostoc sp. PCC 7120]
  misc_feature (51)..(700): Homolog of NCBI NO: 23042448 NR Description: hypothetical protein [Trichodesmium erythraeum
  misc_feature (143)..(710): Homolog of NCBI NO: 14532490 NR Description: At1g79600/F20B17_3 [Arabidopsis thaliana]
MSLVVGQSLGLTLVGDGLSLRNSKINVGKSKFFSVNRRRLARAALVQARPKEDGAAASPSPSSRPASVVQYRRADLADDLQAEARALGRAIDASIYSPELIARKHGSQPFKALRRSLEILGALGGFALKLGIDQKQGNLEKNMKKRAIELRRIFTRLGPTFVKLGQGLSTRPDLCPPDYLEELAELQDALPTFPDAEAFACIERELDLSLETIFSSVSPEPIAAASLGQVYKAQLRYSGQVVAVKVQRPGIEEAIGLDFYLIRGVGKLINKYVDFITTDVLTLIDEFACRVYQELNYVQEAQNARRFKKLYADKADVLVPDIFWDYTSRKVLTMEWVEGTKLNEQLAIESQGLKVLDLVNTGIQCSLRQLLEYGFFHADPHPGNLLATPDGKLAFLDFGMMSETPEEARFAIIGHVVHLVNRDYEAMARDYYALKFLSPDVDVTPIIPALRDFFDDALNYTVSELNFKTLVDGLGAVFYQYPFNVPPYYALILRSLTVLEGLALYADPNFKVLAASYPYFAKRLLTDPNPYLRDALIELLFKDGKFRWNRLENLLQQGSKDRDFSAKDALQPVLKLLLDPNGEELRLLVIKEAVRVSEAIALGTVVDTYNSLPEFLRSLVFNGNGNGPLTMSTAELQSTLELRDQVSRIWGLLQSSESFDPAILQPILQVLQQPEARRLGGRVAGGVGQRLAARFLQQLLRATTPSSAPSQ

SEQ ID NO: 45710 - protein, 569 aa, Arabidopsis thaliana
  peptide (1)..(569): Ceres Seq. ID no. 14309741
  misc_feature (62)..(181): Pfam Name: ABC1 family Pfam Description: ABC1 family
  misc_feature (1)..(444): Homolog of NCBI NO: 17228088 NR Description: hypothetical protein [Nostoc sp. PCC 7120]
  misc_feature (1)..(444): Homolog of NCBI NO: 23129126 NR Description: hypothetical protein [Nostoc punctiforme]
  misc_feature (1)..(454): Homolog of NCBI NO: 37523981 NR Description: hypothetical protein gll4412 [Gloeobacter
  misc_feature (1)..(555): Homolog of NCBI NO: 33867054 NR Description: possible protein kinase: ABC1 family
  misc_feature (1)..(455): Homolog of NCBI NO: 37522693 NR Description: hypothetical protein glr3124 [Gloeobacter
  misc_feature (1)..(568): Homolog of NCBI NO: 16331408 NR Description: ABC1-like [Synechocystis sp. PCC 6803]
  misc_feature (1)..(560): Homolog of NCBI NO: 22298493 NR Description: ORF_ID:tll0950~hypothetical protein
  misc_feature (1)..(566): Homolog of NCBI NO: 17232452 NR Description: hypothetical protein [Nostoc sp. PCC 7120]
  misc_feature (1)..(558): Homolog of NCBI NO: 23042448 NR Description: hypothetical protein [Trichodesmium erythraeum
  misc_feature (1)..(568): Homolog of NCBI NO: 14532490 NR Description: At1g79600/F20B17_3 [Arabidopsis thaliana]
MKKRAIELRRIFTRLGPTFVKLGQGLSTRPDLCPPDYLEELAELQDALPTFPDAEAFACIERELDLSLETIFSSVSPEPIAAASLGQVYKAQLRYSGQVVAVKVQRPGIEEAIGLDFYLIRGVGKLINKYVDFITTDVLTLIDEFACRVYQELNYVQEAQNARRFKKLYADKADVLVPDIFWDYTSRKVLTMEWVEGTKLNEQLAIESQGLKVLDLVNTGIQCSLRQLLEYGFFHADPHPGNLLATPDGKLAFLDFGMMSETPEEARFAIIGHVVHLVNRDYEAMARDYYALKFLSPDVDVTPIIPALRDFFDDALNYTVSELNFKTLVDGLGAVFYQYPFNVPPYYALILRSLTVLEGLALYADPNFKVLAASYPYFAKRLLTDPNPYLRDALIELLFKDGKFRWNRLENLLQQGSKDRDFSAKDALQPVLKLLLDPNGEELRLLVIKEAVRVSEAIALGTVVDTYNSLPEFLRSLVFNGNGNGPLTMSTAELQSTLELRDQVSRIWGLLQSSESFDPAILQPILQVLQQPEARRLGGRVAGGVGQRLAARFLQQLLRATTPSSAPSQ

SEQ ID NO: 45711 - protein, 378 aa, Arabidopsis thaliana
  peptide (1)..(378): Ceres Seq. ID no. 14309742
  misc_feature (1)..(253): Homolog of NCBI NO: 17228088 NR Description: hypothetical protein [Nostoc sp. PCC 7120]
  misc_feature (1)..(253): Homolog of NCBI NO: 23129126 NR Description: hypothetical protein [Nostoc punctiforme]
  misc_feature (1)..(263): Homolog of NCBI NO: 37523981 NR Description: hypothetical protein gll4412 [Gloeobacter
  misc_feature (1)..(364): Homolog of NCBI NO: 33867054 NR Description: possible protein kinase: ABC1 family
  misc_feature (1)..(264): Homolog of NCBI NO: 37522693 NR Description: hypothetical protein glr3124 [Gloeobacter
  misc_feature (1)..(377): Homolog of NCBI NO: 16331408 NR Description: ABC1-like [Synechocystis sp. PCC 6803]
  misc_feature (1)..(369): Homolog of NCBI NO: 22298493 NR Description: ORF_ID:tll0950~hypothetical protein
  misc_feature (1)..(375): Homolog of NCBI NO: 17232452 NR Description: hypothetical protein [Nostoc sp. PCC 7120]
  misc_feature (1)..(367): Homolog of NCBI NO: 23042448 NR Description: hypothetical protein [Trichodesmium erythraeum
  misc_feature (1)..(377): Homolog of NCBI NO: 14532490 NR Description: At1g79600/F20B17_3 [Arabidopsis thaliana]
MEWVEGTKLNEQLAIESQGLKVLDLVNTGIQCSLRQLLEYGFFHADPHPGNLLATPDGKLAFLDFGMMSETPEEARFAIIGHVVHLVNRDYEAMARDYYALKFLSPDVDVTPIIPALRDFFDDALNYTVSELNFKTLVDGLGAVFYQYPFNVPPYYALILRSLTVLEGLALYADPNFKVLAASYPYFAKRLLTDPNPYLRDALIELLFKDGKFRWNRLENLLQQGSKDRDFSAKDALQPVLKLLLDPNGEELRLLVIKEAVRVSEAIALGTVVDTYNSLPEFLRSLVFNGNGNGPLTMSTAELQSTLELRDQVSRIWGLLQSSESFDPAILQPILQVLQQPEARRLGGRVAGGVGQRLAARFLQQLLRATTPSSAPSQ

SEQ ID NO: 45712 - DNA, 1026 bp, Arabidopsis thaliana
  misc_feature (1)..(1026): Ceres Seq. ID no. 12561187
  misc_feature: MA Experiment ID: 20000355 Result: Down-regulated in Transcription
  misc_feature: MA Experiment 20000355 PARAMETER Experiment Name: At_Siliques_Sub_P Parameter: Age (day) Value: 21
  misc_feature: MA Experiment 20000355 PARAMETER Experiment Name: At_Siliques_Sub_P Parameter: Organism Value: A. thaliana
  misc_feature: MA Experiment 20000355 PARAMETER Experiment Name: At_Siliques_Sub_P Parameter: Plant Line Value: WS
  misc_feature: MA Experiment 20000355 PARAMETER Experiment Name: At_Siliques_Sub_P Parameter: Tissue Value: Less Than 5mm Siliques vs. Whole Plant
  misc_feature: MA Experiment ID: 20000440 Result: Up-regulated in Transcription
  misc_feature: MA Experiment 20000440 PARAMETER Experiment Name: At_Closed-Flower__Sub_P Parameter: Tissue Value: Closed Flower vs. Whole Plant
tttgtcttttgctctttctccttcctctccactaaaacatttctctattttttcctttttatttgtttgtttggtttctttaaattctcagcttctatacaaacctttctcaattcttcttgacattagggtttcctctttctttgagagggctaaaaccctaatatatccctctcattgactaaagagttaagcctactctatctactttggaagcgaaattcaaagggtaaggtaaaagcccttgaaagaggaagaaagatacaagatcctcaaagaacctaaagatctaaaggttgtaagaagaaaaacaaatggcgtcgtcatcaaactcatacaactcaccatgcgcggcgtgcaagtttcttcgccggaaatgcatgccgggatgcatattcgcgccatattttccaccggaggagccacacaaattcgccaacgtccacaaaatctttggagcaagcaacgtcacgaagctcctcaacgagctcctccctcaccaacgtgaagacgcagtcaactccttagcctatgaggccgaggcacgtgtccgtgaccccgtctatggctgcgtcggagccatctcttatctccagagacaagtccataggcttcagaaggagctcgacgcagctaatgctgacttggcacattatggtttgtccacatcagccgccggagcacctggcaacgtcgtggacttggtttttcagcctcagccgcttccgtcgcagcaactgcctcccttgaacccggtttataggctttcgggggcaagtccggtgatgaatcagatgccacgtggcaccggagggtcgtatgggacttttcttccttggaacaatggtcatgatcagcaaggaggtaacatgtgagagtttataaattatgagtattcatcctctcatctctctctttctatatttatgtgtgtgtggtacgaatacgatattatttgtttaatgcatggactgtgtgtgggatattatttcctagcgaattataaatgcatggactgttcttatt

SEQ ID NO: 45713 - protein, 186 aa, Arabidopsis thaliana
  peptide (1)..(186): Ceres Seq. ID no. 12561188
  misc_feature (11)..(111): Pfam Name: Protein of unknown function DUF260 Pfam Description: Protein of unknown function DUF260
  misc_feature (9)..(111): Homolog of NCBI NO: 18402268 NR Description: expressed protein
  misc_feature (1)..(114): Homolog of NCBI NO: 15240110 NR Description: putative protein; protein id: At5g66870.1
  misc_feature (10)..(123): Homolog of NCBI NO: 34907508 NR Description: B1099D03.24 [Oryza sativa (japonica
  misc_feature (1)..(114): Homolog of NCBI NO: 15218746 NR Description: unknown protein
  misc_feature (5)..(122): Homolog of NCBI NO: 21618134 NR Description: unknown [Arabidopsis thaliana]
  misc_feature (5)..(122): Homolog of NCBI NO: 29427827 NR Description: LOB domain protein 25
  misc_feature (5)..(122): Homolog of NCBI NO: 18405472 NR Description: expressed protein
  misc_feature (5)..(122): Homolog of NCBI NO: 9294470 NR Description: gb|AAB60912.1~gene_id:MGF10.6~similar to unknown
  misc_feature (1)..(114): Homolog of NCBI NO: 34896184 NR Description: contains ESTs C98868(E3203),C98869(E3203)~similar
  misc_feature (1)..(186): Homolog of NCBI NO: 15242624 NR Description: putative protein
MASSSNSYNSPCAACKFLRRKCMPGCIFAPYFPPEEPHKFANVHKIFGASNVTKLLNELLPHQREDAVNSLAYEAEARVRDPVYGCVGAISYLQRQVHRLQKELDAANADLAHYGLSTSAAGAPGNVVDLVFQPQPLPSQQLPPLNPVYRLSGASPVMNQMPRGTGGSYGTFLPWNNGHDQQGGNM

SEQ ID NO: 45714 - protein, 164 aa, Arabidopsis thaliana
  peptide (1)..(164): Ceres Seq. ID no. 12561189
  misc_feature (1)..(89): Pfam Name: Protein of unknown function DUF260 Pfam Description: Protein of unknown function DUF260
  misc_feature (1)..(89): Homolog of NCBI NO: 18402268 NR Description: expressed protein
  misc_feature (1)..(92): Homolog of NCBI NO: 15240110 NR Description: putative protein; protein id: At5g66870.1
  misc_feature (1)..(101): Homolog of NCBI NO: 34907508 NR Description: B1099D03.24 [Oryza sativa (japonica
  misc_feature (1)..(92): Homolog of NCBI NO: 15218746 NR Description: unknown protein
  misc_feature (1)..(100): Homolog of NCBI NO: 21618134 NR Description: unknown [Arabidopsis thaliana]
  misc_feature (1)..(100): Homolog of NCBI NO: 18405472 NR Description: expressed protein
  misc_feature (1)..(100): Homolog of NCBI NO: 29427827 NR Description: LOB domain protein 25
  misc_feature (1)..(100): Homolog of NCBI NO: 9294470 NR Description: gb|AAB60912.1~gene_id:MGF10.6~similar to unknown
  misc_feature (1)..(92): Homolog of NCBI NO: 34896184 NR Description: contains ESTs C98868(E3203),C98869(E3203)~similar
  misc_feature (1)..(164): Homolog of NCBI NO: 15242624 NR Description: putative protein
MPGCIFAPYFPPEEPHKFANVHKIFGASNVTKLLNELLPHQREDAVNSLAYEAEARVRDPVYGCVGAISYLQRQVHRLQKELDAANADLAHYGLSTSAAGAPGNVVDLVFQPQPLPSQQLPPLNPVYRLSGASPVMNQMPRGTGGSYGTFLPWNNGHDQQGGNM

SEQ ID NO: 45715 - DNA, 1424 bp, Arabidopsis thaliana
  misc_feature (1)..(1424): Ceres Seq. ID no. 12561198
  misc_feature: MA Experiment ID: 108433 Result: Up-regulated in Transcription
  misc_feature: MA Experiment 108433 PARAMETER Experiment Name: At_rhl_Mutant2_cDNA_P Parameter: Age (day) Value: 7
  misc_feature: MA Experiment 108433 PARAMETER Experiment Name: At_rhl_Mutant2_cDNA_P Parameter: Organism Value: A. thaliana
  misc_feature: MA Experiment 108433 PARAMETER Experiment Name: At_rhl_Mutant2_cDNA_P Parameter: Plant Line Value: rhl Mutant vs. wt landsburg
  misc_feature: MA Experiment 108433 PARAMETER Experiment Name: At_rhl_Mutant2_cDNA_P Parameter: Tissue Value: Roots
  misc_feature: MA Experiment ID: 108434 Result: Down-regulated in Transcription
  misc_feature: MA Experiment 108434 PARAMETER Experiment Name: At_Root_Tips_cDNA_P Parameter: Tissue Value: Root Tips
  misc_feature: MA Experiment ID: 108569 Result: Up-regulated in Transcription
  misc_feature: MA Experiment 108569 PARAMETER Experiment Name: At_0.001%_MeJA__cDNA_P Parameter: Timepoint (hr) Value: 6
  misc_feature: MA Experiment 108569 PARAMETER Experiment Name: At_0.001%_MeJA__cDNA_P Parameter: Tissue Value: Aerial
  misc_feature: MA Experiment 108569 PARAMETER Experiment Name: At_0.001%_MeJA__cDNA_P Parameter: Treatment Value: 0.001% MeJA vs. No Treatment
  misc_feature: MA Experiment ID: 108573 Result: Up-regulated in Transcription
  misc_feature: MA Experiment 108573 PARAMETER Experiment Name: At_Drought_cDNA_P Parameter: Timepoint (hr) Value: 6
  misc_feature: MA Experiment 108573 PARAMETER Experiment Name: At_Drought_cDNA_P Parameter: Tissue Value: Aerial
  misc_feature: MA Experiment 108573 PARAMETER Experiment Name: At_Drought_cDNA_P Parameter: Treatment Value: Drought vs. No Drought
  misc_feature: MA Experiment ID: 108585 Result: Up-regulated in Transcription
  misc_feature: MA Experiment 108585 PARAMETER Experiment Name: At_5mM_NaNP_cDNA_P Parameter: Timepoint (hr) Value: 6
  misc_feature: MA Experiment 108585 PARAMETER Experiment Name: At_5mM_NaNP_cDNA_P Parameter: Tissue Value: Aerial
  misc_feature: MA Experiment 108585 PARAMETER Experiment Name: At_5mM_NaNP_cDNA_P Parameter: Treatment Value: null
  misc_feature: MA Experiment ID: 108594 Result: Down-regulated in Transcription
  misc_feature: MA Experiment 108594 PARAMETER Experiment Name: At_Ler-rhl_Root_cDNA_P Parameter: Plant Line Value: null
  misc_feature: MA Experiment ID: 108595 Result: Down-regulated in Transcription
  misc_feature: MA Experiment 108595 PARAMETER Experiment Name: At_Ler-pi_Ovule_cDNA_P Parameter: Plant Line Value: null
  misc_feature: MA Experiment ID: 108668 Result: Up-regulated in Transcription
  misc_feature: MA Experiment 108668 PARAMETER Experiment Name: At_2mM_SA_cDNA_P Parameter: Plant Line Value: WS
  misc_feature: MA Experiment 108668 PARAMETER Experiment Name: At_2mM_SA_cDNA_P Parameter: Timepoint (hr) Value: 6
  misc_feature: MA Experiment 108668 PARAMETER Experiment Name: At_2mM_SA_cDNA_P Parameter: Treatment Value: 2mM SA vs. No Treatment
  misc_feature: MA Experiment ID: 20000070 Result: Up-regulated in Transcription
  misc_feature: MA Experiment 20000070 PARAMETER Experiment Name: At_100uM_ABA_Mutants_cDNA_P Parameter: Plant Line Value: CS24
  misc_feature: MA Experiment 20000070 PARAMETER Experiment Name: At_100uM_ABA_Mutants_cDNA_P Parameter: Timepoint (hr) Value: 6
  misc_feature: MA Experiment 20000070 PARAMETER Experiment Name: At_100uM_ABA_Mutants_cDNA_P Parameter: Tissue Value: Aerial
  misc_feature: MA Experiment 20000070 PARAMETER Experiment Name: At_100uM_ABA_Mutants_cDNA_P Parameter: Treatment Value: 100uM ABA vs. No Treatment
  misc_feature: MA Experiment ID: 20000086 Result: Up-regulated in Transcription
  misc_feature: MA Experiment 20000086 PARAMETER Experiment Name: At_100uM_ABA_Mutants_cDNA_P Parameter: Plant Line Value: CS22
  misc_feature: MA Experiment 20000086 PARAMETER Experiment Name: At_100uM_ABA_Mutants_cDNA_P Parameter: Timepoint (hr) Value: 6
  misc_feature: MA Experiment 20000086 PARAMETER Experiment Name: At_100uM_ABA_Mutants_cDNA_P Parameter: Tissue Value: Aerial
  misc_feature: MA Experiment 20000086 PARAMETER Experiment Name: At_100uM_ABA_Mutants_cDNA_P Parameter: Treatment Value: 100uM ABA vs. No Treatment
  misc_feature: MA Experiment ID: 20000088 Result: Up-regulated in Transcription
  misc_feature: MA Experiment 20000088 PARAMETER Experiment Name: At_100uM_ABA_Mutants_cDNA_P Parameter: Plant Line Value: Landsberg
  misc_feature: MA Experiment 20000088 PARAMETER Experiment Name: At_100uM_ABA_Mutants_cDNA_P Parameter: Timepoint (hr) Value: 6
  misc_feature: MA Experiment 20000088 PARAMETER Experiment Name: At_100uM_ABA_Mutants_cDNA_P Parameter: Tissue Value: Aerial
  misc_feature: MA Experiment 20000088 PARAMETER Experiment Name: At_100uM_ABA_Mutants_cDNA_P Parameter: Treatment Value: 100uM ABA vs. No Treatment
  misc_feature: MA Experiment ID: 20000089 Result: Up-regulated in Transcription
  misc_feature: MA Experiment ID: 20000090 Result: Up-regulated in Transcription
  misc_feature: MA Experiment ID: 20000117 Result: Up-regulated in Transcription
  misc_feature: MA Experiment 20000117 PARAMETER Experiment Name: At_100uM_ABA_Mutants_cDNA_P Parameter: Plant Line Value: Columbia
  misc_feature: MA Experiment 20000117 PARAMETER Experiment Name: At_100uM_ABA_Mutants_cDNA_P Parameter: Timepoint (hr) Value: 6
  misc_feature: MA Experiment 20000117 PARAMETER Experiment Name: At_100uM_ABA_Mutants_cDNA_P Parameter: Tissue Value: Aerial
  misc_feature: MA Experiment 20000117 PARAMETER Experiment Name: At_100uM_ABA_Mutants_cDNA_P Parameter: Treatment Value: 100uM ABA vs. No Treatment
  misc_feature: MA Experiment ID: 20000173 Result: Down-regulated in Transcription
  misc_feature: MA Experiment 20000173 PARAMETER Experiment Name: At_42deg_Heat_P Parameter: Age (day) Value: 14
  misc_feature: MA Experiment 20000173 PARAMETER Experiment Name: At_42deg_Heat_P Parameter: Organism Value: A. thaliana
  misc_feature: MA Experiment 20000173 PARAMETER Experiment Name: At_42deg_Heat_P Parameter: Plant Line Value: WS
  misc_feature: MA Experiment 20000173 PARAMETER Experiment Name: At_42deg_Heat_P Parameter: Temperature (deg C) Value: 42 vs. 22
  misc_feature: MA Experiment 20000173 PARAMETER Experiment Name: At_42deg_Heat_P Parameter: Timepoint (hr) Value: 6
  misc_feature: MA Experiment 20000173 PARAMETER Experiment Name: At_42deg_Heat_P Parameter: Tissue Value: Aerial
  misc_feature: MA Experiment ID: 20000182 Result: Up-regulated in Transcription
  misc_feature: MA Experiment 20000182 PARAMETER Experiment Name: At_2mM_SA_P Parameter: Age (day) Value: 14
  misc_feature: MA Experiment 20000182 PARAMETER Experiment Name: At_2mM_SA_P Parameter: Organism Value: A. thaliana
  misc_feature: MA Experiment 20000182 PARAMETER Experiment Name: At_2mM_SA_P Parameter: Plant Line Value: WS
  misc_feature: MA Experiment 20000182 PARAMETER Experiment Name: At_2mM_SA_P Parameter: Timepoint (hr) Value: 6
  misc_feature: MA Experiment 20000182 PARAMETER Experiment Name: At_2mM_SA_P Parameter: Tissue Value: Aerial
  misc_feature: MA Experiment 20000182 PARAMETER Experiment Name: At_2mM_SA_P Parameter: Treatment Value: 2mM SA vs. No Treatment
  misc_feature: MA Experiment ID: 20000184 Result: Down-regulated in Transcription
  misc_feature: MA Experiment 20000184 PARAMETER Experiment Name: At_Shoots__P Parameter: Age (day) Value: 7
  misc_feature: MA Experiment 20000184 PARAMETER Experiment Name: At_Shoots__P Parameter: Tissue Value: Shoots vs. Whole Plant
  misc_feature: MA Experiment ID: 20000185 Result: Down-regulated in Transcription
  misc_feature: MA Experiment 20000185 PARAMETER Experiment Name: At_Roots__P Parameter: Age (day) Value: 7 vs. 21
  misc_feature: MA Experiment 20000185 PARAMETER Experiment Name: At_Roots__P Parameter: Organism Value: A. thaliana
  misc_feature: MA Experiment 20000185 PARAMETER Experiment Name: At_Roots__P Parameter: Tissue Value: Roots vs. Whole Plant
  misc_feature: MA Experiment ID: 20000224 Result: Down-regulated in Transcription
  misc_feature: MA Experiment ID: 20000227 Result: Down-regulated in Transcription
  misc_feature: MA Experiment 20000227 PARAMETER Experiment Name: At_Root-Tips-vs-Tops_P Parameter: Tissue Value: Root Tips vs. Root Tops
  misc_feature: MA Experiment ID: 20000438 Result: Down-regulated in Transcription
  misc_feature: MA Experiment 20000438 PARAMETER Experiment Name: At_Shoots__P Parameter: Age (day) Value: 14
  misc_feature: MA Experiment 20000438 PARAMETER Experiment Name: At_Shoots__P Parameter: Tissue Value: Shoots vs. Whole Plant
  misc_feature: MA Experiment ID: 20001248 Result: Up-regulated in Transcription
  misc_feature: MA Experiment 20001248 PARAMETER Experiment Name: At_Far-red-induction_P Parameter: Age (day) Value: 7
  misc_feature: MA Experiment 20001248 PARAMETER Experiment Name: At_Far-red-induction_P Parameter: Light Value: Far-red vs. White
  misc_feature: MA Experiment 20001248 PARAMETER Experiment Name: At_Far-red-induction_P Parameter: Organism Value: A. thaliana
  misc_feature: MA Experiment 20001248 PARAMETER Experiment Name: At_Far-red-induction_P Parameter: Plant Line Value: Columbia
  misc_feature: MA Experiment 20001248 PARAMETER Experiment Name: At_Far-red-induction_P Parameter: Timepoint (hr) Value: 4
  misc_feature: MA Experiment 20001248 PARAMETER Experiment Name: At_Far-red-induction_P Parameter: Tissue Value: Whole Plant
  misc_feature: MA Experiment ID: 20001451 Result: Down-regulated in Transcription
  misc_feature: MA Experiment 20001451 PARAMETER Experiment Name: At_Far-red-induction_P Parameter: Age (day) Value: 7
  misc_feature: MA Experiment 20001451 PARAMETER Experiment Name: At_Far-red-induction_P Parameter: Light Value: Far-red vs. White
  misc_feature: MA Experiment 20001451 PARAMETER Experiment Name: At_Far-red-induction_P Parameter: Organism Value: A. thaliana
  misc_feature: MA Experiment 20001451 PARAMETER Experiment Name: At_Far-red-induction_P Parameter: Plant Line Value: Columbia
  misc_feature: MA Experiment 20001451 PARAMETER Experiment Name: At_Far-red-induction_P Parameter: Timepoint (hr) Value: 24
  misc_feature: MA Experiment 20001451 PARAMETER Experiment Name: At_Far-red-induction_P Parameter: Tissue Value: Whole Plant
aacactaacactttttcaaattgtcgtctaaagtctctaaaaccaccatcgaagtcttgacagagagaattcgaatcggacagagaatttcttccgtagtttttcttgtaagcgaaaaagaagtttagttagctcgtgtgagagaagggtgtaatgagctgttttggttggtgtgggagtgaggattttcgcaacgctactgacactggcccaaggccagcgcataacccagcaggttacaatggaggccactaccaaagagctgatccacccatgaaccagcctgttattcccatgcagcctatttctgtaccagccattccagtggatgagctgagagatataactgataactatggttcaaagaccttgatcggcgagggttcttatggaagagtgttttatggtgttcttaaaagcggtggtgcagctgccatcaagaaacttgactctagtaagcagccagatcaagaatttctttcccagatatcaatggtttcgagattgcgacatgacaatgttactgcacttatgggctattgtgttgatggccctctccgtgttcttgcttatgaatttgctcctaaaggatctcttcatgatactcttcatggcaaaaaaggtgccaaaggagcacttagaggtcctgttatgacgtggcaacagagagtcaaaatcgccgttggtgcggccagaggacttgagtacttgcatgagaaggtgagccctcaggttatccaccgagacatcaaatccagcaacgtacttctgtttgatgatgatgttgccaaaattggtgattttgatctgtctgatcaagcccctgacatggctgctcgccttcactcaactcgtgtgctaggaacctttggctaccacgctccagaatatgcaatgacaggaacgttgagctcaaagagcgatgtgtacagttttggcgttgttctgctggagctcctaactggtcgtaaaccagtcgatcataccttaccgcgtggacaacaaagtctagtgacatgggcaacccctaaactaagtgaagacaaagtgaagcaatgcgttgatgcaagactactcggagagtaccctcccaaagctgttggcaagctagctgcagtggctgcactctgtgtgcaatatgaggcaaatttcagaccaaacatgagcattgtggtgaaggcacttcaacctcttttaaaccctcctcgttctgctccgcagactccacataggaacccctactgatcaaatattcaatcccccatatctcatcttctgatcatgatgattcatcaaatgtgtattattcattttggttctgtattgtgtaaatttatgggaccttatctcattaactcttcattctcaagtcccacttttcaagacatgtgtatgtctctcctctatatcaatatattttatgt

SEQ ID NO: 45716 - protein, 363 aa, Arabidopsis thaliana; identical to SEQ ID NO: 24281
  peptide (1)..(363): Ceres Seq. ID no. 12561199
  misc_feature (1)..(355): Homolog of NCBI NO: 15226492 NR Description: putative protein kinase
  misc_feature (1)..(355): Homolog of NCBI NO: 3668069 NR Description: Pto kinase interactor 1 [Lycopersicon esculentum]
  misc_feature (1)..(28): Homolog of NCBI NO: 25405922 NR Description: protein F21D18.6 [imported] - Arabidopsis
  misc_feature (28)..(363): Homolog of NCBI NO: 25405922 NR Description: protein F21D18.6 [imported] - Arabidopsis
  misc_feature (1)..(363): Homolog of NCBI NO: 8778965 NR Description: Similar to Pto kinase interactor 1 from esculentum gb|U28007. It contains a Eukaryotic protein kinase
  misc_feature (1)..(349): Homolog of NCBI NO: 15221113 NR Description: Pto kinase interactor 1, putative; protein id:
  misc_feature (1)..(363): Homolog of NCBI NO: 22331138 NR Description: putative protein kinase
  misc_feature (1)..(341): Homolog of NCBI NO: 25405922 NR Description: protein F21D18.6 [imported] - Arabidopsis
  misc_feature (1)..(363): Homolog of NCBI NO: 15451196 NR Description: similar to Pto kinase interactor 1 gb|AAC61805.1
  misc_feature (1)..(363): Homolog of NCBI NO: 15221111 NR Description: Pto kinase interactor 1, putative

SEQ ID NO: 45717 - protein, 323 aa, Arabidopsis thaliana; identical to SEQ ID NO: 24282
  peptide (1)..(323): Ceres Seq. ID no. 12561200
  misc_feature (1)..(302): Homolog of NCBI NO: 1586940 NR Description: Ser/Thr kinase
  misc_feature (1)..(315): Homolog of NCBI NO: 15226492 NR Description: putative protein kinase
  misc_feature (1)..(315): Homolog of NCBI NO: 3668069 NR Description: Pto kinase interactor 1 [Lycopersicon esculentum]
  misc_feature (1)..(323): Homolog of NCBI NO: 25405922 NR Description: protein F21D18.6 [imported] - Arabidopsis
  misc_feature (1)..(323): Homolog of NCBI NO: 8778965 NR Description: Similar to Pto kinase interactor 1 from esculentum gb|U28007. It contains a Eukaryotic protein kinase
  misc_feature (1)..(309): Homolog of NCBI NO: 15221113 NR Description: Pto kinase interactor 1, putative; protein id:
  misc_feature (1)..(323): Homolog of NCBI NO: 22331138 NR Description: putative protein kinase
  misc_feature (1)..(301): Homolog of NCBI NO: 25405922 NR Description: protein F21D18.6 [imported] - Arabidopsis
  misc_feature (1)..(323): Homolog of NCBI NO: 15451196 NR Description: similar to Pto kinase interactor 1 gb|AAC61805.1
  misc_feature (1)..(323): Homolog of NCBI NO: 15221111 NR Description: Pto kinase interactor 1, putative

SEQ ID NO: 45718 - protein, 316 aa, Arabidopsis thaliana; identical to SEQ ID NO: 24283
  peptide (1)..(316): Ceres Seq. ID no. 12561201
  misc_feature (1)..(295): Homolog of NCBI NO: 1586940 NR Description: Ser/Thr kinase
  misc_feature (1)..(308): Homolog of NCBI NO: 15226492 NR Description: putative protein kinase
  misc_feature (1)..(308): Homolog of NCBI NO: 3668069 NR Description: Pto kinase interactor 1 [Lycopersicon esculentum]
  misc_feature (1)..(316): Homolog of NCBI NO: 25405922 NR Description: protein F21D18.6 [imported] - Arabidopsis
  misc_feature (1)..(316): Homolog of NCBI NO: 8778965 NR Description: Similar to Pto kinase interactor 1 from esculentum gb|U28007. It contains a Eukaryotic protein kinase
  misc_feature (1)..(302): Homolog of NCBI NO: 15221113 NR Description: Pto kinase interactor 1, putative; protein id:
  misc_feature (1)..(316): Homolog of NCBI NO: 22331138 NR Description: putative protein kinase
  misc_feature (1)..(294): Homolog of NCBI NO: 25405922 NR Description: protein F21D18.6 [imported] - Arabidopsis
  misc_feature (1)..(316): Homolog of NCBI NO: 15451196 NR Description: similar to Pto kinase interactor 1 gb|AAC61805.1
  misc_feature (1)..(316): Homolog of NCBI NO: 15221111 NR Description: Pto kinase interactor 1, putative

SEQ ID NO: 45719 - DNA, 2165 bp, Arabidopsis thaliana
  misc_feature (1)..(2165): Ceres Seq. ID no. 13646758
  misc_feature: MA Experiment ID: 20000185 Result: Up-regulated in Transcription
  misc_feature: MA Experiment 20000185 PARAMETER Experiment Name: At_Roots__P Parameter: Age (day) Value: 7 vs. 21
  misc_feature: MA Experiment 20000185 PARAMETER Experiment Name: At_Roots__P Parameter: Organism Value: A. thaliana
  misc_feature: MA Experiment 20000185 PARAMETER Experiment Name: At_Roots__P Parameter: Tissue Value: Roots vs. Whole Plant
  misc_feature: MA Experiment ID: 20000265 Result: Up-regulated in Transcription
  misc_feature: MA Experiment 20000265 PARAMETER Experiment Name: At_Open_Flower_P Parameter: Age (day) Value: 21
  misc_feature: MA Experiment 20000265 PARAMETER Experiment Name: At_Open_Flower_P Parameter: Plant Line Value: WS
  misc_feature: MA Experiment 20000265 PARAMETER Experiment Name: At_Open_Flower_P Parameter: Tissue Value: Closed Flower vs. Whole Plant
  misc_feature: MA Experiment ID: 20000286 Result: Up-regulated in Transcription
  misc_feature: MA Experiment 20000286 PARAMETER Experiment Name: At_Open_Flower_P Parameter: Age (day) Value: 21
  misc_feature: MA Experiment 20000286 PARAMETER Experiment Name: At_Open_Flower_P Parameter: Plant Line Value: WS
  misc_feature: MA Experiment 20000286 PARAMETER Experiment Name: At_Open_Flower_P Parameter: Tissue Value: Half Open vs. Whole Plant
  misc_feature: MA Experiment ID: 20000437 Result: Down-regulated in Transcription
  misc_feature: MA Experiment 20000437 PARAMETER Experiment Name: At_Drought_P Parameter: Age (day) Value: 8
  misc_feature: MA Experiment 20000437 PARAMETER Experiment Name: At_Drought_P Parameter: Organism Value: A. thaliana
  misc_feature: MA Experiment 20000437 PARAMETER Experiment Name: At_Drought_P Parameter: Plant Line Value: WS
  misc_feature: MA Experiment 20000437 PARAMETER Experiment Name: At_Drought_P Parameter: Timepoint (hr) Value: 24
  misc_feature: MA Experiment 20000437 PARAMETER Experiment Name: At_Drought_P Parameter: Tissue Value: Whole Plant
  misc_feature: MA Experiment 20000437 PARAMETER Experiment Name: At_Drought_P Parameter: Treatment Value: Drought vs. No Drought
  misc_feature: MA Experiment ID: 20000439 Result: Up-regulated in Transcription
  misc_feature: MA Experiment 20000439 PARAMETER Experiment Name: At_Roots__P Parameter: Age (day) Value: 14 vs. 21
  misc_feature: MA Experiment 20000439 PARAMETER Experiment Name: At_Roots__P Parameter: Organism Value: A. thaliana
  misc_feature: MA Experiment 20000439 PARAMETER Experiment Name: At_Roots__P Parameter: Tissue Value: Roots vs. Whole Plant
  misc_feature: MA Experiment ID: 20001451 Result: Up-regulated in Transcription
  misc_feature: MA Experiment 20001451 PARAMETER Experiment Name: At_Far-red-induction_P Parameter: Age (day) Value: 7
  misc_feature: MA Experiment 20001451 PARAMETER Experiment Name: At_Far-red-induction_P Parameter: Light Value: Far-red vs. White
  misc_feature: MA Experiment 20001451 PARAMETER Experiment Name: At_Far-red-induction_P Parameter: Organism Value: A. thaliana
  misc_feature: MA Experiment 20001451 PARAMETER Experiment Name: At_Far-red-induction_P Parameter: Plant Line Value: Columbia
  misc_feature: MA Experiment 20001451 PARAMETER Experiment Name: At_Far-red-induction_P Parameter: Timepoint (hr) Value: 24
  misc_feature: MA Experiment 20001451 PARAMETER Experiment Name: At_Far-red-induction_P Parameter: Tissue Value: Whole Plant
  misc_feature: MA Experiment ID: 20001557 Result: Up-regulated in Transcription
  misc_feature: MA Experiment 20001557 PARAMETER Experiment Name: At_Drought_Soil_Dry_P Parameter: Age (day) Value: 27
  misc_feature: MA Experiment 20001557 PARAMETER Experiment Name: At_Drought_Soil_Dry_P Parameter: Organism Value: A. thaliana
  misc_feature: MA Experiment 20001557 PARAMETER Experiment Name: At_Drought_Soil_Dry_P Parameter: Plant Line Value: WS
  misc_feature: MA Experiment 20001557 PARAMETER Experiment Name: At_Drought_Soil_Dry_P Parameter: Post Timepoint (hr) Value: 3
  misc_feature: MA Experiment 20001557 PARAMETER Experiment Name: At_Drought_Soil_Dry_P Parameter: Post-Treatment Value: Re-Water vs. No Drought
  misc_feature: MA Experiment 20001557 PARAMETER Experiment Name: At_Drought_Soil_Dry_P Parameter: Timepoint (day) Value: 13
  misc_feature: MA Experiment 20001557 PARAMETER Experiment Name: At_Drought_Soil_Dry_P Parameter: Treatment Value: Drought vs. No Drought
gaaaagaagaaagacacatttcgttagtagaaatggcgggaaacggaaacgaaagtaccggtggagacttcagtttctcggctgcggcggcccgtgatgcgcttccgaggatcacgactgagaagggcggcaaatctccagggccggcagacgtctgccaggatgacatcgcaccgcgggtcaactttcagaccatcgacgagcttcacagtctccagaagaaacgatctgcccctaccactcctcttagagatggcagcgccagcggagtcagcggaactagtggtccgactactcctgtctccagcgagaccatgcttcaatccgtcagtgcatcgttggcttcgttgacgagagagacaggaccgaagttaataagaggagatccgacttcggcagctaaagtagcacacgtgccagtgactcctacgtcacttccggctgctgacgtcagcgacagtggcttgaagttcactcacatccttcacaacctctctcccgccgagttgtacgagcaagcgataaagtttgagaagggatcgtttgtgacatcgaccggtgcgttggctacattgtctggagccaaaaccggtcggtctcctaaagacaagcgtgtggttaaggatgataccactgaggccgaactctggtggggaaaaggatcaccaaacattgaaatggatgaaaaaacttttttggtgaaccgagagagagctgttgattacttaaactccttggacaaggtgtttgtgaatgatcaatacctaaactgggatccagagaacaaaatcaaagtgagaattgtttcagcaagagcttaccattcactattcatgcacaacatgtgtatccgtccaacacctgaggagttagagaatttcgggacacccgatttcacgatttacaacgcggggaaattcccgtgtaaccgtttcactcattacatgacatcttcgacgagtgtggacataaacctaggaagaagagagatggtgattctaggtacccaatatgctggagaaatgaagaaaggactctttggtgtgatgcattatttgatgcctaagagaaagattttgtctcttcactctggttgtaacatgggcaaagatggagatgttgctctctttttcggactctctggtaccggaaagactacgttgtcgactgaccataaccggtatttgatcggagatgatgaacattgttggagtgaggctggagtttcgaatatcgaaggtggttgttacgcgaaatgcattgatttggctagggacaaagagcctgatatctggaacgctatcaagtttggaaccgttttggagaatgttgtgtttgatgagcatacacgagaagtggattacactgacaaatcagtgacggagaacacacgtgcggcttatccgatagagtacattccaaactcgaagataccgtgcgttggaccacacccgaagaacgtgatcctattggcttgtgacgccttcggtgtgttgccgccaatcagcaagctcaatcttgctcagactatgtaccatttcatcagtggctacactgctctcgttgcaggaacagaggaaggagttaaggaacctcgagcgacattctcagcttgttttggtgctgctttcattatgctacacccaaccaagtacgctgctatgttggctgagaaaatgcaggctcaaggagccaccggttggcttgttaacaccggttggtccggtggaagctacggaactggaagccgaatcaagttggcgtatacacgaaagataatcgatgctatacattcgggtagtctactgaatgcaagttaccgtaaaacagatatttttggtttggagattccaaatgaagtagaaggagttccttctgagatactggaacctattaatgcatggcctgataaaatggcttatgaggacacattgttgaaattggctggtttgtttaaaagcaattttgagacattcacaagtcataagattggtgatgatggaaaattgactgaagagattcttgcagctggtcctaacttctaaagtgattgaagatgatgatgaaaaacaaaccttcttactaaccaaaataagacaactattttttttcacttcccaattttttcccattttttgttaatgacttcagtaagaacggcaatt

SEQ ID NO: 45720 - protein, 680 aa, Arabidopsis thaliana
  peptide (1)..(680): Ceres Seq. ID no. 15219092
  misc_feature (156)..(627): Pfam Name: Phosphoenolpyruvate carboxykinase Pfam Description: Phosphoenolpyruvate carboxykinase
  misc_feature (29)..(680): Homolog of NCBI NO: 12230480 NR Description: Phosphoenolpyruvate carboxykinase
  misc_feature (11)..(678): Homolog of NCBI NO: 1172571 NR Description: Phosphoenolpyruvate carboxykinase
  misc_feature (11)..(680): Homolog of NCBI NO: 16950587 NR Description: phosphoenolpyruvate carboxykinase [Lycopersicon
  misc_feature (12)..(680): Homolog of NCBI NO: 15235730 NR Description: phosphoenolpyruvate carboxykinase (ATP) -related
  misc_feature (11)..(680): Homolog of NCBI NO: 13785471 NR Description: phosphoenolpyruvate carboxykinase [Flaveria
  misc_feature (11)..(680): Homolog of NCBI NO: 13785469 NR Description: phosphoenolpyruvate carboxykinase [Flaveria
  misc_feature (11)..(680): Homolog of NCBI NO: 13785467 NR Description: phosphoenolpyruvate carboxykinase [Flaveria
KEERHISLVEMAGNGNESTGGDFSFSAAAARDALPRITTEKGGKSPGPADVCQDDIAPRVNFQTIDELHSLQKKRSAPTTPLRDGSASGVSGTSGPTTPVSSETMLQSVSASLASLTRETGPKLIRGDPTSAAKVAHVPVTPTSLPAADVSDSGLKFTHILHNLSPAELYEQAIKFEKGSFVTSTGALATLSGAKTGRSPKDKRVVKDDTTEAELWWGKGSPNIEMDEKTFLVNRERAVDYLNSLDKVFVNDQYLNWDPENKIKVRIVSARAYHSLFMHNMCIRPTPEELENFGTPDFTIYNAGKFPCNRFTHYMTSSTSVDINLGRREMVILGTQYAGEMKKGLFGVMHYLMPKRKILSLHSGCNMGKDGDVALFFGLSGTGKTTLSTDHNRYLIGDDEHCWSEAGVSNIEGGCYAKCIDLARDKEPDIWNAIKFGTVLENVVFDEHTREVDYTDKSVTENTRAAYPIEYIPNSKIPCVGPHPKNVILLACDAFGVLPPISKLNLAQTMYHFISGYTALVAGTEEGVKEPRATFSACFGAAFIMLHPTKYAAMLAEKMQAQGATGWLVNTGWSGGSYGTGSRIKLAYTRKIIDAIHSGSLLNASYRKTDIFGLEIPNEVEGVPSEILEPINAWPDKMAYEDTLLKLAGLFKSNFETFTSHKIGDDGKLTEEILAAGPNF

SEQ ID NO: 45721 - protein, 670 aa, Arabidopsis thaliana
  peptide (1)..(670): Ceres Seq. ID no. 15219093
  misc_feature (146)..(617): Pfam Name: Phosphoenolpyruvate carboxykinase Pfam Description: Phosphoenolpyruvate carboxykinase
  misc_feature (19)..(670): Homolog of NCBI NO: 12230480 NR Description: Phosphoenolpyruvate carboxykinase
  misc_feature (1)..(668): Homolog of NCBI NO: 1172571 NR Description: Phosphoenolpyruvate carboxykinase
  misc_feature (1)..(670): Homolog of NCBI NO: 16950587 NR Description: phosphoenolpyruvate carboxykinase [Lycopersicon
  misc_feature (2)..(670): Homolog of NCBI NO: 15235730 NR Description: phosphoenolpyruvate carboxykinase (ATP) -related
  misc_feature (1)..(670): Homolog of NCBI NO: 13785471 NR Description: phosphoenolpyruvate carboxykinase [Flaveria
  misc_feature (1)..(670): Homolog of NCBI NO: 13785469 NR Description: phosphoenolpyruvate carboxykinase [Flaveria
  misc_feature (1)..(670): Homolog of NCBI NO: 13785467 NR Description: phosphoenolpyruvate carboxykinase [Flaveria
MAGNGNESTGGDFSFSAAAARDALPRITTEKGGKSPGPADVCQDDIAPRVNFQTIDELHSLQKKRSAPTTPLRDGSASGVSGTSGPTTPVSSETMLQSVSASLASLTRETGPKLIRGDPTSAAKVAHVPVTPTSLPAADVSDSGLKFTHILHNLSPAELYEQAIKFEKGSFVTSTGALATLSGAKTGRSPKDKRVVKDDTTEAELWWGKGSPNIEMDEKTFLVNRERAVDYLNSLDKVFVNDQYLNWDPENKIKVRIVSARAYHSLFMHNMCIRPTPEELENFGTPDFTIYNAGKFPCNRFTHYMTSSTSVDINLGRREMVILGTQYAGEMKKGLFGVMHYLMPKRKILSLHSGCNMGKDGDVALFFGLSGTGKTTLSTDHNRYLIGDDEHCWSEAGVSNIEGGCYAKCIDLARDKEPDIWNAIKFGTVLENVVFDEHTREVDYTDKSVTENTRAAYPIEYIPNSKIPCVGPHPKNVILLACDAFGVLPPISKLNLAQTMYHFISGYTALVAGTEEGVKEPRATFSACFGAAFIMLHPTKYAAMLAEKMQAQGATGWLVNTGWSGGSYGTGSRIKLAYTRKIIDAIHSGSLLNASYRKTDIFGLEIPNEVEGVPSEILEPINAWPDKMAYEDTLLKLAGLFKSNFETFTSHKIGDDGKLTEEILAAGPNF

SEQ ID NO: 45722 - protein, 576 aa, Arabidopsis thaliana
  peptide (1)..(576): Ceres Seq. ID no. 15219094
  misc_feature (52)..(523): Pfam Name: Phosphoenolpyruvate carboxykinase Pfam Description: Phosphoenolpyruvate carboxykinase
  misc_feature (1)..(576): Homolog of NCBI NO: 12230480 NR Description: Phosphoenolpyruvate carboxykinase
  misc_feature (1)..(574): Homolog of NCBI NO: 1172571 NR Description: Phosphoenolpyruvate carboxykinase
  misc_feature (1)..(576): Homolog of NCBI NO: 16950587 NR Description: phosphoenolpyruvate carboxykinase [Lycopersicon
  misc_feature (1)..(576): Homolog of NCBI NO: 15235730 NR Description: phosphoenolpyruvate carboxykinase (ATP) -related
  misc_feature (1)..(576): Homolog of NCBI NO: 13785471 NR Description: phosphoenolpyruvate carboxykinase [Flaveria
  misc_feature (1)..(576): Homolog of NCBI NO: 13785469 NR Description: phosphoenolpyruvate carboxykinase [Flaveria
  misc_feature (1)..(576): Homolog of NCBI NO: 13785467 NR Description: phosphoenolpyruvate carboxykinase [Flaveria
MLQSVSASLASLTRETGPKLIRGDPTSAAKVAHVPVTPTSLPAADVSDSGLKFTHILHNLSPAELYEQAIKFEKGSFVTSTGALATLSGAKTGRSPKDKRVVKDDTTEAELWWGKGSPNIEMDEKTFLVNRERAVDYLNSLDKVFVNDQYLNWDPENKIKVRIVSARAYHSLFMHNMCIRPTPEELENFGTPDFTIYNAGKFPCNRFTHYMTSSTSVDINLGRREMVILGTQYAGEMKKGLFGVMHYLMPKRKILSLHSGCNMGKDGDVALFFGLSGTGKTTLSTDHNRYLIGDDEHCWSEAGVSNIEGGCYAKCIDLARDKEPDIWNAIKFGTVLENVVFDEHTREVDYTDKSVTENTRAAYPIEYIPNSKIPCVGPHPKNVILLACDAFGVLPPISKLNLAQTMYHFISGYTALVAGTEEGVKEPRATFSACFGAAFIMLHPTKYAAMLAEKMQAQGATGWLVNTGWSGGSYGTGSRIKLAYTRKIIDAIHSGSLLNASYRKTDIFGLEIPNEVEGVPSEILEPINAWPDKMAYEDTLLKLAGLFKSNFETFTSHKIGDDGKLTEEILAAGPNF

SEQ ID NO: 45723 - DNA, 2374 bp, Arabidopsis thaliana
  misc_feature (1)..(2374): Ceres Seq. ID no. 13646465
  misc_feature: MA Experiment ID: 20000180 Result: Down-regulated in Transcription
  misc_feature: MA Experiment 20000180 PARAMETER Experiment Name: At_Germinating_Seeds_P Parameter: Age (hr) Value: 24 vs. 0
  misc_feature: MA Experiment 20000180 PARAMETER Experiment Name: At_Germinating_Seeds_P Parameter: Tissue Value: Germinating Seeds
aaccttcacgcgcggctactcctactttcgcttcgtccggttccgtcgatactgtctccgaatcactgtcttctttcctttttcttcctacatgacatctgtcttatctcttttatgtttctctagatgtacttatacttccatgtttcgtctgtatacgacggagaagcaaaattgcttgaactttcgctttgatggatcaaactagtcttggaacaataatcaaaatccattcgttgccatcatatgcagcttactgtatatgccgtcttctccttctcgctctatactcagaggtctcactgtatccgaaatttgcaagtttattcctcaatcgtggaaacagctgccgagacccatctcagaaacttccaaaacccatgatgatgaatcagttccacaagtgcttttcaattcatttagacattgcatttcccatggtcaattatatgaagctttcagaactttctctctacttcgctaccagtctggttctcatgaattcgttttgtattcatcagcttctcttctatctacatgtgtgggttttaatgagtttgttcctggccagcaacttcatgctcattgtatctcgtcgggtttggagtttgactctgttttggtcccaaagttggtcactttctactctgcttttaatctccttgacgaagctcagaccattactgagaactctgagattttgcatcccttgccgtggaatgtgctcatcggttcgtatattaggaacaaaaggtttcaggagtctgtttctgtttacaagcgaatgatgagtaaaggaattagagcggatgaatttacttacccgtctgttatcaaggcttgtgcagcattactggattttgcatatgggagagttgttcatggctctattgaggttagctctcacaggtgtaacttgtatgtctgcaacgcgttgatatctatgtataaaagatttggtaaagtggatgttgctcggagattgtttgacaggatgtctgaaagggatgctgtctcatggaatgcaataatcaactgttatacttcagaagaaaagttaggggaagcttttaagcttcttgatagaatgtatctctctggtgtcgaagcgagtattgtaacttggaacacaatagctggaggttgtttggaggcaggaaattacataggggctttgaattgtgttgttgggatgagaaattgcaatgtaagaataggttctgtagctatgattaatggtttaaaggcatgctcacacattggagcgttaaagtgggggaaagtatttcattgccttgtgatccgtagttgtagtttttcccatgatattgacaatgttcggaattcgttgatcacaatgtactcaagatgcagtgatcttaggcacgcgtttatagtgtttcagcaggttgaagcaaatagtttgagtacatggaattctatcatttccggttttgcatacaacgagagatcagaagaaacctctttcctgctcaaggagatgttgctctctggatttcacccaaatcacattacgcttgctagcattctccctctttttgctcgggtgggaaacctgcaacatgggaaagagtttcactgctacatcctgagacgccaaagctacaaggactgtttaatcctgtggaactcccttgtcgatatgtatgcaaaatccggtgaaatcatagctgcaaagcgagtatttgattcgatgaggaagagggacaaagtgacatacacttctttgatcgatggatatggcaggctgggtaaaggagaagtcgcattggcatggttcaaggatatggacagatccggtatcaaacctgatcatgtaactatggttgcagttttatcagcttgcagccattccaatttagtgcgtgaaggacactggttgtttacgaagatggagcatgtgtttggtatacgccttcgccttgaacactattcttgtatggttgatctttattgcagagcaggttacctggataaagccagagatatattccatacaataccttacgagccatcaagtgctatgtgtgctactctactgaaagcgtgcctcatccacgggaacacaaacattggggagtgggctgcagataagttactactagaaacaaagccagaacacttaggtcactatatgttgcttgcagatatgtatgcagtaactggttcttggagcaagcttgtaacggtgaagactttactgagtgacttgggcgtgcaaaaggctcatgagtttgctttgatggaaacagattcggagttagatggagagaataataagccgatgaacgatgattctgtcatcaatcaggagcaaagttcagatgaagaacgtcttgtagaagtaggataa

SEQ ID NO: 45724 - protein, 703 aa, Arabidopsis thaliana
  peptide (1)..(703): Ceres Seq. ID no. 13646466
  misc_feature (562)..(596): Pfam Name: PPR repeat Pfam Description: PPR repeat
  misc_feature (88)..(287): Homolog of NCBI NO: 34897084 NR Description: hypothetical protein [Oryza sativa (japonica
  misc_feature (269)..(672): Homolog of NCBI NO: 34897084 NR Description: hypothetical protein [Oryza sativa (japonica
  misc_feature (84)..(661): Homolog of NCBI NO: 15237421 NR Description: pentatricopeptide (PPR) repeat-containing protein
  misc_feature (84)..(672): Homolog of NCBI NO: 15223099 NR Description: pentatricopeptide (PPR) repeat-containing protein
  misc_feature (88)..(287): Homolog of NCBI NO: 15228257 NR Description: pentatricopeptide (PPR) repeat-containing protein
  misc_feature (244)..(669): Homolog of NCBI NO: 15228257 NR Description: pentatricopeptide (PPR) repeat-containing protein
  misc_feature (13)..(698): Homolog of NCBI NO: 34904686 NR Description: P0446G09.7 [Oryza sativa (japonica
  misc_feature (414)..(703): Homolog of NCBI NO: 2462841 NR Description: similar to selenium-binding protein
  misc_feature (49)..(672): Homolog of NCBI NO: 15217514 NR Description: pentatricopeptide (PPR) repeat-containing protein
  misc_feature (1)..(435): Homolog of NCBI NO: 7487353 NR Description: hypothetical protein T22J18.1 - Arabidopsis
MPSSPSRSILRGLTVSEICKFIPQSWKQLPRPISETSKTHDDESVPQVLFNSFRHCISHGQLYEAFRTFSLLRYQSGSHEFVLYSSASLLSTCVGFNEFVPGQQLHAHCISSGLEFDSVLVPKLVTFYSAFNLLDEAQTITENSEILHPLPWNVLIGSYIRNKRFQESVSVYKRMMSKGIRADEFTYPSVIKACAALLDFAYGRVVHGSIEVSSHRCNLYVCNALISMYKRFGKVDVARRLFDRMSERDAVSWNAIINCYTSEEKLGEAFKLLDRMYLSGVEASIVTWNTIAGGCLEAGNYIGALNCVVGMRNCNVRIGSVAMINGLKACSHIGALKWGKVFHCLVIRSCSFSHDIDNVRNSLITMYSRCSDLRHAFIVFQQVEANSLSTWNSIISGFAYNERSEETSFLLKEMLLSGFHPNHITLASILPLFARVGNLQHGKEFHCYILRRQSYKDCLILWNSLVDMYAKSGEIIAAKRVFDSMRKRDKVTYTSLIDGYGRLGKGEVALAWFKDMDRSGIKPDHVTMVAVLSACSHSNLVREGHWLFTKMEHVFGIRLRLEHYSCMVDLYCRAGYLDKARDIFHTIPYEPSSAMCATLLKACLIHGNTNIGEWAADKLLLETKPEHLGHYMLLADMYAVTGSWSKLVTVKTLLSDLGVQKAHEFALMETDSELDGENNKPMNDDSVINQEQSSDEERLVEVG

SEQ ID NO: 45725 - protein, 529 aa, Arabidopsis thaliana
  peptide (1)..(529): Ceres Seq. ID no. 13646467
  misc_feature (388)..(422): Pfam Name: PPR repeat Pfam Description: PPR repeat
  misc_feature (1)..(113): Homolog of NCBI NO: 34897084 NR Description: hypothetical protein [Oryza sativa (japonica
  misc_feature (95)..(498): Homolog of NCBI NO: 34897084 NR Description: hypothetical protein [Oryza sativa (japonica
  misc_feature (1)..(487): Homolog of NCBI NO: 15237421 NR Description: pentatricopeptide (PPR) repeat-containing protein
  misc_feature (1)..(498): Homolog of NCBI NO: 15223099 NR Description: pentatricopeptide (PPR) repeat-containing protein
  misc_feature (1)..(113): Homolog of NCBI NO: 15228257 NR Description: pentatricopeptide (PPR) repeat-containing protein
  misc_feature (70)..(495): Homolog of NCBI NO: 15228257 NR Description: pentatricopeptide (PPR) repeat-containing protein
  misc_feature (1)..(524): Homolog of NCBI NO: 34904686 NR Description: P0446G09.7 [Oryza sativa (japonica
  misc_feature (240)..(529): Homolog of NCBI NO: 2462841 NR Description: similar to selenium-binding protein
  misc_feature (1)..(498): Homolog of NCBI NO: 15217514 NR Description: pentatricopeptide (PPR) repeat-containing protein
  misc_feature (1)..(261): Homolog of NCBI NO: 7487353 NR Description: hypothetical protein T22J18.1 - Arabidopsis
MMSKGIRADEFTYPSVIKACAALLDFAYGRVVHGSIEVSSHRCNLYVCNALISMYKRFGKVDVARRLFDRMSERDAVSWNAIINCYTSEEKLGEAFKLLDRMYLSGVEASIVTWNTIAGGCLEAGNYIGALNCVVGMRNCNVRIGSVAMINGLKACSHIGALKWGKVFHCLVIRSCSFSHDIDNVRNSLITMYSRCSDLRHAFIVFQQVEANSLSTWNSIISGFAYNERSEETSFLLKEMLLSGFHPNHITLASILPLFARVGNLQHGKEFHCYILRRQSYKDCLILWNSLVDMYAKSGEIIAAKRVFDSMRKRDKVTYTSLIDGYGRLGKGEVALAWFKDMDRSGIKPDHVTMVAVLSACSHSNLVREGHWLFTKMEHVFGIRLRLEHYSCMVDLYCRAGYLDKARDIFHTIPYEPSSAMCATLLKACLIHGNTNIGEWAADKLLLETKPEHLGHYMLLADMYAVTGSWSKLVTVKTLLSDLGVQKAHEFALMETDSELDGENNKPMNDDSVINQEQSSDEERLVEVG

SEQ ID NO: 45726 - protein, 528 aa, Arabidopsis thaliana
  peptide (1)..(528): Ceres Seq. ID no. 13646468
  misc_feature (387)..(421): Pfam Name: PPR repeat Pfam Description: PPR repeat
  misc_feature (1)..(112): Homolog of NCBI NO: 34897084 NR Description: hypothetical protein [Oryza sativa (japonica
  misc_feature (94)..(497): Homolog of NCBI NO: 34897084 NR Description: hypothetical protein [Oryza sativa (japonica
  misc_feature (1)..(486): Homolog of NCBI NO: 15237421 NR Description: pentatricopeptide (PPR) repeat-containing protein
  misc_feature (1)..(497): Homolog of NCBI NO: 15223099 NR Description: pentatricopeptide (PPR) repeat-containing protein
  misc_feature (1)..(112): Homolog of NCBI NO: 15228257 NR Description: pentatricopeptide (PPR) repeat-containing protein
  misc_feature (69)..(494): Homolog of NCBI NO: 15228257 NR Description: pentatricopeptide (PPR) repeat-containing protein
  misc_feature (1)..(523): Homolog of NCBI NO: 34904686 NR Description: P0446G09.7 [Oryza sativa (japonica
  misc_feature (239)..(528): Homolog of NCBI NO: 2462841 NR Description: similar to selenium-binding protein
  misc_feature (1)..(497): Homolog of NCBI NO: 15217514 NR Description: pentatricopeptide (PPR) repeat-containing protein
  misc_feature (1)..(260): Homolog of NCBI NO: 7487353 NR Description: hypothetical protein T22J18.1 - Arabidopsis
MSKGIRADEFTYPSVIKACAALLDFAYGRVVHGSIEVSSHRCNLYVCNALISMYKRFGKVDVARRLFDRMSERDAVSWNAIINCYTSEEKLGEAFKLLDRMYLSGVEASIVTWNTIAGGCLEAGNYIGALNCVVGMRNCNVRIGSVAMINGLKACSHIGALKWGKVFHCLVIRSCSFSHDIDNVRNSLITMYSRCSDLRHAFIVFQQVEANSLSTWNSIISGFAYNERSEETSFLLKEMLLSGFHPNHITLASILPLFARVGNLQHGKEFHCYILRRQSYKDCLILWNSLVDMYAKSGEIIAAKRVFDSMRKRDKVTYTSLIDGYGRLGKGEVALAWFKDMDRSGIKPDHVTMVAVLSACSHSNLVREGHWLFTKMEHVFGIRLRLEHYSCMVDLYCRAGYLDKARDIFHTIPYEPSSAMCATLLKACLIHGNTNIGEWAADKLLLETKPEHLGHYMLLADMYAVTGSWSKLVTVKTLLSDLGVQKAHEFALMETDSELDGENNKPMNDDSVINQEQSSDEERLVEVG

SEQ ID NO: 45727 - DNA, 1597 bp, Arabidopsis thaliana
  misc_feature (1)..(1597): Ceres Seq. ID no. 13576220
  misc_feature: MA Experiment ID: 20000184 Result: Up-regulated in Transcription
  misc_feature: MA Experiment 20000184 PARAMETER Experiment Name: At_Shoots__P Parameter: Age (day) Value: 7
  misc_feature: MA Experiment 20000184 PARAMETER Experiment Name: At_Shoots__P Parameter: Tissue Value: Shoots vs. Whole Plant
  misc_feature: MA Experiment ID: 20000234 Result: Up-regulated in Transcription
  misc_feature: MA Experiment 20000234 PARAMETER Experiment Name: At_Siliques_P Parameter: Age (day) Value: 21
  misc_feature: MA Experiment 20000234 PARAMETER Experiment Name: At_Siliques_P Parameter: Organism Value: A. thaliana
  misc_feature: MA Experiment 20000234 PARAMETER Experiment Name: At_Siliques_P Parameter: Plant Line Value: WS
  misc_feature: MA Experiment 20000234 PARAMETER Experiment Name: At_Siliques_P Parameter: Tissue Value: Less Than 5mm Siliques vs. Whole Plant
  misc_feature: MA Experiment ID: 20000265 Result: Up-regulated in Transcription
  misc_feature: MA Experiment 20000265 PARAMETER Experiment Name: At_Open_Flower_P Parameter: Age (day) Value: 21
  misc_feature: MA Experiment 20000265 PARAMETER Experiment Name: At_Open_Flower_P Parameter: Plant Line Value: WS
  misc_feature: MA Experiment 20000265 PARAMETER Experiment Name: At_Open_Flower_P Parameter: Tissue Value: Closed Flower vs. Whole Plant
  misc_feature: MA Experiment ID: 20000286 Result: Up-regulated in Transcription
  misc_feature: MA Experiment 20000286 PARAMETER Experiment Name: At_Open_Flower_P Parameter: Age (day) Value: 21
  misc_feature: MA Experiment 20000286 PARAMETER Experiment Name: At_Open_Flower_P Parameter: Plant Line Value: WS
  misc_feature: MA Experiment 20000286 PARAMETER Experiment Name: At_Open_Flower_P Parameter: Tissue Value: Half Open vs. Whole Plant
  misc_feature: MA Experiment ID: 20000438 Result: Up-regulated in Transcription
  misc_feature: MA Experiment 20000438 PARAMETER Experiment Name: At_Shoots__P Parameter: Age (day) Value: 14
  misc_feature: MA Experiment 20000438 PARAMETER Experiment Name: At_Shoots__P Parameter: Tissue Value: Shoots vs. Whole Plant
  misc_feature: MA Experiment ID: 20000451 Result: Up-regulated in Transcription
  misc_feature: MA Experiment 20000451 PARAMETER Experiment Name: At_CS6879_Shoots-Roots_P Parameter: Age (day) Value: 14
  misc_feature: MA Experiment 20000451 PARAMETER Experiment Name: At_CS6879_Shoots-Roots_P Parameter: Organism Value: A. thaliana
  misc_feature: MA Experiment 20000451 PARAMETER Experiment Name: At_CS6879_Shoots-Roots_P Parameter: Plant Line Value: CS6879 vs. WS
  misc_feature: MA Experiment 20000451 PARAMETER Experiment Name: At_CS6879_Shoots-Roots_P Parameter: Tissue Value: Roots
  misc_feature: MA Experiment ID: 20001504 Result: Down-regulated in Transcription
  misc_feature: MA Experiment 20001504 PARAMETER Experiment Name: At_Far-red-enriched_P Parameter: Age (day) Value: 10
  misc_feature: MA Experiment 20001504 PARAMETER Experiment Name: At_Far-red-enriched_P Parameter: Light Value: Far-red enriched vs. White
  misc_feature: MA Experiment 20001504 PARAMETER Experiment Name: At_Far-red-enriched_P Parameter: Organism Value: A. thaliana
  misc_feature: MA Experiment 20001504 PARAMETER Experiment Name: At_Far-red-enriched_P Parameter: Plant Line Value: Columbia
  misc_feature: MA Experiment 20001504 PARAMETER Experiment Name: At_Far-red-enriched_P Parameter: Timepoint (day) Value: 6
  misc_feature: MA Experiment 20001504 PARAMETER Experiment Name: At_Far-red-enriched_P Parameter: Tissue Value: Whole Plant
  misc_feature: MA Experiment ID: 20001557 Result: Up-regulated in Transcription
  misc_feature: MA Experiment 20001557 PARAMETER Experiment Name: At_Drought_Soil_Dry_P Parameter: Age (day) Value: 27
  misc_feature: MA Experiment 20001557 PARAMETER Experiment Name: At_Drought_Soil_Dry_P Parameter: Organism Value: A. thaliana
  misc_feature: MA Experiment 20001557 PARAMETER Experiment Name: At_Drought_Soil_Dry_P Parameter: Plant Line Value: WS
  misc_feature: MA Experiment 20001557 PARAMETER Experiment Name: At_Drought_Soil_Dry_P Parameter: Post Timepoint (hr) Value: 3
  misc_feature: MA Experiment 20001557 PARAMETER Experiment Name: At_Drought_Soil_Dry_P Parameter: Post-Treatment Value: Re-Water vs. No Drought
  misc_feature: MA Experiment 20001557 PARAMETER Experiment Name: At_Drought_Soil_Dry_P Parameter: Timepoint (day) Value: 13
  misc_feature: MA Experiment 20001557 PARAMETER Experiment Name: At_Drought_Soil_Dry_P Parameter: Treatment Value: Drought vs. No Drought
acactcacaacactctctctctcctgccataactcagcctgagatgtctccggaagcttacgttctgttctttaacagttttaacctcgtaaccttcgaagcctttgcttcagtctcacttatcatagccacagttgctttcttgctctcaccaggtgggctcgcatgggcctggaccgggtcatccaagagtcgggtttcgattccaggaccatctggttctctttccgtcttctccggctccaatccccaccgtgttctcgccgctcttgctaaacgcttcaaggcctctccgttgatggcgttctcagttgggttttcgcgtttcgttatctctagtgaaccggagacggctaaagagattttgagcagctctgcttttgctgaccggccggttaaggagtcagcttacgagcttttgtttcaccgtgccatgggattcgcaccgtatggtgagtattggaggaatctgaggagaatctcctccactcatcttttcagtccaagaagaatcgcgagttttgagggtgttagagttggcatcggtatgaagatggtcaagaagattaaaagccttgttacgtctgatgcttgtggtgaagttgaagtgaaaaagatcgttcactttggttctttgaataatgtaatgacgacagtgtttggtgaaagctacgattttgatgaagttaatggaaaagggtgttttttggagaggctggtgagtgaaggctacgagttgcttgggatttttaactggagtgatcacttttggtttcttcgttggtttgacttccaaggagtgaggaagaggtgtagagctttggtctctgaagtcaacacttttgtcggcggaataattgagaaacacaagatgaagaagggtaataatctcaatggagaggaaaatgacttcgttgatgtcttgcttggcttgcaaaaggatgaaaagttgtctgattctgacatgattgctgttctttgggaaatgatatttagagggacagatacagttgcgattctagtggaatgggtgcttgcaagaatggttttgcatcaagacatccaagataaactctacagagagatagcttctgctacaagtaacaatattagatccttgtctgattccgacatcccaaaactgccgtaccttcaagctattgtcaaagaaaccctaaggctccacccccctggtccacttctctcttgggctcgtctcgctatccatgacgtccacgtaggtcctaaccttgtccctgctggaaccatagctatggtcaacatgtggtccatcacacacaacgctaaaatctggaccgaccctgaagcgtttatgcctgaaaggttcattagtgaggatgtgagcatcatgggctcggatcttagattggctccattcggatccggtcgtcgggtttgtcccggtaaagcaatgggtctagctactgttcatctctggattggtcaactaattcagaattttgaatgggtgaagggttcttgtgatgttgagctcgctgaggttctgaagctgtctatggagatgaagaatccgttgaagtgcaaggctgttccaaggaatgttggtttcgcttga

SEQ ID NO: 45728 - protein, 531 aa, Arabidopsis thaliana
  peptide (1)..(531): Ceres Seq. ID no. 13576221
  misc_feature (69)..(496): Pfam Name: Cytochrome P450 Pfam Description: Cytochrome P450
  misc_feature (43)..(526): Homolog of NCBI NO: 37534160 NR Description: putative cytochrome 450 [Oryza sativa (japonica
  misc_feature (30)..(522): Homolog of NCBI NO: 15226422 NR Description: cytochrome P450, putative [Arabidopsis thaliana]
  misc_feature (28)..(526): Homolog of NCBI NO: 21592543 NR Description: cytochrome p450 (CYP78A9) [Arabidopsis thaliana]
  misc_feature (28)..(526): Homolog of NCBI NO: 15228624 NR Description: cytochrome P450, putative [Arabidopsis thaliana]
  misc_feature (40)..(531): Homolog of NCBI NO: 5921925 NR Description: Cytochrome P450 78A4
  misc_feature (32)..(526): Homolog of NCBI NO: 34394563 NR Description: putative cytochrome P-450
  misc_feature (20)..(526): Homolog of NCBI NO: 31126705 NR Description: putative cytochrome P-450 [Oryza sativa (japonica
  misc_feature (100)..(526): Homolog of NCBI NO: 1173624 NR Description: cytochrome P-450
  misc_feature (62)..(526): Homolog of NCBI NO: 15221132 NR Description: cytochrome P450 family [Arabidopsis thaliana]
  misc_feature (15)..(531): Homolog of NCBI NO: 15222937 NR Description: cytochrome P450 family [Arabidopsis thaliana]
HSQHSLSPAITQPEMSPEAYVLFFNSFNLVTFEAFASVSLIIATVAFLLSPGGLAWAWTGSSKSRVSIPGPSGSLSVFSGSNPHRVLAALAKRFKASPLMAFSVGFSRFVISSEPETAKEILSSSAFADRPVKESAYELLFHRAMGFAPYGEYWRNLRRISSTHLFSPRRIASFEGVRVGIGMKMVKKIKSLVTSDACGEVEVKKIVHFGSLNNVMTTVFGESYDFDEVNGKGCFLERLVSEGYELLGIFNWSDHFWFLRWFDFQGVRKRCRALVSEVNTFVGGIIEKHKMKKGNNLNGEENDFVDVLLGLQKDEKLSDSDMIAVLWEMIFRGTDTVAILVEWVLARMVLHQDIQDKLYREIASATSNNIRSLSDSDIPKLPYLQAIVKETLRLHPPGPLLSWARLAIHDVHVGPNLVPAGTIAMVNMWSITHNAKIWTDPEAFMPERFISEDVSIMGSDLRLAPFGSGRRVCPGKAMGLATVHLWIGQLIQNFEWVKGSCDVELAEVLKLSMEMKNPLKCKAVPRNVGFA

SEQ ID NO: 45729 - protein, 517 aa, Arabidopsis thaliana
  peptide (1)..(517): Ceres Seq. ID no. 13576222
  misc_feature (55)..(482): Pfam Name: Cytochrome P450 Pfam Description: Cytochrome P450
  misc_feature (29)..(512): Homolog of NCBI NO: 37534160 NR Description: putative cytochrome 450 [Oryza sativa (japonica
  misc_feature (16)..(508): Homolog of NCBI NO: 15226422 NR Description: cytochrome P450, putative [Arabidopsis thaliana]
  misc_feature (14)..(512): Homolog of NCBI NO: 21592543 NR Description: cytochrome p450 (CYP78A9) [Arabidopsis thaliana]
  misc_feature (14)..(512): Homolog of NCBI NO: 15228624 NR Description: cytochrome P450, putative [Arabidopsis thaliana]
  misc_feature (26)..(517): Homolog of NCBI NO: 5921925 NR Description: Cytochrome P450 78A4
  misc_feature (18)..(512): Homolog of NCBI NO: 34394563 NR Description: putative cytochrome P-450
  misc_feature (6)..(512): Homolog of NCBI NO: 31126705 NR Description: putative cytochrome P-450 [Oryza sativa (japonica
  misc_feature (86)..(512): Homolog of NCBI NO: 1173624 NR Description: cytochrome P-450
  misc_feature (48)..(512): Homolog of NCBI NO: 15221132 NR Description: cytochrome P450 family [Arabidopsis thaliana]
  misc_feature (1)..(517): Homolog of NCBI NO: 15222937 NR Description: cytochrome P450 family [Arabidopsis thaliana]
MSPEAYVLFFNSFNLVTFEAFASVSLIIATVAFLLSPGGLAWAWTGSSKSRVSIPGPSGSLSVFSGSNPHRVLAALAKRFKASPLMAFSVGFSRFVISSEPETAKEILSSSAFADRPVKESAYELLFHRAMGFAPYGEYWRNLRRISSTHLFSPRRIASFEGVRVGIGMKMVKKIKSLVTSDACGEVEVKKIVHFGSLNNVMTTVFGESYDFDEVNGKGCFLERLVSEGYELLGIFNWSDHFWFLRWFDFQGVRKRCRALVSEVNTFVGGIIEKHKMKKGNNLNGEENDFVDVLLGLQKDEKLSDSDMIAVLWEMIFRGTDTVAILVEWVLARMVLHQDIQDKLYREIASATSNNIRSLSDSDIPKLPYLQAIVKETLRLHPPGPLLSWARLAIHDVHVGPNLVPAGTIAMVNMWSITHNAKIWTDPEAFMPERFISEDVSIMGSDLRLAPFGSGRRVCPGKAMGLATVHLWIGQLIQNFEWVKGSCDVELAEVLKLSMEMKNPLKCKAVPRNVGFA

SEQ ID NO: 45730 - protein, 432 aa, Arabidopsis thaliana
  peptide (1)..(432): Ceres Seq. ID no. 13576223
  misc_feature (1)..(397): Pfam Name: Cytochrome P450 Pfam Description: Cytochrome P450
  misc_feature (1)..(427): Homolog of NCBI NO: 37534160 NR Description: putative cytochrome 450 [Oryza sativa (japonica
  misc_feature (1)..(423): Homolog of NCBI NO: 15226422 NR Description: cytochrome P450, putative [Arabidopsis thaliana]
  misc_feature (1)..(427): Homolog of NCBI NO: 21592543 NR Description: cytochrome p450 (CYP78A9) [Arabidopsis thaliana]
  misc_feature (1)..(427): Homolog of NCBI NO: 15228624 NR Description: cytochrome P450, putative [Arabidopsis thaliana]
  misc_feature (1)..(432): Homolog of NCBI NO: 5921925 NR Description: Cytochrome P450 78A4
  misc_feature (1)..(427): Homolog of NCBI NO: 34394563 NR Description: putative cytochrome P-450
  misc_feature (1)..(427): Homolog of NCBI NO: 31126705 NR Description: putative cytochrome P-450 [Oryza sativa (japonica
  misc_feature (1)..(427): Homolog of NCBI NO: 1173624 NR Description: cytochrome P-450
  misc_feature (1)..(427): Homolog of NCBI NO: 15221132 NR Description: cytochrome P450 family [Arabidopsis thaliana]
  misc_feature (1)..(432): Homolog of NCBI NO: 15222937 NR Description: cytochrome P450 family [Arabidopsis thaliana]
MAFSVGFSRFVISSEPETAKEILSSSAFADRPVKESAYELLFHRAMGFAPYGEYWRNLRRISSTHLFSPRRIASFEGVRVGIGMKMVKKIKSLVTSDACGEVEVKKIVHFGSLNNVMTTVFGESYDFDEVNGKGCFLERLVSEGYELLGIFNWSDHFWFLRWFDFQGVRKRCRALVSEVNTFVGGIIEKHKMKKGNNLNGEENDFVDVLLGLQKDEKLSDSDMIAVLWEMIFRGTDTVAILVEWVLARMVLHQDIQDKLYREIASATSNNIRSLSDSDIPKLPYLQAIVKETLRLHPPGPLLSWARLAIHDVHVGPNLVPAGTIAMVNMWSITHNAKIWTDPEAFMPERFISEDVSIMGSDLRLAPFGSGRRVCPGKAMGLATVHLWIGQLIQNFEWVKGSCDVELAEVLKLSMEMKNPLKCKAVPRNVGFA

SEQ ID NO: 45731 - DNA, 1425 bp, Arabidopsis thaliana
  misc_feature (1)..(1425): Ceres Seq. ID no. 13646469
  misc_feature: MA Experiment ID: 20000185 Result: Down-regulated in Transcription
  misc_feature: MA Experiment 20000185 PARAMETER Experiment Name: At_Roots__P Parameter: Age (day) Value: 7 vs. 21
  misc_feature: MA Experiment 20000185 PARAMETER Experiment Name: At_Roots__P Parameter: Organism Value: A. thaliana
  misc_feature: MA Experiment 20000185 PARAMETER Experiment Name: At_Roots__P Parameter: Tissue Value: Roots vs. Whole Plant
  misc_feature: MA Experiment ID: 20000227 Result: Down-regulated in Transcription
  misc_feature: MA Experiment 20000227 PARAMETER Experiment Name: At_Root-Tips-vs-Tops_P Parameter: Tissue Value: Root Tips vs. Root Tops
  misc_feature: MA Experiment ID: 20000495 Result: Down-regulated in Transcription
  misc_feature: MA Experiment 20000495 PARAMETER Experiment Name: At_Guard_Cells_P Parameter: Harvest Date Value: 8/2/2002
  misc_feature: MA Experiment 20000495 PARAMETER Experiment Name: At_Guard_Cells_P Parameter: Organism Value: A. thaliana
  misc_feature: MA Experiment 20000495 PARAMETER Experiment Name: At_Guard_Cells_P Parameter: Tissue Value: Guard Cells vs. Leaves
gacaattcctagttcttaagaaaaaagtggaaattttcctttaaatttagtttaaaactcatacaaatccttctactcgaccactggtactctccgtaagctacttgctgaattcgattattgattttgggcgtagaagaagatgaaggcatcgatgaagtttcgtgaagagcaaaagcctctttttagggctaaagttcctttaagcatcttaggtttaccctttcaatctggaatcgtcgccggagaatccaaggagctcagtctcaatctctccactttcttcgaatctggcccttctctcaaagtcgcttaccgtccaaacgattcgtggaatcctttctctctaatcgtcaaaaccggatcgggatcgttcggttctccgatttcaagctctatgctcatgagcgctgaattcaatctcctaggtcaaggaaaccctagctttatgctccacttcaaacctcaattcggcgatttctctatcaaaaagtctcattcttcgtctggatttgagaggaatttgatcaaatcgatgaatggatctgtttccgaagatgattcttcgattgaggtggtggatactccagcggtcaatggatgcggcggaggatttagaaaagtcacggttctgccgtcaacttctgctggagatatcgctggattgttatctggcgttgaggttgcggcgaggacgtctctgcctgtgagaggacgcgccgttttgaatttccggtggggcgttagggttcctacggagatcagacgcgatttcgatccaacggctgctatttcgttgaggagattcccttttttggtgatgaataaaataggaatcgaacacgtggacggcgcagatgctaaagtgaccaaatccactggtgatccgggtaaagtttcgggtccggctcagttcacaacaagtggtgacgtggcggaggtgatagaggagcttcgaacggagaacaagcagttaaagagagccgttgaagatctccgggaagtaatatcaaacgtccgtccatactcgccggcgacaattgattacggatcacactcgaagtatcgcgaatccgagaggaacaacaacaacaacaacaacaacaacaacaacaacaacgggagatcgagagctgatcggtggagcagcgagagaacgacaacgtctgattacggtgggaagaaaagcaaggaagagggcaatgtagctgaggagctgaagaaagctttgaaaggagctgcttgaagcttctatggcggctattggtaatcgcaggctttactcgaattacaattacatttgtcgaccttaatcagctattgcttttgtatatatatgcgttgaattatctggattagatttgcacaacttgttttgaatcttttgatggaatcttcagagttttgtatgagattatgcttttc

SEQ ID NO: 45732 - protein, 367 aa, Arabidopsis thaliana
  peptide (1)..(367): Ceres Seq. ID no. 13646470
  misc_feature (50)..(108): Homolog of NCBI NO: 21740989 NR Description: OSJNBa0019K04.27 [Oryza sativa (japonica
  misc_feature (1)..(364): Homolog of NCBI NO: 28411873 NR Description: OSJNBa0016N23.25 [Oryza sativa (japonica
  misc_feature (1)..(367): Homolog of NCBI NO: 15230911 NR Description: expressed protein [Arabidopsis thaliana]
MKASMKFREEQKPLFRAKVPLSILGLPFQSGIVAGESKELSLNLSTFFESGPSLKVAYRPNDSWNPFSLIVKTGSGSFGSPISSSMLMSAEFNLLGQGNPSFMLHFKPQFGDFSIKKSHSSSGFERNLIKSMNGSVSEDDSSIEVVDTPAVNGCGGGFRKVTVLPSTSAGDIAGLLSGVEVAARTSLPVRGRAVLNFRWGVRVPTEIRRDFDPTAAISLRRFPFLVMNKIGIEHVDGADAKVTKSTGDPGKVSGPAQFTTSGDVAEVIEELRTENKQLKRAVEDLREVISNVRPYSPATIDYGSHSKYRESERNNNNNNNNNNNNNGRSRADRWSSERTTTSDYGGKKSKEEGNVAEELKKALKGAA

SEQ ID NO: 45733 - protein, 363 aa, Arabidopsis thaliana
  peptide (1)..(363): Ceres Seq. ID no. 13646471
  misc_feature (46)..(104): Homolog of NCBI NO: 21740989 NR Description: OSJNBa0019K04.27 [Oryza sativa (japonica
  misc_feature (1)..(360): Homolog of NCBI NO: 28411873 NR Description: OSJNBa0016N23.25 [Oryza sativa (japonica
  misc_feature (1)..(363): Homolog of NCBI NO: 15230911 NR Description: expressed protein [Arabidopsis thaliana]
MKFREEQKPLFRAKVPLSILGLPFQSGIVAGESKELSLNLSTFFESGPSLKVAYRPNDSWNPFSLIVKTGSGSFGSPISSSMLMSAEFNLLGQGNPSFMLHFKPQFGDFSIKKSHSSSGFERNLIKSMNGSVSEDDSSIEVVDTPAVNGCGGGFRKVTVLPSTSAGDIAGLLSGVEVAARTSLPVRGRAVLNFRWGVRVPTEIRRDFDPTAAISLRRFPFLVMNKIGIEHVDGADAKVTKSTGDPGKVSGPAQFTTSGDVAEVIEELRTENKQLKRAVEDLREVISNVRPYSPATIDYGSHSKYRESERNNNNNNNNNNNNNGRSRADRWSSERTTTSDYGGKKSKEEGNVAEELKKALKGAA

SEQ ID NO: 45734 - protein, 282 aa, Arabidopsis thaliana
  peptide (1)..(282): Ceres Seq. ID no. 13646472
  misc_feature (1)..(23): Homolog of NCBI NO: 21740989 NR Description: OSJNBa0019K04.27 [Oryza sativa (japonica
  misc_feature (1)..(279): Homolog of NCBI NO: 28411873 NR Description: OSJNBa0016N23.25 [Oryza sativa (japonica
  misc_feature (1)..(282): Homolog of NCBI NO: 15230911 NR Description: expressed protein [Arabidopsis thaliana]
MLMSAEFNLLGQGNPSFMLHFKPQFGDFSIKKSHSSSGFERNLIKSMNGSVSEDDSSIEVVDTPAVNGCGGGFRKVTVLPSTSAGDIAGLLSGVEVAARTSLPVRGRAVLNFRWGVRVPTEIRRDFDPTAAISLRRFPFLVMNKIGIEHVDGADAKVTKSTGDPGKVSGPAQFTTSGDVAEVIEELRTENKQLKRAVEDLREVISNVRPYSPATIDYGSHSKYRESERNNNNNNNNNNNNNGRSRADRWSSERTTTSDYGGKKSKEEGNVAEELKKALKGAA

SEQ ID NO: 45735 - DNA, 1702 bp, Arabidopsis thaliana
  misc_feature (1)..(1702): Ceres Seq. ID no. 13593094
  misc_feature: MA Experiment ID: 20000184 Result: Up-regulated in Transcription
  misc_feature: MA Experiment 20000184 PARAMETER Experiment Name: At_Shoots__P Parameter: Age (day) Value: 7
  misc_feature: MA Experiment 20000184 PARAMETER Experiment Name: At_Shoots__P Parameter: Tissue Value: Shoots vs. Whole Plant
  misc_feature: MA Experiment ID: 20000234 Result: Up-regulated in Transcription
  misc_feature: MA Experiment 20000234 PARAMETER Experiment Name: At_Siliques_P Parameter: Age (day) Value: 21
  misc_feature: MA Experiment 20000234 PARAMETER Experiment Name: At_Siliques_P Parameter: Organism Value: A. thaliana
  misc_feature: MA Experiment 20000234 PARAMETER Experiment Name: At_Siliques_P Parameter: Plant Line Value: WS
  misc_feature: MA Experiment 20000234 PARAMETER Experiment Name: At_Siliques_P Parameter: Tissue Value: Less Than 5mm Siliques vs. Whole Plant
  misc_feature: MA Experiment ID: 20000235 Result: Up-regulated in Transcription
  misc_feature: MA Experiment 20000235 PARAMETER Experiment Name: At_Siliques_P Parameter: Age (day) Value: 21
  misc_feature: MA Experiment 20000235 PARAMETER Experiment Name: At_Siliques_P Parameter: Organism Value: A. thaliana
  misc_feature: MA Experiment 20000235 PARAMETER Experiment Name: At_Siliques_P Parameter: Plant Line Value: WS
  misc_feature: MA Experiment 20000235 PARAMETER Experiment Name: At_Siliques_P Parameter: Tissue Value: 5-10mm Siliques vs. Whole Plant
  misc_feature: MA Experiment ID: 20000495 Result: Up-regulated in Transcription
  misc_feature: MA Experiment 20000495 PARAMETER Experiment Name: At_Guard_Cells_P Parameter: Harvest Date Value: 8/2/2002
  misc_feature: MA Experiment 20000495 PARAMETER Experiment Name: At_Guard_Cells_P Parameter: Organism Value: A. thaliana
  misc_feature: MA Experiment 20000495 PARAMETER Experiment Name: At_Guard_Cells_P Parameter: Tissue Value: Guard Cells vs. Leaves
  misc_feature: MA Experiment ID: 20001557 Result: Up-regulated in Transcription
  misc_feature: MA Experiment 20001557 PARAMETER Experiment Name: At_Drought_Soil_Dry_P Parameter: Age (day) Value: 27
  misc_feature: MA Experiment 20001557 PARAMETER Experiment Name: At_Drought_Soil_Dry_P Parameter: Organism Value: A. thaliana
  misc_feature: MA Experiment 20001557 PARAMETER Experiment Name: At_Drought_Soil_Dry_P Parameter: Plant Line Value: WS
  misc_feature: MA Experiment 20001557 PARAMETER Experiment Name: At_Drought_Soil_Dry_P Parameter: Post Timepoint (hr) Value: 3
  misc_feature: MA Experiment 20001557 PARAMETER Experiment Name: At_Drought_Soil_Dry_P Parameter: Post-Treatment Value: Re-Water vs. No Drought
  misc_feature: MA Experiment 20001557 PARAMETER Experiment Name: At_Drought_Soil_Dry_P Parameter: Timepoint (day) Value: 13
  misc_feature: MA Experiment 20001557 PARAMETER Experiment Name: At_Drought_Soil_Dry_P Parameter: Treatment Value: Drought vs. No Drought
ctttcccccctgcaggaattcggcaccagagagagagagagagagctcactagtcccccccccccgagggtaaaagctttctcttttattgtgtcttgtcttgcattttcctctgttacgttttgcgttgtttacgaaaaatgtaggaaataaatttggttgcttgctttgttggtgtgtgaaccgacacttatctctgtgatttttttaattaaattctcagtgatgtttgaaggaattgtttcaatcttcgttaccttaaaatgatgtcgtcattgttattgtattgggtaaattttctgttttgtaattgttttagcatatgtctctgtctgattgtgtcagagttttgagtgaaacccccaaagttttattttttttatttaactggacatgaagctgtttttgaattcagcttttggtgaattttacgctgatttttgaatgtgttttatcttttcttgggtacagttagatagatagcatgaattggttacctgaagctgaagctgaggatgacttcaaaggtcttctctctggtgatttctttgatgatctcatcaatcaccttgacgtccctcttgatgacattgataccaccaatggtgaaggagattgggttgacaggtttcaagaccttgagcctcctcccatggatatgttccccactttgccttctgacctcacctcttgcggctctggcatggccaaggcccctcgtgtggatattcaaaggaacattcctgctttgaaacagtcctattcttctgaagccttgtccagcactctccaccaatcttcagctcctcctgaaatcaaagtttcgaaactatttcagtctttaagtccagtgtcagttctcgagaacagttatggttctctctcgacccacaacaatggatctcagagattggctttccctgtgaaaggcatgagaagcaagcgcaaacgccccacaacactgagacttagctacctttaccctctgaaccccgaaagcccgagaagtcaaccccgggcaaacctgaatccgagtgttacttttcttctgagcaacatgccaagaagaaacgcaagatccacctgaccacccgcacggtctcttccactctggaggcaagcaactcggatgggatagtccgcaaatgcactcattgcgagacaaccaagaccccacagtggagggaaggacccagtggaccgaagaccctctgcaatgcttgcggagtgaggttcagatctggtcgcctagttccagaataccgaccagcctcaagccccaccttcatcccagctgtgcattcaaactcacacaggaagatcattgagatgagaaggaaggacgacgaacagtttgatagcagcatgattcgggcagtgatatccagagggtaaagcagttttttttttaaagtttggtctctgatccgcagaaatgggaagtcagtggaggaagaagatggtataaaagtagggtttagtgactgttttcaaatctgatgaagagagtttagtggtttagttcaagttagggatatgaaatattttgttgtttcattatgtgtttttatctttatctcttggctgacatttgtgtatcagaggaaaacaggtgaagccaaagtttgctctctttttttcgctranaaaaaaaaaaaaaaaaaaaaaaaaaaaaaaaaaacctcgagggggggcccggtac

SEQ ID NO: 45736 - protein, 200 aa, Arabidopsis thaliana
  peptide (1)..(200): Ceres Seq. ID no. 15221196
  misc_feature (3)..(165): Homolog of NCBI NO: 15226388 NR Description: GATA zinc finger protein [Arabidopsis thaliana]
  misc_feature (1)..(177): Homolog of NCBI NO: 15223085 NR Description: GATA zinc finger protein [Arabidopsis thaliana]
  misc_feature (1)..(177): Homolog of NCBI NO: 8778844 NR Description: T6D22.9 [Arabidopsis thaliana]
  misc_feature (90)..(177): Homolog of NCBI NO: 8778844 NR Description: T6D22.9 [Arabidopsis thaliana]
  misc_feature (1)..(177): Homolog of NCBI NO: 15223086 NR Description: GATA zinc finger protein [Arabidopsis thaliana]
  misc_feature (1)..(99): Homolog of NCBI NO: 8778844 NR Description: T6D22.9 [Arabidopsis thaliana]
MNWLPEAEAEDDFKGLLSGDFFDDLINHLDVPLDDIDTTNGEGDWVDRFQDLEPPPMDMFPTLPSDLTSCGSGMAKAPRVDIQRNIPALKQSYSSEALSSTLHQSSAPPEIKVSKLFQSLSPVSVLENSYGSLSTHNNGSQRLAFPVKGMRSKRKRPTTLRLSYLYPLNPESPRSQPRANLNPSVTFLLSNMPRRNARST

SEQ ID NO: 45737 - protein, 144 aa, Arabidopsis thaliana
  peptide (1)..(144): Ceres Seq. ID no. 15221197
  misc_feature (1)..(109): Homolog of NCBI NO: 15226388 NR Description: GATA zinc finger protein [Arabidopsis thaliana]
  misc_feature (1)..(121): Homolog of NCBI NO: 15223085 NR Description: GATA zinc finger protein [Arabidopsis thaliana]
  misc_feature (1)..(121): Homolog of NCBI NO: 8778844 NR Description: T6D22.9 [Arabidopsis thaliana]
  misc_feature (34)..(121): Homolog of NCBI NO: 8778844 NR Description: T6D22.9 [Arabidopsis thaliana]
  misc_feature (1)..(121): Homolog of NCBI NO: 15223086 NR Description: GATA zinc finger protein [Arabidopsis thaliana]
  misc_feature (1)..(43): Homolog of NCBI NO: 8778844 NR Description: T6D22.9 [Arabidopsis thaliana]
MDMFPTLPSDLTSCGSGMAKAPRVDIQRNIPALKQSYSSEALSSTLHQSSAPPEIKVSKLFQSLSPVSVLENSYGSLSTHNNGSQRLAFPVKGMRSKRKRPTTLRLSYLYPLNPESPRSQPRANLNPSVTFLLSNMPRRNARST

SEQ ID NO: 45738 - protein, 142 aa, Arabidopsis thaliana
  peptide (1)..(142): Ceres Seq. ID no. 15221198
  misc_feature (1)..(107): Homolog of NCBI NO: 15226388 NR Description: GATA zinc finger protein [Arabidopsis thaliana]
  misc_feature (1)..(119): Homolog of NCBI NO: 15223085 NR Description: GATA zinc finger protein [Arabidopsis thaliana]
  misc_feature (1)..(119): Homolog of NCBI NO: 8778844 NR Description: T6D22.9 [Arabidopsis thaliana]
  misc_feature (32)..(119): Homolog of NCBI NO: 8778844 NR Description: T6D22.9 [Arabidopsis thaliana]
  misc_feature (1)..(119): Homolog of NCBI NO: 15223086 NR Description: GATA zinc finger protein [Arabidopsis thaliana]
  misc_feature (1)..(41): Homolog of NCBI NO: 8778844 NR Description: T6D22.9 [Arabidopsis thaliana]
MFPTLPSDLTSCGSGMAKAPRVDIQRNIPALKQSYSSEALSSTLHQSSAPPEIKVSKLFQSLSPVSVLENSYGSLSTHNNGSQRLAFPVKGMRSKRKRPTTLRLSYLYPLNPESPRSQPRANLNPSVTFLLSNMPRRNARST

SEQ ID NO: 45739 - DNA, 1842 bp, Arabidopsis thaliana
  misc_feature (1)..(1842): Ceres Seq. ID no. 13646763
  misc_feature: MA Experiment ID: 20000451 Result: Up-regulated in Transcription
  misc_feature: MA Experiment 20000451 PARAMETER Experiment Name: At_CS6879_Shoots-Roots_P Parameter: Age (day) Value: 14
  misc_feature: MA Experiment 20000451 PARAMETER Experiment Name: At_CS6879_Shoots-Roots_P Parameter: Organism Value: A. thaliana
  misc_feature: MA Experiment 20000451 PARAMETER Experiment Name: At_CS6879_Shoots-Roots_P Parameter: Plant Line Value: CS6879 vs. WS
  misc_feature: MA Experiment 20000451 PARAMETER Experiment Name: At_CS6879_Shoots-Roots_P Parameter: Tissue Value: Roots
  misc_feature: MA Experiment ID: 20001451 Result: Down-regulated in Transcription
  misc_feature: MA Experiment 20001451 PARAMETER Experiment Name: At_Far-red-induction_P Parameter: Age (day) Value: 7
  misc_feature: MA Experiment 20001451 PARAMETER Experiment Name: At_Far-red-induction_P Parameter: Light Value: Far-red vs. White
  misc_feature: MA Experiment 20001451 PARAMETER Experiment Name: At_Far-red-induction_P Parameter: Organism Value: A. thaliana
  misc_feature: MA Experiment 20001451 PARAMETER Experiment Name: At_Far-red-induction_P Parameter: Plant Line Value: Columbia
  misc_feature: MA Experiment 20001451 PARAMETER Experiment Name: At_Far-red-induction_P Parameter: Timepoint (hr) Value: 24
  misc_feature: MA Experiment 20001451 PARAMETER Experiment Name: At_Far-red-induction_P Parameter: Tissue Value: Whole Plant
ggaacccagaaaaaagattcataaaaccaggcaatagaaatttcatctgaagaaaagaaaaagtaaagctattaaaaatcaaagccacgagaagaaagtagaaaaagttacagtctctgtctatcaaaatcccaacggtaactgaaaatcgccggaaccgaatctgcggcgagccaaaacttgtggatcttttaatgaaaacttgaagattcctctttccacggttgcttctagggttttctcttcgattcaccacatcgtcatgaaccaaatctctttctggtgcctttctttactccttacggtggtgattgctgcagaagagactcctatcactcgtatagccttcggatcatgcgctaatcaaagtgctccacagccgatatgggatgcgataaacaagtttgatccgcaactgtttatttggttgggtgataacatctacggagatataagaagaccacttacagtcattgggaaagagagaacttttgggccatggaggaattcaccgaggtttgtaccttcttcagaggaagaaatgaaactaagatacgctaaagccaaagctaatcctggatattctcgtattcagagaaaagctaaggttattggtacatgggatgatcatgattacggattgaatgacgctggaaaagagtttgatcgtaaagtcattaaccaaaaacttatgcttgatttcttgaatgagcctcttgatagtcctaggagaaagcaagctggtgtttatgcttcttatacttatggtccgcctaatcggaaagttaaggttatagttttagatactagatatcatagagaccctttaagaagtgacgggagcatattgggtgatacgcagtgggactggctcgaaaatgaattgagcggtccccgaagcgaaatcactatcataggatcctctgttcaggtgatatcaaatctttctgctaccactggacctctcttttatatggaatcatggggtcgttttccaaaggaaaggaaacgtctttttaaactgatagcagatactaagagagatggagttatattcatcagtggagatgtacattttggagaaatcacgagatatgattgttctgttgggtacccattatatgatgtcacctccagtggtctagtacaatctgttgagaaagttgtccctcgtcccttgcgttccatagttaggcttcttttttggtatactccaagcacgatgagagttatcaatgataactgcaaattcaaatcttgcacatacggacaacaaaattttggagcaatatcgatagattggaatgcaaatccggttaccataaagctcgagatcagagatgttaacggagacactgtactaggcacgaatgtttcattatctgaactccaaccaggaggctcgaattctttaaaagatacaacaactaagggaaagtctcaacgatattgcacactcgaaattgaattaccaggaacgaccagataccgattggcagttctcatctacttcaccattgctgtcttggcaatggcgatattaggacttatcattggagctgtattggccataacagcatgcgtttataaatgcaaggtcgattgattgttgatgacattaatcaactttttttggtccaacaaaagtgtctttatgacttataatctgtattagttggattattcagggattacaattcggatgtagcttataatgttaaaaattgttgaacacatggattttgatcttgtgatgggaattctaagcttgagctgttattaattaaacttctttgaaagagaaaaaaaaaaaaaaaaaaaactcgagggggggcccggtac

SEQ ID NO: 45740 - protein, 447 aa, Arabidopsis thaliana
  peptide (1)..(447): Ceres Seq. ID no. 13646764
  misc_feature (88)..(292): Homolog of NCBI NO: 32470716 NR Description: probable alkaline phosphatase D [Precursor]
  misc_feature (89)..(300): Homolog of NCBI NO: 37519932 NR Description: hypothetical protein gll0363 [Gloeobacter
  misc_feature (94)..(188): Homolog of NCBI NO: 23491463 NR Description: Arabidopsis thaliana P42251 [Plasmodium yoelii
  misc_feature (191)..(370): Homolog of NCBI NO: 23491463 NR Description: Arabidopsis thaliana P42251 [Plasmodium yoelii
  misc_feature (98)..(188): Homolog of NCBI NO: 23613643 NR Description: hypothetical protein, conserved [Plasmodium
  misc_feature (191)..(370): Homolog of NCBI NO: 23613643 NR Description: hypothetical protein, conserved [Plasmodium
  misc_feature (1)..(447): Homolog of NCBI NO: 13430796 NR Description: unknown protein [Arabidopsis thaliana]
  misc_feature (1)..(447): Homolog of NCBI NO: 15238950 NR Description: expressed protein [Arabidopsis thaliana]
MNQISFWCLSLLLTVVIAAEETPITRIAFGSCANQSAPQPIWDAINKFDPQLFIWLGDNIYGDIRRPLTVIGKERTFGPWRNSPRFVPSSEEEMKLRYAKAKANPGYSRIQRKAKVIGTWDDHDYGLNDAGKEFDRKVINQKLMLDFLNEPLDSPRRKQAGVYASYTYGPPNRKVKVIVLDTRYHRDPLRSDGSILGDTQWDWLENELSGPRSEITIIGSSVQVISNLSATTGPLFYMESWGRFPKERKRLFKLIADTKRDGVIFISGDVHFGEITRYDCSVGYPLYDVTSSGLVQSVEKVVPRPLRSIVRLLFWYTPSTMRVINDNCKFKSCTYGQQNFGAISIDWNANPVTIKLEIRDVNGDTVLGTNVSLSELQPGGSNSLKDTTTKGKSQRYCTLEIELPGTTRYRLAVLIYFTIAVLAMAILGLIIGAVLAITACVYKCKVD

SEQ ID NO: 45741 - protein, 354 aa, Arabidopsis thaliana
  peptide (1)..(354): Ceres Seq. ID no. 13646765
  misc_feature (1)..(199): Homolog of NCBI NO: 32470716 NR Description: probable alkaline phosphatase D [Precursor]
  misc_feature (1)..(207): Homolog of NCBI NO: 37519932 NR Description: hypothetical protein gll0363 [Gloeobacter
  misc_feature (1)..(95): Homolog of NCBI NO: 23491463 NR Description: Arabidopsis thaliana P42251 [Plasmodium yoelii
  misc_feature (98)..(277): Homolog of NCBI NO: 23491463 NR Description: Arabidopsis thaliana P42251 [Plasmodium yoelii
  misc_feature (5)..(95): Homolog of NCBI NO: 23613643 NR Description: hypothetical protein, conserved [Plasmodium
  misc_feature (98)..(277): Homolog of NCBI NO: 23613643 NR Description: hypothetical protein, conserved [Plasmodium
  misc_feature (1)..(354): Homolog of NCBI NO: 13430796 NR Description: unknown protein [Arabidopsis thaliana]
  misc_feature (1)..(354): Homolog of NCBI NO: 15238950 NR Description: expressed protein [Arabidopsis thaliana]
MKLRYAKAKANPGYSRIQRKAKVIGTWDDHDYGLNDAGKEFDRKVINQKLMLDFLNEPLDSPRRKQAGVYASYTYGPPNRKVKVIVLDTRYHRDPLRSDGSILGDTQWDWLENELSGPRSEITIIGSSVQVISNLSATTGPLFYMESWGRFPKERKRLFKLIADTKRDGVIFISGDVHFGEITRYDCSVGYPLYDVTSSGLVQSVEKVVPRPLRSIVRLLFWYTPSTMRVINDNCKFKSCTYGQQNFGAISIDWNANPVTIKLEIRDVNGDTVLGTNVSLSELQPGGSNSLKDTTTKGKSQRYCTLEIELPGTTRYRLAVLIYFTIAVLAMAILGLIIGAVLAITACVYKCKVD

SEQ ID NO: 45742 - protein, 304 aa, Arabidopsis thaliana
  peptide (1)..(304): Ceres Seq. ID no. 13646766
  misc_feature (1)..(149): Homolog of NCBI NO: 32470716 NR Description: probable alkaline phosphatase D [Precursor]
  misc_feature (1)..(157): Homolog of NCBI NO: 37519932 NR Description: hypothetical protein gll0363 [Gloeobacter
  misc_feature (1)..(45): Homolog of NCBI NO: 23491463 NR Description: Arabidopsis thaliana P42251 [Plasmodium yoelii
  misc_feature (48)..(227): Homolog of NCBI NO: 23491463 NR Description: Arabidopsis thaliana P42251 [Plasmodium yoelii
  misc_feature (1)..(45): Homolog of NCBI NO: 23613643 NR Description: hypothetical protein, conserved [Plasmodium
  misc_feature (48)..(227): Homolog of NCBI NO: 23613643 NR Description: hypothetical protein, conserved [Plasmodium
  misc_feature (1)..(304): Homolog of NCBI NO: 13430796 NR Description: unknown protein [Arabidopsis thaliana]
  misc_feature (1)..(304): Homolog of NCBI NO: 15238950 NR Description: expressed protein [Arabidopsis thaliana]
MLDFLNEPLDSPRRKQAGVYASYTYGPPNRKVKVIVLDTRYHRDPLRSDGSILGDTQWDWLENELSGPRSEITIIGSSVQVISNLSATTGPLFYMESWGRFPKERKRLFKLIADTKRDGVIFISGDVHFGEITRYDCSVGYPLYDVTSSGLVQSVEKVVPRPLRSIVRLLFWYTPSTMRVINDNCKFKSCTYGQQNFGAISIDWNANPVTIKLEIRDVNGDTVLGTNVSLSELQPGGSNSLKDTTTKGKSQRYCTLEIELPGTTRYRLAVLIYFTIAVLAMAILGLIIGAVLAITACVYKCKVD

SEQ ID NO: 45743 - DNA, 1890 bp, Arabidopsis thaliana
  misc_feature (1)..(1890): Ceres Seq. ID no. 12561142
  misc_feature: MA Experiment ID: 20000794 Result: Down-regulated in Transcription
  misc_feature: MA Experiment 20000794 PARAMETER Experiment Name: At_Petals_P Parameter: Age (day) Value: 23-25 days
  misc_feature: MA Experiment 20000794 PARAMETER Experiment Name: At_Petals_P Parameter: Plant Line Value: WS
  misc_feature: MA Experiment 20000794 PARAMETER Experiment Name: At_Petals_P Parameter: Tissue Value: Petals vs. Whole plant
  misc_feature: MA Experiment ID: 20001555 Result: Down-regulated in Transcription
  misc_feature: MA Experiment 20001555 PARAMETER Experiment Name: At_Drought_Soil_Dry_P Parameter: Age (day) Value: 24
  misc_feature: MA Experiment 20001555 PARAMETER Experiment Name: At_Drought_Soil_Dry_P Parameter: Organism Value: A. thaliana
  misc_feature: MA Experiment 20001555 PARAMETER Experiment Name: At_Drought_Soil_Dry_P Parameter: Plant Line Value: WS
  misc_feature: MA Experiment 20001555 PARAMETER Experiment Name: At_Drought_Soil_Dry_P Parameter: Post Timepoint (hr) Value: None
  misc_feature: MA Experiment 20001555 PARAMETER Experiment Name: At_Drought_Soil_Dry_P Parameter: Post-Treatment Value: None
  misc_feature: MA Experiment 20001555 PARAMETER Experiment Name: At_Drought_Soil_Dry_P Parameter: Timepoint (day) Value: 10
  misc_feature: MA Experiment 20001555 PARAMETER Experiment Name: At_Drought_Soil_Dry_P Parameter: Treatment Value: Drought vs. No Drought
  misc_feature: MA Experiment ID: 20001556 Result: Down-regulated in Transcription
  misc_feature: MA Experiment 20001556 PARAMETER Experiment Name: At_Drought_Soil_Dry_P Parameter: Age (day) Value: 26
  misc_feature: MA Experiment 20001556 PARAMETER Experiment Name: At_Drought_Soil_Dry_P Parameter: Organism Value: A. thaliana
  misc_feature: MA Experiment 20001556 PARAMETER Experiment Name: At_Drought_Soil_Dry_P Parameter: Plant Line Value: WS
  misc_feature: MA Experiment 20001556 PARAMETER Experiment Name: At_Drought_Soil_Dry_P Parameter: Post Timepoint (hr) Value: None
  misc_feature: MA Experiment 20001556 PARAMETER Experiment Name: At_Drought_Soil_Dry_P Parameter: Post-Treatment Value: None
  misc_feature: MA Experiment 20001556 PARAMETER Experiment Name: At_Drought_Soil_Dry_P Parameter: Timepoint (day) Value: 12
  misc_feature: MA Experiment 20001556 PARAMETER Experiment Name: At_Drought_Soil_Dry_P Parameter: Treatment Value: Drought vs. No Drought
  misc_feature: MA Experiment ID: 20001905 Result: Down-regulated in Transcription
  misc_feature: MA Experiment 20001905 PARAMETER Experiment Name: At_Drought_Reproduction_P Parameter: Age (day) Value: 40
  misc_feature: MA Experiment 20001905 PARAMETER Experiment Name: At_Drought_Reproduction_P Parameter: Organism Value: A. thaliana
  misc_feature: MA Experiment 20001905 PARAMETER Experiment Name: At_Drought_Reproduction_P Parameter: Plant Line Value: WS
  misc_feature: MA Experiment 20001905 PARAMETER Experiment Name: At_Drought_Reproduction_P Parameter: Timepoint (day) Value: 10
  misc_feature: MA Experiment 20001905 PARAMETER Experiment Name: At_Drought_Reproduction_P Parameter: Tissue Value: Rosettes
  misc_feature: MA Experiment 20001905 PARAMETER Experiment Name: At_Drought_Reproduction_P Parameter: Treatment Value: Drought vs. No Drought
  misc_feature: MA Experiment ID: 20001911 Result: Down-regulated in Transcription
  misc_feature: MA Experiment 20001911 PARAMETER Experiment Name: At_Drought_Reproduction_P Parameter: Age (day) Value: 40
  misc_feature: MA Experiment 20001911 PARAMETER Experiment Name: At_Drought_Reproduction_P Parameter: Organism Value: A. thaliana
  misc_feature: MA Experiment 20001911 PARAMETER Experiment Name: At_Drought_Reproduction_P Parameter: Plant Line Value: WS
  misc_feature: MA Experiment 20001911 PARAMETER Experiment Name: At_Drought_Reproduction_P Parameter: Timepoint (day) Value: 10
  misc_feature: MA Experiment 20001911 PARAMETER Experiment Name: At_Drought_Reproduction_P Parameter: Tissue Value: Flowers
  misc_feature: MA Experiment 20001911 PARAMETER Experiment Name: At_Drought_Reproduction_P Parameter: Treatment Value: Drought vs. No Drought
atggatactctctttagactagtcagtctccaacaacaacaacaatccgatagtatcattacaaatcaatcttcgttaagcagaacttccaccaccactactggctctccacaaactgcttatcactacaactttccacaaaacgacgtcgtcgaagaatgcttcaactttttcatggatgaagaagacctttcctcttcttcttctcaccacaaccatcacaaccacaacaatcctaatacttactactctcctttcactactcccacccaataccatcccgccacatcatcaaccccttcctccaccgccgcagccgcagctttagcctcgccttactcctcctccggccaccataatgacccttccgcgttctccatacctcaaactcctccgtccttcgacttctcagccaatgccaagtgggcagactcggtccttcttgaagcggcacgtgccttctccgacaaagacactgcacgtgcgcaacaaatcctatggacgctcaacgagctctcttctccgtacggagacaccgagcaaaaactggcttcttacttcctccaagctctcttcaaccgcatgaccggttcaggcgaacgatgctaccgaaccatggtaacagctgcagccacagagaagacttgctccttcgagtcaacgcgaaaaactgtactaaagttccaagaagttagcccctgggccacgtttggacacgtggcggcaaacggagcaatcttggaagcagtagacggagaggcaaagatccacatcgttgacataagctccacgttttgcactcaatggccgactcttctagaagctttagccacaagatcagacgacacgcctcacctaaggctaaccacagttgtcgtggccaacaagtttgtcaacgatcaaacggcgtcgcatcggatgatgaaagagatcggaaaccgaatggagaaattcgctaggcttatgggagttcctttcaaatttaacattattcatcacgttggagatttatctgagtttgatctcaacgaactcgacgttaaaccagacgaagtcttggccattaactgcgtaggcgcgatgcatgggatcgcttcacgtggaagccctagagacgctgtgatatcgagtttccgacggttaagaccgaggattgtgacggtcgtagaagaagaagctgatcttgtcggagaagaagaaggtggctttgatgatgagttcttgagagggtttggagaatgtttacgatggtttagggtttgcttcgagtcatgggaagagagttttccaaggacgagcaacgagaggttgatgctagagcgtgcagcgggacgtgcgatcgttgatcttgtggcttgtgagccgtcggattccacggagaggcgagagacagcgaggaagtggtcgaggaggatgaggaatagtgggtttggagcggtggggtatagtgatgaggtggcggatgatgtcagagctttgttgaggagatataaagaaggtgtttggtcgatggtacagtgtcctgatgccgccggaatattcctttgttggagagatcagccggtggtttgggctagtgcgtggcggccaacgtaaagggttgtttttattttttcataaggaattcgcaagttcgatttttacttgagatggtttcacacgtgtggtgatggttgatgatgggctttgagattgagagagttacgattatgatgataatgcagttcataatatgaatttggattttggaataggactaattaagtaattctgatcattgaggtgggtatcaaggttcatacaattcgtgattttttgttttgtctttggtatttattaattttaaaaatccattttggaatgaaatttgtgattacttttgtttatccg

SEQ ID NO: 45744 - protein, 531 aa, Arabidopsis thaliana
  peptide (1)..(531): Ceres Seq. ID no. 12561143
  misc_feature (118)..(437): Pfam Name: GRAS family transcription factor Pfam Description: GRAS family transcription factor
  misc_feature (146)..(529): Homolog of NCBI NO: 34907424 NR Description: scarecrow-like protein [Oryza sativa (japonica
  misc_feature (147)..(529): Homolog of NCBI NO: 26450054 NR Description: putative SCARECROW gene regulator [Arabidopsis
  misc_feature (147)..(529): Homolog of NCBI NO: 15238903 NR Description: SCARECROW gene regulator-like
  misc_feature (67)..(528): Homolog of NCBI NO: 37533564 NR Description: putative SCARECROW gene regulator-like
  misc_feature (121)..(530): Homolog of NCBI NO: 15229645 NR Description: putative protein; protein id: At3g49950.1
  misc_feature (246)..(530): Homolog of NCBI NO: 34901144 NR Description: short-root protein-like [Oryza sativa (japonica
  misc_feature (1)..(44): Homolog of NCBI NO: 34901144 NR Description: short-root protein-like [Oryza sativa (japonica
  misc_feature (37)..(399): Homolog of NCBI NO: 34901144 NR Description: short-root protein-like [Oryza sativa (japonica
  misc_feature (54)..(531): Homolog of NCBI NO: 18491223 NR Description: putative SHORT-ROOT (SHR) protein [Arabidopsis
  misc_feature (1)..(531): Homolog of NCBI NO: 15235646 NR Description: SHORT-ROOT (SHR); protein id: At4g37650.1
MDTLFRLVSLQQQQQSDSIITNQSSLSRTSTTTTGSPQTAYHYNFPQNDVVEECFNFFMDEEDLSSSSSHHNHHNHNNPNTYYSPFTTPTQYHPATSSTPSSTAAAAALASPYSSSGHHNDPSAFSIPQTPPSFDFSANAKWADSVLLEAARAFSDKDTARAQQILWTLNELSSPYGDTEQKLASYFLQALFNRMTGSGERCYRTMVTAAATEKTCSFESTRKTVLKFQEVSPWATFGHVAANGAILEAVDGEAKIHIVDISSTFCTQWPTLLEALATRSDDTPHLRLTTVVVANKFVNDQTASHRMMKEIGNRMEKFARLMGVPFKFNIIHHVGDLSEFDLNELDVKPDEVLAINCVGAMHGIASRGSPRDAVISSFRRLRPRIVTVVEEEADLVGEEEGGFDDEFLRGFGECLRWFRVCFESWEESFPRTSNERLMLERAAGRAIVDLVACEPSDSTERRETARKWSRRMRNSGFGAVGYSDEVADDVRALLRRYKEGVWSMVQCPDAAGIFLCWRDQPVVWASAWRPT

SEQ ID NO: 45745 - protein, 473 aa, Arabidopsis thaliana
  peptide (1)..(473): Ceres Seq. ID no. 12561144
  misc_feature (60)..(379): Pfam Name: GRAS family transcription factor Pfam Description: GRAS family transcription factor
  misc_feature (88)..(471): Homolog of NCBI NO: 15218990 NR Description: scarecrow-like 1
  misc_feature (88)..(471): Homolog of NCBI NO: 34907424 NR Description: scarecrow-like protein [Oryza sativa (japonica
  misc_feature (89)..(471): Homolog of NCBI NO: 26450054 NR Description: putative SCARECROW gene regulator [Arabidopsis
  misc_feature (89)..(471): Homolog of NCBI NO: 15238903 NR Description: SCARECROW gene regulator-like
  misc_feature (9)..(470): Homolog of NCBI NO: 37533564 NR Description: putative SCARECROW gene regulator-like
  misc_feature (63)..(472): Homolog of NCBI NO: 15229645 NR Description: putative protein; protein id: At3g49950.1
  misc_feature (188)..(472): Homolog of NCBI NO: 34901144 NR Description: short-root protein-like [Oryza sativa (japonica
  misc_feature (1)..(341): Homolog of NCBI NO: 34901144 NR Description: short-root protein-like [Oryza sativa (japonica
  misc_feature (1)..(473): Homolog of NCBI NO: 18491223 NR Description: putative SHORT-ROOT (SHR) protein [Arabidopsis
  misc_feature (1)..(473): Homolog of NCBI NO: 15235646 NR Description: SHORT-ROOT (SHR); protein id: At4g37650.1
MDEEDLSSSSSHHNHHNHNNPNTYYSPFTTPTQYHPATSSTPSSTAAAAALASPYSSSGHHNDPSAFSIPQTPPSFDFSANAKWADSVLLEAARAFSDKDTARAQQILWTLNELSSPYGDTEQKLASYFLQALFNRMTGSGERCYRTMVTAAATEKTCSFESTRKTVLKFQEVSPWATFGHVAANGAILEAVDGEAKIHIVDISSTFCTQWPTLLEALATRSDDTPHLRLTTVVVANKFVNDQTASHRMMKEIGNRMEKFARLMGVPFKFNIIHHVGDLSEFDLNELDVKPDEVLAINCVGAMHGIASRGSPRDAVISSFRRLRPRIVTVVEEEADLVGEEEGGFDDEFLRGFGECLRWFRVCFESWEESFPRTSNERLMLERAAGRAIVDLVACEPSDSTERRETARKWSRRMRNSGFGAVGYSDEVADDVRALLRRYKEGVWSMVQCPDAAGIFLCWRDQPVVWASAWRPT

SEQ ID NO: 45746 - protein, 337 aa, Arabidopsis thaliana
  peptide (1)..(337): Ceres Seq. ID no. 12561145
  misc_feature (1)..(243): Pfam Name: GRAS family transcription factor Pfam Description: GRAS family transcription factor
  misc_feature (1)..(335): Homolog of NCBI NO: 15218990 NR Description: scarecrow-like 1
  misc_feature (1)..(335): Homolog of NCBI NO: 34907424 NR Description: scarecrow-like protein [Oryza sativa (japonica
  misc_feature (1)..(335): Homolog of NCBI NO: 26450054 NR Description: putative SCARECROW gene regulator [Arabidopsis
  misc_feature (1)..(335): Homolog of NCBI NO: 15238903 NR Description: SCARECROW gene regulator-like
  misc_feature (1)..(334): Homolog of NCBI NO: 37533564 NR Description: putative SCARECROW gene regulator-like
  misc_feature (1)..(336): Homolog of NCBI NO: 15229645 NR Description: putative protein; protein id: At3g49950.1
  misc_feature (52)..(336): Homolog of NCBI NO: 34901144 NR Description: short-root protein-like [Oryza sativa (japonica
  misc_feature (1)..(205): Homolog of NCBI NO: 34901144 NR Description: short-root protein-like [Oryza sativa (japonica
  misc_feature (1)..(337): Homolog of NCBI NO: 18491223 NR Description: putative SHORT-ROOT (SHR) protein [Arabidopsis
  misc_feature (1)..(337): Homolog of NCBI NO: 15235646 NR Description: SHORT-ROOT (SHR); protein id: At4g37650.1
MTGSGERCYRTMVTAAATEKTCSFESTRKTVLKFQEVSPWATFGHVAANGAILEAVDGEAKIHIVDISSTFCTQWPTLLEALATRSDDTPHLRLTTVVVANKFVNDQTASHRMMKEIGNRMEKFARLMGVPFKFNIIHHVGDLSEFDLNELDVKPDEVLAINCVGAMHGIASRGSPRDAVISSFRRLRPRIVTVVEEEADLVGEEEGGFDDEFLRGFGECLRWFRVCFESWEESFPRTSNERLMLERAAGRAIVDLVACEPSDSTERRETARKWSRRMRNSGFGAVGYSDEVADDVRALLRRYKEGVWSMVQCPDAAGIFLCWRDQPVVWASAWRPT

SEQ ID NO: 45747 - DNA, 1839 bp, Arabidopsis thaliana
  misc_feature (1)..(1839): Ceres Seq. ID no. 13593206
  misc_feature: MA Experiment ID: 20000166 Result: Up-regulated in Transcription
  misc_feature: MA Experiment 20000166 PARAMETER Experiment Name: At_100uM_ABA_P Parameter: Age (day) Value: 14
  misc_feature: MA Experiment 20000166 PARAMETER Experiment Name: At_100uM_ABA_P Parameter: Organism Value: A. thaliana
  misc_feature: MA Experiment 20000166 PARAMETER Experiment Name: At_100uM_ABA_P Parameter: Plant Line Value: WS
  misc_feature: MA Experiment 20000166 PARAMETER Experiment Name: At_100uM_ABA_P Parameter: Timepoint (hr) Value: 1
  misc_feature: MA Experiment 20000166 PARAMETER Experiment Name: At_100uM_ABA_P Parameter: Tissue Value: Aerial
  misc_feature: MA Experiment 20000166 PARAMETER Experiment Name: At_100uM_ABA_P Parameter: Treatment Value: 100uM ABA vs. No Treatment
  misc_feature: MA Experiment ID: 20000180 Result: Up-regulated in Transcription
  misc_feature: MA Experiment 20000180 PARAMETER Experiment Name: At_Germinating_Seeds_P Parameter: Age (hr) Value: 24 vs. 0
  misc_feature: MA Experiment 20000180 PARAMETER Experiment Name: At_Germinating_Seeds_P Parameter: Tissue Value: Germinating Seeds
  misc_feature: MA Experiment ID: 20000185 Result: Down-regulated in Transcription
  misc_feature: MA Experiment 20000185 PARAMETER Experiment Name: At_Roots__P Parameter: Age (day) Value: 7 vs. 21
  misc_feature: MA Experiment 20000185 PARAMETER Experiment Name: At_Roots__P Parameter: Organism Value: A. thaliana
  misc_feature: MA Experiment 20000185 PARAMETER Experiment Name: At_Roots__P Parameter: Tissue Value: Roots vs. Whole Plant
  misc_feature: MA Experiment ID: 20000437 Result: Down-regulated in Transcription
  misc_feature: MA Experiment 20000437 PARAMETER Experiment Name: At_Drought_P Parameter: Age (day) Value: 8
  misc_feature: MA Experiment 20000437 PARAMETER Experiment Name: At_Drought_P Parameter: Organism Value: A. thaliana
  misc_feature: MA Experiment 20000437 PARAMETER Experiment Name: At_Drought_P Parameter: Plant Line Value: WS
  misc_feature: MA Experiment 20000437 PARAMETER Experiment Name: At_Drought_P Parameter: Timepoint (hr) Value: 24
  misc_feature: MA Experiment 20000437 PARAMETER Experiment Name: At_Drought_P Parameter: Tissue Value: Whole Plant
  misc_feature: MA Experiment 20000437 PARAMETER Experiment Name: At_Drought_P Parameter: Treatment Value: Drought vs. No Drought
  misc_feature: MA Experiment ID: 20000445 Result: Up-regulated in Transcription
  misc_feature: MA Experiment 20000445 PARAMETER Experiment Name: At_100uM_NAA__P Parameter: Age (day) Value: 14
  misc_feature: MA Experiment 20000445 PARAMETER Experiment Name: At_100uM_NAA__P Parameter: Organism Value: A. thaliana
  misc_feature: MA Experiment 20000445 PARAMETER Experiment Name: At_100uM_NAA__P Parameter: Plant Line Value: WS
  misc_feature: MA Experiment 20000445 PARAMETER Experiment Name: At_100uM_NAA__P Parameter: Timepoint (hr) Value: 6
  misc_feature: MA Experiment 20000445 PARAMETER Experiment Name: At_100uM_NAA__P Parameter: Tissue Value: Aerial
  misc_feature: MA Experiment 20000445 PARAMETER Experiment Name: At_100uM_NAA__P Parameter: Treatment Value: 100uM NAA vs. No Treatment
  misc_feature: MA Experiment ID: 20000451 Result: Up-regulated in Transcription
  misc_feature: MA Experiment 20000451 PARAMETER Experiment Name: At_CS6879_Shoots-Roots_P Parameter: Age (day) Value: 14
  misc_feature: MA Experiment 20000451 PARAMETER Experiment Name: At_CS6879_Shoots-Roots_P Parameter: Organism Value: A. thaliana
  misc_feature: MA Experiment 20000451 PARAMETER Experiment Name: At_CS6879_Shoots-Roots_P Parameter: Plant Line Value: CS6879 vs. WS
  misc_feature: MA Experiment 20000451 PARAMETER Experiment Name: At_CS6879_Shoots-Roots_P Parameter: Tissue Value: Roots
  misc_feature: MA Experiment ID: 20000460 Result: Up-regulated in Transcription
  misc_feature: MA Experiment 20000460 PARAMETER Experiment Name: At_10percent_PEG_P Parameter: Age (day) Value: 12
  misc_feature: MA Experiment 20000460 PARAMETER Experiment Name: At_10percent_PEG_P Parameter: Organism Value: A. thaliana
  misc_feature: MA Experiment 20000460 PARAMETER Experiment Name: At_10percent_PEG_P Parameter: Plant Line Value: WS
  misc_feature: MA Experiment 20000460 PARAMETER Experiment Name: At_10percent_PEG_P Parameter: Timepoint (day) Value: 12
  misc_feature: MA Experiment 20000460 PARAMETER Experiment Name: At_10percent_PEG_P Parameter: Tissue Value: Whole Plant
  misc_feature: MA Experiment 20000460 PARAMETER Experiment Name: At_10percent_PEG_P Parameter: Treatment Value: 10percent PEG vs. No Treatment
  misc_feature: MA Experiment ID: 20000527 Result: Up-regulated in Transcription
  misc_feature: MA Experiment 20000527 PARAMETER Experiment Name: At_10percent_PEG_P Parameter: Age (day) Value: 20
  misc_feature: MA Experiment 20000527 PARAMETER Experiment Name: At_10percent_PEG_P Parameter: Organism Value: A. thaliana
  misc_feature: MA Experiment 20000527 PARAMETER Experiment Name: At_10percent_PEG_P Parameter: Plant Line Value: WS
  misc_feature: MA Experiment 20000527 PARAMETER Experiment Name: At_10percent_PEG_P Parameter: Timepoint (day) Value: 20
  misc_feature: MA Experiment 20000527 PARAMETER Experiment Name: At_10percent_PEG_P Parameter: Tissue Value: Whole Plant
  misc_feature: MA Experiment 20000527 PARAMETER Experiment Name: At_10percent_PEG_P Parameter: Treatment Value: 10percent PEG vs. No Treatment
  misc_feature: MA Experiment ID: 20001554 Result: Down-regulated in Transcription
  misc_feature: MA Experiment 20001554 PARAMETER Experiment Name: At_Drought_Soil_Dry_P Parameter: Age (day) Value: 21
  misc_feature: MA Experiment 20001554 PARAMETER Experiment Name: At_Drought_Soil_Dry_P Parameter: Organism Value: A. thaliana
  misc_feature: MA Experiment 20001554 PARAMETER Experiment Name: At_Drought_Soil_Dry_P Parameter: Plant Line Value: WS
  misc_feature: MA Experiment 20001554 PARAMETER Experiment Name: At_Drought_Soil_Dry_P Parameter: Post Timepoint (hr) Value: None
  misc_feature: MA Experiment 20001554 PARAMETER Experiment Name: At_Drought_Soil_Dry_P Parameter: Post-Treatment Value: None
  misc_feature: MA Experiment 20001554 PARAMETER Experiment Name: At_Drought_Soil_Dry_P Parameter: Timepoint (day) Value: 7
  misc_feature: MA Experiment 20001554 PARAMETER Experiment Name: At_Drought_Soil_Dry_P Parameter: Treatment Value: Drought vs. No Drought
  misc_feature: MA Experiment ID: 20001555 Result: Down-regulated in Transcription
  misc_feature: MA Experiment 20001555 PARAMETER Experiment Name: At_Drought_Soil_Dry_P Parameter: Age (day) Value: 24
  misc_feature: MA Experiment 20001555 PARAMETER Experiment Name: At_Drought_Soil_Dry_P Parameter: Organism Value: A. thaliana
  misc_feature: MA Experiment 20001555 PARAMETER Experiment Name: At_Drought_Soil_Dry_P Parameter: Plant Line Value: WS
  misc_feature: MA Experiment 20001555 PARAMETER Experiment Name: At_Drought_Soil_Dry_P Parameter: Post Timepoint (hr) Value: None
  misc_feature: MA Experiment 20001555 PARAMETER Experiment Name: At_Drought_Soil_Dry_P Parameter: Post-Treatment Value: None
  misc_feature: MA Experiment 20001555 PARAMETER Experiment Name: At_Drought_Soil_Dry_P Parameter: Timepoint (day) Value: 10
  misc_feature: MA Experiment 20001555 PARAMETER Experiment Name: At_Drought_Soil_Dry_P Parameter: Treatment Value: Drought vs. No Drought
  misc_feature: MA Experiment ID: 20001556 Result: Down-regulated in Transcription
  misc_feature: MA Experiment 20001556 PARAMETER Experiment Name: At_Drought_Soil_Dry_P Parameter: Age (day) Value: 26
  misc_feature: MA Experiment 20001556 PARAMETER Experiment Name: At_Drought_Soil_Dry_P Parameter: Organism Value: A. thaliana
  misc_feature: MA Experiment 20001556 PARAMETER Experiment Name: At_Drought_Soil_Dry_P Parameter: Plant Line Value: WS
  misc_feature: MA Experiment 20001556 PARAMETER Experiment Name: At_Drought_Soil_Dry_P Parameter: Post Timepoint (hr) Value: None
  misc_feature: MA Experiment 20001556 PARAMETER Experiment Name: At_Drought_Soil_Dry_P Parameter: Post-Treatment Value: None
  misc_feature: MA Experiment 20001556 PARAMETER Experiment Name: At_Drought_Soil_Dry_P Parameter: Timepoint (day) Value: 12
  misc_feature: MA Experiment 20001556 PARAMETER Experiment Name: At_Drought_Soil_Dry_P Parameter: Treatment Value: Drought vs. No Drought
  misc_feature: MA Experiment ID: 20001558 Result: Up-regulated in Transcription
  misc_feature: MA Experiment 20001558 PARAMETER Experiment Name: At_Drought_Soil_Dry_P Parameter: Age (day) Value: 27
  misc_feature: MA Experiment 20001558 PARAMETER Experiment Name: At_Drought_Soil_Dry_P Parameter: Organism Value: A. thaliana
  misc_feature: MA Experiment 20001558 PARAMETER Experiment Name: At_Drought_Soil_Dry_P Parameter: Plant Line Value: WS
  misc_feature: MA Experiment 20001558 PARAMETER Experiment Name: At_Drought_Soil_Dry_P Parameter: Post Timepoint (hr) Value: 6
  misc_feature: MA Experiment 20001558 PARAMETER Experiment Name: At_Drought_Soil_Dry_P Parameter: Post-Treatment Value: Re-Water vs. No Drought
  misc_feature: MA Experiment 20001558 PARAMETER Experiment Name: At_Drought_Soil_Dry_P Parameter: Timepoint (day) Value: 13
  misc_feature: MA Experiment 20001558 PARAMETER Experiment Name: At_Drought_Soil_Dry_P Parameter: Treatment Value: Drought vs. No Drought
  misc_feature: MA Experiment ID: 20001770 Result: Up-regulated in Transcription
  misc_feature: MA Experiment 20001770 PARAMETER Experiment Name: At_Far-red-enriched-adult_P Parameter: Age (day) Value: 28
  misc_feature: MA Experiment 20001770 PARAMETER Experiment Name: At_Far-red-enriched-adult_P Parameter: Light Value: Far-red enriched vs. White
  misc_feature: MA Experiment 20001770 PARAMETER Experiment Name: At_Far-red-enriched-adult_P Parameter: Organism Value: A. thaliana
  misc_feature: MA Experiment 20001770 PARAMETER Experiment Name: At_Far-red-enriched-adult_P Parameter: Plant Line Value: Columbia
  misc_feature: MA Experiment 20001770 PARAMETER Experiment Name: At_Far-red-enriched-adult_P Parameter: Timepoint (hr) Value: 8
  misc_feature: MA Experiment 20001770 PARAMETER Experiment Name: At_Far-red-enriched-adult_P Parameter: Tissue Value: Aerial
  misc_feature: MA Experiment ID: 20001907 Result: Down-regulated in Transcription
  misc_feature: MA Experiment 20001907 PARAMETER Experiment Name: At_Drought_Reproduction_P Parameter: Age (day) Value: 37
  misc_feature: MA Experiment 20001907 PARAMETER Experiment Name: At_Drought_Reproduction_P Parameter: Organism Value: A. thaliana
  misc_feature: MA Experiment 20001907 PARAMETER Experiment Name: At_Drought_Reproduction_P Parameter: Plant Line Value: WS
  misc_feature: MA Experiment 20001907 PARAMETER Experiment Name: At_Drought_Reproduction_P Parameter: Timepoint (day) Value: 7
  misc_feature: MA Experiment 20001907 PARAMETER Experiment Name: At_Drought_Reproduction_P Parameter: Tissue Value: Siliques
  misc_feature: MA Experiment 20001907 PARAMETER Experiment Name: At_Drought_Reproduction_P Parameter: Treatment Value: Drought vs. No Drought
  misc_feature: MA Experiment ID: 20001910 Result: Down-regulated in Transcription
  misc_feature: MA Experiment 20001910 PARAMETER Experiment Name: At_Drought_Reproduction_P Parameter: Age (day) Value: 37
  misc_feature: MA Experiment 20001910 PARAMETER Experiment Name: At_Drought_Reproduction_P Parameter: Organism Value: A. thaliana
  misc_feature: MA Experiment 20001910 PARAMETER Experiment Name: At_Drought_Reproduction_P Parameter: Plant Line Value: WS
  misc_feature: MA Experiment 20001910 PARAMETER Experiment Name: At_Drought_Reproduction_P Parameter: Timepoint (day) Value: 7
  misc_feature: MA Experiment 20001910 PARAMETER Experiment Name: At_Drought_Reproduction_P Parameter: Tissue Value: Flowers
  misc_feature: MA Experiment 20001910 PARAMETER Experiment Name: At_Drought_Reproduction_P Parameter: Treatment Value: Drought vs. No Drought
  misc_feature: MA Experiment ID: 20001911 Result: Down-regulated in Transcription
  misc_feature: MA Experiment 20001911 PARAMETER Experiment Name: At_Drought_Reproduction_P Parameter: Age (day) Value: 40
  misc_feature: MA Experiment 20001911 PARAMETER Experiment Name: At_Drought_Reproduction_P Parameter: Organism Value: A. thaliana
  misc_feature: MA Experiment 20001911 PARAMETER Experiment Name: At_Drought_Reproduction_P Parameter: Plant Line Value: WS
  misc_feature: MA Experiment 20001911 PARAMETER Experiment Name: At_Drought_Reproduction_P Parameter: Timepoint (day) Value: 10
  misc_feature: MA Experiment 20001911 PARAMETER Experiment Name: At_Drought_Reproduction_P Parameter: Tissue Value: Flowers
  misc_feature: MA Experiment 20001911 PARAMETER Experiment Name: At_Drought_Reproduction_P Parameter: Treatment Value: Drought vs. No Drought
gagtaacatcaaaatttacaaaaaacaaaaaaacatgctatctctcaaactcttcctcgtaacactcttcttatctcttcaaacactcttcattgcttctcaaactcttcttccttcttcttcaaacacttcatcaaccatctgcaaaacaacacccgatccaaaattctgcaaatcagtgttcccacaaacatctcaaggcgacgttcgcgaatacggccgcttctccctccgcaaatcgctaacgcaatcgcggaaattcacacgcaccattgacaaatacctcaaacgcaacaatgcactattatctcaatccgccgttggagctctccaagactgccgttacctagcaagcctcacaacagactatctcataacatcgttcgagaccgacaatatcactacatcatccaaaacgttgtcgttttccaaagccgacgaaatccaaacacttctctctgcggctttgactaacgagcaaacatgtcttgatggaatcaacaccgctgcttcctcttcttggactatacgaaacggtgtcgcattgcctctaatcaacgacacgaagctctttagtgtttcgctcgcattattcaccaaaggttgggttccaaagaagaagaaacaagtagccagttactcttgggcccatccaaagaacactcatagtcacacaaaaccattccgtcatttccgtaacggagctttaccgttaaagatgacggaacacacacgcgcagtttacgagtctttaagcaggaggaaactcgctgacgacgataatgacgtaaacacggtgcttgtaagcgacatcgtaacggtgaaccaaaacggaacggggaatttcacgaccataacggaagctgttaattcggcgccgaatataactgacggtaccgccggttatttcgttatctacgtgacgtcaggtgtttatgaggaaaacgtagtgattgccaaaaacaaaagatatctaatgatgattggtgacggaataaaccgtacggtggttaccggtaaccggaatgtcgtcgacggttggaccactttcaactccgccacttttgctgttacatcgccgaacttcgttgccgtgaacatgactttccgaaataccgctggaccagagaagcaccaggccgtagctatgaggagcagtgcagatctttcaatcttctatagttgcagtttcgaagcttatcaagacactttatacacacattcactaagacagttctatagagaatgtgacatttatggaacagtcgatttcatattcggcaatgcagctgttgtgttccaagactgtaatctctatccaagacaaccgatgcagaaccagttcaacgctattacagctcaaggtcgtactgatccgaatcaaaacacgggaatttcgattcacaattgtacgattaaaccggcagatgatttggtttcgagtaactatacggttaaaacgtatttgggacgaccatggaaggagtattcacgtacggtttttatgcaatcgtacatagacgaggttgttgaaccggttggttggagagaatggaacggagatttcgcattgagtacgttgtactatgctgagtataacaataccggttccggttcaagtactacagatcgagtggtttggtccggttatcatgtgattaattctacggatgcgaataatttcacagtcgagaatttcttgttaggagatggttggatggttcagagtggtgtaccttatattagtggtttactttcgtaatttcttgtatctgattatttgttttagctattattatgggtaaaaaaaaaaaaaaaaaactcgagggggggcccggt

SEQ ID NO: 45748 - protein, 586 aa, Arabidopsis thaliana
  peptide (1)..(586): Ceres Seq. ID no. 13593207
  misc_feature (272)..(570): Pfam Name: Pectinesterase Pfam Description: Pectinesterase
  misc_feature (35)..(586): Homolog of NCBI NO: 30681457 NR Description: pectinesterase, putative [Arabidopsis thaliana]
  misc_feature (35)..(586): Homolog of NCBI NO: 6630558 NR Description: putative pectinesterase [Arabidopsis thaliana]
  misc_feature (240)..(586): Homolog of NCBI NO: 16604402 NR Description: At2g47550/T30B22.15 [Arabidopsis thaliana]
  misc_feature (240)..(586): Homolog of NCBI NO: 27363394 NR Description: At2g47550/T30B22.15 [Arabidopsis thaliana]
  misc_feature (76)..(208): Homolog of NCBI NO: 7447370 NR Description: probable pectinesterase (EC 3.1.1.11) T30B22.15 -
  misc_feature (269)..(586): Homolog of NCBI NO: 7447370 NR Description: probable pectinesterase (EC 3.1.1.11) T30B22.15 -
  misc_feature (67)..(586): Homolog of NCBI NO: 18407388 NR Description: pectinesterase family [Arabidopsis thaliana]
  misc_feature (19)..(586): Homolog of NCBI NO: 18379010 NR Description: pectinesterase family [Arabidopsis thaliana]
  misc_feature (12)..(586): Homolog of NCBI NO: 19424045 NR Description: unknown protein [Arabidopsis thaliana]
  misc_feature (12)..(586): Homolog of NCBI NO: 18411914 NR Description: expressed protein [Arabidopsis thaliana]
SNIKIYKKQKNMLSLKLFLVTLFLSLQTLFIASQTLLPSSSNTSSTICKTTPDPKFCKSVFPQTSQGDVREYGRFSLRKSLTQSRKFTRTIDKYLKRNNALLSQSAVGALQDCRYLASLTTDYLITSFETDNITTSSKTLSFSKADEIQTLLSAALTNEQTCLDGINTAASSSWTIRNGVALPLINDTKLFSVSLALFTKGWVPKKKKQVASYSWAHPKNTHSHTKPFRHFRNGALPLKMTEHTRAVYESLSRRKLADDDNDVNTVLVSDIVTVNQNGTGNFTTITEAVNSAPNITDGTAGYFVIYVTSGVYEENVVIAKNKRYLMMIGDGINRTVVTGNRNVVDGWTTFNSATFAVTSPNFVAVNMTFRNTAGPEKHQAVAMRSSADLSIFYSCSFEAYQDTLYTHSLRQFYRECDIYGTVDFIFGNAAVVFQDCNLYPRQPMQNQFNAITAQGRTDPNQNTGISIHNCTIKPADDLVSSNYTVKTYLGRPWKEYSRTVFMQSYIDEVVEPVGWREWNGDFALSTLYYAEYNNTGSGSSTTDRVVWSGYHVINSTDANNFTVENFLLGDGWMVQSGVPYISGLLS

SEQ ID NO: 45749 - protein, 575 aa, Arabidopsis thaliana
  peptide (1)..(575): Ceres Seq. ID no. 13593208
  misc_feature (261)..(559): Pfam Name: Pectinesterase Pfam Description: Pectinesterase
  misc_feature (24)..(575): Homolog of NCBI NO: 30681457 NR Description: pectinesterase, putative [Arabidopsis thaliana]
  misc_feature (24)..(575): Homolog of NCBI NO: 6630558 NR Description: putative pectinesterase [Arabidopsis thaliana]
  misc_feature (229)..(575): Homolog of NCBI NO: 16604402 NR Description: At2g47550/T30B22.15 [Arabidopsis thaliana]
  misc_feature (229)..(575): Homolog of NCBI NO: 27363394 NR Description: At2g47550/T30B22.15 [Arabidopsis thaliana]
  misc_feature (65)..(197): Homolog of NCBI NO: 7447370 NR Description: probable pectinesterase (EC 3.1.1.11) T30B22.15 -
  misc_feature (258)..(575): Homolog of NCBI NO: 7447370 NR Description: probable pectinesterase (EC 3.1.1.11) T30B22.15 -
  misc_feature (56)..(575): Homolog of NCBI NO: 18407388 NR Description: pectinesterase family [Arabidopsis thaliana]
  misc_feature (8)..(575): Homolog of NCBI NO: 18379010 NR Description: pectinesterase family [Arabidopsis thaliana]
  misc_feature (1)..(575): Homolog of NCBI NO: 19424045 NR Description: unknown protein [Arabidopsis thaliana]
  misc_feature (1)..(575): Homolog of NCBI NO: 18411914 NR Description: expressed protein [Arabidopsis thaliana]
MLSLKLFLVTLFLSLQTLFIASQTLLPSSSNTSSTICKTTPDPKFCKSVFPQTSQGDVREYGRFSLRKSLTQSRKFTRTIDKYLKRNNALLSQSAVGALQDCRYLASLTTDYLITSFETDNITTSSKTLSFSKADEIQTLLSAALTNEQTCLDGINTAASSSWTIRNGVALPLINDTKLFSVSLALFTKGWVPKKKKQVASYSWAHPKNTHSHTKPFRHFRNGALPLKMTEHTRAVYESLSRRKLADDDNDVNTVLVSDIVTVNQNGTGNFTTITEAVNSAPNITDGTAGYFVIYVTSGVYEENVVIAKNKRYLMMIGDGINRTVVTGNRNVVDGWTTFNSATFAVTSPNFVAVNMTFRNTAGPEKHQAVAMRSSADLSIFYSCSFEAYQDTLYTHSLRQFYRECDIYGTVDFIFGNAAVVFQDCNLYPRQPMQNQFNAITAQGRTDPNQNTGISIHNCTIKPADDLVSSNYTVKTYLGRPWKEYSRTVFMQSYIDEVVEPVGWREWNGDFALSTLYYAEYNNTGSGSSTTDRVVWSGYHVINSTDANNFTVENFLLGDGWMVQSGVPYISGLLS

SEQ ID NO: 45750 - protein, 347 aa, Arabidopsis thaliana
  peptide (1)..(347): Ceres Seq. ID no. 13593209
  misc_feature (33)..(331): Pfam Name: Pectinesterase Pfam Description: Pectinesterase
  misc_feature (1)..(346): Homolog of NCBI NO: 15238378 NR Description: pectinesterase, putative [Arabidopsis thaliana]
  misc_feature (1)..(347): Homolog of NCBI NO: 30681457 NR Description: pectinesterase, putative [Arabidopsis thaliana]
  misc_feature (1)..(347): Homolog of NCBI NO: 6630558 NR Description: putative pectinesterase [Arabidopsis thaliana]
  misc_feature (1)..(347): Homolog of NCBI NO: 16604402 NR Description: At2g47550/T30B22.15 [Arabidopsis thaliana]
  misc_feature (1)..(347): Homolog of NCBI NO: 27363394 NR Description: At2g47550/T30B22.15 [Arabidopsis thaliana]
  misc_feature (30)..(347): Homolog of NCBI NO: 7447370 NR Description: probable pectinesterase (EC 3.1.1.11) T30B22.15 -
  misc_feature (1)..(347): Homolog of NCBI NO: 18407388 NR Description: pectinesterase family [Arabidopsis thaliana]
  misc_feature (1)..(347): Homolog of NCBI NO: 18379010 NR Description: pectinesterase family [Arabidopsis thaliana]
  misc_feature (1)..(347): Homolog of NCBI NO: 19424045 NR Description: unknown protein [Arabidopsis thaliana]
  misc_feature (1)..(347): Homolog of NCBI NO: 18411914 NR Description: expressed protein [Arabidopsis thaliana]
MTEHTRAVYESLSRRKLADDDNDVNTVLVSDIVTVNQNGTGNFTTITEAVNSAPNITDGTAGYFVIYVTSGVYEENVVIAKNKRYLMMIGDGINRTVVTGNRNVVDGWTTFNSATFAVTSPNFVAVNMTFRNTAGPEKHQAVAMRSSADLSIFYSCSFEAYQDTLYTHSLRQFYRECDIYGTVDFIFGNAAVVFQDCNLYPRQPMQNQFNAITAQGRTDPNQNTGISIHNCTIKPADDLVSSNYTVKTYLGRPWKEYSRTVFMQSYIDEVVEPVGWREWNGDFALSTLYYAEYNNTGSGSSTTDRVVWSGYHVINSTDANNFTVENFLLGDGWMVQSGVPYISGLLS

SEQ ID NO: 45751 - DNA, 1629 bp, Arabidopsis thaliana
  misc_feature (1)..(1629): Ceres Seq. ID no. 14309798
  misc_feature: MA Experiment ID: 20000794 Result: Down-regulated in Transcription
  misc_feature: MA Experiment 20000794 PARAMETER Experiment Name: At_Petals_P Parameter: Age (day) Value: 23-25 days
  misc_feature: MA Experiment 20000794 PARAMETER Experiment Name: At_Petals_P Parameter: Plant Line Value: WS
  misc_feature: MA Experiment 20000794 PARAMETER Experiment Name: At_Petals_P Parameter: Tissue Value: Petals vs. Whole plant
  misc_feature: MA Experiment ID: 20001248 Result: Up-regulated in Transcription
  misc_feature: MA Experiment 20001248 PARAMETER Experiment Name: At_Far-red-induction_P Parameter: Age (day) Value: 7
  misc_feature: MA Experiment 20001248 PARAMETER Experiment Name: At_Far-red-induction_P Parameter: Light Value: Far-red vs. White
  misc_feature: MA Experiment 20001248 PARAMETER Experiment Name: At_Far-red-induction_P Parameter: Organism Value: A. thaliana
  misc_feature: MA Experiment 20001248 PARAMETER Experiment Name: At_Far-red-induction_P Parameter: Plant Line Value: Columbia
  misc_feature: MA Experiment 20001248 PARAMETER Experiment Name: At_Far-red-induction_P Parameter: Timepoint (hr) Value: 4
  misc_feature: MA Experiment 20001248 PARAMETER Experiment Name: At_Far-red-induction_P Parameter: Tissue Value: Whole Plant
  misc_feature: MA Experiment ID: 20001451 Result: Up-regulated in Transcription
  misc_feature: MA Experiment 20001451 PARAMETER Experiment Name: At_Far-red-induction_P Parameter: Age (day) Value: 7
  misc_feature: MA Experiment 20001451 PARAMETER Experiment Name: At_Far-red-induction_P Parameter: Light Value: Far-red vs. White
  misc_feature: MA Experiment 20001451 PARAMETER Experiment Name: At_Far-red-induction_P Parameter: Organism Value: A. thaliana
  misc_feature: MA Experiment 20001451 PARAMETER Experiment Name: At_Far-red-induction_P Parameter: Plant Line Value: Columbia
  misc_feature: MA Experiment 20001451 PARAMETER Experiment Name: At_Far-red-induction_P Parameter: Timepoint (hr) Value: 24
  misc_feature: MA Experiment 20001451 PARAMETER Experiment Name: At_Far-red-induction_P Parameter: Tissue Value: Whole Plant
aaaaccccctggtctggaggaaatagtaccagctaagctcgcagctcaaagctcagtgtttaataattgtatagcttttttggtgaacgaagagtcagatcggcgagcctgagatgggttggggttcggtgttgctattactggcggtggctcttctttgtcagagggcaagttcaatcggagctaactggggcacacaggcgtcgcacccacttccaccggacatagttgtgcggatgctaagagagaatggtattcagaaagtaaagctctttgacgccgaatacgacactctcagagctttgggcaaatccggaatcgaagtcatggttggtattcccaatgagatgcttgcgactctcgcctctagcctgaaagctgctgagaaatgggttgctaaaaatgtctctactcacatctccaccgacaacgtcaacatcagatatgtggctgttgggaatgaacctttcttgtctacttataatgggagctatctgagtactactttccctgcgttgaggaacatccaaattgcaattataaaggctggccttcagaaccaagtgaaggtcacttgtcccttgaacgctgatgtctatgacagctccaccacttttccttctggaggggacttcagggccaatatccgtgacctcatgatcactatcgtcaagttcttgagcgaaaatggcggtcctttcactgttaacatctacccttacatcagtctttacaccaaccccgatttcccagttgattacgccttctttgacggcaatgcacagcccctgaacgatggtgggactttttattacaacatgtttgatgcaaattacgacaccctagtccacgcgttggagaagaatgggtttggtaacatgcctatcattattggggaaattggttggcctactgatggagacagtaatgcgaatttggactacgctaagaagttcaaccaaggctttatggctcacatctcaggggggaaagggactccgaggagacctggccctatcgatgcatacctgttcagcttgatagacgaggacgccaagagtgttcagccaggatactttgagcgacactgggggatattcacatttgacggcttaccaaaatatgccttgaacctagggacaacgaacacaggagctctgatccaggccaaaggggtacgctacctagagaggaagtggtgtgtgatgaagccaaatgtgaggttggatgatccgcaggtagctccagccgtgagctacgcgtgtagccttggggactgtactagtcttggggttgggacgtcctgtgctaatcttgacgggaaacaaaacatatcgtatgcattcaacagttattatcagatacaggatcagcttgatacagcttgtaagttcccaaacatatcagaggtgaccaagacagatccatctactggaacttgcagatttccgattatgatagaaccttactacggtggggcagcccgggaacacgggttctttttcccactactgatggtggcagccatcgcagtctctattttttgatggtttcttcttgtcaatttgtaattctgtgtgatggcttgaactatttttttttcttcttgaattctgatttctcttcctt

SEQ ID NO: 45752 - protein, 477 aa, Arabidopsis thaliana
  peptide (1)..(477): Ceres Seq. ID no. 14309799
  misc_feature (22)..(341): Pfam Name: Glycosyl hydrolases family 17 Pfam Description: Glycosyl hydrolases family 17
  misc_feature (6)..(477): Homolog of NCBI NO: 34395009 NR Description: putative 3-glucanase [Oryza sativa (japonica
  misc_feature (7)..(476): Homolog of NCBI NO: 31415977 NR Description: putative beta-1,3-glucanase
  misc_feature (7)..(473): Homolog of NCBI NO: 18483232 NR Description: 3-glucanase [Sorghum bicolor]
  misc_feature (19)..(461): Homolog of NCBI NO: 28269434 NR Description: putative beta-1,3 glucanase
  misc_feature (6)..(450): Homolog of NCBI NO: 15242078 NR Description: glycosyl hydrolase family 17 [Arabidopsis
  misc_feature (11)..(450): Homolog of NCBI NO: 30017525 NR Description: putative 1,3-beta-glucanase
  misc_feature (4)..(476): Homolog of NCBI NO: 30060382 NR Description: putative glucan endo-1,3-beta-glucosidase
  misc_feature (6)..(450): Homolog of NCBI NO: 15235840 NR Description: glycosyl hydrolase family 17 [Arabidopsis
  misc_feature (1)..(477): Homolog of NCBI NO: 16604491 NR Description: AT5g58090/k21l19_70 [Arabidopsis thaliana]
  misc_feature (1)..(477): Homolog of NCBI NO: 22327934 NR Description: glycosyl hydrolase family 17 [Arabidopsis
MGWGSVLLLLAVALLCQRASSIGANWGTQASHPLPPDIVVRMLRENGIQKVKLFDAEYDTLRALGKSGIEVMVGIPNEMLATLASSLKAAEKWVAKNVSTHISTDNVNIRYVAVGNEPFLSTYNGSYLSTTFPALRNIQIAIIKAGLQNQVKVTCPLNADVYDSSTTFPSGGDFRANIRDLMITIVKFLSENGGPFTVNIYPYISLYTNPDFPVDYAFFDGNAQPLNDGGTFYYNMFDANYDTLVHALEKNGFGNMPIIIGEIGWPTDGDSNANLDYAKKFNQGFMAHISGGKGTPRRPGPIDAYLFSLIDEDAKSVQPGYFERHWGIFTFDGLPKYALNLGTTNTGALIQAKGVRYLERKWCVMKPNVRLDDPQVAPAVSYACSLGDCTSLGVGTSCANLDGKQNISYAFNSYYQIQDQLDTACKFPNISEVTKTDPSTGTCRFPIMIEPYYGGAAREHGFFFPLLMVAAIAVSIF

SEQ ID NO: 45753 - protein, 436 aa, Arabidopsis thaliana
  peptide (1)..(436): Ceres Seq. ID no. 14309800
  misc_feature (1)..(300): Pfam Name: Glycosyl hydrolases family 17 Pfam Description: Glycosyl hydrolases family 17
  misc_feature (1)..(436): Homolog of NCBI NO: 34395009 NR Description: putative 3-glucanase [Oryza sativa (japonica
  misc_feature (1)..(435): Homolog of NCBI NO: 31415977 NR Description: putative beta-1,3-glucanase
  misc_feature (1)..(432): Homolog of NCBI NO: 18483232 NR Description: 3-glucanase [Sorghum bicolor]
  misc_feature (1)..(420): Homolog of NCBI NO: 28269434 NR Description: putative beta-1,3 glucanase
  misc_feature (1)..(409): Homolog of NCBI NO: 15242078 NR Description: glycosyl hydrolase family 17 [Arabidopsis
  misc_feature (1)..(409): Homolog of NCBI NO: 30017525 NR Description: putative 1,3-beta-glucanase
  misc_feature (1)..(435): Homolog of NCBI NO: 30060382 NR Description: putative glucan endo-1,3-beta-glucosidase
  misc_feature (1)..(409): Homolog of NCBI NO: 15235840 NR Description: glycosyl hydrolase family 17 [Arabidopsis
  misc_feature (1)..(436): Homolog of NCBI NO: 16604491 NR Description: AT5g58090/k21l19_70 [Arabidopsis thaliana]
  misc_feature (1)..(436): Homolog of NCBI NO: 22327934 NR Description: glycosyl hydrolase family 17 [Arabidopsis
MLRENGIQKVKLFDAEYDTLRALGKSGIEVMVGIPNEMLATLASSLKAAEKWVAKNVSTHISTDNVNIRYVAVGNEPFLSTYNGSYLSTTFPALRNIQIAIIKAGLQNQVKVTCPLNADVYDSSTTFPSGGDFRANIRDLMITIVKFLSENGGPFTVNIYPYISLYTNPDFPVDYAFFDGNAQPLNDGGTFYYNMFDANYDTLVHALEKNGFGNMPIIIGEIGWPTDGDSNANLDYAKKFNQGFMAHISGGKGTPRRPGPIDAYLFSLIDEDAKSVQPGYFERHWGIFTFDGLPKYALNLGTTNTGALIQAKGVRYLERKWCVMKPNVRLDDPQVAPAVSYACSLGDCTSLGVGTSCANLDGKQNISYAFNSYYQIQDQLDTACKFPNISEVTKTDPSTGTCRFPIMIEPYYGGAAREHGFFFPLLMVAAIAVSIF

SEQ ID NO: 45754 - protein, 406 aa, Arabidopsis thaliana
  peptide (1)..(406): Ceres Seq. ID no. 14309801
  misc_feature (1)..(270): Pfam Name: Glycosyl hydrolases family 17 Pfam Description: Glycosyl hydrolases family 17
  misc_feature (1)..(406): Homolog of NCBI NO: 34395009 NR Description: putative 3-glucanase [Oryza sativa (japonica
  misc_feature (1)..(405): Homolog of NCBI NO: 31415977 NR Description: putative beta-1,3-glucanase
  misc_feature (1)..(402): Homolog of NCBI NO: 18483232 NR Description: 3-glucanase [Sorghum bicolor]
  misc_feature (1)..(390): Homolog of NCBI NO: 28269434 NR Description: putative beta-1,3 glucanase
  misc_feature (1)..(379): Homolog of NCBI NO: 15242078 NR Description: glycosyl hydrolase family 17 [Arabidopsis
  misc_feature (1)..(379): Homolog of NCBI NO: 30017525 NR Description: putative 1,3-beta-glucanase
  misc_feature (1)..(405): Homolog of NCBI NO: 30060382 NR Description: putative glucan endo-1,3-beta-glucosidase
  misc_feature (1)..(379): Homolog of NCBI NO: 15235840 NR Description: glycosyl hydrolase family 17 [Arabidopsis
  misc_feature (1)..(406): Homolog of NCBI NO: 16604491 NR Description: AT5g58090/k21l19_70 [Arabidopsis thaliana]
  misc_feature (1)..(406): Homolog of NCBI NO: 22327934 NR Description: glycosyl hydrolase family 17 [Arabidopsis
MVGIPNEMLATLASSLKAAEKWVAKNVSTHISTDNVNIRYVAVGNEPFLSTYNGSYLSTTFPALRNIQIAIIKAGLQNQVKVTCPLNADVYDSSTTFPSGGDFRANIRDLMITIVKFLSENGGPFTVNIYPYISLYTNPDFPVDYAFFDGNAQPLNDGGTFYYNMFDANYDTLVHALEKNGFGNMPIIIGEIGWPTDGDSNANLDYAKKFNQGFMAHISGGKGTPRRPGPIDAYLFSLIDEDAKSVQPGYFERHWGIFTFDGLPKYALNLGTTNTGALIQAKGVRYLERKWCVMKPNVRLDDPQVAPAVSYACSLGDCTSLGVGTSCANLDGKQNISYAFNSYYQIQDQLDTACKFPNISEVTKTDPSTGTCRFPIMIEPYYGGAAREHGFFFPLLMVAAIAVSIF

SEQ ID NO: 45755 - DNA, 1923 bp, Arabidopsis thaliana
  misc_feature (1)..(1923): Ceres Seq. ID no. 13646485
  misc_feature: MA Experiment ID: 20000182 Result: Up-regulated in Transcription
  misc_feature: MA Experiment 20000182 PARAMETER Experiment Name: At_2mM_SA_P Parameter: Age (day) Value: 14
  misc_feature: MA Experiment 20000182 PARAMETER Experiment Name: At_2mM_SA_P Parameter: Organism Value: A. thaliana
  misc_feature: MA Experiment 20000182 PARAMETER Experiment Name: At_2mM_SA_P Parameter: Plant Line Value: WS
  misc_feature: MA Experiment 20000182 PARAMETER Experiment Name: At_2mM_SA_P Parameter: Timepoint (hr) Value: 6
  misc_feature: MA Experiment 20000182 PARAMETER Experiment Name: At_2mM_SA_P Parameter: Tissue Value: Aerial
  misc_feature: MA Experiment 20000182 PARAMETER Experiment Name: At_2mM_SA_P Parameter: Treatment Value: 2mM SA vs. No Treatment
  misc_feature: MA Experiment ID: 20000437 Result: Up-regulated in Transcription
  misc_feature: MA Experiment 20000437 PARAMETER Experiment Name: At_Drought_P Parameter: Age (day) Value: 8
  misc_feature: MA Experiment 20000437 PARAMETER Experiment Name: At_Drought_P Parameter: Organism Value: A. thaliana
  misc_feature: MA Experiment 20000437 PARAMETER Experiment Name: At_Drought_P Parameter: Plant Line Value: WS
  misc_feature: MA Experiment 20000437 PARAMETER Experiment Name: At_Drought_P Parameter: Timepoint (hr) Value: 24
  misc_feature: MA Experiment 20000437 PARAMETER Experiment Name: At_Drought_P Parameter: Tissue Value: Whole Plant
  misc_feature: MA Experiment 20000437 PARAMETER Experiment Name: At_Drought_P Parameter: Treatment Value: Drought vs. No Drought
  misc_feature: MA Experiment ID: 20000452 Result: Up-regulated in Transcription
  misc_feature: MA Experiment 20000452 PARAMETER Experiment Name: At_CS6879_Shoots-Roots_P Parameter: Age (day) Value: 14
  misc_feature: MA Experiment 20000452 PARAMETER Experiment Name: At_CS6879_Shoots-Roots_P Parameter: Organism Value: A. thaliana
  misc_feature: MA Experiment 20000452 PARAMETER Experiment Name: At_CS6879_Shoots-Roots_P Parameter: Plant Line Value: CS6879 vs. WS
  misc_feature: MA Experiment 20000452 PARAMETER Experiment Name: At_CS6879_Shoots-Roots_P Parameter: Tissue Value: Shoots
attttctctttatkgacttttcctttgctttgacttgtcagtcttctcttccccttttctcttcttttttttttttgatcaaacaaatcaatctcacacctcttcttcttcttcttcttcttcttcttcttcaacctcttaaatctcaaaatctcaatcatcaagcttctccttcttcttcttctttccatcttcgcttcaacaacaatgtctaatttcacttatacatctgctttcaacttatccgacaactccccttttaatcccgccattggttcttcgtcttcttcttcctccgcgctcgtcgtagcttccgatgatgataataataccgatgatgcttgtagcatctgtctcgagcctttcaccctccaggatccttccactgtcagattcttttaatcctctctctttttgtttttgtctataagctcttcggggtttaacgatctccttctcgcttttatttcgcttttacttgaaatctgggataatcggattttgtgccttgcgatattttgactcagattaataacgagatcgtttgattaactcgatcacttgttcttgaaccatcgttgaacatgtttgattgatcctctcgctttctcattttggtcctattggatctaacataaacatcttctattgttgtttcttctccgatatctaaagctttccgatggttttctcaggtcaccagctgcaaacatgaatatcaccttcagtgcatcattgaatggtcacagagaagcaaagagtgtcctatttgctggcaattgtttgttttgagagaccctgctagccaagagcttttagctgctgtggaaaaggaaagacttttgaaaaccaggaatatatcttcatcctctccaatctctattcatcactctcatgacgattttcactctgaggaggaggaatcacagtttagcagctttgatgaacaattcttgaggcatcttactgaagctgcacatagacgttgtttgcttcgcagaagggatggtcaaatatcctctagtcttgtttcgtccagcgatcccactacgattcatcctactgatttggtcaatctttatcgtctctctgctatttcccatgttgaacatcaaaactcaaacccttgtccaagtcctggctcaatgactccatctcccgtctctggtcattcttccattcctgcagatagcaataacggatccagaatctctcctggcccttctccatctcgttcatctcaaagtccaaaatcacctgaagcatcctcgcttccggaagccattaaatcgaaactagctgctgcttctgcaaagtacaaggaatcgatctctaaaagtaaacaaggtcttaaagagaagctacttgctcgcaataactcagtgaaagaattgagcaaaggagtgcaacgtgagatgaatgcaggaatagctggtgttgcacgaatgatcgaacgcatggatttttcttcaaaacgttttggagggtctgctcatgtatcaacctccactgctactgcttctggattcaatttctcattcaaagggaaacgtgtagaagccaattctaagtctaacaacaatggagacaaaaccgaaccccaaaagctgcagggaggagaaacgtgctgaggcaatcagaaaaatggagagaggcctttaatgcaagcgatgtacgtttccattgaatcaacttacccgttggtcttcgcatcctgcattgttcagagctcacggtctcgtctctcgtctctctgttacctttgcgatgcgtacttttagatggctaaaataagcaactgagtaataattttattactcgattttgacggagccaaaactataatatttattaatttcaaaggataatgttttatgttttttcactaagaattggatcagtcctaatcaatattgcactatg

SEQ ID NO: 45756 - protein, 161 aa, Arabidopsis thaliana
  peptide (1)..(161): Ceres Seq. ID no. 15219409
  misc_feature (1)..(88): Homolog of NCBI NO: 30688252 NR Description: zinc finger (C3HC4-type RING finger) protein
  misc_feature (1)..(88): Homolog of NCBI NO: 18420424 NR Description: zinc finger (C3HC4-type RING finger) protein
  misc_feature (1)..(88): Homolog of NCBI NO: 26451710 NR Description: putative RING-H2 finger protein RHF2a
  misc_feature (1)..(129): Homolog of NCBI NO: 27819501 NR Description: putative zinc finger protein
  misc_feature (1)..(161): Homolog of NCBI NO: 16226716 NR Description: AT4g14220/dl3150w [Arabidopsis thaliana]
  misc_feature (1)..(156): Homolog of NCBI NO: 7485164 NR Description: hypothetical protein - Arabidopsis thaliana
  misc_feature (1)..(161): Homolog of NCBI NO: 11358783 NR Description: RING-H2 finger protein RHF1a
  misc_feature (1)..(156): Homolog of NCBI NO: 25360953 NR Description: RING-H2 finger protein RHF1a [imported] -
  misc_feature (1)..(161): Homolog of NCBI NO: 26450997 NR Description: putative RING-H2 finger protein RHF1a
  misc_feature (1)..(161): Homolog of NCBI NO: 30682750 NR Description: zinc finger (C3HC4-type RING finger) protein
MTPSPVSGHSSIPADSNNGSRISPGPSPSRSSQSPKSPEASSLPEAIKSKLAAASAKYKESISKSKQGLKEKLLARNNSVKELSKGVQREMNAGIAGVARMIERMDFSSKRFGGSAHVSTSTATASGFNFSFKGKRVEANSKSNNNGDKTEPQKLQGGETC

SEQ ID NO: 45757 - DNA, 2127 bp, Arabidopsis thaliana; identical to SEQ ID NO: 42669
  misc_feature (1)..(2127): Ceres Seq. ID no. 13646490
  misc_feature: MA Experiment ID: 20000307 Result: Down-regulated in Transcription
  misc_feature: MA Experiment 20000307 PARAMETER Experiment Name: At_Germinating_Seeds_Sub_P Parameter: Age (hr) Value: 24 vs. 0
  misc_feature: MA Experiment 20000307 PARAMETER Experiment Name: At_Germinating_Seeds_Sub_P Parameter: Organism Value: A. thaliana
  misc_feature: MA Experiment 20000307 PARAMETER Experiment Name: At_Germinating_Seeds_Sub_P Parameter: Plant Line Value: WS
  misc_feature: MA Experiment 20000307 PARAMETER Experiment Name: At_Germinating_Seeds_Sub_P Parameter: Tissue Value: Germinating Seeds
  misc_feature: MA Experiment ID: 20000327 Result: Down-regulated in Transcription
  misc_feature: MA Experiment 20000327 PARAMETER Experiment Name: At_42deg_Heat_Sub_P Parameter: Age (day) Value: 14
  misc_feature: MA Experiment 20000327 PARAMETER Experiment Name: At_42deg_Heat_Sub_P Parameter: Organism Value: A. thaliana
  misc_feature: MA Experiment 20000327 PARAMETER Experiment Name: At_42deg_Heat_Sub_P Parameter: Plant Line Value: WS
  misc_feature: MA Experiment 20000327 PARAMETER Experiment Name: At_42deg_Heat_Sub_P Parameter: Temperature (deg C) Value: 42 vs. 22
  misc_feature: MA Experiment 20000327 PARAMETER Experiment Name: At_42deg_Heat_Sub_P Parameter: Timepoint (hr) Value: 1
  misc_feature: MA Experiment 20000327 PARAMETER Experiment Name: At_42deg_Heat_Sub_P Parameter: Tissue Value: Aerial
  misc_feature: MA Experiment ID: 20000328 Result: Down-regulated in Transcription
  misc_feature: MA Experiment 20000328 PARAMETER Experiment Name: At_42deg_Heat_Sub_P Parameter: Age (day) Value: 14
  misc_feature: MA Experiment 20000328 PARAMETER Experiment Name: At_42deg_Heat_Sub_P Parameter: Organism Value: A. thaliana
  misc_feature: MA Experiment 20000328 PARAMETER Experiment Name: At_42deg_Heat_Sub_P Parameter: Plant Line Value: WS
  misc_feature: MA Experiment 20000328 PARAMETER Experiment Name: At_42deg_Heat_Sub_P Parameter: Temperature (deg C) Value: 42 vs. 22
  misc_feature: MA Experiment 20000328 PARAMETER Experiment Name: At_42deg_Heat_Sub_P Parameter: Timepoint (hr) Value: 6
  misc_feature: MA Experiment 20000328 PARAMETER Experiment Name: At_42deg_Heat_Sub_P Parameter: Tissue Value: Aerial
  misc_feature: MA Experiment ID: 20000329 Result: Down-regulated in Transcription
  misc_feature: MA Experiment 20000329 PARAMETER Experiment Name: At_4deg_Cold_Sub_P Parameter: Age (day) Value: 14
  misc_feature: MA Experiment 20000329 PARAMETER Experiment Name: At_4deg_Cold_Sub_P Parameter: Organism Value: A. thaliana
  misc_feature: MA Experiment 20000329 PARAMETER Experiment Name: At_4deg_Cold_Sub_P Parameter: Plant Line Value: WS
  misc_feature: MA Experiment 20000329 PARAMETER Experiment Name: At_4deg_Cold_Sub_P Parameter: Temperature (deg C) Value: 4 vs. 22
  misc_feature: MA Experiment 20000329 PARAMETER Experiment Name: At_4deg_Cold_Sub_P Parameter: Timepoint (hr) Value: 6
  misc_feature: MA Experiment 20000329 PARAMETER Experiment Name: At_4deg_Cold_Sub_P Parameter: Tissue Value: Aerial
  misc_feature: MA Experiment ID: 20000332 Result: Down-regulated in Transcription
  misc_feature: MA Experiment 20000332 PARAMETER Experiment Name: At_4deg_Cold_Sub_P Parameter: Age (day) Value: 14
  misc_feature: MA Experiment 20000332 PARAMETER Experiment Name: At_4deg_Cold_Sub_P Parameter: Organism Value: A. thaliana
  misc_feature: MA Experiment 20000332 PARAMETER Experiment Name: At_4deg_Cold_Sub_P Parameter: Plant Line Value: WS
  misc_feature: MA Experiment 20000332 PARAMETER Experiment Name: At_4deg_Cold_Sub_P Parameter: Temperature (deg C) Value: 4 vs. 22
  misc_feature: MA Experiment 20000332 PARAMETER Experiment Name: At_4deg_Cold_Sub_P Parameter: Timepoint (hr) Value: 2
  misc_feature: MA Experiment 20000332 PARAMETER Experiment Name: At_4deg_Cold_Sub_P Parameter: Tissue Value: Aerial

SEQ ID NO: 45758 - protein, 533 aa, Arabidopsis thaliana; identical to SEQ ID NO: 42670
  peptide (1)..(533): Ceres Seq. ID no. 13646491
  misc_feature (143)..(440): Pfam Name: GRAS family transcription factor Pfam Description: GRAS family transcription factor
  misc_feature (143)..(440): Pfam Name: GRAS family transcription factor Pfam Description: GRAS family transcription factor
  misc_feature (143)..(440): Pfam Name: GRAS family transcription factor Pfam Description: GRAS family transcription factor
  misc_feature (98)..(532): Homolog of NCBI NO: 15529230 NR Description: At2g01570/F2I9.19 [Arabidopsis thaliana]
  misc_feature (1)..(94): Homolog of NCBI NO: 2569940 NR Description: GRS protein [Arabidopsis thaliana]
  misc_feature (98)..(532): Homolog of NCBI NO: 2569940 NR Description: GRS protein [Arabidopsis thaliana]
  misc_feature (1)..(94): Homolog of NCBI NO: 15226311 NR Description: gibberellin response modulator (RGA1)
  misc_feature (98)..(532): Homolog of NCBI NO: 15226311 NR Description: gibberellin response modulator (RGA1)
  misc_feature (98)..(532): Homolog of NCBI NO: 15529230 NR Description: At2g01570/F2I9.19 [Arabidopsis thaliana]
  misc_feature (98)..(532): Homolog of NCBI NO: 2569940 NR Description: GRS protein [Arabidopsis thaliana]
  misc_feature (98)..(532): Homolog of NCBI NO: 15226311 NR Description: gibberellin response modulator (RGA1)
  misc_feature (1)..(94): Homolog of NCBI NO: 15226311 NR Description: gibberellin response modulator (RGA1)
  misc_feature (98)..(532): Homolog of NCBI NO: 2569940 NR Description: GRS protein [Arabidopsis thaliana]
  misc_feature (1)..(94): Homolog of NCBI NO: 2569940 NR Description: GRS protein [Arabidopsis thaliana]
  misc_feature (98)..(532): Homolog of NCBI NO: 15529230 NR Description: At2g01570/F2I9.19 [Arabidopsis thaliana]
  misc_feature (1)..(533): Homolog of NCBI NO: 15223951 NR Description: gibberellin response modulator (GAI/RGA2)
  misc_feature (1)..(533): Homolog of NCBI NO: 2569938 NR Description: GAI [Arabidopsis thaliana]
  misc_feature (1)..(533): Homolog of NCBI NO: 2339980 NR Description: RGA2 protein [Arabidopsis thaliana]
  misc_feature (98)..(532): Homolog of NCBI NO: 2339978 NR Description: RGA1 protein [Arabidopsis thaliana]
  misc_feature (1)..(94): Homolog of NCBI NO: 2339978 NR Description: RGA1 protein [Arabidopsis thaliana]
  misc_feature (1)..(533): Homolog of NCBI NO: 15223951 NR Description: gibberellin response modulator (GAI/RGA2)
  misc_feature (1)..(533): Homolog of NCBI NO: 2569938 NR Description: GAI [Arabidopsis thaliana]
  misc_feature (1)..(533): Homolog of NCBI NO: 2339980 NR Description: RGA2 protein [Arabidopsis thaliana]
  misc_feature (98)..(532): Homolog of NCBI NO: 2339978 NR Description: RGA1 protein [Arabidopsis thaliana]
  misc_feature (1)..(94): Homolog of NCBI NO: 2339978 NR Description: RGA1 protein [Arabidopsis thaliana]
  misc_feature (98)..(532): Homolog of NCBI NO: 15226311 NR Description: gibberellin response modulator (RGA1)
  misc_feature (1)..(94): Homolog of NCBI NO: 15226311 NR Description: gibberellin response modulator (RGA1)
  misc_feature (1)..(94): Homolog of NCBI NO: 2569940 NR Description: GRS protein [Arabidopsis thaliana]
  misc_feature (1)..(94): Homolog of NCBI NO: 2339978 NR Description: RGA1 protein [Arabidopsis thaliana]
  misc_feature (98)..(532): Homolog of NCBI NO: 2339978 NR Description: RGA1 protein [Arabidopsis thaliana]
  misc_feature (1)..(533): Homolog of NCBI NO: 2339980 NR Description: RGA2 protein [Arabidopsis thaliana]
  misc_feature (1)..(533): Homolog of NCBI NO: 2569938 NR Description: GAI [Arabidopsis thaliana]
  misc_feature (1)..(533): Homolog of NCBI NO: 15223951 NR Description: gibberellin response modulator (GAI/RGA2)

SEQ ID NO: 45759 - protein, 518 aa, Arabidopsis thaliana; identical to SEQ ID NO: 42671
  peptide (1)..(518): Ceres Seq. ID no. 13646492
  misc_feature (128)..(425): Pfam Name: GRAS family transcription factor Pfam Description: GRAS family transcription factor
  misc_feature (128)..(425): Pfam Name: GRAS family transcription factor Pfam Description: GRAS family transcription factor
  misc_feature (128)..(425): Pfam Name: GRAS family transcription factor Pfam Description: GRAS family transcription factor
  misc_feature (83)..(517): Homolog of NCBI NO: 15529230 NR Description: At2g01570/F2I9.19 [Arabidopsis thaliana]
  misc_feature (1)..(79): Homolog of NCBI NO: 2569940 NR Description: GRS protein [Arabidopsis thaliana]
  misc_feature (83)..(517): Homolog of NCBI NO: 2569940 NR Description: GRS protein [Arabidopsis thaliana]
  misc_feature (1)..(79): Homolog of NCBI NO: 15226311 NR Description: gibberellin response modulator (RGA1)
  misc_feature (83)..(517): Homolog of NCBI NO: 15226311 NR Description: gibberellin response modulator (RGA1)
  misc_feature (83)..(517): Homolog of NCBI NO: 15529230 NR Description: At2g01570/F2I9.19 [Arabidopsis thaliana]
  misc_feature (83)..(517): Homolog of NCBI NO: 2569940 NR Description: GRS protein [Arabidopsis thaliana]
  misc_feature (83)..(517): Homolog of NCBI NO: 15226311 NR Description: gibberellin response modulator (RGA1)
  misc_feature (1)..(79): Homolog of NCBI NO: 15226311 NR Description: gibberellin response modulator (RGA1)
  misc_feature (83)..(517): Homolog of NCBI NO: 2569940 NR Description: GRS protein [Arabidopsis thaliana]
  misc_feature (1)..(79): Homolog of NCBI NO: 2569940 NR Description: GRS protein [Arabidopsis thaliana]
  misc_feature (83)..(517): Homolog of NCBI NO: 15529230 NR Description: At2g01570/F2I9.19 [Arabidopsis thaliana]
  misc_feature (1)..(518): Homolog of NCBI NO: 15223951 NR Description: gibberellin response modulator (GAI/RGA2)
  misc_feature (1)..(518): Homolog of NCBI NO: 2569938 NR Description: GAI [Arabidopsis thaliana]
  misc_feature (1)..(518): Homolog of NCBI NO: 2339980 NR Description: RGA2 protein [Arabidopsis thaliana]
  misc_feature (83)..(517): Homolog of NCBI NO: 2339978 NR Description: RGA1 protein [Arabidopsis thaliana]
  misc_feature (1)..(79): Homolog of NCBI NO: 2339978 NR Description: RGA1 protein [Arabidopsis thaliana]
  misc_feature (1)..(518): Homolog of NCBI NO: 15223951 NR Description: gibberellin response modulator (GAI/RGA2)
  misc_feature (1)..(518): Homolog of NCBI NO: 2569938 NR Description: GAI [Arabidopsis thaliana]
  misc_feature (1)..(518): Homolog of NCBI NO: 2339980 NR Description: RGA2 protein [Arabidopsis thaliana]
  misc_feature (83)..(517): Homolog of NCBI NO: 2339978 NR Description: RGA1 protein [Arabidopsis thaliana]
  misc_feature (1)..(79): Homolog of NCBI NO: 2339978 NR Description: RGA1 protein [Arabidopsis thaliana]
  misc_feature (83)..(517): Homolog of NCBI NO: 15226311 NR Description: gibberellin response modulator (RGA1)
  misc_feature (1)..(79): Homolog of NCBI NO: 15226311 NR Description: gibberellin response modulator (RGA1)
  misc_feature (1)..(79): Homolog of NCBI NO: 2569940 NR Description: GRS protein [Arabidopsis thaliana]
  misc_feature (1)..(79): Homolog of NCBI NO: 2339978 NR Description: RGA1 protein [Arabidopsis thaliana]
  misc_feature (83)..(517): Homolog of NCBI NO: 2339978 NR Description: RGA1 protein [Arabidopsis thaliana]
  misc_feature (1)..(518): Homolog of NCBI NO: 2339980 NR Description: RGA2 protein [Arabidopsis thaliana]
  misc_feature (1)..(518): Homolog of NCBI NO: 2569938 NR Description: GAI [Arabidopsis thaliana]
  misc_feature (1)..(518): Homolog of NCBI NO: 15223951 NR Description: gibberellin response modulator (GAI/RGA2)

SEQ ID NO: 45760 - protein, 517 aa, Arabidopsis thaliana; identical to SEQ ID NO: 42672
  peptide (1)..(517): Ceres Seq. ID no. 13646493
  misc_feature (127)..(424): Pfam Name: GRAS family transcription factor Pfam Description: GRAS family transcription factor
  misc_feature (127)..(424): Pfam Name: GRAS family transcription factor Pfam Description: GRAS family transcription factor
  misc_feature (127)..(424): Pfam Name: GRAS family transcription factor Pfam Description: GRAS family transcription factor
  misc_feature (82)..(516): Homolog of NCBI NO: 15529230 NR Description: At2g01570/F2I9.19 [Arabidopsis thaliana]
  misc_feature (1)..(78): Homolog of NCBI NO: 2569940 NR Description: GRS protein [Arabidopsis thaliana]
  misc_feature (82)..(516): Homolog of NCBI NO: 2569940 NR Description: GRS protein [Arabidopsis thaliana]
  misc_feature (1)..(78): Homolog of NCBI NO: 15226311 NR Description: gibberellin response modulator (RGA1)
  misc_feature (82)..(516): Homolog of NCBI NO: 15226311 NR Description: gibberellin response modulator (RGA1)
  misc_feature (82)..(516): Homolog of NCBI NO: 15529230 NR Description: At2g01570/F2I9.19 [Arabidopsis thaliana]
  misc_feature (82)..(516): Homolog of NCBI NO: 2569940 NR Description: GRS protein [Arabidopsis thaliana]
  misc_feature (82)..(516): Homolog of NCBI NO: 15226311 NR Description: gibberellin response modulator (RGA1)
  misc_feature (1)..(78): Homolog of NCBI NO: 15226311 NR Description: gibberellin response modulator (RGA1)
  misc_feature (82)..(516): Homolog of NCBI NO: 2569940 NR Description: GRS protein [Arabidopsis thaliana]
  misc_feature (1)..(78): Homolog of NCBI NO: 2569940 NR Description: GRS protein [Arabidopsis thaliana]
  misc_feature (82)..(516): Homolog of NCBI NO: 15529230 NR Description: At2g01570/F2I9.19 [Arabidopsis thaliana]
  misc_feature (1)..(517): Homolog of NCBI NO: 15223951 NR Description: gibberellin response modulator (GAI/RGA2)
  misc_feature (1)..(517): Homolog of NCBI NO: 2569938 NR Description: GAI [Arabidopsis thaliana]
  misc_feature (1)..(517): Homolog of NCBI NO: 2339980 NR Description: RGA2 protein [Arabidopsis thaliana]
  misc_feature (82)..(516): Homolog of NCBI NO: 2339978 NR Description: RGA1 protein [Arabidopsis thaliana]
  misc_feature (1)..(78): Homolog of NCBI NO: 2339978 NR Description: RGA1 protein [Arabidopsis thaliana]
  misc_feature (1)..(517): Homolog of NCBI NO: 15223951 NR Description: gibberellin response modulator (GAI/RGA2)
  misc_feature (1)..(517): Homolog of NCBI NO: 2569938 NR Description: GAI [Arabidopsis thaliana]
  misc_feature (1)..(517): Homolog of NCBI NO: 2339980 NR Description: RGA2 protein [Arabidopsis thaliana]
  misc_feature (82)..(516): Homolog of NCBI NO: 2339978 NR Description: RGA1 protein [Arabidopsis thaliana]
  misc_feature (1)..(78): Homolog of NCBI NO: 2339978 NR Description: RGA1 protein [Arabidopsis thaliana]
  misc_feature (82)..(516): Homolog of NCBI NO: 15226311 NR Description: gibberellin response modulator (RGA1)
  misc_feature (1)..(78): Homolog of NCBI NO: 15226311 NR Description: gibberellin response modulator (RGA1)
  misc_feature (1)..(78): Homolog of NCBI NO: 2569940 NR Description: GRS protein [Arabidopsis thaliana]
  misc_feature (1)..(78): Homolog of NCBI NO: 2339978 NR Description: RGA1 protein [Arabidopsis thaliana]
  misc_feature (82)..(516): Homolog of NCBI NO: 2339978 NR Description: RGA1 protein [Arabidopsis thaliana]
  misc_feature (1)..(517): Homolog of NCBI NO: 2339980 NR Description: RGA2 protein [Arabidopsis thaliana]
  misc_feature (1)..(517): Homolog of NCBI NO: 2569938 NR Description: GAI [Arabidopsis thaliana]
  misc_feature (1)..(517): Homolog of NCBI NO: 15223951 NR Description: gibberellin response modulator (GAI/RGA2)

SEQ ID NO: 45761 - DNA, 2106 bp, Arabidopsis thaliana
  misc_feature (1)..(2106): Ceres Seq. ID no. 12561149
  misc_feature: MA Experiment ID: 108433 Result: Down-regulated in Transcription
  misc_feature: MA Experiment 108433 PARAMETER Experiment Name: At_rhl_Mutant2_cDNA_P Parameter: Age (day) Value: 7
  misc_feature: MA Experiment 108433 PARAMETER Experiment Name: At_rhl_Mutant2_cDNA_P Parameter: Organism Value: A. thaliana
  misc_feature: MA Experiment 108433 PARAMETER Experiment Name: At_rhl_Mutant2_cDNA_P Parameter: Plant Line Value: rhl Mutant vs. wt landsburg
  misc_feature: MA Experiment 108433 PARAMETER Experiment Name: At_rhl_Mutant2_cDNA_P Parameter: Tissue Value: Roots
  misc_feature: MA Experiment ID: 108461 Result: Down-regulated in Transcription
  misc_feature: MA Experiment 108461 PARAMETER Experiment Name: At_Germinating_Seeds_cDNA_P Parameter: Age (day) Value: 1 vs. 0
  misc_feature: MA Experiment 108461 PARAMETER Experiment Name: At_Germinating_Seeds_cDNA_P Parameter: Tissue Value: Germinating Seeds
  misc_feature: MA Experiment ID: 108462 Result: Down-regulated in Transcription
  misc_feature: MA Experiment 108462 PARAMETER Experiment Name: At_Germinating_Seeds_cDNA_P Parameter: Age (day) Value: 2 vs. 0
  misc_feature: MA Experiment 108462 PARAMETER Experiment Name: At_Germinating_Seeds_cDNA_P Parameter: Tissue Value: Germinating Seeds
  misc_feature: MA Experiment ID: 108463 Result: Down-regulated in Transcription
  misc_feature: MA Experiment 108463 PARAMETER Experiment Name: At_Germinating_Seeds_cDNA_P Parameter: Age (day) Value: 3 vs. 0
  misc_feature: MA Experiment 108463 PARAMETER Experiment Name: At_Germinating_Seeds_cDNA_P Parameter: Tissue Value: Germinating Seeds
  misc_feature: MA Experiment ID: 108464 Result: Down-regulated in Transcription
  misc_feature: MA Experiment 108464 PARAMETER Experiment Name: At_Germinating_Seeds_cDNA_P Parameter: Age (day) Value: 4 vs. 0
  misc_feature: MA Experiment 108464 PARAMETER Experiment Name: At_Germinating_Seeds_cDNA_P Parameter: Tissue Value: Germinating Seeds
  misc_feature: MA Experiment ID: 108585 Result: Up-regulated in Transcription
  misc_feature: MA Experiment 108585 PARAMETER Experiment Name: At_5mM_NaNP_cDNA_P Parameter: Timepoint (hr) Value: 6
  misc_feature: MA Experiment 108585 PARAMETER Experiment Name: At_5mM_NaNP_cDNA_P Parameter: Tissue Value: Aerial
  misc_feature: MA Experiment 108585 PARAMETER Experiment Name: At_5mM_NaNP_cDNA_P Parameter: Treatment Value: null
  misc_feature: MA Experiment ID: 20000087 Result: Up-regulated in Transcription
  misc_feature: MA Experiment 20000087 PARAMETER Experiment Name: At_100uM_ABA_Mutants_cDNA_P Parameter: Plant Line Value: WS
  misc_feature: MA Experiment 20000087 PARAMETER Experiment Name: At_100uM_ABA_Mutants_cDNA_P Parameter: Timepoint (hr) Value: 6
  misc_feature: MA Experiment 20000087 PARAMETER Experiment Name: At_100uM_ABA_Mutants_cDNA_P Parameter: Tissue Value: Aerial
  misc_feature: MA Experiment 20000087 PARAMETER Experiment Name: At_100uM_ABA_Mutants_cDNA_P Parameter: Treatment Value: 100uM ABA vs. No Treatment
  misc_feature: MA Experiment ID: 20000184 Result: Up-regulated in Transcription
  misc_feature: MA Experiment 20000184 PARAMETER Experiment Name: At_Shoots__P Parameter: Age (day) Value: 7
  misc_feature: MA Experiment 20000184 PARAMETER Experiment Name: At_Shoots__P Parameter: Tissue Value: Shoots vs. Whole Plant
  misc_feature: MA Experiment ID: 20000224 Result: Down-regulated in Transcription
  misc_feature: MA Experiment ID: 20001557 Result: Up-regulated in Transcription
  misc_feature: MA Experiment 20001557 PARAMETER Experiment Name: At_Drought_Soil_Dry_P Parameter: Age (day) Value: 27
  misc_feature: MA Experiment 20001557 PARAMETER Experiment Name: At_Drought_Soil_Dry_P Parameter: Organism Value: A. thaliana
  misc_feature: MA Experiment 20001557 PARAMETER Experiment Name: At_Drought_Soil_Dry_P Parameter: Plant Line Value: WS
  misc_feature: MA Experiment 20001557 PARAMETER Experiment Name: At_Drought_Soil_Dry_P Parameter: Post Timepoint (hr) Value: 3
  misc_feature: MA Experiment 20001557 PARAMETER Experiment Name: At_Drought_Soil_Dry_P Parameter: Post-Treatment Value: Re-Water vs. No Drought
  misc_feature: MA Experiment 20001557 PARAMETER Experiment Name: At_Drought_Soil_Dry_P Parameter: Timepoint (day) Value: 13
  misc_feature: MA Experiment 20001557 PARAMETER Experiment Name: At_Drought_Soil_Dry_P Parameter: Treatment Value: Drought vs. No Drought
tgttttccttcttcttccttatctccgcctctttctagggtttctctcaaatcagctcttcaaccatggcggacgaatctcaatactcatcggatacttactccaacaaacgcaaatacgaagaaccaaccgctcctcctccatcaactcgcagacctaccggcttctcttctggtccgatcccatctgcttcagttgatcccaccgcacctaccggtcttccaccttcttcttacaacagcgttcctcctccgatggatgaaatccagattgctaaacaaaaagcacaagaaatcgctgctcgtcttcttaatagcgctgatgctaaacgtcctcgtgttgacaatggtgcttcttatgattatggtgacaacaaaggatttagctcatatccctctgagggtaagcagatgtcagggacggttccgtcttcgataccggtttcgtatggtagctttcaaggaactactaagaagattgatattccgaatatgagagttggtgttatcattggtaaaggtggagagactattaagtatcttcagcttcagtctggagctaagattcaggttactagagatatggatgcagaccctaattgtgctactaggactgttgacctaactggtacccctgatcagatctcaaaggctgaacagttgatcactgacgtccttcaagaggctgaggcaggcaatacagctggttcaggtggaggaggcggccgtaggatgggtggacaagcaggggctgatcaatttgttatgaaaattccgaataacaaggttggtttgataattggtaaaggaggtgaaacaatcaaatctatgcaagctaagactggagctagaattcaggttattcctttacatttgccccctggagacccaacgccagaacggactttgcagattgatgggataaccgaacagattgaacatgctaaacaattagttaatgaaatcatcagtggcgagaaccgtatgagaaactcagcaatgggtggaggctatccacaacaaggtggttatcaagcccgcccaccctcaagctgggcaccacctggtggtccgccagcacaacctggttatggtggttacatgcaaccaggagcatatccaggtccacctcagtatggtcaatcaccttacggaagttaccctcaacaaacttcagctggttactatgatcagtcctctgtgccaccatcccagcagagcgcgcaaggtgagtatgattattacggtcagcaacagtctcagcaaccaagcagtggtggtagctcagccccaccaacagataccacagggtacaattactaccagcatgcttctggttatggccaagctggtcagggataccagcaagatgggtatggagcttacaatgcctcgcagcaatcgggatatggtcaagctgctgggtatgatcaacagggtggttacggcagcaccactaatccaagtcaagaggaagatgcatctcaagccgctccaccatcgtcagctcagtctggacaggctgggtatggtacaactggtcaacagccgcctgctcaaggtagtactggtcaggcagggtatggagctcctccaacttctcaggctggttacagcagccagccagcagcagcttacaattctgggtatggagcaccaccacctgcttcaaagccaccgacttatggccagagccagcagtctccaggtgctcctgggagctatggtagtcagtctgggtatgcccaaccagcagcttcagggtatggacaacctccagcgtatgggtatggtcaagcgccacagggatatgggtcttatggaggatacacacaacctgctgctggtggaggttactcttcagacgggtctgctggagccactgctggtggtggtggtggtacaccagcttcacagagtgctgctccacctgctggaccgcccaaagcatccccgaaaagttgatatgtgtatggataaatttctactgttatacaaaacatgcttccatgctcttatctttttcttgaggatttatcaatgtttgtgtttcacattttagctcttgtctgtcaactctctttatattaaagataatgttacgttt

SEQ ID NO: 45762 - protein, 632 aa, Arabidopsis thaliana
  peptide (1)..(632): Ceres Seq. ID no. 12561150
  misc_feature (315)..(630): Pfam Name: High molecular weight glutenin subunit Pfam Description: High molecular weight glutenin subunit
  misc_feature (128)..(520): Homolog of NCBI NO: 28278093 NR Description: Similar to far upstream element (FUSE) binding
  misc_feature (128)..(522): Homolog of NCBI NO: 39794540 NR Description: Unknown (protein for MGC:75632) [Silurana
  misc_feature (128)..(427): Homolog of NCBI NO: 16878077 NR Description: far upstream element (FUSE) binding protein 1
  misc_feature (128)..(427): Homolog of NCBI NO: 17402900 NR Description: far upstream element-binding protein
  misc_feature (128)..(427): Homolog of NCBI NO: 1082624 NR Description: myc far upstream element-binding protein - human
  misc_feature (128)..(504): Homolog of NCBI NO: 16975504 NR Description: DNA segment, Chr 3, ERATO Doi 330, expressed
  misc_feature (129)..(507): Homolog of NCBI NO: 40555849 NR Description: Unknown (protein for MGC:66046) [Danio rerio]
  misc_feature (69)..(301): Homolog of NCBI NO: 25511683 NR Description: F14M2.18 protein - Arabidopsis thaliana
  misc_feature (1)..(629): Homolog of NCBI NO: 7487735 NR Description: hypothetical protein T5L19.200 - Arabidopsis
  misc_feature (1)..(629): Homolog of NCBI NO: 22328551 NR Description: KH domain protein; protein id: At4g10070.1
MADESQYSSDTYSNKRKYEEPTAPPPSTRRPTGFSSGPIPSASVDPTAPTGLPPSSYNSVPPPMDEIQIAKQKAQEIAARLLNSADAKRPRVDNGASYDYGDNKGFSSYPSEGKQMSGTVPSSIPVSYGSFQGTTKKIDIPNMRVGVIIGKGGETIKYLQLQSGAKIQVTRDMDADPNCATRTVDLTGTPDQISKAEQLITDVLQEAEAGNTAGSGGGGGRRMGGQAGADQFVMKIPNNKVGLIIGKGGETIKSMQAKTGARIQVIPLHLPPGDPTPERTLQIDGITEQIEHAKQLVNEIISGENRMRNSAMGGGYPQQGGYQARPPSSWAPPGGPPAQPGYGGYMQPGAYPGPPQYGQSPYGSYPQQTSAGYYDQSSVPPSQQSAQGEYDYYGQQQSQQPSSGGSSAPPTDTTGYNYYQHASGYGQAGQGYQQDGYGAYNASQQSGYGQAAGYDQQGGYGSTTNPSQEEDASQAAPPSSAQSGQAGYGTTGQQPPAQGSTGQAGYGAPPTSQAGYSSQPAAAYNSGYGAPPPASKPPTYGQSQQSPGAPGSYGSQSGYAQPAASGYGQPPAYGYGQAPQGYGSYGGYTQPAAGGGYSSDGSAGATAGGGGGTPASQSAAPPAGPPKASPKS

SEQ ID NO: 45763 - protein, 569 aa, Arabidopsis thaliana
  peptide (1)..(569): Ceres Seq. ID no. 12561151
  misc_feature (252)..(567): Pfam Name: High molecular weight glutenin subunit Pfam Description: High molecular weight glutenin subunit
  misc_feature (65)..(457): Homolog of NCBI NO: 28278093 NR Description: Similar to far upstream element (FUSE) binding
  misc_feature (65)..(459): Homolog of NCBI NO: 39794540 NR Description: Unknown (protein for MGC:75632) [Silurana
  misc_feature (65)..(364): Homolog of NCBI NO: 16878077 NR Description: far upstream element (FUSE) binding protein 1
  misc_feature (65)..(364): Homolog of NCBI NO: 17402900 NR Description: far upstream element-binding protein
  misc_feature (65)..(364): Homolog of NCBI NO: 1082624 NR Description: myc far upstream element-binding protein - human
  misc_feature (65)..(441): Homolog of NCBI NO: 16975504 NR Description: DNA segment, Chr 3, ERATO Doi 330, expressed
  misc_feature (66)..(444): Homolog of NCBI NO: 40555849 NR Description: Unknown (protein for MGC:66046) [Danio rerio]
  misc_feature (6)..(238): Homolog of NCBI NO: 25511683 NR Description: F14M2.18 protein - Arabidopsis thaliana
  misc_feature (1)..(566): Homolog of NCBI NO: 7487735 NR Description: hypothetical protein T5L19.200 - Arabidopsis
  misc_feature (1)..(566): Homolog of NCBI NO: 22328551 NR Description: KH domain protein; protein id: At4g10070.1
MDEIQIAKQKAQEIAARLLNSADAKRPRVDNGASYDYGDNKGFSSYPSEGKQMSGTVPSSIPVSYGSFQGTTKKIDIPNMRVGVIIGKGGETIKYLQLQSGAKIQVTRDMDADPNCATRTVDLTGTPDQISKAEQLITDVLQEAEAGNTAGSGGGGGRRMGGQAGADQFVMKIPNNKVGLIIGKGGETIKSMQAKTGARIQVIPLHLPPGDPTPERTLQIDGITEQIEHAKQLVNEIISGENRMRNSAMGGGYPQQGGYQARPPSSWAPPGGPPAQPGYGGYMQPGAYPGPPQYGQSPYGSYPQQTSAGYYDQSSVPPSQQSAQGEYDYYGQQQSQQPSSGGSSAPPTDTTGYNYYQHASGYGQAGQGYQQDGYGAYNASQQSGYGQAAGYDQQGGYGSTTNPSQEEDASQAAPPSSAQSGQAGYGTTGQQPPAQGSTGQAGYGAPPTSQAGYSSQPAAAYNSGYGAPPPASKPPTYGQSQQSPGAPGSYGSQSGYAQPAASGYGQPPAYGYGQAPQGYGSYGGYTQPAAGGGYSSDGSAGATAGGGGGTPASQSAAPPAGPPKASPKS

SEQ ID NO: 45764 - protein, 517 aa, Arabidopsis thaliana
  peptide (1)..(517): Ceres Seq. ID no. 12561152
  misc_feature (200)..(515): Pfam Name: High molecular weight glutenin subunit Pfam Description: High molecular weight glutenin subunit
  misc_feature (13)..(405): Homolog of NCBI NO: 28278093 NR Description: Similar to far upstream element (FUSE) binding
  misc_feature (13)..(407): Homolog of NCBI NO: 39794540 NR Description: Unknown (protein for MGC:75632) [Silurana
  misc_feature (13)..(312): Homolog of NCBI NO: 16878077 NR Description: far upstream element (FUSE) binding protein 1
  misc_feature (13)..(312): Homolog of NCBI NO: 17402900 NR Description: far upstream element-binding protein
  misc_feature (13)..(312): Homolog of NCBI NO: 1082624 NR Description: myc far upstream element-binding protein - human
  misc_feature (13)..(389): Homolog of NCBI NO: 16975504 NR Description: DNA segment, Chr 3, ERATO Doi 330, expressed
  misc_feature (14)..(392): Homolog of NCBI NO: 40555849 NR Description: Unknown (protein for MGC:66046) [Danio rerio]
  misc_feature (1)..(186): Homolog of NCBI NO: 25511683 NR Description: F14M2.18 protein - Arabidopsis thaliana
  misc_feature (1)..(514): Homolog of NCBI NO: 7487735 NR Description: hypothetical protein T5L19.200 - Arabidopsis
  misc_feature (1)..(514): Homolog of NCBI NO: 22328551 NR Description: KH domain protein; protein id: At4g10070.1
MSGTVPSSIPVSYGSFQGTTKKIDIPNMRVGVIIGKGGETIKYLQLQSGAKIQVTRDMDADPNCATRTVDLTGTPDQISKAEQLITDVLQEAEAGNTAGSGGGGGRRMGGQAGADQFVMKIPNNKVGLIIGKGGETIKSMQAKTGARIQVIPLHLPPGDPTPERTLQIDGITEQIEHAKQLVNEIISGENRMRNSAMGGGYPQQGGYQARPPSSWAPPGGPPAQPGYGGYMQPGAYPGPPQYGQSPYGSYPQQTSAGYYDQSSVPPSQQSAQGEYDYYGQQQSQQPSSGGSSAPPTDTTGYNYYQHASGYGQAGQGYQQDGYGAYNASQQSGYGQAAGYDQQGGYGSTTNPSQEEDASQAAPPSSAQSGQAGYGTTGQQPPAQGSTGQAGYGAPPTSQAGYSSQPAAAYNSGYGAPPPASKPPTYGQSQQSPGAPGSYGSQSGYAQPAASGYGQPPAYGYGQAPQGYGSYGGYTQPAAGGGYSSDGSAGATAGGGGGTPASQSAAPPAGPPKASPKS

SEQ ID NO: 45765 - DNA, 1664 bp, Arabidopsis thaliana; identical to SEQ ID NO: 26269
  misc_feature (1)..(1664): Ceres Seq. ID no. 13591642
  misc_feature: MA Experiment ID: 108434 Result: Down-regulated in Transcription
  misc_feature: MA Experiment 108434 PARAMETER Experiment Name: At_Root_Tips_cDNA_P Parameter: Tissue Value: Root Tips
  misc_feature: MA Experiment ID: 108462 Result: Up-regulated in Transcription
  misc_feature: MA Experiment 108462 PARAMETER Experiment Name: At_Germinating_Seeds_cDNA_P Parameter: Age (day) Value: 2 vs. 0
  misc_feature: MA Experiment 108462 PARAMETER Experiment Name: At_Germinating_Seeds_cDNA_P Parameter: Tissue Value: Germinating Seeds
  misc_feature: MA Experiment ID: 108463 Result: Up-regulated in Transcription
  misc_feature: MA Experiment 108463 PARAMETER Experiment Name: At_Germinating_Seeds_cDNA_P Parameter: Age (day) Value: 3 vs. 0
  misc_feature: MA Experiment 108463 PARAMETER Experiment Name: At_Germinating_Seeds_cDNA_P Parameter: Tissue Value: Germinating Seeds
  misc_feature: MA Experiment ID: 108595 Result: Down-regulated in Transcription
  misc_feature: MA Experiment 108595 PARAMETER Experiment Name: At_Ler-pi_Ovule_cDNA_P Parameter: Plant Line Value: null
  misc_feature: MA Experiment ID: 20000069 Result: Down-regulated in Transcription
  misc_feature: MA Experiment 20000069 PARAMETER Experiment Name: At_100uM_ABA_Mutants_cDNA_P Parameter: Plant Line Value: CS23
  misc_feature: MA Experiment 20000069 PARAMETER Experiment Name: At_100uM_ABA_Mutants_cDNA_P Parameter: Timepoint (hr) Value: 6
  misc_feature: MA Experiment 20000069 PARAMETER Experiment Name: At_100uM_ABA_Mutants_cDNA_P Parameter: Tissue Value: Aerial
  misc_feature: MA Experiment 20000069 PARAMETER Experiment Name: At_100uM_ABA_Mutants_cDNA_P Parameter: Treatment Value: 100uM ABA vs. No Treatment
  misc_feature: MA Experiment ID: 20000072 Result: Down-regulated in Transcription
  misc_feature: MA Experiment 20000072 PARAMETER Experiment Name: At_100uM_ABA_Mutants_cDNA_P Parameter: Plant Line Value: CS8105
  misc_feature: MA Experiment 20000072 PARAMETER Experiment Name: At_100uM_ABA_Mutants_cDNA_P Parameter: Timepoint (hr) Value: 6
  misc_feature: MA Experiment 20000072 PARAMETER Experiment Name: At_100uM_ABA_Mutants_cDNA_P Parameter: Tissue Value: Aerial
  misc_feature: MA Experiment 20000072 PARAMETER Experiment Name: At_100uM_ABA_Mutants_cDNA_P Parameter: Treatment Value: 100uM ABA vs. No Treatment
  misc_feature: MA Experiment ID: 20000087 Result: Down-regulated in Transcription
  misc_feature: MA Experiment 20000087 PARAMETER Experiment Name: At_100uM_ABA_Mutants_cDNA_P Parameter: Plant Line Value: WS
  misc_feature: MA Experiment 20000087 PARAMETER Experiment Name: At_100uM_ABA_Mutants_cDNA_P Parameter: Timepoint (hr) Value: 6
  misc_feature: MA Experiment 20000087 PARAMETER Experiment Name: At_100uM_ABA_Mutants_cDNA_P Parameter: Tissue Value: Aerial
  misc_feature: MA Experiment 20000087 PARAMETER Experiment Name: At_100uM_ABA_Mutants_cDNA_P Parameter: Treatment Value: 100uM ABA vs. No Treatment
  misc_feature: MA Experiment ID: 20000180 Result: Up-regulated in Transcription
  misc_feature: MA Experiment 20000180 PARAMETER Experiment Name: At_Germinating_Seeds_P Parameter: Age (hr) Value: 24 vs. 0
  misc_feature: MA Experiment 20000180 PARAMETER Experiment Name: At_Germinating_Seeds_P Parameter: Tissue Value: Germinating Seeds
  misc_feature: MA Experiment ID: 20000184 Result: Up-regulated in Transcription
  misc_feature: MA Experiment 20000184 PARAMETER Experiment Name: At_Shoots__P Parameter: Age (day) Value: 7
  misc_feature: MA Experiment 20000184 PARAMETER Experiment Name: At_Shoots__P Parameter: Tissue Value: Shoots vs. Whole Plant
  misc_feature: MA Experiment ID: 20000185 Result: Down-regulated in Transcription
  misc_feature: MA Experiment 20000185 PARAMETER Experiment Name: At_Roots__P Parameter: Age (day) Value: 7 vs. 21
  misc_feature: MA Experiment 20000185 PARAMETER Experiment Name: At_Roots__P Parameter: Organism Value: A. thaliana
  misc_feature: MA Experiment 20000185 PARAMETER Experiment Name: At_Roots__P Parameter: Tissue Value: Roots vs. Whole Plant
  misc_feature: MA Experiment ID: 20000438 Result: Up-regulated in Transcription
  misc_feature: MA Experiment 20000438 PARAMETER Experiment Name: At_Shoots__P Parameter: Age (day) Value: 14
  misc_feature: MA Experiment 20000438 PARAMETER Experiment Name: At_Shoots__P Parameter: Tissue Value: Shoots vs. Whole Plant
  misc_feature: MA Experiment ID: 20000439 Result: Down-regulated in Transcription
  misc_feature: MA Experiment 20000439 PARAMETER Experiment Name: At_Roots__P Parameter: Age (day) Value: 14 vs. 21
  misc_feature: MA Experiment 20000439 PARAMETER Experiment Name: At_Roots__P Parameter: Organism Value: A. thaliana
  misc_feature: MA Experiment 20000439 PARAMETER Experiment Name: At_Roots__P Parameter: Tissue Value: Roots vs. Whole Plant
  misc_feature: MA Experiment ID: 20000794 Result: Down-regulated in Transcription
  misc_feature: MA Experiment 20000794 PARAMETER Experiment Name: At_Petals_P Parameter: Age (day) Value: 23-25 days
  misc_feature: MA Experiment 20000794 PARAMETER Experiment Name: At_Petals_P Parameter: Plant Line Value: WS
  misc_feature: MA Experiment 20000794 PARAMETER Experiment Name: At_Petals_P Parameter: Tissue Value: Petals vs. Whole plant
  misc_feature: MA Experiment ID: 20001905 Result: Down-regulated in Transcription
  misc_feature: MA Experiment 20001905 PARAMETER Experiment Name: At_Drought_Reproduction_P Parameter: Age (day) Value: 40
  misc_feature: MA Experiment 20001905 PARAMETER Experiment Name: At_Drought_Reproduction_P Parameter: Organism Value: A. thaliana
  misc_feature: MA Experiment 20001905 PARAMETER Experiment Name: At_Drought_Reproduction_P Parameter: Plant Line Value: WS
  misc_feature: MA Experiment 20001905 PARAMETER Experiment Name: At_Drought_Reproduction_P Parameter: Timepoint (day) Value: 10
  misc_feature: MA Experiment 20001905 PARAMETER Experiment Name: At_Drought_Reproduction_P Parameter: Tissue Value: Rosettes
  misc_feature: MA Experiment 20001905 PARAMETER Experiment Name: At_Drought_Reproduction_P Parameter: Treatment Value: Drought vs. No Drought
  misc_feature: MA Experiment ID: 20001906 Result: Down-regulated in Transcription
  misc_feature: MA Experiment 20001906 PARAMETER Experiment Name: At_Drought_Reproduction_P Parameter: Age (day) Value: 35
  misc_feature: MA Experiment 20001906 PARAMETER Experiment Name: At_Drought_Reproduction_P Parameter: Organism Value: A. thaliana
  misc_feature: MA Experiment 20001906 PARAMETER Experiment Name: At_Drought_Reproduction_P Parameter: Plant Line Value: WS
  misc_feature: MA Experiment 20001906 PARAMETER Experiment Name: At_Drought_Reproduction_P Parameter: Timepoint (day) Value: 5
  misc_feature: MA Experiment 20001906 PARAMETER Experiment Name: At_Drought_Reproduction_P Parameter: Tissue Value: Siliques
  misc_feature: MA Experiment 20001906 PARAMETER Experiment Name: At_Drought_Reproduction_P Parameter: Treatment Value: Drought vs. No Drought
  misc_feature: MA Experiment ID: 20001908 Result: Down-regulated in Transcription
  misc_feature: MA Experiment 20001908 PARAMETER Experiment Name: At_Drought_Reproduction_P Parameter: Age (day) Value: 40
  misc_feature: MA Experiment 20001908 PARAMETER Experiment Name: At_Drought_Reproduction_P Parameter: Organism Value: A. thaliana
  misc_feature: MA Experiment 20001908 PARAMETER Experiment Name: At_Drought_Reproduction_P Parameter: Plant Line Value: WS
  misc_feature: MA Experiment 20001908 PARAMETER Experiment Name: At_Drought_Reproduction_P Parameter: Timepoint (day) Value: 10
  misc_feature: MA Experiment 20001908 PARAMETER Experiment Name: At_Drought_Reproduction_P Parameter: Tissue Value: Siliques
  misc_feature: MA Experiment 20001908 PARAMETER Experiment Name: At_Drought_Reproduction_P Parameter: Treatment Value: Drought vs. No Drought
  misc_feature: MA Experiment ID: 20001911 Result: Down-regulated in Transcription
  misc_feature: MA Experiment 20001911 PARAMETER Experiment Name: At_Drought_Reproduction_P Parameter: Age (day) Value: 40
  misc_feature: MA Experiment 20001911 PARAMETER Experiment Name: At_Drought_Reproduction_P Parameter: Organism Value: A. thaliana
  misc_feature: MA Experiment 20001911 PARAMETER Experiment Name: At_Drought_Reproduction_P Parameter: Plant Line Value: WS
  misc_feature: MA Experiment 20001911 PARAMETER Experiment Name: At_Drought_Reproduction_P Parameter: Timepoint (day) Value: 10
  misc_feature: MA Experiment 20001911 PARAMETER Experiment Name: At_Drought_Reproduction_P Parameter: Tissue Value: Flowers
  misc_feature: MA Experiment 20001911 PARAMETER Experiment Name: At_Drought_Reproduction_P Parameter: Treatment Value: Drought vs. No Drought

SEQ ID NO: 45766 - protein, 448 aa, Arabidopsis thaliana; identical to SEQ ID NO: 26270
  peptide (1)..(448): Ceres Seq. ID no. 13591643
  misc_feature (152)..(447): Pfam Name: Extensin-like region Pfam Description: Extensin-like region
  misc_feature (152)..(447): Pfam Name: Extensin-like region Pfam Description: Extensin-like region
  misc_feature (152)..(447): Pfam Name: Extensin-like region Pfam Description: Extensin-like region
  misc_feature (152)..(445): Homolog of NCBI NO: 5917664 NR Description: extensin-like protein [Lycopersicon esculentum]
  misc_feature (151)..(434): Homolog of NCBI NO: 7489265 NR Description: proline-rich protein GPP1 - potato
  misc_feature (152)..(448): Homolog of NCBI NO: 7489265 NR Description: proline-rich protein GPP1 - potato
  misc_feature (1)..(286): Homolog of NCBI NO: 7620011 NR Description: proline-rich protein 2 [Arabidopsis thaliana]
  misc_feature (1)..(286): Homolog of NCBI NO: 15226468 NR Description: proline-rich protein family [Arabidopsis
  misc_feature (152)..(445): Homolog of NCBI NO: 5917664 NR Description: extensin-like protein [Lycopersicon esculentum]
  misc_feature (152)..(448): Homolog of NCBI NO: 7489265 NR Description: proline-rich protein GPP1 - potato
  misc_feature (1)..(286): Homolog of NCBI NO: 15226468 NR Description: proline-rich protein family [Arabidopsis
  misc_feature (1)..(286): Homolog of NCBI NO: 7620011 NR Description: proline-rich protein 2 [Arabidopsis thaliana]
  misc_feature (152)..(448): Homolog of NCBI NO: 7489265 NR Description: proline-rich protein GPP1 - potato
  misc_feature (151)..(434): Homolog of NCBI NO: 7489265 NR Description: proline-rich protein GPP1 - potato
  misc_feature (152)..(445): Homolog of NCBI NO: 5917664 NR Description: extensin-like protein [Lycopersicon esculentum]
  misc_feature (1)..(448): Homolog of NCBI NO: 15234785 NR Description: proline-rich protein family [Arabidopsis
  misc_feature (1)..(448): Homolog of NCBI NO: 7620015 NR Description: proline-rich protein 4 [Arabidopsis thaliana]
  misc_feature (1)..(448): Homolog of NCBI NO: 6782442 NR Description: proline-rich protein [Arabidopsis thaliana]
  misc_feature (16)..(446): Homolog of NCBI NO: 7489265 NR Description: proline-rich protein GPP1 - potato
  misc_feature (10)..(448): Homolog of NCBI NO: 7489265 NR Description: proline-rich protein GPP1 - potato
  misc_feature (1)..(448): Homolog of NCBI NO: 15234785 NR Description: proline-rich protein family [Arabidopsis
  misc_feature (1)..(448): Homolog of NCBI NO: 7620015 NR Description: proline-rich protein 4 [Arabidopsis thaliana]
  misc_feature (1)..(448): Homolog of NCBI NO: 6782442 NR Description: proline-rich protein [Arabidopsis thaliana]
  misc_feature (16)..(446): Homolog of NCBI NO: 7489265 NR Description: proline-rich protein GPP1 - potato
  misc_feature (10)..(448): Homolog of NCBI NO: 7489265 NR Description: proline-rich protein GPP1 - potato
  misc_feature (1)..(286): Homolog of NCBI NO: 15226468 NR Description: proline-rich protein family [Arabidopsis
  misc_feature (1)..(286): Homolog of NCBI NO: 7620011 NR Description: proline-rich protein 2 [Arabidopsis thaliana]
  misc_feature (151)..(434): Homolog of NCBI NO: 7489265 NR Description: proline-rich protein GPP1 - potato
  misc_feature (10)..(448): Homolog of NCBI NO: 7489265 NR Description: proline-rich protein GPP1 - potato
  misc_feature (16)..(446): Homolog of NCBI NO: 7489265 NR Description: proline-rich protein GPP1 - potato
  misc_feature (1)..(448): Homolog of NCBI NO: 6782442 NR Description: proline-rich protein [Arabidopsis thaliana]
  misc_feature (1)..(448): Homolog of NCBI NO: 7620015 NR Description: proline-rich protein 4 [Arabidopsis thaliana]
  misc_feature (1)..(448): Homolog of NCBI NO: 15234785 NR Description: proline-rich protein family [Arabidopsis

SEQ ID NO: 45767 - protein, 296 aa, Arabidopsis thaliana; identical to SEQ ID NO: 26271
  peptide (1)..(296): Ceres Seq. ID no. 13591644
  misc_feature (1)..(295): Pfam Name: Extensin-like region Pfam Description: Extensin-like region
  misc_feature (1)..(295): Pfam Name: Extensin-like region Pfam Description: Extensin-like region
  misc_feature (1)..(295): Pfam Name: Extensin-like region Pfam Description: Extensin-like region
  misc_feature (1)..(293): Homolog of NCBI NO: 5917664 NR Description: extensin-like protein [Lycopersicon esculentum]
  misc_feature (1)..(282): Homolog of NCBI NO: 7489265 NR Description: proline-rich protein GPP1 - potato
  misc_feature (1)..(296): Homolog of NCBI NO: 7489265 NR Description: proline-rich protein GPP1 - potato
  misc_feature (1)..(134): Homolog of NCBI NO: 7620011 NR Description: proline-rich protein 2 [Arabidopsis thaliana]
  misc_feature (1)..(134): Homolog of NCBI NO: 15226468 NR Description: proline-rich protein family [Arabidopsis
  misc_feature (1)..(293): Homolog of NCBI NO: 5917664 NR Description: extensin-like protein [Lycopersicon esculentum]
  misc_feature (1)..(296): Homolog of NCBI NO: 7489265 NR Description: proline-rich protein GPP1 - potato
  misc_feature (1)..(134): Homolog of NCBI NO: 15226468 NR Description: proline-rich protein family [Arabidopsis
  misc_feature (1)..(134): Homolog of NCBI NO: 7620011 NR Description: proline-rich protein 2 [Arabidopsis thaliana]
  misc_feature (1)..(296): Homolog of NCBI NO: 7489265 NR Description: proline-rich protein GPP1 - potato
  misc_feature (1)..(282): Homolog of NCBI NO: 7489265 NR Description: proline-rich protein GPP1 - potato
  misc_feature (1)..(293): Homolog of NCBI NO: 5917664 NR Description: extensin-like protein [Lycopersicon esculentum]
  misc_feature (1)..(296): Homolog of NCBI NO: 15234785 NR Description: proline-rich protein family [Arabidopsis
  misc_feature (1)..(296): Homolog of NCBI NO: 7620015 NR Description: proline-rich protein 4 [Arabidopsis thaliana]
  misc_feature (1)..(296): Homolog of NCBI NO: 6782442 NR Description: proline-rich protein [Arabidopsis thaliana]
  misc_feature (1)..(294): Homolog of NCBI NO: 7489265 NR Description: proline-rich protein GPP1 - potato
  misc_feature (1)..(296): Homolog of NCBI NO: 7489265 NR Description: proline-rich protein GPP1 - potato
  misc_feature (1)..(296): Homolog of NCBI NO: 15234785 NR Description: proline-rich protein family [Arabidopsis
  misc_feature (1)..(296): Homolog of NCBI NO: 7620015 NR Description: proline-rich protein 4 [Arabidopsis thaliana]
  misc_feature (1)..(296): Homolog of NCBI NO: 6782442 NR Description: proline-rich protein [Arabidopsis thaliana]
  misc_feature (1)..(294): Homolog of NCBI NO: 7489265 NR Description: proline-rich protein GPP1 - potato
  misc_feature (1)..(296): Homolog of NCBI NO: 7489265 NR Description: proline-rich protein GPP1 - potato
  misc_feature (1)..(134): Homolog of NCBI NO: 15226468 NR Description: proline-rich protein family [Arabidopsis
  misc_feature (1)..(134): Homolog of NCBI NO: 7620011 NR Description: proline-rich protein 2 [Arabidopsis thaliana]
  misc_feature (1)..(282): Homolog of NCBI NO: 7489265 NR Description: proline-rich protein GPP1 - potato
  misc_feature (1)..(296): Homolog of NCBI NO: 7489265 NR Description: proline-rich protein GPP1 - potato
  misc_feature (1)..(294): Homolog of NCBI NO: 7489265 NR Description: proline-rich protein GPP1 - potato
  misc_feature (1)..(296): Homolog of NCBI NO: 6782442 NR Description: proline-rich protein [Arabidopsis thaliana]
  misc_feature (1)..(296): Homolog of NCBI NO: 7620015 NR Description: proline-rich protein 4 [Arabidopsis thaliana]
  misc_feature (1)..(296): Homolog of NCBI NO: 15234785 NR Description: proline-rich protein family [Arabidopsis

SEQ ID NO: 45768 - DNA, 1275 bp, Arabidopsis thaliana
  misc_feature (1)..(1275): Ceres Seq. ID no. 13646508
  misc_feature: MA Experiment ID: 20000184 Result: Up-regulated in Transcription
  misc_feature: MA Experiment 20000184 PARAMETER Experiment Name: At_Shoots__P Parameter: Age (day) Value: 7
  misc_feature: MA Experiment 20000184 PARAMETER Experiment Name: At_Shoots__P Parameter: Tissue Value: Shoots vs. Whole Plant
  misc_feature: MA Experiment ID: 20000437 Result: Down-regulated in Transcription
  misc_feature: MA Experiment 20000437 PARAMETER Experiment Name: At_Drought_P Parameter: Age (day) Value: 8
  misc_feature: MA Experiment 20000437 PARAMETER Experiment Name: At_Drought_P Parameter: Organism Value: A. thaliana
  misc_feature: MA Experiment 20000437 PARAMETER Experiment Name: At_Drought_P Parameter: Plant Line Value: WS
  misc_feature: MA Experiment 20000437 PARAMETER Experiment Name: At_Drought_P Parameter: Timepoint (hr) Value: 24
  misc_feature: MA Experiment 20000437 PARAMETER Experiment Name: At_Drought_P Parameter: Tissue Value: Whole Plant
  misc_feature: MA Experiment 20000437 PARAMETER Experiment Name: At_Drought_P Parameter: Treatment Value: Drought vs. No Drought
  misc_feature: MA Experiment ID: 20000438 Result: Up-regulated in Transcription
  misc_feature: MA Experiment 20000438 PARAMETER Experiment Name: At_Shoots__P Parameter: Age (day) Value: 14
  misc_feature: MA Experiment 20000438 PARAMETER Experiment Name: At_Shoots__P Parameter: Tissue Value: Shoots vs. Whole Plant
  misc_feature: MA Experiment ID: 20000794 Result: Down-regulated in Transcription
  misc_feature: MA Experiment 20000794 PARAMETER Experiment Name: At_Petals_P Parameter: Age (day) Value: 23-25 days
  misc_feature: MA Experiment 20000794 PARAMETER Experiment Name: At_Petals_P Parameter: Plant Line Value: WS
  misc_feature: MA Experiment 20000794 PARAMETER Experiment Name: At_Petals_P Parameter: Tissue Value: Petals vs. Whole plant
  misc_feature: MA Experiment ID: 20001247 Result: Up-regulated in Transcription
  misc_feature: MA Experiment 20001247 PARAMETER Experiment Name: At_Far-red-induction_P Parameter: Age (day) Value: 7
  misc_feature: MA Experiment 20001247 PARAMETER Experiment Name: At_Far-red-induction_P Parameter: Light Value: Far-red vs. White
  misc_feature: MA Experiment 20001247 PARAMETER Experiment Name: At_Far-red-induction_P Parameter: Organism Value: A. thaliana
  misc_feature: MA Experiment 20001247 PARAMETER Experiment Name: At_Far-red-induction_P Parameter: Plant Line Value: Columbia
  misc_feature: MA Experiment 20001247 PARAMETER Experiment Name: At_Far-red-induction_P Parameter: Timepoint (hr) Value: 1
  misc_feature: MA Experiment 20001247 PARAMETER Experiment Name: At_Far-red-induction_P Parameter: Tissue Value: Whole Plant
  misc_feature: MA Experiment ID: 20001248 Result: Down-regulated in Transcription
  misc_feature: MA Experiment 20001248 PARAMETER Experiment Name: At_Far-red-induction_P Parameter: Age (day) Value: 7
  misc_feature: MA Experiment 20001248 PARAMETER Experiment Name: At_Far-red-induction_P Parameter: Light Value: Far-red vs. White
  misc_feature: MA Experiment 20001248 PARAMETER Experiment Name: At_Far-red-induction_P Parameter: Organism Value: A. thaliana
  misc_feature: MA Experiment 20001248 PARAMETER Experiment Name: At_Far-red-induction_P Parameter: Plant Line Value: Columbia
  misc_feature: MA Experiment 20001248 PARAMETER Experiment Name: At_Far-red-induction_P Parameter: Timepoint (hr) Value: 4
  misc_feature: MA Experiment 20001248 PARAMETER Experiment Name: At_Far-red-induction_P Parameter: Tissue Value: Whole Plant
  misc_feature: MA Experiment ID: 20001554 Result: Down-regulated in Transcription
  misc_feature: MA Experiment 20001554 PARAMETER Experiment Name: At_Drought_Soil_Dry_P Parameter: Age (day) Value: 21
  misc_feature: MA Experiment 20001554 PARAMETER Experiment Name: At_Drought_Soil_Dry_P Parameter: Organism Value: A. thaliana
  misc_feature: MA Experiment 20001554 PARAMETER Experiment Name: At_Drought_Soil_Dry_P Parameter: Plant Line Value: WS
  misc_feature: MA Experiment 20001554 PARAMETER Experiment Name: At_Drought_Soil_Dry_P Parameter: Post Timepoint (hr) Value: None
  misc_feature: MA Experiment 20001554 PARAMETER Experiment Name: At_Drought_Soil_Dry_P Parameter: Post-Treatment Value: None
  misc_feature: MA Experiment 20001554 PARAMETER Experiment Name: At_Drought_Soil_Dry_P Parameter: Timepoint (day) Value: 7
  misc_feature: MA Experiment 20001554 PARAMETER Experiment Name: At_Drought_Soil_Dry_P Parameter: Treatment Value: Drought vs. No Drought
  misc_feature: MA Experiment ID: 20001555 Result: Down-regulated in Transcription
  misc_feature: MA Experiment 20001555 PARAMETER Experiment Name: At_Drought_Soil_Dry_P Parameter: Age (day) Value: 24
  misc_feature: MA Experiment 20001555 PARAMETER Experiment Name: At_Drought_Soil_Dry_P Parameter: Organism Value: A. thaliana
  misc_feature: MA Experiment 20001555 PARAMETER Experiment Name: At_Drought_Soil_Dry_P Parameter: Plant Line Value: WS
  misc_feature: MA Experiment 20001555 PARAMETER Experiment Name: At_Drought_Soil_Dry_P Parameter: Post Timepoint (hr) Value: None
  misc_feature: MA Experiment 20001555 PARAMETER Experiment Name: At_Drought_Soil_Dry_P Parameter: Post-Treatment Value: None
  misc_feature: MA Experiment 20001555 PARAMETER Experiment Name: At_Drought_Soil_Dry_P Parameter: Timepoint (day) Value: 10
  misc_feature: MA Experiment 20001555 PARAMETER Experiment Name: At_Drought_Soil_Dry_P Parameter: Treatment Value: Drought vs. No Drought
  misc_feature: MA Experiment ID: 20001556 Result: Down-regulated in Transcription
  misc_feature: MA Experiment 20001556 PARAMETER Experiment Name: At_Drought_Soil_Dry_P Parameter: Age (day) Value: 26
  misc_feature: MA Experiment 20001556 PARAMETER Experiment Name: At_Drought_Soil_Dry_P Parameter: Organism Value: A. thaliana
  misc_feature: MA Experiment 20001556 PARAMETER Experiment Name: At_Drought_Soil_Dry_P Parameter: Plant Line Value: WS
  misc_feature: MA Experiment 20001556 PARAMETER Experiment Name: At_Drought_Soil_Dry_P Parameter: Post Timepoint (hr) Value: None
  misc_feature: MA Experiment 20001556 PARAMETER Experiment Name: At_Drought_Soil_Dry_P Parameter: Post-Treatment Value: None
  misc_feature: MA Experiment 20001556 PARAMETER Experiment Name: At_Drought_Soil_Dry_P Parameter: Timepoint (day) Value: 12
  misc_feature: MA Experiment 20001556 PARAMETER Experiment Name: At_Drought_Soil_Dry_P Parameter: Treatment Value: Drought vs. No Drought
  misc_feature: MA Experiment ID: 20001557 Result: Down-regulated in Transcription
  misc_feature: MA Experiment 20001557 PARAMETER Experiment Name: At_Drought_Soil_Dry_P Parameter: Age (day) Value: 27
  misc_feature: MA Experiment 20001557 PARAMETER Experiment Name: At_Drought_Soil_Dry_P Parameter: Organism Value: A. thaliana
  misc_feature: MA Experiment 20001557 PARAMETER Experiment Name: At_Drought_Soil_Dry_P Parameter: Plant Line Value: WS
  misc_feature: MA Experiment 20001557 PARAMETER Experiment Name: At_Drought_Soil_Dry_P Parameter: Post Timepoint (hr) Value: 3
  misc_feature: MA Experiment 20001557 PARAMETER Experiment Name: At_Drought_Soil_Dry_P Parameter: Post-Treatment Value: Re-Water vs. No Drought
  misc_feature: MA Experiment 20001557 PARAMETER Experiment Name: At_Drought_Soil_Dry_P Parameter: Timepoint (day) Value: 13
  misc_feature: MA Experiment 20001557 PARAMETER Experiment Name: At_Drought_Soil_Dry_P Parameter: Treatment Value: Drought vs. No Drought
  misc_feature: MA Experiment ID: 20001904 Result: Down-regulated in Transcription
  misc_feature: MA Experiment 20001904 PARAMETER Experiment Name: At_Drought_Reproduction_P Parameter: Age (day) Value: 37
  misc_feature: MA Experiment 20001904 PARAMETER Experiment Name: At_Drought_Reproduction_P Parameter: Organism Value: A. thaliana
  misc_feature: MA Experiment 20001904 PARAMETER Experiment Name: At_Drought_Reproduction_P Parameter: Plant Line Value: WS
  misc_feature: MA Experiment 20001904 PARAMETER Experiment Name: At_Drought_Reproduction_P Parameter: Timepoint (day) Value: 7
  misc_feature: MA Experiment 20001904 PARAMETER Experiment Name: At_Drought_Reproduction_P Parameter: Tissue Value: Rosettes
  misc_feature: MA Experiment 20001904 PARAMETER Experiment Name: At_Drought_Reproduction_P Parameter: Treatment Value: Drought vs. No Drought
  misc_feature: MA Experiment ID: 20001906 Result: Down-regulated in Transcription
  misc_feature: MA Experiment 20001906 PARAMETER Experiment Name: At_Drought_Reproduction_P Parameter: Age (day) Value: 35
  misc_feature: MA Experiment 20001906 PARAMETER Experiment Name: At_Drought_Reproduction_P Parameter: Organism Value: A. thaliana
  misc_feature: MA Experiment 20001906 PARAMETER Experiment Name: At_Drought_Reproduction_P Parameter: Plant Line Value: WS
  misc_feature: MA Experiment 20001906 PARAMETER Experiment Name: At_Drought_Reproduction_P Parameter: Timepoint (day) Value: 5
  misc_feature: MA Experiment 20001906 PARAMETER Experiment Name: At_Drought_Reproduction_P Parameter: Tissue Value: Siliques
  misc_feature: MA Experiment 20001906 PARAMETER Experiment Name: At_Drought_Reproduction_P Parameter: Treatment Value: Drought vs. No Drought
  misc_feature: MA Experiment ID: 20001911 Result: Down-regulated in Transcription
  misc_feature: MA Experiment 20001911 PARAMETER Experiment Name: At_Drought_Reproduction_P Parameter: Age (day) Value: 40
  misc_feature: MA Experiment 20001911 PARAMETER Experiment Name: At_Drought_Reproduction_P Parameter: Organism Value: A. thaliana
  misc_feature: MA Experiment 20001911 PARAMETER Experiment Name: At_Drought_Reproduction_P Parameter: Plant Line Value: WS
  misc_feature: MA Experiment 20001911 PARAMETER Experiment Name: At_Drought_Reproduction_P Parameter: Timepoint (day) Value: 10
  misc_feature: MA Experiment 20001911 PARAMETER Experiment Name: At_Drought_Reproduction_P Parameter: Tissue Value: Flowers
  misc_feature: MA Experiment 20001911 PARAMETER Experiment Name: At_Drought_Reproduction_P Parameter: Treatment Value: Drought vs. No Drought
actctatcttgatcaaatctctactagcaagttacaatggctactctctctcttcactcccactctttccttcttgttctccttccgtttatcctcattctccgacaaaacttggcagtggccggaggatgtcaggttccgccggtgatttttaactttggcgattccaactccgacacgggtggactcgtcgccggactcggatacagcattggtcttcctaacggtcgttcgtttttccagagatccaccggccgattatccgacggacgcctcgtcatcgatttcctttgccagagtttgaatacaagtctattgaacccatacttagactcattggttggatcaaagttccaaaacggtgccaatttcgcaattgttggatcttccactcttcccagatatgttccttttgctctcaacattcagctcatgcagttcctccatttcaaatcccgagcactcgagcttgcttctatttcagatcctttgaaagagatgatgataggcgaaagtggattcagaaacgcattgtacatgatcgatatcggacagaatgatattgcggattcattctccaaaggcctttcttactcccgggtcgtcaagcttattccaaacgttatttccgagatcaaaagtgccataaagatattgtatgatgaaggagggaggaaattttgggttcacaacacaggaccattaggttgtctgcctcagaaactttcaatggttcatagcaaaggttttgataagcatggttgtctagcaacttataacgcagctgcaaaactgtttaacgaaggactggatcatatgtgtcgggatctgaggacggaactgaaagaggccaacattgtctatgtcgacatttatgccatcaagtacgatctcatcgcaaactccaacaattatggctttgagaaacccttaatggcatgttgcggatacggagggcctccttacaactacaatgtgaacataacgtgtgggaatggtggctctaaaagttgcgacgaagggtctcggtttataagctgggacggaatacactacaccgagactgctaacgccattgtagccatgaaagtattgtcgatgcaacattctacgccaccaactccgttccatttcttctgcggcggctgacattctacacattgcttccgttccaagtaagaaattttatttttgtttcggatttggttttagcctctgtaattgtgcaaattagacttcaccaatataaaaaccggtcacaattgattttctttc

SEQ ID NO: 45769 - protein, 370 aa, Arabidopsis thaliana
  peptide (1)..(370): Ceres Seq. ID no. 13646509
  misc_feature (38)..(352): Pfam Name: GDSL-like Lipase/Acylhydrolase Pfam Description: GDSL-like Lipase/Acylhydrolase
  misc_feature (239)..(360): Homolog of NCBI NO: 15228721 NR Description: GDSL-motif lipase/hydrolase protein [Arabidopsis
  misc_feature (11)..(256): Homolog of NCBI NO: 15228721 NR Description: GDSL-motif lipase/hydrolase protein [Arabidopsis
  misc_feature (87)..(368): Homolog of NCBI NO: 34894844 NR Description: putative lipase homolog [Oryza sativa (japonica
  misc_feature (36)..(361): Homolog of NCBI NO: 21537184 NR Description: early nodule-specific protein, putative
  misc_feature (36)..(361): Homolog of NCBI NO: 18405064 NR Description: GDSL-motif lipase/hydrolase protein [Arabidopsis
  misc_feature (29)..(364): Homolog of NCBI NO: 34894838 NR Description: putative lipase homolog [Oryza sativa (japonica
  misc_feature (29)..(368): Homolog of NCBI NO: 34894866 NR Description: putative lipase homolog [Oryza sativa (japonica
  misc_feature (42)..(341): Homolog of NCBI NO: 25336281 NR Description: lipase-like protein Lip-4
  misc_feature (1)..(368): Homolog of NCBI NO: 15223585 NR Description: GDSL-motif lipase/hydrolase protein [Arabidopsis
  misc_feature (1)..(370): Homolog of NCBI NO: 15217506 NR Description: GDSL-motif lipase/hydrolase protein [Arabidopsis
MATLSLHSHSFLLVLLPFILILRQNLAVAGGCQVPPVIFNFGDSNSDTGGLVAGLGYSIGLPNGRSFFQRSTGRLSDGRLVIDFLCQSLNTSLLNPYLDSLVGSKFQNGANFAIVGSSTLPRYVPFALNIQLMQFLHFKSRALELASISDPLKEMMIGESGFRNALYMIDIGQNDIADSFSKGLSYSRVVKLIPNVISEIKSAIKILYDEGGRKFWVHNTGPLGCLPQKLSMVHSKGFDKHGCLATYNAAAKLFNEGLDHMCRDLRTELKEANIVYVDIYAIKYDLIANSNNYGFEKPLMACCGYGGPPYNYNVNITCGNGGSKSCDEGSRFISWDGIHYTETANAIVAMKVLSMQHSTPPTPFHFFCGG

SEQ ID NO: 45770 - protein, 238 aa, Arabidopsis thaliana
  peptide (1)..(238): Ceres Seq. ID no. 13646510
  misc_feature (1)..(220): Pfam Name: GDSL-like Lipase/Acylhydrolase Pfam Description: GDSL-like Lipase/Acylhydrolase
  misc_feature (107)..(228): Homolog of NCBI NO: 15228721 NR Description: GDSL-motif lipase/hydrolase protein [Arabidopsis
  misc_feature (1)..(124): Homolog of NCBI NO: 15228721 NR Description: GDSL-motif lipase/hydrolase protein [Arabidopsis
  misc_feature (1)..(236): Homolog of NCBI NO: 34894844 NR Description: putative lipase homolog [Oryza sativa (japonica
  misc_feature (1)..(229): Homolog of NCBI NO: 21537184 NR Description: early nodule-specific protein, putative
  misc_feature (1)..(229): Homolog of NCBI NO: 18405064 NR Description: GDSL-motif lipase/hydrolase protein [Arabidopsis
  misc_feature (1)..(232): Homolog of NCBI NO: 34894838 NR Description: putative lipase homolog [Oryza sativa (japonica
  misc_feature (1)..(236): Homolog of NCBI NO: 34894866 NR Description: putative lipase homolog [Oryza sativa (japonica
  misc_feature (1)..(209): Homolog of NCBI NO: 25336281 NR Description: lipase-like protein Lip-4
  misc_feature (1)..(236): Homolog of NCBI NO: 15223585 NR Description: GDSL-motif lipase/hydrolase protein [Arabidopsis
  misc_feature (1)..(238): Homolog of NCBI NO: 15217506 NR Description: GDSL-motif lipase/hydrolase protein [Arabidopsis
MQFLHFKSRALELASISDPLKEMMIGESGFRNALYMIDIGQNDIADSFSKGLSYSRVVKLIPNVISEIKSAIKILYDEGGRKFWVHNTGPLGCLPQKLSMVHSKGFDKHGCLATYNAAAKLFNEGLDHMCRDLRTELKEANIVYVDIYAIKYDLIANSNNYGFEKPLMACCGYGGPPYNYNVNITCGNGGSKSCDEGSRFISWDGIHYTETANAIVAMKVLSMQHSTPPTPFHFFCGG

SEQ ID NO: 45771 - protein, 216 aa, Arabidopsis thaliana
  peptide (1)..(216): Ceres Seq. ID no. 13646511
  misc_feature (1)..(198): Pfam Name: GDSL-like Lipase/Acylhydrolase Pfam Description: GDSL-like Lipase/Acylhydrolase
  misc_feature (85)..(206): Homolog of NCBI NO: 15228721 NR Description: GDSL-motif lipase/hydrolase protein [Arabidopsis
  misc_feature (1)..(102): Homolog of NCBI NO: 15228721 NR Description: GDSL-motif lipase/hydrolase protein [Arabidopsis
  misc_feature (1)..(214): Homolog of NCBI NO: 34894844 NR Description: putative lipase homolog [Oryza sativa (japonica
  misc_feature (1)..(207): Homolog of NCBI NO: 21537184 NR Description: early nodule-specific protein, putative
  misc_feature (1)..(207): Homolog of NCBI NO: 18405064 NR Description: GDSL-motif lipase/hydrolase protein [Arabidopsis
  misc_feature (1)..(210): Homolog of NCBI NO: 34894838 NR Description: putative lipase homolog [Oryza sativa (japonica
  misc_feature (1)..(214): Homolog of NCBI NO: 34894866 NR Description: putative lipase homolog [Oryza sativa (japonica
  misc_feature (1)..(187): Homolog of NCBI NO: 25336281 NR Description: lipase-like protein Lip-4
  misc_feature (1)..(214): Homolog of NCBI NO: 15223585 NR Description: GDSL-motif lipase/hydrolase protein [Arabidopsis
  misc_feature (1)..(216): Homolog of NCBI NO: 15217506 NR Description: GDSL-motif lipase/hydrolase protein [Arabidopsis
MMIGESGFRNALYMIDIGQNDIADSFSKGLSYSRVVKLIPNVISEIKSAIKILYDEGGRKFWVHNTGPLGCLPQKLSMVHSKGFDKHGCLATYNAAAKLFNEGLDHMCRDLRTELKEANIVYVDIYAIKYDLIANSNNYGFEKPLMACCGYGGPPYNYNVNITCGNGGSKSCDEGSRFISWDGIHYTETANAIVAMKVLSMQHSTPPTPFHFFCGG

SEQ ID NO: 45772 - DNA, 2665 bp, Arabidopsis thaliana
  misc_feature (1)..(2665): Ceres Seq. ID no. 12561126
  misc_feature: MA Experiment ID: 20000234 Result: Up-regulated in Transcription
  misc_feature: MA Experiment 20000234 PARAMETER Experiment Name: At_Siliques_P Parameter: Age (day) Value: 21
  misc_feature: MA Experiment 20000234 PARAMETER Experiment Name: At_Siliques_P Parameter: Organism Value: A. thaliana
  misc_feature: MA Experiment 20000234 PARAMETER Experiment Name: At_Siliques_P Parameter: Plant Line Value: WS
  misc_feature: MA Experiment 20000234 PARAMETER Experiment Name: At_Siliques_P Parameter: Tissue Value: Less Than 5mm Siliques vs. Whole Plant
  misc_feature: MA Experiment ID: 20000235 Result: Up-regulated in Transcription
  misc_feature: MA Experiment 20000235 PARAMETER Experiment Name: At_Siliques_P Parameter: Age (day) Value: 21
  misc_feature: MA Experiment 20000235 PARAMETER Experiment Name: At_Siliques_P Parameter: Organism Value: A. thaliana
  misc_feature: MA Experiment 20000235 PARAMETER Experiment Name: At_Siliques_P Parameter: Plant Line Value: WS
  misc_feature: MA Experiment 20000235 PARAMETER Experiment Name: At_Siliques_P Parameter: Tissue Value: 5-10mm Siliques vs. Whole Plant
  misc_feature: MA Experiment ID: 20000265 Result: Up-regulated in Transcription
  misc_feature: MA Experiment 20000265 PARAMETER Experiment Name: At_Open_Flower_P Parameter: Age (day) Value: 21
  misc_feature: MA Experiment 20000265 PARAMETER Experiment Name: At_Open_Flower_P Parameter: Plant Line Value: WS
  misc_feature: MA Experiment 20000265 PARAMETER Experiment Name: At_Open_Flower_P Parameter: Tissue Value: Closed Flower vs. Whole Plant
  misc_feature: MA Experiment ID: 20000286 Result: Up-regulated in Transcription
  misc_feature: MA Experiment 20000286 PARAMETER Experiment Name: At_Open_Flower_P Parameter: Age (day) Value: 21
  misc_feature: MA Experiment 20000286 PARAMETER Experiment Name: At_Open_Flower_P Parameter: Plant Line Value: WS
  misc_feature: MA Experiment 20000286 PARAMETER Experiment Name: At_Open_Flower_P Parameter: Tissue Value: Half Open vs. Whole Plant
atgaaacacttcactcgtctcttatcattgttcttcatcctcattacttcattatctttggctaaatcaaccattgtctctcatgatgaacgagccatcacaattaatggaaaacgccggatcctactttcaggctccattcattacccacgaagcactgctgatatgtggcctgatctgatcaacaaagccaaagatggtggcttagatgcaatcgagacgtacgttttttggaacgcacatgaaccaaaacgtagggaatacgatttctcggggaatctcgatgttgttcgttttatcaaaaccattcaagacgcaggtctctactccgttcttcgcatcggaccttatgtttgcgcagaatggaattatggaggctttcccgtgtggctgcacaatatgcccaacatgaaattcagaacagttaaccctagtttcatgaatgaaatgcaaaatttcactacaaagatagtgaagatgatgaaggaagagaagctctttgcttcacaaggcggtccaattatcctagctcagatcgagaatgaatacgggaatgtgatctcgtcgtatggagcagagggtaaggcctacattgattggtgtgccaacatggccaactctctagacattggtgttccatggcttatgtgccaacaaccaaacgctcctcagcctatgctcgagacgtgcaatggattctactgtgaccagtacgaaccaaccaacccgagcaccccaaagatgtggacagagaattggaccggctggttcaagaattggggaggcaaacatccttacagaaccgctgaggatcttgctttttcagttgctagattcttccaaaccggaggaactttccaaaactattacatgtaccatggtggtactaactttggaagagtcgctggaggtccatacatcaccacttcatatgattaccatgctcctcttgatgaattcggtaacttgaaccagcctaaatggggtcacttgaaacagctccacacagtcttaaaatccatggagaaatcgctgacttacggaaacatatcaagaatcgatcttggcaactcaatcaaggcgacgatttacacaacaaaggagggatcaagctgcttcatcggtaatgtgaacgcaactgcggatgctttagtcaacttcaaaggaaaagactaccacgtaccggcttggtctgtaagtgttcttccggactgcgataaagaggcttacaacactgcaaaagtgaacactcaaacatcaatcatgaccgaggactctagtaagccagagaggctggaatggacctggagaccggagtccgctcagaagatgattcttaaaggcagtggagatctcattgccaagggtcttgtagaccaaaaagatgttacaaacgatgctagtgactatctttggtacatgactaggcttcatctcgacaagaaagatccactttggagccgaaacatgacgttacgggttcacagcaatgcccatgttctacacgcttacgtcaatggaaaatacgtcggtaaccaattcgtaaaggacgggaaatttgattacagatttgagaggaaggtcaatcatctcgttcatgggactaatcacatttcacttctcagcgtttccgttggactacagaattatggacctttctttgagagcggaccaactggaatcaatggtcctgtgtccttagtcggatacaaaggagaggaaacaatcgagaaggatctctcgcagcatcaatgggactacaagattggtttgaatggatacaacgacaaacttttcagcataaaatctgttggtcaccaaaaatgggcaaacgaaaagctacctactggtcggatgttgacatggtacaaggcaaagttcaaggctcctcttggtaaggagccagtgattgtggacttaaatggtctcgggaaaggtgaggcttggatcaacggtcagagcattggtcgttactggccgagctttaactctagcgatgatggttgcaaagacgaatgtgactaccgtggggcgtatggtagcgacaaatgcgcttttatgtgcggcaaaccaactcaaagatggtaccatgttccacgatcgttcttgaatgcgagcggacataacactatcacactattcgaagaaatgggcggtaacccgtcaatggtgaacttcaagacagtagtggttggaacagtttgtgccagggctcatgaacacaacaaagtggagttgtcctgccataaccggccgatttcagccgttaaatttgcaagctttggaaatccgttggggcattgtgggtcattcgcggttggtacgtgccaaggagacaaggatgctgcgaagaccgtggctaaagagtgtgttggcaaactcaactgcactgtcaatgtgtcttccgacacgtttggttctactttggactgtggagattcacctaaaaaattggccgtggaattggagtgctagattagatcttagctctagctagctagtgattgcaataatttccatcaaataatgtcgtacttgtttttgatctatcaggttttttagatgatttggatttaggattgtggaataaatattatgatcgaataaaagtttctcttgtttaaatattttatcttgagatggtttttgttctgacgcggccgcg

SEQ ID NO: 45773 - protein, 824 aa, Arabidopsis thaliana
  peptide (1)..(824): Ceres Seq. ID no. 12561127
  misc_feature (746)..(824): Pfam Name: Galactose binding lectin domain Pfam Description: Galactose binding lectin domain
  misc_feature (746)..(824): Pfam Name: Galactose binding lectin domain Pfam Description: Galactose binding lectin domain
  misc_feature (744)..(824): Homolog of NCBI NO: 6686888 NR Description: putative beta-galactosidase [Arabidopsis thaliana]
  misc_feature (6)..(735): Homolog of NCBI NO: 6686888 NR Description: putative beta-galactosidase [Arabidopsis thaliana]
  misc_feature (736)..(824): Homolog of NCBI NO: 7939623 NR Description: putative beta-galactosidase [Lycopersicon
  misc_feature (26)..(740): Homolog of NCBI NO: 7939623 NR Description: putative beta-galactosidase [Lycopersicon
  misc_feature (589)..(668): Homolog of NCBI NO: 22329897 NR Description: similar to glycosyl hydrolase family 35
  misc_feature (744)..(824): Homolog of NCBI NO: 6686888 NR Description: putative beta-galactosidase [Arabidopsis thaliana]
  misc_feature (736)..(824): Homolog of NCBI NO: 7939623 NR Description: putative beta-galactosidase [Lycopersicon
  misc_feature (589)..(668): Homolog of NCBI NO: 22329897 NR Description: similar to glycosyl hydrolase family 35
  misc_feature (7)..(603): Homolog of NCBI NO: 12597826 NR Description: hypothetical protein [Arabidopsis thaliana]
  misc_feature (696)..(824): Homolog of NCBI NO: 12597826 NR Description: hypothetical protein [Arabidopsis thaliana]
  misc_feature (589)..(672): Homolog of NCBI NO: 12597826 NR Description: hypothetical protein [Arabidopsis thaliana]
  misc_feature (3)..(603): Homolog of NCBI NO: 22329897 NR Description: similar to glycosyl hydrolase family 35
  misc_feature (685)..(824): Homolog of NCBI NO: 22329897 NR Description: similar to glycosyl hydrolase family 35
  misc_feature (26)..(740): Homolog of NCBI NO: 7939623 NR Description: putative beta-galactosidase [Lycopersicon
  misc_feature (6)..(735): Homolog of NCBI NO: 6686888 NR Description: putative beta-galactosidase [Arabidopsis thaliana]
  misc_feature (685)..(824): Homolog of NCBI NO: 22329897 NR Description: similar to glycosyl hydrolase family 35
  misc_feature (3)..(603): Homolog of NCBI NO: 22329897 NR Description: similar to glycosyl hydrolase family 35
  misc_feature (589)..(672): Homolog of NCBI NO: 12597826 NR Description: hypothetical protein [Arabidopsis thaliana]
  misc_feature (696)..(824): Homolog of NCBI NO: 12597826 NR Description: hypothetical protein [Arabidopsis thaliana]
  misc_feature (7)..(603): Homolog of NCBI NO: 12597826 NR Description: hypothetical protein [Arabidopsis thaliana]
MKHFTRLLSLFFILITSLSLAKSTIVSHDERAITINGKRRILLSGSIHYPRSTADMWPDLINKAKDGGLDAIETYVFWNAHEPKRREYDFSGNLDVVRFIKTIQDAGLYSVLRIGPYVCAEWNYGGFPVWLHNMPNMKFRTVNPSFMNEMQNFTTKIVKMMKEEKLFASQGGPIILAQIENEYGNVISSYGAEGKAYIDWCANMANSLDIGVPWLMCQQPNAPQPMLETCNGFYCDQYEPTNPSTPKMWTENWTGWFKNWGGKHPYRTAEDLAFSVARFFQTGGTFQNYYMYHGGTNFGRVAGGPYITTSYDYHAPLDEFGNLNQPKWGHLKQLHTVLKSMEKSLTYGNISRIDLGNSIKATIYTTKEGSSCFIGNVNATADALVNFKGKDYHVPAWSVSVLPDCDKEAYNTAKVNTQTSIMTEDSSKPERLEWTWRPESAQKMILKGSGDLIAKGLVDQKDVTNDASDYLWYMTRLHLDKKDPLWSRNMTLRVHSNAHVLHAYVNGKYVGNQFVKDGKFDYRFERKVNHLVHGTNHISLLSVSVGLQNYGPFFESGPTGINGPVSLVGYKGEETIEKDLSQHQWDYKIGLNGYNDKLFSIKSVGHQKWANEKLPTGRMLTWYKAKFKAPLGKEPVIVDLNGLGKGEAWINGQSIGRYWPSFNSSDDGCKDECDYRGAYGSDKCAFMCGKPTQRWYHVPRSFLNASGHNTITLFEEMGGNPSMVNFKTVVVGTVCARAHEHNKVELSCHNRPISAVKFASFGNPLGHCGSFAVGTCQGDKDAAKTVAKECVGKLNCTVNVSSDTFGSTLDCGDSPKKLAVELEC

SEQ ID NO: 45774 - protein, 769 aa, Arabidopsis thaliana
  peptide (1)..(769): Ceres Seq. ID no. 12561128
  misc_feature (691)..(769): Pfam Name: Galactose binding lectin domain Pfam Description: Galactose binding lectin domain
  misc_feature (691)..(769): Pfam Name: Galactose binding lectin domain Pfam Description: Galactose binding lectin domain
  misc_feature (689)..(769): Homolog of NCBI NO: 6686888 NR Description: putative beta-galactosidase [Arabidopsis thaliana]
  misc_feature (1)..(680): Homolog of NCBI NO: 6686888 NR Description: putative beta-galactosidase [Arabidopsis thaliana]
  misc_feature (681)..(769): Homolog of NCBI NO: 7939623 NR Description: putative beta-galactosidase [Lycopersicon
  misc_feature (1)..(685): Homolog of NCBI NO: 7939623 NR Description: putative beta-galactosidase [Lycopersicon
  misc_feature (534)..(613): Homolog of NCBI NO: 22329897 NR Description: similar to glycosyl hydrolase family 35
  misc_feature (689)..(769): Homolog of NCBI NO: 6686888 NR Description: putative beta-galactosidase [Arabidopsis thaliana]
  misc_feature (681)..(769): Homolog of NCBI NO: 7939623 NR Description: putative beta-galactosidase [Lycopersicon
  misc_feature (534)..(613): Homolog of NCBI NO: 22329897 NR Description: similar to glycosyl hydrolase family 35
  misc_feature (1)..(548): Homolog of NCBI NO: 12597826 NR Description: hypothetical protein [Arabidopsis thaliana]
  misc_feature (641)..(769): Homolog of NCBI NO: 12597826 NR Description: hypothetical protein [Arabidopsis thaliana]
  misc_feature (534)..(617): Homolog of NCBI NO: 12597826 NR Description: hypothetical protein [Arabidopsis thaliana]
  misc_feature (1)..(548): Homolog of NCBI NO: 22329897 NR Description: similar to glycosyl hydrolase family 35
  misc_feature (630)..(769): Homolog of NCBI NO: 22329897 NR Description: similar to glycosyl hydrolase family 35
  misc_feature (1)..(685): Homolog of NCBI NO: 7939623 NR Description: putative beta-galactosidase [Lycopersicon
  misc_feature (1)..(680): Homolog of NCBI NO: 6686888 NR Description: putative beta-galactosidase [Arabidopsis thaliana]
  misc_feature (630)..(769): Homolog of NCBI NO: 22329897 NR Description: similar to glycosyl hydrolase family 35
  misc_feature (1)..(548): Homolog of NCBI NO: 22329897 NR Description: similar to glycosyl hydrolase family 35
  misc_feature (534)..(617): Homolog of NCBI NO: 12597826 NR Description: hypothetical protein [Arabidopsis thaliana]
  misc_feature (641)..(769): Homolog of NCBI NO: 12597826 NR Description: hypothetical protein [Arabidopsis thaliana]
  misc_feature (1)..(548): Homolog of NCBI NO: 12597826 NR Description: hypothetical protein [Arabidopsis thaliana]
MWPDLINKAKDGGLDAIETYVFWNAHEPKRREYDFSGNLDVVRFIKTIQDAGLYSVLRIGPYVCAEWNYGGFPVWLHNMPNMKFRTVNPSFMNEMQNFTTKIVKMMKEEKLFASQGGPIILAQIENEYGNVISSYGAEGKAYIDWCANMANSLDIGVPWLMCQQPNAPQPMLETCNGFYCDQYEPTNPSTPKMWTENWTGWFKNWGGKHPYRTAEDLAFSVARFFQTGGTFQNYYMYHGGTNFGRVAGGPYITTSYDYHAPLDEFGNLNQPKWGHLKQLHTVLKSMEKSLTYGNISRIDLGNSIKATIYTTKEGSSCFIGNVNATADALVNFKGKDYHVPAWSVSVLPDCDKEAYNTAKVNTQTSIMTEDSSKPERLEWTWRPESAQKMILKGSGDLIAKGLVDQKDVTNDASDYLWYMTRLHLDKKDPLWSRNMTLRVHSNAHVLHAYVNGKYVGNQFVKDGKFDYRFERKVNHLVHGTNHISLLSVSVGLQNYGPFFESGPTGINGPVSLVGYKGEETIEKDLSQHQWDYKIGLNGYNDKLFSIKSVGHQKWANEKLPTGRMLTWYKAKFKAPLGKEPVIVDLNGLGKGEAWINGQSIGRYWPSFNSSDDGCKDECDYRGAYGSDKCAFMCGKPTQRWYHVPRSFLNASGHNTITLFEEMGGNPSMVNFKTVVVGTVCARAHEHNKVELSCHNRPISAVKFASFGNPLGHCGSFAVGTCQGDKDAAKTVAKECVGKLNCTVNVSSDTFGSTLDCGDSPKKLAVELEC

SEQ ID NO: 45775 - protein, 691 aa, Arabidopsis thaliana
  peptide (1)..(691): Ceres Seq. ID no. 12561129
  misc_feature (613)..(691): Pfam Name: Galactose binding lectin domain Pfam Description: Galactose binding lectin domain
  misc_feature (613)..(691): Pfam Name: Galactose binding lectin domain Pfam Description: Galactose binding lectin domain
  misc_feature (611)..(691): Homolog of NCBI NO: 6686888 NR Description: putative beta-galactosidase [Arabidopsis thaliana]
  misc_feature (1)..(602): Homolog of NCBI NO: 6686888 NR Description: putative beta-galactosidase [Arabidopsis thaliana]
  misc_feature (603)..(691): Homolog of NCBI NO: 7939623 NR Description: putative beta-galactosidase [Lycopersicon
  misc_feature (1)..(607): Homolog of NCBI NO: 7939623 NR Description: putative beta-galactosidase [Lycopersicon
  misc_feature (456)..(535): Homolog of NCBI NO: 22329897 NR Description: similar to glycosyl hydrolase family 35
  misc_feature (611)..(691): Homolog of NCBI NO: 6686888 NR Description: putative beta-galactosidase [Arabidopsis thaliana]
  misc_feature (603)..(691): Homolog of NCBI NO: 7939623 NR Description: putative beta-galactosidase [Lycopersicon
  misc_feature (456)..(535): Homolog of NCBI NO: 22329897 NR Description: similar to glycosyl hydrolase family 35
  misc_feature (1)..(470): Homolog of NCBI NO: 12597826 NR Description: hypothetical protein [Arabidopsis thaliana]
  misc_feature (563)..(691): Homolog of NCBI NO: 12597826 NR Description: hypothetical protein [Arabidopsis thaliana]
  misc_feature (456)..(539): Homolog of NCBI NO: 12597826 NR Description: hypothetical protein [Arabidopsis thaliana]
  misc_feature (1)..(470): Homolog of NCBI NO: 22329897 NR Description: similar to glycosyl hydrolase family 35
  misc_feature (552)..(691): Homolog of NCBI NO: 22329897 NR Description: similar to glycosyl hydrolase family 35
  misc_feature (1)..(607): Homolog of NCBI NO: 7939623 NR Description: putative beta-galactosidase [Lycopersicon
  misc_feature (1)..(602): Homolog of NCBI NO: 6686888 NR Description: putative beta-galactosidase [Arabidopsis thaliana]
  misc_feature (552)..(691): Homolog of NCBI NO: 22329897 NR Description: similar to glycosyl hydrolase family 35
  misc_feature (1)..(470): Homolog of NCBI NO: 22329897 NR Description: similar to glycosyl hydrolase family 35
  misc_feature (456)..(539): Homolog of NCBI NO: 12597826 NR Description: hypothetical protein [Arabidopsis thaliana]
  misc_feature (563)..(691): Homolog of NCBI NO: 12597826 NR Description: hypothetical protein [Arabidopsis thaliana]
  misc_feature (1)..(470): Homolog of NCBI NO: 12597826 NR Description: hypothetical protein [Arabidopsis thaliana]
MPNMKFRTVNPSFMNEMQNFTTKIVKMMKEEKLFASQGGPIILAQIENEYGNVISSYGAEGKAYIDWCANMANSLDIGVPWLMCQQPNAPQPMLETCNGFYCDQYEPTNPSTPKMWTENWTGWFKNWGGKHPYRTAEDLAFSVARFFQTGGTFQNYYMYHGGTNFGRVAGGPYITTSYDYHAPLDEFGNLNQPKWGHLKQLHTVLKSMEKSLTYGNISRIDLGNSIKATIYTTKEGSSCFIGNVNATADALVNFKGKDYHVPAWSVSVLPDCDKEAYNTAKVNTQTSIMTEDSSKPERLEWTWRPESAQKMILKGSGDLIAKGLVDQKDVTNDASDYLWYMTRLHLDKKDPLWSRNMTLRVHSNAHVLHAYVNGKYVGNQFVKDGKFDYRFERKVNHLVHGTNHISLLSVSVGLQNYGPFFESGPTGINGPVSLVGYKGEETIEKDLSQHQWDYKIGLNGYNDKLFSIKSVGHQKWANEKLPTGRMLTWYKAKFKAPLGKEPVIVDLNGLGKGEAWINGQSIGRYWPSFNSSDDGCKDECDYRGAYGSDKCAFMCGKPTQRWYHVPRSFLNASGHNTITLFEEMGGNPSMVNFKTVVVGTVCARAHEHNKVELSCHNRPISAVKFASFGNPLGHCGSFAVGTCQGDKDAAKTVAKECVGKLNCTVNVSSDTFGSTLDCGDSPKKLAVELEC

SEQ ID NO: 45776 - DNA, 2271 bp, Arabidopsis thaliana
  misc_feature (1)..(2271): Ceres Seq. ID no. 14309805
  misc_feature: MA Experiment ID: 20000171 Result: Down-regulated in Transcription
  misc_feature: MA Experiment 20000171 PARAMETER Experiment Name: At_42deg_Heat_P Parameter: Age (day) Value: 14
  misc_feature: MA Experiment 20000171 PARAMETER Experiment Name: At_42deg_Heat_P Parameter: Organism Value: A. thaliana
  misc_feature: MA Experiment 20000171 PARAMETER Experiment Name: At_42deg_Heat_P Parameter: Plant Line Value: WS
  misc_feature: MA Experiment 20000171 PARAMETER Experiment Name: At_42deg_Heat_P Parameter: Temperature (deg C) Value: 42 vs. 22
  misc_feature: MA Experiment 20000171 PARAMETER Experiment Name: At_42deg_Heat_P Parameter: Timepoint (hr) Value: 1
  misc_feature: MA Experiment 20000171 PARAMETER Experiment Name: At_42deg_Heat_P Parameter: Tissue Value: Aerial
  misc_feature: MA Experiment ID: 20000173 Result: Down-regulated in Transcription
  misc_feature: MA Experiment 20000173 PARAMETER Experiment Name: At_42deg_Heat_P Parameter: Age (day) Value: 14
  misc_feature: MA Experiment 20000173 PARAMETER Experiment Name: At_42deg_Heat_P Parameter: Organism Value: A. thaliana
  misc_feature: MA Experiment 20000173 PARAMETER Experiment Name: At_42deg_Heat_P Parameter: Plant Line Value: WS
  misc_feature: MA Experiment 20000173 PARAMETER Experiment Name: At_42deg_Heat_P Parameter: Temperature (deg C) Value: 42 vs. 22
  misc_feature: MA Experiment 20000173 PARAMETER Experiment Name: At_42deg_Heat_P Parameter: Timepoint (hr) Value: 6
  misc_feature: MA Experiment 20000173 PARAMETER Experiment Name: At_42deg_Heat_P Parameter: Tissue Value: Aerial
  misc_feature: MA Experiment ID: 20000180 Result: Down-regulated in Transcription
  misc_feature: MA Experiment 20000180 PARAMETER Experiment Name: At_Germinating_Seeds_P Parameter: Age (hr) Value: 24 vs. 0
  misc_feature: MA Experiment 20000180 PARAMETER Experiment Name: At_Germinating_Seeds_P Parameter: Tissue Value: Germinating Seeds
  misc_feature: MA Experiment ID: 20000227 Result: Up-regulated in Transcription
  misc_feature: MA Experiment 20000227 PARAMETER Experiment Name: At_Root-Tips-vs-Tops_P Parameter: Tissue Value: Root Tips vs. Root Tops
  misc_feature: MA Experiment ID: 20000437 Result: Down-regulated in Transcription
  misc_feature: MA Experiment 20000437 PARAMETER Experiment Name: At_Drought_P Parameter: Age (day) Value: 8
  misc_feature: MA Experiment 20000437 PARAMETER Experiment Name: At_Drought_P Parameter: Organism Value: A. thaliana
  misc_feature: MA Experiment 20000437 PARAMETER Experiment Name: At_Drought_P Parameter: Plant Line Value: WS
  misc_feature: MA Experiment 20000437 PARAMETER Experiment Name: At_Drought_P Parameter: Timepoint (hr) Value: 24
  misc_feature: MA Experiment 20000437 PARAMETER Experiment Name: At_Drought_P Parameter: Tissue Value: Whole Plant
  misc_feature: MA Experiment 20000437 PARAMETER Experiment Name: At_Drought_P Parameter: Treatment Value: Drought vs. No Drought
  misc_feature: MA Experiment ID: 20000794 Result: Down-regulated in Transcription
  misc_feature: MA Experiment 20000794 PARAMETER Experiment Name: At_Petals_P Parameter: Age (day) Value: 23-25 days
  misc_feature: MA Experiment 20000794 PARAMETER Experiment Name: At_Petals_P Parameter: Plant Line Value: WS
  misc_feature: MA Experiment 20000794 PARAMETER Experiment Name: At_Petals_P Parameter: Tissue Value: Petals vs. Whole plant
  misc_feature: MA Experiment ID: 20001247 Result: Up-regulated in Transcription
  misc_feature: MA Experiment 20001247 PARAMETER Experiment Name: At_Far-red-induction_P Parameter: Age (day) Value: 7
  misc_feature: MA Experiment 20001247 PARAMETER Experiment Name: At_Far-red-induction_P Parameter: Light Value: Far-red vs. White
  misc_feature: MA Experiment 20001247 PARAMETER Experiment Name: At_Far-red-induction_P Parameter: Organism Value: A. thaliana
  misc_feature: MA Experiment 20001247 PARAMETER Experiment Name: At_Far-red-induction_P Parameter: Plant Line Value: Columbia
  misc_feature: MA Experiment 20001247 PARAMETER Experiment Name: At_Far-red-induction_P Parameter: Timepoint (hr) Value: 1
  misc_feature: MA Experiment 20001247 PARAMETER Experiment Name: At_Far-red-induction_P Parameter: Tissue Value: Whole Plant
  misc_feature: MA Experiment ID: 20001554 Result: Down-regulated in Transcription
  misc_feature: MA Experiment 20001554 PARAMETER Experiment Name: At_Drought_Soil_Dry_P Parameter: Age (day) Value: 21
  misc_feature: MA Experiment 20001554 PARAMETER Experiment Name: At_Drought_Soil_Dry_P Parameter: Organism Value: A. thaliana
  misc_feature: MA Experiment 20001554 PARAMETER Experiment Name: At_Drought_Soil_Dry_P Parameter: Plant Line Value: WS
  misc_feature: MA Experiment 20001554 PARAMETER Experiment Name: At_Drought_Soil_Dry_P Parameter: Post Timepoint (hr) Value: None
  misc_feature: MA Experiment 20001554 PARAMETER Experiment Name: At_Drought_Soil_Dry_P Parameter: Post-Treatment Value: None
  misc_feature: MA Experiment 20001554 PARAMETER Experiment Name: At_Drought_Soil_Dry_P Parameter: Timepoint (day) Value: 7
  misc_feature: MA Experiment 20001554 PARAMETER Experiment Name: At_Drought_Soil_Dry_P Parameter: Treatment Value: Drought vs. No Drought
  misc_feature: MA Experiment ID: 20001555 Result: Down-regulated in Transcription
  misc_feature: MA Experiment 20001555 PARAMETER Experiment Name: At_Drought_Soil_Dry_P Parameter: Age (day) Value: 24
  misc_feature: MA Experiment 20001555 PARAMETER Experiment Name: At_Drought_Soil_Dry_P Parameter: Organism Value: A. thaliana
  misc_feature: MA Experiment 20001555 PARAMETER Experiment Name: At_Drought_Soil_Dry_P Parameter: Plant Line Value: WS
  misc_feature: MA Experiment 20001555 PARAMETER Experiment Name: At_Drought_Soil_Dry_P Parameter: Post Timepoint (hr) Value: None
  misc_feature: MA Experiment 20001555 PARAMETER Experiment Name: At_Drought_Soil_Dry_P Parameter: Post-Treatment Value: None
  misc_feature: MA Experiment 20001555 PARAMETER Experiment Name: At_Drought_Soil_Dry_P Parameter: Timepoint (day) Value: 10
  misc_feature: MA Experiment 20001555 PARAMETER Experiment Name: At_Drought_Soil_Dry_P Parameter: Treatment Value: Drought vs. No Drought
  misc_feature: MA Experiment ID: 20001556 Result: Down-regulated in Transcription
  misc_feature: MA Experiment 20001556 PARAMETER Experiment Name: At_Drought_Soil_Dry_P Parameter: Age (day) Value: 26
  misc_feature: MA Experiment 20001556 PARAMETER Experiment Name: At_Drought_Soil_Dry_P Parameter: Organism Value: A. thaliana
  misc_feature: MA Experiment 20001556 PARAMETER Experiment Name: At_Drought_Soil_Dry_P Parameter: Plant Line Value: WS
  misc_feature: MA Experiment 20001556 PARAMETER Experiment Name: At_Drought_Soil_Dry_P Parameter: Post Timepoint (hr) Value: None
  misc_feature: MA Experiment 20001556 PARAMETER Experiment Name: At_Drought_Soil_Dry_P Parameter: Post-Treatment Value: None
  misc_feature: MA Experiment 20001556 PARAMETER Experiment Name: At_Drought_Soil_Dry_P Parameter: Timepoint (day) Value: 12
  misc_feature: MA Experiment 20001556 PARAMETER Experiment Name: At_Drought_Soil_Dry_P Parameter: Treatment Value: Drought vs. No Drought
  misc_feature: MA Experiment ID: 20001557 Result: Up-regulated in Transcription
  misc_feature: MA Experiment 20001557 PARAMETER Experiment Name: At_Drought_Soil_Dry_P Parameter: Age (day) Value: 27
  misc_feature: MA Experiment 20001557 PARAMETER Experiment Name: At_Drought_Soil_Dry_P Parameter: Organism Value: A. thaliana
  misc_feature: MA Experiment 20001557 PARAMETER Experiment Name: At_Drought_Soil_Dry_P Parameter: Plant Line Value: WS
  misc_feature: MA Experiment 20001557 PARAMETER Experiment Name: At_Drought_Soil_Dry_P Parameter: Post Timepoint (hr) Value: 3
  misc_feature: MA Experiment 20001557 PARAMETER Experiment Name: At_Drought_Soil_Dry_P Parameter: Post-Treatment Value: Re-Water vs. No Drought
  misc_feature: MA Experiment 20001557 PARAMETER Experiment Name: At_Drought_Soil_Dry_P Parameter: Timepoint (day) Value: 13
  misc_feature: MA Experiment 20001557 PARAMETER Experiment Name: At_Drought_Soil_Dry_P Parameter: Treatment Value: Drought vs. No Drought
  misc_feature: MA Experiment ID: 20001558 Result: Up-regulated in Transcription
  misc_feature: MA Experiment 20001558 PARAMETER Experiment Name: At_Drought_Soil_Dry_P Parameter: Age (day) Value: 27
  misc_feature: MA Experiment 20001558 PARAMETER Experiment Name: At_Drought_Soil_Dry_P Parameter: Organism Value: A. thaliana
  misc_feature: MA Experiment 20001558 PARAMETER Experiment Name: At_Drought_Soil_Dry_P Parameter: Plant Line Value: WS
  misc_feature: MA Experiment 20001558 PARAMETER Experiment Name: At_Drought_Soil_Dry_P Parameter: Post Timepoint (hr) Value: 6
  misc_feature: MA Experiment 20001558 PARAMETER Experiment Name: At_Drought_Soil_Dry_P Parameter: Post-Treatment Value: Re-Water vs. No Drought
  misc_feature: MA Experiment 20001558 PARAMETER Experiment Name: At_Drought_Soil_Dry_P Parameter: Timepoint (day) Value: 13
  misc_feature: MA Experiment 20001558 PARAMETER Experiment Name: At_Drought_Soil_Dry_P Parameter: Treatment Value: Drought vs. No Drought
  misc_feature: MA Experiment ID: 20001904 Result: Down-regulated in Transcription
  misc_feature: MA Experiment 20001904 PARAMETER Experiment Name: At_Drought_Reproduction_P Parameter: Age (day) Value: 37
  misc_feature: MA Experiment 20001904 PARAMETER Experiment Name: At_Drought_Reproduction_P Parameter: Organism Value: A. thaliana
  misc_feature: MA Experiment 20001904 PARAMETER Experiment Name: At_Drought_Reproduction_P Parameter: Plant Line Value: WS
  misc_feature: MA Experiment 20001904 PARAMETER Experiment Name: At_Drought_Reproduction_P Parameter: Timepoint (day) Value: 7
  misc_feature: MA Experiment 20001904 PARAMETER Experiment Name: At_Drought_Reproduction_P Parameter: Tissue Value: Rosettes
  misc_feature: MA Experiment 20001904 PARAMETER Experiment Name: At_Drought_Reproduction_P Parameter: Treatment Value: Drought vs. No Drought
agagcccaacattggattcctcttctttgaccattcctctctacctgaataacccgttaatctctctctgtccctttcttcttcttttttcaagaacaataaaaaaatgtctcaagattctgcaactactactccgccgccacctttaacctccgacgtttcaatgccttccggtgaggaagatgagccaaagcatgtaacattggaagaagaagcaccggtgacttcggagacaaatctgaagctacctttaatgccggagctagaggagtcaaatcatacggcggaggtagtttcagagaaggtgacgccggagacgatgactttggagtcagaaggtctcaaccacgcggcggaggattcaaagcagacacatgaagtaacgccggaggcagagactttgaagctagaggttctcaaccacacggcggaggattcagagcagacacatgaagtgacgccggagacagagacagtgaagtcagagtttctcaaccacgtggcggaggattcagagcagacacatgaagtgacgccggagacagagactgtgaagtcagaggttctcaaccatgcggcggaggattcagagcagccacgtggagtgacgccgacgccggagacagaaacttctgagccaaacacgtcattgcttgtaacttccgagacagaagagcctaaccatgcggcggaggattattcagagacagagccatcacagaaactaatgttggagcagaggagaaagtacatggaagtagaagattggacagagccagaactaccagatgaagcggtgttagaagctgcagcgtcagtccctgagccaaagcaaccagagcctcagacaccaccaccaccaccatctactactacttccactgttgcatctagatctttagccgaaatgatgaacagagaagaagcagaagcagaagagaaacaaaagattcagattcctcgtagtctcggttcattcaaagaagaaacaaacaaaatctccgatctttcagaaacagagttaaacgcacttcaagagcttcgtcaccttcttcaagtatcacaagattcaagcaaaacctctatatggggtgtgccatttctcaaagacgacagaaccgacgtcgttttgttaaagtttctaagagcaagagactttaaacctcaagaagcttactcaatgctaaacaagacactccaatggagaatcgacttcaacatcgaagagcttctagacgaaaacctcggtgacgatttagacaaagttgtgttcatgcaaggacaagacaaggagaatcatcctgtctgtttcaatgtctacggtgagtttcagaacaaagatctttatcagaaaacgttttcagatgaagagaagagagaacggttcttgagatggaggattcagtttcttgaaaagagtatcaggaatcttgattttgtagctggtggtgtttccacgatatgtcaagtaaatgatcttaagaattctccaggacctggtaagactgagcttaggttagctactaagcaagctcttcatcttcttcaagacaattaccctgagtttgtctctaaacagatattcatcaatgttccatggtggtaccttgcgttctataggattattagtccttttatgtcacaaagatcaaagagcaaactagttttcgcaggtccttcaagatctgcagaaacccttctcaggtacatatcacccgaacatgtcccggttcagtatggtggactaagtgtggataattgcgagtgtaactcggatttcacacacgatgatatcgctaccgagatcactattaaaccaactactaaacaaaccgtcgagattattgtttacgagaaatgtacaatcgtgtgggagataagagtagtgggatgggaggtttcgtatggagcggagtttgtgccggagaacaaagaaggttatacagtgatcattcagaaaccgaggaagatgactgcgaaaaatgaactggtggtgtctcatagcttcaaagttggagaagttggcaggattttgctaactgttgataacccgacttcaaccaagaaaatgcttatctacaggttcaaggttaagcctttagcttgtgagtaacaaaagtgcgcatctttcttcgagtgtttcttagtttagaacttgatcatatgattgttgattgtgttttgtttttctctcttttaccgacttatatgtttgtgtggttctgtttgctaaattcttttgttttatattgtattttgctcttatttttt

SEQ ID NO: 45777 - protein, 668 aa, Arabidopsis thaliana
  peptide (1)..(668): Ceres Seq. ID no. 14309806
  misc_feature (389)..(555): Pfam Name: CRAL/TRIO domain Pfam Description: CRAL/TRIO domain
  misc_feature (295)..(578): Homolog of NCBI NO: 29336071 NR Description: SEC14-like 2 [Bos taurus]
  misc_feature (295)..(578): Homolog of NCBI NO: 21542233 NR Description: SEC14-like protein 2 (Alpha-tocopherol associated
  misc_feature (91)..(663): Homolog of NCBI NO: 15218382 NR Description: cytosolic factor -related [Arabidopsis thaliana]
  misc_feature (114)..(663): Homolog of NCBI NO: 14334978 NR Description: unknown protein [Arabidopsis thaliana]
  misc_feature (114)..(663): Homolog of NCBI NO: 18397616 NR Description: expressed protein [Arabidopsis thaliana]
  misc_feature (13)..(663): Homolog of NCBI NO: 15219901 NR Description: expressed protein [Arabidopsis thaliana]
  misc_feature (54)..(663): Homolog of NCBI NO: 34907288 NR Description: contains ESTs
  misc_feature (196)..(666): Homolog of NCBI NO: 8894548 NR Description: hypothetical protein [Cicer arietinum]
  misc_feature (284)..(665): Homolog of NCBI NO: 15081614 NR Description: At1g72160/T9N14_8 [Arabidopsis thaliana]
  misc_feature (177)..(665): Homolog of NCBI NO: 15218383 NR Description: cytosolic factor -related [Arabidopsis thaliana]
MSQDSATTTPPPPLTSDVSMPSGEEDEPKHVTLEEEAPVTSETNLKLPLMPELEESNHTAEVVSEKVTPETMTLESEGLNHAAEDSKQTHEVTPEAETLKLEVLNHTAEDSEQTHEVTPETETVKSEFLNHVAEDSEQTHEVTPETETVKSEVLNHAAEDSEQPRGVTPTPETETSEPNTSLLVTSETEEPNHAAEDYSETEPSQKLMLEQRRKYMEVEDWTEPELPDEAVLEAAASVPEPKQPEPQTPPPPPSTTTSTVASRSLAEMMNREEAEAEEKQKIQIPRSLGSFKEETNKISDLSETELNALQELRHLLQVSQDSSKTSIWGVPFLKDDRTDVVLLKFLRARDFKPQEAYSMLNKTLQWRIDFNIEELLDENLGDDLDKVVFMQGQDKENHPVCFNVYGEFQNKDLYQKTFSDEEKRERFLRWRIQFLEKSIRNLDFVAGGVSTICQVNDLKNSPGPGKTELRLATKQALHLLQDNYPEFVSKQIFINVPWWYLAFYRIISPFMSQRSKSKLVFAGPSRSAETLLRYISPEHVPVQYGGLSVDNCECNSDFTHDDIATEITIKPTTKQTVEIIVYEKCTIVWEIRVVGWEVSYGAEFVPENKEGYTVIIQKPRKMTAKNELVVSHSFKVGEVGRILLTVDNPTSTKKMLIYRFKVKPLACE

SEQ ID NO: 45778 - protein, 649 aa, Arabidopsis thaliana
  peptide (1)..(649): Ceres Seq. ID no. 14309807
  misc_feature (370)..(536): Pfam Name: CRAL/TRIO domain Pfam Description: CRAL/TRIO domain
  misc_feature (276)..(559): Homolog of NCBI NO: 29336071 NR Description: SEC14-like 2 [Bos taurus]
  misc_feature (276)..(559): Homolog of NCBI NO: 21542233 NR Description: SEC14-like protein 2 (Alpha-tocopherol associated
  misc_feature (72)..(644): Homolog of NCBI NO: 15218382 NR Description: cytosolic factor -related [Arabidopsis thaliana]
  misc_feature (95)..(644): Homolog of NCBI NO: 14334978 NR Description: unknown protein [Arabidopsis thaliana]
  misc_feature (95)..(644): Homolog of NCBI NO: 18397616 NR Description: expressed protein [Arabidopsis thaliana]
  misc_feature (1)..(644): Homolog of NCBI NO: 15219901 NR Description: expressed protein [Arabidopsis thaliana]
  misc_feature (35)..(644): Homolog of NCBI NO: 34907288 NR Description: contains ESTs
  misc_feature (177)..(647): Homolog of NCBI NO: 8894548 NR Description: hypothetical protein [Cicer arietinum]
  misc_feature (265)..(646): Homolog of NCBI NO: 15081614 NR Description: At1g72160/T9N14_8 [Arabidopsis thaliana]
  misc_feature (158)..(646): Homolog of NCBI NO: 15218383 NR Description: cytosolic factor -related [Arabidopsis thaliana]
MPSGEEDEPKHVTLEEEAPVTSETNLKLPLMPELEESNHTAEVVSEKVTPETMTLESEGLNHAAEDSKQTHEVTPEAETLKLEVLNHTAEDSEQTHEVTPETETVKSEFLNHVAEDSEQTHEVTPETETVKSEVLNHAAEDSEQPRGVTPTPETETSEPNTSLLVTSETEEPNHAAEDYSETEPSQKLMLEQRRKYMEVEDWTEPELPDEAVLEAAASVPEPKQPEPQTPPPPPSTTTSTVASRSLAEMMNREEAEAEEKQKIQIPRSLGSFKEETNKISDLSETELNALQELRHLLQVSQDSSKTSIWGVPFLKDDRTDVVLLKFLRARDFKPQEAYSMLNKTLQWRIDFNIEELLDENLGDDLDKVVFMQGQDKENHPVCFNVYGEFQNKDLYQKTFSDEEKRERFLRWRIQFLEKSIRNLDFVAGGVSTICQVNDLKNSPGPGKTELRLATKQALHLLQDNYPEFVSKQIFINVPWWYLAFYRIISPFMSQRSKSKLVFAGPSRSAETLLRYISPEHVPVQYGGLSVDNCECNSDFTHDDIATEITIKPTTKQTVEIIVYEKCTIVWEIRVVGWEVSYGAEFVPENKEGYTVIIQKPRKMTAKNELVVSHSFKVGEVGRILLTVDNPTSTKKMLIYRFKVKPLACE

SEQ ID NO: 45779 - protein, 619 aa, Arabidopsis thaliana
  peptide (1)..(619): Ceres Seq. ID no. 14309808
  misc_feature (340)..(506): Pfam Name: CRAL/TRIO domain Pfam Description: CRAL/TRIO domain
  misc_feature (246)..(529): Homolog of NCBI NO: 29336071 NR Description: SEC14-like 2 [Bos taurus]
  misc_feature (246)..(529): Homolog of NCBI NO: 21542233 NR Description: SEC14-like protein 2 (Alpha-tocopherol associated
  misc_feature (42)..(614): Homolog of NCBI NO: 15218382 NR Description: cytosolic factor -related [Arabidopsis thaliana]
  misc_feature (65)..(614): Homolog of NCBI NO: 14334978 NR Description: unknown protein [Arabidopsis thaliana]
  misc_feature (65)..(614): Homolog of NCBI NO: 18397616 NR Description: expressed protein [Arabidopsis thaliana]
  misc_feature (1)..(614): Homolog of NCBI NO: 15219901 NR Description: expressed protein [Arabidopsis thaliana]
  misc_feature (5)..(614): Homolog of NCBI NO: 34907288 NR Description: contains ESTs
  misc_feature (147)..(617): Homolog of NCBI NO: 8894548 NR Description: hypothetical protein [Cicer arietinum]
  misc_feature (235)..(616): Homolog of NCBI NO: 15081614 NR Description: At1g72160/T9N14_8 [Arabidopsis thaliana]
  misc_feature (128)..(616): Homolog of NCBI NO: 15218383 NR Description: cytosolic factor -related [Arabidopsis thaliana]
MPELEESNHTAEVVSEKVTPETMTLESEGLNHAAEDSKQTHEVTPEAETLKLEVLNHTAEDSEQTHEVTPETETVKSEFLNHVAEDSEQTHEVTPETETVKSEVLNHAAEDSEQPRGVTPTPETETSEPNTSLLVTSETEEPNHAAEDYSETEPSQKLMLEQRRKYMEVEDWTEPELPDEAVLEAAASVPEPKQPEPQTPPPPPSTTTSTVASRSLAEMMNREEAEAEEKQKIQIPRSLGSFKEETNKISDLSETELNALQELRHLLQVSQDSSKTSIWGVPFLKDDRTDVVLLKFLRARDFKPQEAYSMLNKTLQWRIDFNIEELLDENLGDDLDKVVFMQGQDKENHPVCFNVYGEFQNKDLYQKTFSDEEKRERFLRWRIQFLEKSIRNLDFVAGGVSTICQVNDLKNSPGPGKTELRLATKQALHLLQDNYPEFVSKQIFINVPWWYLAFYRIISPFMSQRSKSKLVFAGPSRSAETLLRYISPEHVPVQYGGLSVDNCECNSDFTHDDIATEITIKPTTKQTVEIIVYEKCTIVWEIRVVGWEVSYGAEFVPENKEGYTVIIQKPRKMTAKNELVVSHSFKVGEVGRILLTVDNPTSTKKMLIYRFKVKPLACE

SEQ ID NO: 45780 - DNA, 1223 bp, Arabidopsis thaliana
  misc_feature (1)..(1223): Ceres Seq. ID no. 13591684
  misc_feature: MA Experiment ID: 20000185 Result: Up-regulated in Transcription
  misc_feature: MA Experiment 20000185 PARAMETER Experiment Name: At_Roots__P Parameter: Age (day) Value: 7 vs. 21
  misc_feature: MA Experiment 20000185 PARAMETER Experiment Name: At_Roots__P Parameter: Organism Value: A. thaliana
  misc_feature: MA Experiment 20000185 PARAMETER Experiment Name: At_Roots__P Parameter: Tissue Value: Roots vs. Whole Plant
  misc_feature: MA Experiment ID: 20000265 Result: Up-regulated in Transcription
  misc_feature: MA Experiment 20000265 PARAMETER Experiment Name: At_Open_Flower_P Parameter: Age (day) Value: 21
  misc_feature: MA Experiment 20000265 PARAMETER Experiment Name: At_Open_Flower_P Parameter: Plant Line Value: WS
  misc_feature: MA Experiment 20000265 PARAMETER Experiment Name: At_Open_Flower_P Parameter: Tissue Value: Closed Flower vs. Whole Plant
  misc_feature: MA Experiment ID: 20000286 Result: Up-regulated in Transcription
  misc_feature: MA Experiment 20000286 PARAMETER Experiment Name: At_Open_Flower_P Parameter: Age (day) Value: 21
  misc_feature: MA Experiment 20000286 PARAMETER Experiment Name: At_Open_Flower_P Parameter: Plant Line Value: WS
  misc_feature: MA Experiment 20000286 PARAMETER Experiment Name: At_Open_Flower_P Parameter: Tissue Value: Half Open vs. Whole Plant
  misc_feature: MA Experiment ID: 20000794 Result: Up-regulated in Transcription
  misc_feature: MA Experiment 20000794 PARAMETER Experiment Name: At_Petals_P Parameter: Age (day) Value: 23-25 days
  misc_feature: MA Experiment 20000794 PARAMETER Experiment Name: At_Petals_P Parameter: Plant Line Value: WS
  misc_feature: MA Experiment 20000794 PARAMETER Experiment Name: At_Petals_P Parameter: Tissue Value: Petals vs. Whole plant
  misc_feature: MA Experiment ID: 20001451 Result: Down-regulated in Transcription
  misc_feature: MA Experiment 20001451 PARAMETER Experiment Name: At_Far-red-induction_P Parameter: Age (day) Value: 7
  misc_feature: MA Experiment 20001451 PARAMETER Experiment Name: At_Far-red-induction_P Parameter: Light Value: Far-red vs. White
  misc_feature: MA Experiment 20001451 PARAMETER Experiment Name: At_Far-red-induction_P Parameter: Organism Value: A. thaliana
  misc_feature: MA Experiment 20001451 PARAMETER Experiment Name: At_Far-red-induction_P Parameter: Plant Line Value: Columbia
  misc_feature: MA Experiment 20001451 PARAMETER Experiment Name: At_Far-red-induction_P Parameter: Timepoint (hr) Value: 24
  misc_feature: MA Experiment 20001451 PARAMETER Experiment Name: At_Far-red-induction_P Parameter: Tissue Value: Whole Plant
  misc_feature: MA Experiment ID: 20001555 Result: Up-regulated in Transcription
  misc_feature: MA Experiment 20001555 PARAMETER Experiment Name: At_Drought_Soil_Dry_P Parameter: Age (day) Value: 24
  misc_feature: MA Experiment 20001555 PARAMETER Experiment Name: At_Drought_Soil_Dry_P Parameter: Organism Value: A. thaliana
  misc_feature: MA Experiment 20001555 PARAMETER Experiment Name: At_Drought_Soil_Dry_P Parameter: Plant Line Value: WS
  misc_feature: MA Experiment 20001555 PARAMETER Experiment Name: At_Drought_Soil_Dry_P Parameter: Post Timepoint (hr) Value: None
  misc_feature: MA Experiment 20001555 PARAMETER Experiment Name: At_Drought_Soil_Dry_P Parameter: Post-Treatment Value: None
  misc_feature: MA Experiment 20001555 PARAMETER Experiment Name: At_Drought_Soil_Dry_P Parameter: Timepoint (day) Value: 10
  misc_feature: MA Experiment 20001555 PARAMETER Experiment Name: At_Drought_Soil_Dry_P Parameter: Treatment Value: Drought vs. No Drought
  misc_feature: MA Experiment ID: 20001556 Result: Up-regulated in Transcription
  misc_feature: MA Experiment 20001556 PARAMETER Experiment Name: At_Drought_Soil_Dry_P Parameter: Age (day) Value: 26
  misc_feature: MA Experiment 20001556 PARAMETER Experiment Name: At_Drought_Soil_Dry_P Parameter: Organism Value: A. thaliana
  misc_feature: MA Experiment 20001556 PARAMETER Experiment Name: At_Drought_Soil_Dry_P Parameter: Plant Line Value: WS
  misc_feature: MA Experiment 20001556 PARAMETER Experiment Name: At_Drought_Soil_Dry_P Parameter: Post Timepoint (hr) Value: None
  misc_feature: MA Experiment 20001556 PARAMETER Experiment Name: At_Drought_Soil_Dry_P Parameter: Post-Treatment Value: None
  misc_feature: MA Experiment 20001556 PARAMETER Experiment Name: At_Drought_Soil_Dry_P Parameter: Timepoint (day) Value: 12
  misc_feature: MA Experiment 20001556 PARAMETER Experiment Name: At_Drought_Soil_Dry_P Parameter: Treatment Value: Drought vs. No Drought
  misc_feature: MA Experiment ID: 20001557 Result: Up-regulated in Transcription
  misc_feature: MA Experiment 20001557 PARAMETER Experiment Name: At_Drought_Soil_Dry_P Parameter: Age (day) Value: 27
  misc_feature: MA Experiment 20001557 PARAMETER Experiment Name: At_Drought_Soil_Dry_P Parameter: Organism Value: A. thaliana
  misc_feature: MA Experiment 20001557 PARAMETER Experiment Name: At_Drought_Soil_Dry_P Parameter: Plant Line Value: WS
  misc_feature: MA Experiment 20001557 PARAMETER Experiment Name: At_Drought_Soil_Dry_P Parameter: Post Timepoint (hr) Value: 3
  misc_feature: MA Experiment 20001557 PARAMETER Experiment Name: At_Drought_Soil_Dry_P Parameter: Post-Treatment Value: Re-Water vs. No Drought
  misc_feature: MA Experiment 20001557 PARAMETER Experiment Name: At_Drought_Soil_Dry_P Parameter: Timepoint (day) Value: 13
  misc_feature: MA Experiment 20001557 PARAMETER Experiment Name: At_Drought_Soil_Dry_P Parameter: Treatment Value: Drought vs. No Drought
  misc_feature: MA Experiment ID: 20001558 Result: Up-regulated in Transcription
  misc_feature: MA Experiment 20001558 PARAMETER Experiment Name: At_Drought_Soil_Dry_P Parameter: Age (day) Value: 27
  misc_feature: MA Experiment 20001558 PARAMETER Experiment Name: At_Drought_Soil_Dry_P Parameter: Organism Value: A. thaliana
  misc_feature: MA Experiment 20001558 PARAMETER Experiment Name: At_Drought_Soil_Dry_P Parameter: Plant Line Value: WS
  misc_feature: MA Experiment 20001558 PARAMETER Experiment Name: At_Drought_Soil_Dry_P Parameter: Post Timepoint (hr) Value: 6
  misc_feature: MA Experiment 20001558 PARAMETER Experiment Name: At_Drought_Soil_Dry_P Parameter: Post-Treatment Value: Re-Water vs. No Drought
  misc_feature: MA Experiment 20001558 PARAMETER Experiment Name: At_Drought_Soil_Dry_P Parameter: Timepoint (day) Value: 13
  misc_feature: MA Experiment 20001558 PARAMETER Experiment Name: At_Drought_Soil_Dry_P Parameter: Treatment Value: Drought vs. No Drought
gaatctcgaagttggtcgaagcaaagcaaaagcaaaattctcttggccgagagaagaaacattgatcgtcgatcatggttggaccagtaagacctcaaatcgtacttttcggttcttcaattgttcaatatagcttcactgatcgtggttggggtgccactctcgctgacctctactctcgcacggctgatatcattcttcgtggatatgctggttggaattctaggtttgccttgaaggttcttcaccaagtattcccaaaggatgctgtgatacaaccttctttggtgatagtctatttcggtgggaatgattcaactcatcctcatccttcaggtcatggccctcatgttcctttatctgaattcatcgaaaacatgaggaagattggtgaacatcttttgagcctttctgataaaactcgtgtcattttcctcactccgccaccaatgaatgagaaacagatcgagatagtttttggagatgcaataaaaggccggagtaacgagttgtgccgtccatatgcagaagagttgttaaatctatgcagagagatcaatgtgaaaggtatcgatatttggaccgcgatacagcagcaagatgattggttgaacagctgcttcacagatgggatccatttcactgcgaaggcaagtgagattgttgttaaggagatattgaaggtactgagaggagcggattggaaaccaagtctttactggaaatcattaccggttgaatttccatttgattttgatgctccaaactctataagccttcatgacctagagttaaccagaaacaaccattttgagtcaccgcaccttgtaagcctttgtgaacaagagttaaccagaaacgagcagctggagccgccacaccctgtaagcctttgtgaccatgagttaacccgaaacgagcagctggagccgccacaccctgtaagcctttgtgaccatgagttaacccaaaacgagcagctggagccaccacagcctacggcgcgcttgtaaaacaagtcgtagttagagattatgcttctacattgacatcttgatggtgtgtaaccagtttcacctttcatttgcatctggatatttgtattgctaatttaacattttgttagacgttttgttttgtatcattagtttcgctgggtctttggattagaatattttgttctcacttgtgtgcttcagatatacaaaacaaaatgctagctc

SEQ ID NO: 45781 - protein, 312 aa, Arabidopsis thaliana
  peptide (1)..(312): Ceres Seq. ID no. 13591685
  misc_feature (9)..(201): Pfam Name: GDSL-like Lipase/Acylhydrolase Pfam Description: GDSL-like Lipase/Acylhydrolase
  misc_feature (9)..(201): Pfam Name: GDSL-like Lipase/Acylhydrolase Pfam Description: GDSL-like Lipase/Acylhydrolase
  misc_feature (5)..(237): Homolog of NCBI NO: 38454102 NR Description: At5g45920 [Arabidopsis thaliana]
  misc_feature (5)..(237): Homolog of NCBI NO: 15242539 NR Description: GDSL-motif lipase/hydrolase protein [Arabidopsis
  misc_feature (5)..(226): Homolog of NCBI NO: 34903948 NR Description: OSJNBa0038J17.19 [Oryza sativa (japonica
  misc_feature (5)..(227): Homolog of NCBI NO: 15242002 NR Description: GDSL-motif lipase/hydrolase protein [Arabidopsis
  misc_feature (5)..(224): Homolog of NCBI NO: 37535366 NR Description: putative esterase [Oryza sativa (japonica
  misc_feature (5)..(237): Homolog of NCBI NO: 38454102 NR Description: At5g45920 [Arabidopsis thaliana]
  misc_feature (5)..(226): Homolog of NCBI NO: 34903948 NR Description: OSJNBa0038J17.19 [Oryza sativa (japonica
  misc_feature (5)..(224): Homolog of NCBI NO: 37535366 NR Description: putative esterase [Oryza sativa (japonica
  misc_feature (1)..(312): Homolog of NCBI NO: 18404664 NR Description: GDSL-motif lipase/hydrolase protein [Arabidopsis
  misc_feature (1)..(312): Homolog of NCBI NO: 16974631 NR Description: At2g38180/F16M14.11 [Arabidopsis thaliana]
  misc_feature (1)..(226): Homolog of NCBI NO: 13161403 NR Description: CPRD49 [Vigna unguiculata]
  misc_feature (1)..(244): Homolog of NCBI NO: 21554235 NR Description: CPRD49 [Arabidopsis thaliana]
  misc_feature (1)..(244): Homolog of NCBI NO: 18399151 NR Description: GDSL-motif lipase/hydrolase protein [Arabidopsis
  misc_feature (5)..(227): Homolog of NCBI NO: 15242002 NR Description: GDSL-motif lipase/hydrolase protein [Arabidopsis
  misc_feature (5)..(237): Homolog of NCBI NO: 15242539 NR Description: GDSL-motif lipase/hydrolase protein [Arabidopsis
  misc_feature (1)..(244): Homolog of NCBI NO: 18399151 NR Description: GDSL-motif lipase/hydrolase protein [Arabidopsis
  misc_feature (1)..(244): Homolog of NCBI NO: 21554235 NR Description: CPRD49 [Arabidopsis thaliana]
  misc_feature (1)..(226): Homolog of NCBI NO: 13161403 NR Description: CPRD49 [Vigna unguiculata]
  misc_feature (1)..(312): Homolog of NCBI NO: 16974631 NR Description: At2g38180/F16M14.11 [Arabidopsis thaliana]
  misc_feature (1)..(312): Homolog of NCBI NO: 18404664 NR Description: GDSL-motif lipase/hydrolase protein [Arabidopsis
MVGPVRPQIVLFGSSIVQYSFTDRGWGATLADLYSRTADIILRGYAGWNSRFALKVLHQVFPKDAVIQPSLVIVYFGGNDSTHPHPSGHGPHVPLSEFIENMRKIGEHLLSLSDKTRVIFLTPPPMNEKQIEIVFGDAIKGRSNELCRPYAEELLNLCREINVKGIDIWTAIQQQDDWLNSCFTDGIHFTAKASEIVVKEILKVLRGADWKPSLYWKSLPVEFPFDFDAPNSISLHDLELTRNNHFESPHLVSLCEQELTRNEQLEPPHPVSLCDHELTRNEQLEPPHPVSLCDHELTQNEQLEPPQPTARL

SEQ ID NO: 45782 - protein, 211 aa, Arabidopsis thaliana
  peptide (1)..(211): Ceres Seq. ID no. 13591686
  misc_feature (1)..(100): Pfam Name: GDSL-like Lipase/Acylhydrolase Pfam Description: GDSL-like Lipase/Acylhydrolase
  misc_feature (1)..(100): Pfam Name: GDSL-like Lipase/Acylhydrolase Pfam Description: GDSL-like Lipase/Acylhydrolase
  misc_feature (1)..(136): Homolog of NCBI NO: 38454102 NR Description: At5g45920 [Arabidopsis thaliana]
  misc_feature (1)..(136): Homolog of NCBI NO: 15242539 NR Description: GDSL-motif lipase/hydrolase protein [Arabidopsis
  misc_feature (1)..(125): Homolog of NCBI NO: 34903948 NR Description: OSJNBa0038J17.19 [Oryza sativa (japonica
  misc_feature (1)..(126): Homolog of NCBI NO: 15242002 NR Description: GDSL-motif lipase/hydrolase protein [Arabidopsis
  misc_feature (1)..(123): Homolog of NCBI NO: 37535366 NR Description: putative esterase [Oryza sativa (japonica
  misc_feature (1)..(136): Homolog of NCBI NO: 38454102 NR Description: At5g45920 [Arabidopsis thaliana]
  misc_feature (1)..(125): Homolog of NCBI NO: 34903948 NR Description: OSJNBa0038J17.19 [Oryza sativa (japonica
  misc_feature (1)..(123): Homolog of NCBI NO: 37535366 NR Description: putative esterase [Oryza sativa (japonica
  misc_feature (1)..(211): Homolog of NCBI NO: 18404664 NR Description: GDSL-motif lipase/hydrolase protein [Arabidopsis
  misc_feature (1)..(211): Homolog of NCBI NO: 16974631 NR Description: At2g38180/F16M14.11 [Arabidopsis thaliana]
  misc_feature (1)..(125): Homolog of NCBI NO: 13161403 NR Description: CPRD49 [Vigna unguiculata]
  misc_feature (1)..(143): Homolog of NCBI NO: 21554235 NR Description: CPRD49 [Arabidopsis thaliana]
  misc_feature (1)..(143): Homolog of NCBI NO: 18399151 NR Description: GDSL-motif lipase/hydrolase protein [Arabidopsis
  misc_feature (1)..(126): Homolog of NCBI NO: 15242002 NR Description: GDSL-motif lipase/hydrolase protein [Arabidopsis
  misc_feature (1)..(136): Homolog of NCBI NO: 15242539 NR Description: GDSL-motif lipase/hydrolase protein [Arabidopsis
  misc_feature (1)..(143): Homolog of NCBI NO: 18399151 NR Description: GDSL-motif lipase/hydrolase protein [Arabidopsis
  misc_feature (1)..(143): Homolog of NCBI NO: 21554235 NR Description: CPRD49 [Arabidopsis thaliana]
  misc_feature (1)..(125): Homolog of NCBI NO: 13161403 NR Description: CPRD49 [Vigna unguiculata]
  misc_feature (1)..(211): Homolog of NCBI NO: 16974631 NR Description: At2g38180/F16M14.11 [Arabidopsis thaliana]
  misc_feature (1)..(211): Homolog of NCBI NO: 18404664 NR Description: GDSL-motif lipase/hydrolase protein [Arabidopsis
MRKIGEHLLSLSDKTRVIFLTPPPMNEKQIEIVFGDAIKGRSNELCRPYAEELLNLCREINVKGIDIWTAIQQQDDWLNSCFTDGIHFTAKASEIVVKEILKVLRGADWKPSLYWKSLPVEFPFDFDAPNSISLHDLELTRNNHFESPHLVSLCEQELTRNEQLEPPHPVSLCDHELTRNEQLEPPHPVSLCDHELTQNEQLEPPQPTARL

SEQ ID NO: 45783 - protein, 187 aa, Arabidopsis thaliana
  peptide (1)..(187): Ceres Seq. ID no. 13591687
  misc_feature (1)..(76): Pfam Name: GDSL-like Lipase/Acylhydrolase Pfam Description: GDSL-like Lipase/Acylhydrolase
  misc_feature (1)..(76): Pfam Name: GDSL-like Lipase/Acylhydrolase Pfam Description: GDSL-like Lipase/Acylhydrolase
  misc_feature (1)..(112): Homolog of NCBI NO: 38454102 NR Description: At5g45920 [Arabidopsis thaliana]
  misc_feature (1)..(112): Homolog of NCBI NO: 15242539 NR Description: GDSL-motif lipase/hydrolase protein [Arabidopsis
  misc_feature (1)..(101): Homolog of NCBI NO: 34903948 NR Description: OSJNBa0038J17.19 [Oryza sativa (japonica
  misc_feature (1)..(102): Homolog of NCBI NO: 15242002 NR Description: GDSL-motif lipase/hydrolase protein [Arabidopsis
  misc_feature (1)..(99): Homolog of NCBI NO: 37535366 NR Description: putative esterase [Oryza sativa (japonica
  misc_feature (1)..(112): Homolog of NCBI NO: 38454102 NR Description: At5g45920 [Arabidopsis thaliana]
  misc_feature (1)..(101): Homolog of NCBI NO: 34903948 NR Description: OSJNBa0038J17.19 [Oryza sativa (japonica
  misc_feature (1)..(99): Homolog of NCBI NO: 37535366 NR Description: putative esterase [Oryza sativa (japonica
  misc_feature (1)..(187): Homolog of NCBI NO: 18404664 NR Description: GDSL-motif lipase/hydrolase protein [Arabidopsis
  misc_feature (1)..(187): Homolog of NCBI NO: 16974631 NR Description: At2g38180/F16M14.11 [Arabidopsis thaliana]
  misc_feature (1)..(101): Homolog of NCBI NO: 13161403 NR Description: CPRD49 [Vigna unguiculata]
  misc_feature (1)..(119): Homolog of NCBI NO: 21554235 NR Description: CPRD49 [Arabidopsis thaliana]
  misc_feature (1)..(119): Homolog of NCBI NO: 18399151 NR Description: GDSL-motif lipase/hydrolase protein [Arabidopsis
  misc_feature (1)..(102): Homolog of NCBI NO: 15242002 NR Description: GDSL-motif lipase/hydrolase protein [Arabidopsis
  misc_feature (1)..(112): Homolog of NCBI NO: 15242539 NR Description: GDSL-motif lipase/hydrolase protein [Arabidopsis
  misc_feature (1)..(119): Homolog of NCBI NO: 18399151 NR Description: GDSL-motif lipase/hydrolase protein [Arabidopsis
  misc_feature (1)..(119): Homolog of NCBI NO: 21554235 NR Description: CPRD49 [Arabidopsis thaliana]
  misc_feature (1)..(101): Homolog of NCBI NO: 13161403 NR Description: CPRD49 [Vigna unguiculata]
  misc_feature (1)..(187): Homolog of NCBI NO: 16974631 NR Description: At2g38180/F16M14.11 [Arabidopsis thaliana]
  misc_feature (1)..(187): Homolog of NCBI NO: 18404664 NR Description: GDSL-motif lipase/hydrolase protein [Arabidopsis
MNEKQIEIVFGDAIKGRSNELCRPYAEELLNLCREINVKGIDIWTAIQQQDDWLNSCFTDGIHFTAKASEIVVKEILKVLRGADWKPSLYWKSLPVEFPFDFDAPNSISLHDLELTRNNHFESPHLVSLCEQELTRNEQLEPPHPVSLCDHELTRNEQLEPPHPVSLCDHELTQNEQLEPPQPTARL

SEQ ID NO: 45784 - DNA, 1475 bp, Arabidopsis thaliana
  misc_feature (1)..(1475): Ceres Seq. ID no. 14309790
  misc_feature: MA Experiment ID: 20000315 Result: Down-regulated in Transcription
  misc_feature: MA Experiment 20000315 PARAMETER Experiment Name: At_14day_Shoots-Roots_Sub_P Parameter: Age (day) Value: 14
  misc_feature: MA Experiment 20000315 PARAMETER Experiment Name: At_14day_Shoots-Roots_Sub_P Parameter: Organism Value: A. thaliana
  misc_feature: MA Experiment 20000315 PARAMETER Experiment Name: At_14day_Shoots-Roots_Sub_P Parameter: Plant Line Value: WS
  misc_feature: MA Experiment 20000315 PARAMETER Experiment Name: At_14day_Shoots-Roots_Sub_P Parameter: Tissue Value: Shoots vs. Whole Plant
ggactgtccctgtggaagatataattttacatgtccgaattccggagaagaaaaagatgaagtgattgattaaattgaaatcgatcacatcaaccatctctttctctcgcctgcaaagttatctccttttcaaaccgaacgaatcaattcgggaatcttcatctttctacgtgttttctcagctatgtatctctgggttcgacttcagtaaaagcttcaccagccatggatttcgttaggggtttttggaggaagcatagaaggaaggtcttggtgacggctggttgtttgggaagtgggtatttactctacaaactatacaattcccatactcgtaggcttgctgatttggaacgagaactcgctcacgagcgtgaaaatgacgaaatcatcaaaacccaaatgaaagcacatttcgagagtattcagatgattgtggattcgaccacactgcctcacgcaatgcagtttttgagtatccgtatcagcgaggagatcgatgtctctcatgttatggacagactgaaccaagggaaaggaatgctgagtccacctgagaaacttcagctctgggatgagctcaagattttgagtttcacgaggatggttttgtctctgtggtctgtgacaatgcttagcttatacattagggttcaagtcaacattttaggcagacatttgtatgttgacaccgctcgagctcttggcagctctcatttacttgaagaggtagatctcattgatagagatgatgaacagaagtttttgtcgagtgctgattttcttgtcaccaatgcaatgccaagtttgatttcagatatgcagggttcagccgaggaagtccttaaaggaaagcagttaaaggatgtaattaccacaagagttcttcaagaaaccgtgatgcagattgtagatgtgtttatgagcactggaagcccacatcactgggttgattatttaatgatgcctcaagacacaaagctttcaagaaccacaagtgactcttctgatgaagctgtgtccaagtttcatcaactcatggttgagactcgagaagtactcatcagcactgaattcacaaatatagtcgaaatttcgctcaagtgcttcacggatgcgttggtagaggaaatggaaacgcagactgaagcaggcggtttggctacagggaaaccattggcaaaggtcttaccacagattgagaagacaatgaatgtgattacagctgaaccaagcaagaaccggttcttacaaatcatcagagatctgcctgaagttaaactcttttttactcttttatacgctaatatgccgcaatagcaacttttgtttgttctcttagaaattccccaaagtgttttgctatatgctttctttgtaggggggtcttttagcttgaaagaaatgcaggaattttcgtgttttgagcttgtagaaccaaagttgatttcatttatttgttttgattagaaaag

SEQ ID NO: 45785 - protein, 364 aa, Arabidopsis thaliana
  peptide (1)..(364): Ceres Seq. ID no. 14309791
  misc_feature (1)..(362): Pfam Name: Peroxin-3 Pfam Description: Peroxin-3
  misc_feature (4)..(359): Homolog of NCBI NO: 4505727 NR Description: peroxisomal biogenesis factor 3 [Homo sapiens]
  misc_feature (7)..(359): Homolog of NCBI NO: 28278477 NR Description: Similar to peroxisomal biogenesis factor 3 [Danio
  misc_feature (167)..(364): Homolog of NCBI NO: 9294071 NR Description: gene_id:MRC8.15~unknown protein [Arabidopsis
  misc_feature (1)..(364): Homolog of NCBI NO: 21554142 NR Description: unknown [Arabidopsis thaliana]
  misc_feature (1)..(364): Homolog of NCBI NO: 18401790 NR Description: expressed protein [Arabidopsis thaliana]
  misc_feature (10)..(62): Homolog of NCBI NO: 12321594 NR Description: hypothetical protein, 3' partial [Arabidopsis
  misc_feature (55)..(340): Homolog of NCBI NO: 12321594 NR Description: hypothetical protein, 3' partial [Arabidopsis
  misc_feature (10)..(62): Homolog of NCBI NO: 12597815 NR Description: lysine and histidine specific transporter,
  misc_feature (55)..(351): Homolog of NCBI NO: 12597815 NR Description: lysine and histidine specific transporter,
  misc_feature (1)..(364): Homolog of NCBI NO: 22330115 NR Description: expressed protein [Arabidopsis thaliana]
MDFVRGFWRKHRRKVLVTAGCLGSGYLLYKLYNSHTRRLADLERELAHERENDEIIKTQMKAHFESIQMIVDSTTLPHAMQFLSIRISEEIDVSHVMDRLNQGKGMLSPPEKLQLWDELKILSFTRMVLSLWSVTMLSLYIRVQVNILGRHLYVDTARALGSSHLLEEVDLIDRDDEQKFLSSADFLVTNAMPSLISDMQGSAEEVLKGKQLKDVITTRVLQETVMQIVDVFMSTGSPHHWVDYLMMPQDTKLSRTTSDSSDEAVSKFHQLMVETREVLISTEFTNIVEISLKCFTDALVEEMETQTEAGGLATGKPLAKVLPQIEKTMNVITAEPSKNRFLQIIRDLPEVKLFFTLLYANMPQ

SEQ ID NO: 45786 - protein, 305 aa, Arabidopsis thaliana
  peptide (1)..(305): Ceres Seq. ID no. 14309792
  misc_feature (1)..(303): Pfam Name: Peroxin-3 Pfam Description: Peroxin-3
  misc_feature (1)..(300): Homolog of NCBI NO: 9910484 NR Description: peroxisomal biogenesis factor 3; peroxisomal
  misc_feature (1)..(300): Homolog of NCBI NO: 12230450 NR Description: Peroxisomal assembly protein PEX3 (Peroxin-3)
  misc_feature (1)..(300): Homolog of NCBI NO: 4505727 NR Description: peroxisomal biogenesis factor 3 [Homo sapiens]
  misc_feature (1)..(300): Homolog of NCBI NO: 28278477 NR Description: Similar to peroxisomal biogenesis factor 3 [Danio
  misc_feature (108)..(305): Homolog of NCBI NO: 9294071 NR Description: gene_id:MRC8.15~unknown protein [Arabidopsis
  misc_feature (1)..(305): Homolog of NCBI NO: 21554142 NR Description: unknown [Arabidopsis thaliana]
  misc_feature (1)..(305): Homolog of NCBI NO: 18401790 NR Description: expressed protein [Arabidopsis thaliana]
  misc_feature (1)..(281): Homolog of NCBI NO: 12321594 NR Description: hypothetical protein, 3' partial [Arabidopsis
  misc_feature (1)..(292): Homolog of NCBI NO: 12597815 NR Description: lysine and histidine specific transporter,
  misc_feature (1)..(305): Homolog of NCBI NO: 22330115 NR Description: expressed protein [Arabidopsis thaliana]
MKAHFESIQMIVDSTTLPHAMQFLSIRISEEIDVSHVMDRLNQGKGMLSPPEKLQLWDELKILSFTRMVLSLWSVTMLSLYIRVQVNILGRHLYVDTARALGSSHLLEEVDLIDRDDEQKFLSSADFLVTNAMPSLISDMQGSAEEVLKGKQLKDVITTRVLQETVMQIVDVFMSTGSPHHWVDYLMMPQDTKLSRTTSDSSDEAVSKFHQLMVETREVLISTEFTNIVEISLKCFTDALVEEMETQTEAGGLATGKPLAKVLPQIEKTMNVITAEPSKNRFLQIIRDLPEVKLFFTLLYANMPQ

SEQ ID NO: 45787 - protein, 296 aa, Arabidopsis thaliana
  peptide (1)..(296): Ceres Seq. ID no. 14309793
  misc_feature (1)..(294): Pfam Name: Peroxin-3 Pfam Description: Peroxin-3
  misc_feature (1)..(291): Homolog of NCBI NO: 9910484 NR Description: peroxisomal biogenesis factor 3; peroxisomal
  misc_feature (1)..(291): Homolog of NCBI NO: 12230450 NR Description: Peroxisomal assembly protein PEX3 (Peroxin-3)
  misc_feature (1)..(291): Homolog of NCBI NO: 4505727 NR Description: peroxisomal biogenesis factor 3 [Homo sapiens]
  misc_feature (1)..(291): Homolog of NCBI NO: 28278477 NR Description: Similar to peroxisomal biogenesis factor 3 [Danio
  misc_feature (99)..(296): Homolog of NCBI NO: 9294071 NR Description: gene_id:MRC8.15~unknown protein [Arabidopsis
  misc_feature (1)..(296): Homolog of NCBI NO: 21554142 NR Description: unknown [Arabidopsis thaliana]
  misc_feature (1)..(296): Homolog of NCBI NO: 18401790 NR Description: expressed protein [Arabidopsis thaliana]
  misc_feature (1)..(272): Homolog of NCBI NO: 12321594 NR Description: hypothetical protein, 3' partial [Arabidopsis
  misc_feature (1)..(283): Homolog of NCBI NO: 12597815 NR Description: lysine and histidine specific transporter,
  misc_feature (1)..(296): Homolog of NCBI NO: 22330115 NR Description: expressed protein [Arabidopsis thaliana]
MIVDSTTLPHAMQFLSIRISEEIDVSHVMDRLNQGKGMLSPPEKLQLWDELKILSFTRMVLSLWSVTMLSLYIRVQVNILGRHLYVDTARALGSSHLLEEVDLIDRDDEQKFLSSADFLVTNAMPSLISDMQGSAEEVLKGKQLKDVITTRVLQETVMQIVDVFMSTGSPHHWVDYLMMPQDTKLSRTTSDSSDEAVSKFHQLMVETREVLISTEFTNIVEISLKCFTDALVEEMETQTEAGGLATGKPLAKVLPQIEKTMNVITAEPSKNRFLQIIRDLPEVKLFFTLLYANMPQ

SEQ ID NO: 45788 - DNA, 3093 bp, Arabidopsis thaliana; identical to SEQ ID NO: 45040
  misc_feature (1)..(3093): Ceres Seq. ID no. 12600157
  misc_feature: MA Experiment ID: 20000179 Result: Up-regulated in Transcription
  misc_feature: MA Experiment 20000179 PARAMETER Experiment Name: At_Germinating_Seeds_P Parameter: Age (hr) Value: 6 vs. 0
  misc_feature: MA Experiment 20000179 PARAMETER Experiment Name: At_Germinating_Seeds_P Parameter: Tissue Value: Germinating Seeds
  misc_feature: MA Experiment ID: 20000180 Result: Up-regulated in Transcription
  misc_feature: MA Experiment 20000180 PARAMETER Experiment Name: At_Germinating_Seeds_P Parameter: Age (hr) Value: 24 vs. 0
  misc_feature: MA Experiment 20000180 PARAMETER Experiment Name: At_Germinating_Seeds_P Parameter: Tissue Value: Germinating Seeds
  misc_feature: MA Experiment ID: 20000184 Result: Up-regulated in Transcription
  misc_feature: MA Experiment 20000184 PARAMETER Experiment Name: At_Shoots__P Parameter: Age (day) Value: 7
  misc_feature: MA Experiment 20000184 PARAMETER Experiment Name: At_Shoots__P Parameter: Tissue Value: Shoots vs. Whole Plant
  misc_feature: MA Experiment ID: 20000234 Result: Up-regulated in Transcription
  misc_feature: MA Experiment 20000234 PARAMETER Experiment Name: At_Siliques_P Parameter: Age (day) Value: 21
  misc_feature: MA Experiment 20000234 PARAMETER Experiment Name: At_Siliques_P Parameter: Organism Value: A. thaliana
  misc_feature: MA Experiment 20000234 PARAMETER Experiment Name: At_Siliques_P Parameter: Plant Line Value: WS
  misc_feature: MA Experiment 20000234 PARAMETER Experiment Name: At_Siliques_P Parameter: Tissue Value: Less Than 5mm Siliques vs. Whole Plant
  misc_feature: MA Experiment ID: 20000235 Result: Up-regulated in Transcription
  misc_feature: MA Experiment 20000235 PARAMETER Experiment Name: At_Siliques_P Parameter: Age (day) Value: 21
  misc_feature: MA Experiment 20000235 PARAMETER Experiment Name: At_Siliques_P Parameter: Organism Value: A. thaliana
  misc_feature: MA Experiment 20000235 PARAMETER Experiment Name: At_Siliques_P Parameter: Plant Line Value: WS
  misc_feature: MA Experiment 20000235 PARAMETER Experiment Name: At_Siliques_P Parameter: Tissue Value: 5-10mm Siliques vs. Whole Plant
  misc_feature: MA Experiment ID: 20000264 Result: Up-regulated in Transcription
  misc_feature: MA Experiment 20000264 PARAMETER Experiment Name: At_Open_Flower_P Parameter: Age (day) Value: 21
  misc_feature: MA Experiment 20000264 PARAMETER Experiment Name: At_Open_Flower_P Parameter: Plant Line Value: WS
  misc_feature: MA Experiment 20000264 PARAMETER Experiment Name: At_Open_Flower_P Parameter: Tissue Value: Open Flower vs. Whole Plant
  misc_feature: MA Experiment ID: 20000265 Result: Up-regulated in Transcription
  misc_feature: MA Experiment 20000265 PARAMETER Experiment Name: At_Open_Flower_P Parameter: Age (day) Value: 21
  misc_feature: MA Experiment 20000265 PARAMETER Experiment Name: At_Open_Flower_P Parameter: Plant Line Value: WS
  misc_feature: MA Experiment 20000265 PARAMETER Experiment Name: At_Open_Flower_P Parameter: Tissue Value: Closed Flower vs. Whole Plant
  misc_feature: MA Experiment ID: 20000286 Result: Up-regulated in Transcription
  misc_feature: MA Experiment 20000286 PARAMETER Experiment Name: At_Open_Flower_P Parameter: Age (day) Value: 21
  misc_feature: MA Experiment 20000286 PARAMETER Experiment Name: At_Open_Flower_P Parameter: Plant Line Value: WS
  misc_feature: MA Experiment 20000286 PARAMETER Experiment Name: At_Open_Flower_P Parameter: Tissue Value: Half Open vs. Whole Plant
  misc_feature: MA Experiment ID: 20000438 Result: Up-regulated in Transcription
  misc_feature: MA Experiment 20000438 PARAMETER Experiment Name: At_Shoots__P Parameter: Age (day) Value: 14
  misc_feature: MA Experiment 20000438 PARAMETER Experiment Name: At_Shoots__P Parameter: Tissue Value: Shoots vs. Whole Plant
  misc_feature: MA Experiment ID: 20000439 Result: Up-regulated in Transcription
  misc_feature: MA Experiment 20000439 PARAMETER Experiment Name: At_Roots__P Parameter: Age (day) Value: 14 vs. 21
  misc_feature: MA Experiment 20000439 PARAMETER Experiment Name: At_Roots__P Parameter: Organism Value: A. thaliana
  misc_feature: MA Experiment 20000439 PARAMETER Experiment Name: At_Roots__P Parameter: Tissue Value: Roots vs. Whole Plant
  misc_feature: MA Experiment ID: 20000495 Result: Up-regulated in Transcription
  misc_feature: MA Experiment 20000495 PARAMETER Experiment Name: At_Guard_Cells_P Parameter: Harvest Date Value: 8/2/2002
  misc_feature: MA Experiment 20000495 PARAMETER Experiment Name: At_Guard_Cells_P Parameter: Organism Value: A. thaliana
  misc_feature: MA Experiment 20000495 PARAMETER Experiment Name: At_Guard_Cells_P Parameter: Tissue Value: Guard Cells vs. Leaves
  misc_feature: MA Experiment ID: 20000573 Result: Down-regulated in Transcription
  misc_feature: MA Experiment 20000573 PARAMETER Experiment Name: At_100uM_ABA_Mutants__P Parameter: Organism Value: A. thaliana
  misc_feature: MA Experiment 20000573 PARAMETER Experiment Name: At_100uM_ABA_Mutants__P Parameter: Plant Line Value: CS22 vs. Ler wt
  misc_feature: MA Experiment 20000573 PARAMETER Experiment Name: At_100uM_ABA_Mutants__P Parameter: Timepoint (hr) Value: N/A
  misc_feature: MA Experiment 20000573 PARAMETER Experiment Name: At_100uM_ABA_Mutants__P Parameter: Tissue Value: Whole Plant
  misc_feature: MA Experiment 20000573 PARAMETER Experiment Name: At_100uM_ABA_Mutants__P Parameter: Treatment Value: None
  misc_feature: MA Experiment ID: 20001248 Result: Down-regulated in Transcription
  misc_feature: MA Experiment 20001248 PARAMETER Experiment Name: At_Far-red-induction_P Parameter: Age (day) Value: 7
  misc_feature: MA Experiment 20001248 PARAMETER Experiment Name: At_Far-red-induction_P Parameter: Light Value: Far-red vs. White
  misc_feature: MA Experiment 20001248 PARAMETER Experiment Name: At_Far-red-induction_P Parameter: Organism Value: A. thaliana
  misc_feature: MA Experiment 20001248 PARAMETER Experiment Name: At_Far-red-induction_P Parameter: Plant Line Value: Columbia
  misc_feature: MA Experiment 20001248 PARAMETER Experiment Name: At_Far-red-induction_P Parameter: Timepoint (hr) Value: 4
  misc_feature: MA Experiment 20001248 PARAMETER Experiment Name: At_Far-red-induction_P Parameter: Tissue Value: Whole Plant
  misc_feature: MA Experiment ID: 20001450 Result: Down-regulated in Transcription
  misc_feature: MA Experiment 20001450 PARAMETER Experiment Name: At_Far-red-induction_P Parameter: Age (day) Value: 7
  misc_feature: MA Experiment 20001450 PARAMETER Experiment Name: At_Far-red-induction_P Parameter: Light Value: Far-red vs. White
  misc_feature: MA Experiment 20001450 PARAMETER Experiment Name: At_Far-red-induction_P Parameter: Organism Value: A. thaliana
  misc_feature: MA Experiment 20001450 PARAMETER Experiment Name: At_Far-red-induction_P Parameter: Plant Line Value: Columbia
  misc_feature: MA Experiment 20001450 PARAMETER Experiment Name: At_Far-red-induction_P Parameter: Timepoint (hr) Value: 8
  misc_feature: MA Experiment 20001450 PARAMETER Experiment Name: At_Far-red-induction_P Parameter: Tissue Value: Whole Plant
  misc_feature: MA Experiment ID: 20001557 Result: Up-regulated in Transcription
  misc_feature: MA Experiment 20001557 PARAMETER Experiment Name: At_Drought_Soil_Dry_P Parameter: Age (day) Value: 27
  misc_feature: MA Experiment 20001557 PARAMETER Experiment Name: At_Drought_Soil_Dry_P Parameter: Organism Value: A. thaliana
  misc_feature: MA Experiment 20001557 PARAMETER Experiment Name: At_Drought_Soil_Dry_P Parameter: Plant Line Value: WS
  misc_feature: MA Experiment 20001557 PARAMETER Experiment Name: At_Drought_Soil_Dry_P Parameter: Post Timepoint (hr) Value: 3
  misc_feature: MA Experiment 20001557 PARAMETER Experiment Name: At_Drought_Soil_Dry_P Parameter: Post-Treatment Value: Re-Water vs. No Drought
  misc_feature: MA Experiment 20001557 PARAMETER Experiment Name: At_Drought_Soil_Dry_P Parameter: Timepoint (day) Value: 13
  misc_feature: MA Experiment 20001557 PARAMETER Experiment Name: At_Drought_Soil_Dry_P Parameter: Treatment Value: Drought vs. No Drought
  misc_feature: MA Experiment ID: 20001558 Result: Up-regulated in Transcription
  misc_feature: MA Experiment 20001558 PARAMETER Experiment Name: At_Drought_Soil_Dry_P Parameter: Age (day) Value: 27
  misc_feature: MA Experiment 20001558 PARAMETER Experiment Name: At_Drought_Soil_Dry_P Parameter: Organism Value: A. thaliana
  misc_feature: MA Experiment 20001558 PARAMETER Experiment Name: At_Drought_Soil_Dry_P Parameter: Plant Line Value: WS
  misc_feature: MA Experiment 20001558 PARAMETER Experiment Name: At_Drought_Soil_Dry_P Parameter: Post Timepoint (hr) Value: 6
  misc_feature: MA Experiment 20001558 PARAMETER Experiment Name: At_Drought_Soil_Dry_P Parameter: Post-Treatment Value: Re-Water vs. No Drought
  misc_feature: MA Experiment 20001558 PARAMETER Experiment Name: At_Drought_Soil_Dry_P Parameter: Timepoint (day) Value: 13
  misc_feature: MA Experiment 20001558 PARAMETER Experiment Name: At_Drought_Soil_Dry_P Parameter: Treatment Value: Drought vs. No Drought
  misc_feature: MA Experiment ID: 20001560 Result: Up-regulated in Transcription
  misc_feature: MA Experiment 20001560 PARAMETER Experiment Name: At_Drought_Soil_Dry_P Parameter: Age (day) Value: 28
  misc_feature: MA Experiment 20001560 PARAMETER Experiment Name: At_Drought_Soil_Dry_P Parameter: Organism Value: A. thaliana
  misc_feature: MA Experiment 20001560 PARAMETER Experiment Name: At_Drought_Soil_Dry_P Parameter: Plant Line Value: WS
  misc_feature: MA Experiment 20001560 PARAMETER Experiment Name: At_Drought_Soil_Dry_P Parameter: Post Timepoint (hr) Value: None
  misc_feature: MA Experiment 20001560 PARAMETER Experiment Name: At_Drought_Soil_Dry_P Parameter: Post-Treatment Value: None
  misc_feature: MA Experiment 20001560 PARAMETER Experiment Name: At_Drought_Soil_Dry_P Parameter: Timepoint (day) Value: 14
  misc_feature: MA Experiment 20001560 PARAMETER Experiment Name: At_Drought_Soil_Dry_P Parameter: Treatment Value: Drought vs. No Drought
  misc_feature: MA Experiment ID: 20001911 Result: Down-regulated in Transcription
  misc_feature: MA Experiment 20001911 PARAMETER Experiment Name: At_Drought_Reproduction_P Parameter: Age (day) Value: 40
  misc_feature: MA Experiment 20001911 PARAMETER Experiment Name: At_Drought_Reproduction_P Parameter: Organism Value: A. thaliana
  misc_feature: MA Experiment 20001911 PARAMETER Experiment Name: At_Drought_Reproduction_P Parameter: Plant Line Value: WS
  misc_feature: MA Experiment 20001911 PARAMETER Experiment Name: At_Drought_Reproduction_P Parameter: Timepoint (day) Value: 10
  misc_feature: MA Experiment 20001911 PARAMETER Experiment Name: At_Drought_Reproduction_P Parameter: Tissue Value: Flowers
  misc_feature: MA Experiment 20001911 PARAMETER Experiment Name: At_Drought_Reproduction_P Parameter: Treatment Value: Drought vs. No Drought

SEQ ID NO: 45789 - protein, 856 aa, Arabidopsis thaliana; identical to SEQ ID NO: 45041
  peptide (1)..(856): Ceres Seq. ID no. 12600158
  misc_feature (768)..(845): Pfam Name: Galactose binding lectin domain Pfam Description: Galactose binding lectin domain
  misc_feature (768)..(845): Pfam Name: Galactose binding lectin domain Pfam Description: Galactose binding lectin domain
  misc_feature (768)..(845): Pfam Name: Galactose binding lectin domain Pfam Description: Galactose binding lectin domain
  misc_feature (622)..(849): Homolog of NCBI NO: 30679742 NR Description: glycosyl hydrolase family 35 (beta-galactosidase)
  misc_feature (33)..(668): Homolog of NCBI NO: 30679742 NR Description: glycosyl hydrolase family 35 (beta-galactosidase)
  misc_feature (622)..(849): Homolog of NCBI NO: 25326168 NR Description: probable beta-galactosidase [imported] -
  misc_feature (16)..(668): Homolog of NCBI NO: 25326168 NR Description: probable beta-galactosidase [imported] -
  misc_feature (22)..(846): Homolog of NCBI NO: 30683905 NR Description: glycosyl hydrolase family 35 (beta-galactosidase)
  misc_feature (622)..(849): Homolog of NCBI NO: 30679742 NR Description: glycosyl hydrolase family 35 (beta-galactosidase)
  misc_feature (622)..(849): Homolog of NCBI NO: 25326168 NR Description: probable beta-galactosidase [imported] -
  misc_feature (22)..(846): Homolog of NCBI NO: 30683905 NR Description: glycosyl hydrolase family 35 (beta-galactosidase)
  misc_feature (16)..(668): Homolog of NCBI NO: 25326168 NR Description: probable beta-galactosidase [imported] -
  misc_feature (622)..(849): Homolog of NCBI NO: 25326168 NR Description: probable beta-galactosidase [imported] -
  misc_feature (33)..(668): Homolog of NCBI NO: 30679742 NR Description: glycosyl hydrolase family 35 (beta-galactosidase)
  misc_feature (622)..(849): Homolog of NCBI NO: 30679742 NR Description: glycosyl hydrolase family 35 (beta-galactosidase)
  misc_feature (16)..(846): Homolog of NCBI NO: 1352077 NR Description: Beta-galactosidase precursor (Lactase) (Acid
  misc_feature (17)..(846): Homolog of NCBI NO: 15231354 NR Description: glycosyl hydrolase family 35 (beta-galactosidase)
  misc_feature (17)..(846): Homolog of NCBI NO: 20260596 NR Description: galactosidase, putative [Arabidopsis thaliana]
  misc_feature (13)..(846): Homolog of NCBI NO: 4138137 NR Description: ss-galactosidase [Lycopersicon esculentum]
  misc_feature (16)..(732): Homolog of NCBI NO: 30687121 NR Description: glycosyl hydrolase family 35 (beta-galactosidase)
  misc_feature (16)..(846): Homolog of NCBI NO: 1352077 NR Description: Beta-galactosidase precursor (Lactase) (Acid
  misc_feature (17)..(846): Homolog of NCBI NO: 15231354 NR Description: glycosyl hydrolase family 35 (beta-galactosidase)
  misc_feature (17)..(846): Homolog of NCBI NO: 20260596 NR Description: galactosidase, putative [Arabidopsis thaliana]
  misc_feature (13)..(846): Homolog of NCBI NO: 4138137 NR Description: ss-galactosidase [Lycopersicon esculentum]
  misc_feature (16)..(732): Homolog of NCBI NO: 30687121 NR Description: glycosyl hydrolase family 35 (beta-galactosidase)
  misc_feature (22)..(846): Homolog of NCBI NO: 30683905 NR Description: glycosyl hydrolase family 35 (beta-galactosidase)
  misc_feature (16)..(668): Homolog of NCBI NO: 25326168 NR Description: probable beta-galactosidase [imported] -
  misc_feature (33)..(668): Homolog of NCBI NO: 30679742 NR Description: glycosyl hydrolase family 35 (beta-galactosidase)
  misc_feature (16)..(732): Homolog of NCBI NO: 30687121 NR Description: glycosyl hydrolase family 35 (beta-galactosidase)
  misc_feature (13)..(846): Homolog of NCBI NO: 4138137 NR Description: ss-galactosidase [Lycopersicon esculentum]
  misc_feature (17)..(846): Homolog of NCBI NO: 20260596 NR Description: galactosidase, putative [Arabidopsis thaliana]
  misc_feature (17)..(846): Homolog of NCBI NO: 15231354 NR Description: glycosyl hydrolase family 35 (beta-galactosidase)
  misc_feature (16)..(846): Homolog of NCBI NO: 1352077 NR Description: Beta-galactosidase precursor (Lactase) (Acid

SEQ ID NO: 45790 - protein, 853 aa, Arabidopsis thaliana; identical to SEQ ID NO: 45042
  peptide (1)..(853): Ceres Seq. ID no. 12600159
  misc_feature (765)..(842): Pfam Name: Galactose binding lectin domain Pfam Description: Galactose binding lectin domain
  misc_feature (765)..(842): Pfam Name: Galactose binding lectin domain Pfam Description: Galactose binding lectin domain
  misc_feature (765)..(842): Pfam Name: Galactose binding lectin domain Pfam Description: Galactose binding lectin domain
  misc_feature (619)..(846): Homolog of NCBI NO: 30679742 NR Description: glycosyl hydrolase family 35 (beta-galactosidase)
  misc_feature (30)..(665): Homolog of NCBI NO: 30679742 NR Description: glycosyl hydrolase family 35 (beta-galactosidase)
  misc_feature (619)..(846): Homolog of NCBI NO: 25326168 NR Description: probable beta-galactosidase [imported] -
  misc_feature (13)..(665): Homolog of NCBI NO: 25326168 NR Description: probable beta-galactosidase [imported] -
  misc_feature (19)..(843): Homolog of NCBI NO: 30683905 NR Description: glycosyl hydrolase family 35 (beta-galactosidase)
  misc_feature (619)..(846): Homolog of NCBI NO: 30679742 NR Description: glycosyl hydrolase family 35 (beta-galactosidase)
  misc_feature (619)..(846): Homolog of NCBI NO: 25326168 NR Description: probable beta-galactosidase [imported] -
  misc_feature (19)..(843): Homolog of NCBI NO: 30683905 NR Description: glycosyl hydrolase family 35 (beta-galactosidase)
  misc_feature (13)..(665): Homolog of NCBI NO: 25326168 NR Description: probable beta-galactosidase [imported] -
  misc_feature (619)..(846): Homolog of NCBI NO: 25326168 NR Description: probable beta-galactosidase [imported] -
  misc_feature (30)..(665): Homolog of NCBI NO: 30679742 NR Description: glycosyl hydrolase family 35 (beta-galactosidase)
  misc_feature (619)..(846): Homolog of NCBI NO: 30679742 NR Description: glycosyl hydrolase family 35 (beta-galactosidase)
  misc_feature (13)..(843): Homolog of NCBI NO: 1352077 NR Description: Beta-galactosidase precursor (Lactase) (Acid
  misc_feature (14)..(843): Homolog of NCBI NO: 15231354 NR Description: glycosyl hydrolase family 35 (beta-galactosidase)
  misc_feature (14)..(843): Homolog of NCBI NO: 20260596 NR Description: galactosidase, putative [Arabidopsis thaliana]
  misc_feature (10)..(843): Homolog of NCBI NO: 4138137 NR Description: ss-galactosidase [Lycopersicon esculentum]
  misc_feature (13)..(729): Homolog of NCBI NO: 30687121 NR Description: glycosyl hydrolase family 35 (beta-galactosidase)
  misc_feature (13)..(843): Homolog of NCBI NO: 1352077 NR Description: Beta-galactosidase precursor (Lactase) (Acid
  misc_feature (14)..(843): Homolog of NCBI NO: 15231354 NR Description: glycosyl hydrolase family 35 (beta-galactosidase)
  misc_feature (14)..(843): Homolog of NCBI NO: 20260596 NR Description: galactosidase, putative [Arabidopsis thaliana]
  misc_feature (10)..(843): Homolog of NCBI NO: 4138137 NR Description: ss-galactosidase [Lycopersicon esculentum]
  misc_feature (13)..(729): Homolog of NCBI NO: 30687121 NR Description: glycosyl hydrolase family 35 (beta-galactosidase)
  misc_feature (19)..(843): Homolog of NCBI NO: 30683905 NR Description: glycosyl hydrolase family 35 (beta-galactosidase)
  misc_feature (13)..(665): Homolog of NCBI NO: 25326168 NR Description: probable beta-galactosidase [imported] -
  misc_feature (30)..(665): Homolog of NCBI NO: 30679742 NR Description: glycosyl hydrolase family 35 (beta-galactosidase)
  misc_feature (13)..(729): Homolog of NCBI NO: 30687121 NR Description: glycosyl hydrolase family 35 (beta-galactosidase)
  misc_feature (10)..(843): Homolog of NCBI NO: 4138137 NR Description: ss-galactosidase [Lycopersicon esculentum]
  misc_feature (14)..(843): Homolog of NCBI NO: 20260596 NR Description: galactosidase, putative [Arabidopsis thaliana]
  misc_feature (14)..(843): Homolog of NCBI NO: 15231354 NR Description: glycosyl hydrolase family 35 (beta-galactosidase)
  misc_feature (13)..(843): Homolog of NCBI NO: 1352077 NR Description: Beta-galactosidase precursor (Lactase) (Acid

SEQ ID NO: 45791 - protein, 794 aa, Arabidopsis thaliana; identical to SEQ ID NO: 45043
  peptide (1)..(794): Ceres Seq. ID no. 12600160
  misc_feature (706)..(783): Pfam Name: Galactose binding lectin domain Pfam Description: Galactose binding lectin domain
  misc_feature (706)..(783): Pfam Name: Galactose binding lectin domain Pfam Description: Galactose binding lectin domain
  misc_feature (706)..(783): Pfam Name: Galactose binding lectin domain Pfam Description: Galactose binding lectin domain
  misc_feature (560)..(787): Homolog of NCBI NO: 30679742 NR Description: glycosyl hydrolase family 35 (beta-galactosidase)
  misc_feature (1)..(606): Homolog of NCBI NO: 30679742 NR Description: glycosyl hydrolase family 35 (beta-galactosidase)
  misc_feature (560)..(787): Homolog of NCBI NO: 25326168 NR Description: probable beta-galactosidase [imported] -
  misc_feature (1)..(606): Homolog of NCBI NO: 25326168 NR Description: probable beta-galactosidase [imported] -
  misc_feature (1)..(784): Homolog of NCBI NO: 30683905 NR Description: glycosyl hydrolase family 35 (beta-galactosidase)
  misc_feature (560)..(787): Homolog of NCBI NO: 30679742 NR Description: glycosyl hydrolase family 35 (beta-galactosidase)
  misc_feature (560)..(787): Homolog of NCBI NO: 25326168 NR Description: probable beta-galactosidase [imported] -
  misc_feature (1)..(784): Homolog of NCBI NO: 30683905 NR Description: glycosyl hydrolase family 35 (beta-galactosidase)
  misc_feature (1)..(606): Homolog of NCBI NO: 25326168 NR Description: probable beta-galactosidase [imported] -
  misc_feature (560)..(787): Homolog of NCBI NO: 25326168 NR Description: probable beta-galactosidase [imported] -
  misc_feature (1)..(606): Homolog of NCBI NO: 30679742 NR Description: glycosyl hydrolase family 35 (beta-galactosidase)
  misc_feature (560)..(787): Homolog of NCBI NO: 30679742 NR Description: glycosyl hydrolase family 35 (beta-galactosidase)
  misc_feature (1)..(784): Homolog of NCBI NO: 1352077 NR Description: Beta-galactosidase precursor (Lactase) (Acid
  misc_feature (1)..(784): Homolog of NCBI NO: 15231354 NR Description: glycosyl hydrolase family 35 (beta-galactosidase)
  misc_feature (1)..(784): Homolog of NCBI NO: 20260596 NR Description: galactosidase, putative [Arabidopsis thaliana]
  misc_feature (1)..(784): Homolog of NCBI NO: 4138137 NR Description: ss-galactosidase [Lycopersicon esculentum]
  misc_feature (1)..(670): Homolog of NCBI NO: 30687121 NR Description: glycosyl hydrolase family 35 (beta-galactosidase)
  misc_feature (1)..(784): Homolog of NCBI NO: 1352077 NR Description: Beta-galactosidase precursor (Lactase) (Acid
  misc_feature (1)..(784): Homolog of NCBI NO: 15231354 NR Description: glycosyl hydrolase family 35 (beta-galactosidase)
  misc_feature (1)..(784): Homolog of NCBI NO: 20260596 NR Description: galactosidase, putative [Arabidopsis thaliana]
  misc_feature (1)..(784): Homolog of NCBI NO: 4138137 NR Description: ss-galactosidase [Lycopersicon esculentum]
  misc_feature (1)..(670): Homolog of NCBI NO: 30687121 NR Description: glycosyl hydrolase family 35 (beta-galactosidase)
  misc_feature (1)..(784): Homolog of NCBI NO: 30683905 NR Description: glycosyl hydrolase family 35 (beta-galactosidase)
  misc_feature (1)..(606): Homolog of NCBI NO: 25326168 NR Description: probable beta-galactosidase [imported] -
  misc_feature (1)..(606): Homolog of NCBI NO: 30679742 NR Description: glycosyl hydrolase family 35 (beta-galactosidase)
  misc_feature (1)..(670): Homolog of NCBI NO: 30687121 NR Description: glycosyl hydrolase family 35 (beta-galactosidase)
  misc_feature (1)..(784): Homolog of NCBI NO: 4138137 NR Description: ss-galactosidase [Lycopersicon esculentum]
  misc_feature (1)..(784): Homolog of NCBI NO: 20260596 NR Description: galactosidase, putative [Arabidopsis thaliana]
  misc_feature (1)..(784): Homolog of NCBI NO: 15231354 NR Description: glycosyl hydrolase family 35 (beta-galactosidase)
  misc_feature (1)..(784): Homolog of NCBI NO: 1352077 NR Description: Beta-galactosidase precursor (Lactase) (Acid

SEQ ID NO: 45792 - DNA, 2367 bp, Arabidopsis thaliana
  misc_feature (1)..(2367): Ceres Seq. ID no. 13600852
  misc_feature: MA Experiment ID: 20000307 Result: Down-regulated in Transcription
  misc_feature: MA Experiment 20000307 PARAMETER Experiment Name: At_Germinating_Seeds_Sub_P Parameter: Age (hr) Value: 24 vs. 0
  misc_feature: MA Experiment 20000307 PARAMETER Experiment Name: At_Germinating_Seeds_Sub_P Parameter: Organism Value: A. thaliana
  misc_feature: MA Experiment 20000307 PARAMETER Experiment Name: At_Germinating_Seeds_Sub_P Parameter: Plant Line Value: WS
  misc_feature: MA Experiment 20000307 PARAMETER Experiment Name: At_Germinating_Seeds_Sub_P Parameter: Tissue Value: Germinating Seeds
  misc_feature: MA Experiment ID: 20000328 Result: Up-regulated in Transcription
  misc_feature: MA Experiment 20000328 PARAMETER Experiment Name: At_42deg_Heat_Sub_P Parameter: Age (day) Value: 14
  misc_feature: MA Experiment 20000328 PARAMETER Experiment Name: At_42deg_Heat_Sub_P Parameter: Organism Value: A. thaliana
  misc_feature: MA Experiment 20000328 PARAMETER Experiment Name: At_42deg_Heat_Sub_P Parameter: Plant Line Value: WS
  misc_feature: MA Experiment 20000328 PARAMETER Experiment Name: At_42deg_Heat_Sub_P Parameter: Temperature (deg C) Value: 42 vs. 22
  misc_feature: MA Experiment 20000328 PARAMETER Experiment Name: At_42deg_Heat_Sub_P Parameter: Timepoint (hr) Value: 6
  misc_feature: MA Experiment 20000328 PARAMETER Experiment Name: At_42deg_Heat_Sub_P Parameter: Tissue Value: Aerial
  misc_feature: MA Experiment ID: 20001807 Result: Up-regulated in Transcription
  misc_feature: MA Experiment 20001807 PARAMETER Experiment Name: At_50mM_NH4NO3_L-to-H_Sub_P Parameter: Timepoint (hr) Value: 6
  misc_feature: MA Experiment 20001807 PARAMETER Experiment Name: At_50mM_NH4NO3_L-to-H_Sub_P Parameter: Tissue Value: Leaf
  misc_feature: MA Experiment 20001807 PARAMETER Experiment Name: At_50mM_NH4NO3_L-to-H_Sub_P Parameter: Treatment Value: 50mM NH4NO3 vs 100mM Mannitol
gagcagccaaaacatttcttgttcatctctccgaccttaaaccctccgatccaaaaatctccaccgactctaatccaatcaaatggcctccgtcgcgcttctacggtcttttcgtcgccgtgaagtccaaatggcttccgtatctgcgtttaaatccgtttccgcaaatggaaagaattctatgtttgggaaattaggttacttggcgagacctttctgctcgaggcctgtggggaatgatgttattggtattgatttgggtactaccaattcttgtgtatctgtgatggagggaaagaccgctagggttattgagaatgcggaaggaagtcgaaccacaccatcggttgttgctatgaaccaaaaaggggaactccttgttggaacaccggctaaacgtcaggccgtgaccaatccaacaaacacgattttcggttctaaacgtttgattgggagacgttttgatgatccacagactcagaaggagatgaaaatggttccttacaagattgttaaggcacctaacggtgatgcttgggtcgaagccaatggacaaaagttttctcccagtcagattggagctaatgtcctcactaaaatgaaggaaacagctgaagcttacctcgggaaatctatcaacaaagctgttgttaccgttccagcttatttcaatgatgcacagagacaagccactaaggatgctgggaaaatcgctggtcttgatgtccagaggatcatcaacgaacctacagctgctgcactatcatatggtatgaacaacaaggaaggtgtcattgcagtgtttgatcttggaggtggaacctttgatgtttctatcttggaaatctcaagtggtgtttttgaggttaaagcaacaaatggagatacctttttgggaggagaagactttgacaacaccttgttggagtacttggttaatgagttcaaaagatcagataatattgatctgactaaagacaaccttgccctccagaggctgagagaagctgcagagaaggccaagattgagctctcatcgacaactcagaccgaaatcaacctgcctttcattacagcggatgcttcaggagctaagcacttgaacatcaccttaactaggtcaaagtttgaaggtttggtgggcaagttgattgagagaacaagatccccgtgccaaaactgcctgaaggatgctggagtcacaattaaggaagttgatgaggttcttcttgttggtggaatgacccgtgttcccaaagtgcaagagatagtttctgagatctttgggaagagtccttgtaaaggtgttaacccggatgaagcggttgccatgggagcagccattcaaggtggtatcctccgtggtgatgtgaaggatttgcttcttttggacgtggttcctctctcattgggtattgaaacattgggtgcagtcttcaccaagttgattccacgaaacaccactattcccacaaagaagtctcaggttttctccacagctgctgacaaccagatgcaagtgggaatcaaagttcttcagggagaacgtgaaatggcggctgacaacaaagtgcttggagaattcgaccttgttggcatcccaccggcacctagaggaatgccacagatcgaagttacattcgacattgatgcaaatggtattactactgtctcagcgaaagacaaagcaacaggtaaagagcagaatatcacaatcagatcttcaggtggtctctcagacgatgagattaacagaatggtgaaagaagctgagcttaacgcacagaaggatcaagagaagaagcaacttatcgaccttaggaacagtgctgatacaacaatttacagtgtagagaagagcttgagtgaatacagagagaagattccagctgagattgcctctgagatcgaaactgcagtgtctgatctcaggactgctatggctggtgaggatgtcgaggacatcaaggctaaggtcgaagctgcaaacaaggcagtgtcgaagatcggagaacacatgtctaagggatctggatcatctggttccgatggaagctctggtgagggtacaagtgggactgagcagacgcctgaagctgaattcgaggaggccagtggttcaaggaagtgaggttgccgctaaccggttccatacagaaatcaggtttttcccaaaataagtttacatgcttatctcctccctcacaaatttgattagttttgtgtatttaaaaccttatttgagaggtatcatctcttcgaaacctattgagagtcccggatgtagtttgtttgattggttattttcatgaagtttacggttattatcttgaccggttaaatgagtcaatttcacataagattatg

SEQ ID NO: 45793 - protein, 682 aa, Arabidopsis thaliana
  peptide (1)..(682): Ceres Seq. ID no. 13600853
  misc_feature (54)..(648): Pfam Name: Hsp70 protein Pfam Description: Hsp70 protein
  misc_feature (54)..(648): Pfam Name: Hsp70 protein Pfam Description: Hsp70 protein
  misc_feature (54)..(648): Pfam Name: Hsp70 protein Pfam Description: Hsp70 protein
  misc_feature (17)..(656): Homolog of NCBI NO: 31790767 NR Description: heat shock protein 70 precursor [Neocallimastix
  misc_feature (1)..(673): Homolog of NCBI NO: 34878657 NR Description: similar to grp75 [Rattus norvegicus]
  misc_feature (1)..(676): Homolog of NCBI NO: 585273 NR Description: Heat shock 70 kDa protein, mitochondrial
  misc_feature (42)..(676): Homolog of NCBI NO: 27476086 NR Description: Putative heat shock 70 KD protein, mitochondrial
  misc_feature (7)..(677): Homolog of NCBI NO: 7441881 NR Description: dnaK-type molecular chaperone HSC70-10,
  misc_feature (17)..(656): Homolog of NCBI NO: 31790767 NR Description: heat shock protein 70 precursor [Neocallimastix
  misc_feature (1)..(676): Homolog of NCBI NO: 585273 NR Description: Heat shock 70 kDa protein, mitochondrial
  misc_feature (7)..(677): Homolog of NCBI NO: 7441881 NR Description: dnaK-type molecular chaperone HSC70-10,
  misc_feature (42)..(676): Homolog of NCBI NO: 27476086 NR Description: Putative heat shock 70 KD protein, mitochondrial
  misc_feature (1)..(676): Homolog of NCBI NO: 585273 NR Description: Heat shock 70 kDa protein, mitochondrial
  misc_feature (1)..(673): Homolog of NCBI NO: 34878657 NR Description: similar to grp75 [Rattus norvegicus]
  misc_feature (17)..(656): Homolog of NCBI NO: 31790767 NR Description: heat shock protein 70 precursor [Neocallimastix
  misc_feature (3)..(676): Homolog of NCBI NO: 7441844 NR Description: dnaK-type molecular chaperone PHSP1 precursor,
  misc_feature (3)..(676): Homolog of NCBI NO: 585272 NR Description: HEAT SHOCK 70 KD PROTEIN, MITOCHONDRIAL PRECURSOR
  misc_feature (5)..(676): Homolog of NCBI NO: 399940 NR Description: HEAT SHOCK 70 KD PROTEIN, MITOCHONDRIAL PRECURSOR
  misc_feature (1)..(676): Homolog of NCBI NO: 15242459 NR Description: heat shock protein mtHsc70-2 (Hsc70-5)
  misc_feature (7)..(677): Homolog of NCBI NO: 7441879 NR Description: dnaK-type molecular chaperone HSC70-11,
  misc_feature (3)..(676): Homolog of NCBI NO: 7441844 NR Description: dnaK-type molecular chaperone PHSP1 precursor,
  misc_feature (3)..(676): Homolog of NCBI NO: 585272 NR Description: HEAT SHOCK 70 KD PROTEIN, MITOCHONDRIAL PRECURSOR
  misc_feature (5)..(676): Homolog of NCBI NO: 399940 NR Description: HEAT SHOCK 70 KD PROTEIN, MITOCHONDRIAL PRECURSOR
  misc_feature (1)..(676): Homolog of NCBI NO: 15242459 NR Description: heat shock protein mtHsc70-2 (Hsc70-5)
  misc_feature (7)..(677): Homolog of NCBI NO: 7441879 NR Description: dnaK-type molecular chaperone HSC70-11,
  misc_feature (7)..(677): Homolog of NCBI NO: 7441881 NR Description: dnaK-type molecular chaperone HSC70-10,
  misc_feature (42)..(676): Homolog of NCBI NO: 27476086 NR Description: Putative heat shock 70 KD protein, mitochondrial
  misc_feature (1)..(673): Homolog of NCBI NO: 34878657 NR Description: similar to grp75 [Rattus norvegicus]
  misc_feature (7)..(677): Homolog of NCBI NO: 7441879 NR Description: dnaK-type molecular chaperone HSC70-11,
  misc_feature (1)..(676): Homolog of NCBI NO: 15242459 NR Description: heat shock protein mtHsc70-2 (Hsc70-5)
  misc_feature (5)..(676): Homolog of NCBI NO: 399940 NR Description: HEAT SHOCK 70 KD PROTEIN, MITOCHONDRIAL PRECURSOR
  misc_feature (3)..(676): Homolog of NCBI NO: 585272 NR Description: HEAT SHOCK 70 KD PROTEIN, MITOCHONDRIAL PRECURSOR
  misc_feature (3)..(676): Homolog of NCBI NO: 7441844 NR Description: dnaK-type molecular chaperone PHSP1 precursor,
MASVALLRSFRRREVQMASVSAFKSVSANGKNSMFGKLGYLARPFCSRPVGNDVIGIDLGTTNSCVSVMEGKTARVIENAEGSRTTPSVVAMNQKGELLVGTPAKRQAVTNPTNTIFGSKRLIGRRFDDPQTQKEMKMVPYKIVKAPNGDAWVEANGQKFSPSQIGANVLTKMKETAEAYLGKSINKAVVTVPAYFNDAQRQATKDAGKIAGLDVQRIINEPTAAALSYGMNNKEGVIAVFDLGGGTFDVSILEISSGVFEVKATNGDTFLGGEDFDNTLLEYLVNEFKRSDNIDLTKDNLALQRLREAAEKAKIELSSTTQTEINLPFITADASGAKHLNITLTRSKFEGLVGKLIERTRSPCQNCLKDAGVTIKEVDEVLLVGGMTRVPKVQEIVSEIFGKSPCKGVNPDEAVAMGAAIQGGILRGDVKDLLLLDVVPLSLGIETLGAVFTKLIPRNTTIPTKKSQVFSTAADNQMQVGIKVLQGEREMAADNKVLGEFDLVGIPPAPRGMPQIEVTFDIDANGITTVSAKDKATGKEQNITIRSSGGLSDDEINRMVKEAELNAQKDQEKKQLIDLRNSADTTIYSVEKSLSEYREKIPAEIASEIETAVSDLRTAMAGEDVEDIKAKVEAANKAVSKIGEHMSKGSGSSGSDGSSGEGTSGTEQTPEAEFEEASGSRK

SEQ ID NO: 45794 - protein, 666 aa, Arabidopsis thaliana
  peptide (1)..(666): Ceres Seq. ID no. 13600854
  misc_feature (38)..(632): Pfam Name: Hsp70 protein Pfam Description: Hsp70 protein
  misc_feature (38)..(632): Pfam Name: Hsp70 protein Pfam Description: Hsp70 protein
  misc_feature (38)..(632): Pfam Name: Hsp70 protein Pfam Description: Hsp70 protein
  misc_feature (1)..(640): Homolog of NCBI NO: 31790767 NR Description: heat shock protein 70 precursor [Neocallimastix
  misc_feature (1)..(657): Homolog of NCBI NO: 34878657 NR Description: similar to grp75 [Rattus norvegicus]
  misc_feature (1)..(660): Homolog of NCBI NO: 585273 NR Description: Heat shock 70 kDa protein, mitochondrial
  misc_feature (26)..(660): Homolog of NCBI NO: 27476086 NR Description: Putative heat shock 70 KD protein, mitochondrial
  misc_feature (1)..(661): Homolog of NCBI NO: 7441881 NR Description: dnaK-type molecular chaperone HSC70-10,
  misc_feature (1)..(640): Homolog of NCBI NO: 31790767 NR Description: heat shock protein 70 precursor [Neocallimastix
  misc_feature (1)..(660): Homolog of NCBI NO: 585273 NR Description: Heat shock 70 kDa protein, mitochondrial
  misc_feature (1)..(661): Homolog of NCBI NO: 7441881 NR Description: dnaK-type molecular chaperone HSC70-10,
  misc_feature (26)..(660): Homolog of NCBI NO: 27476086 NR Description: Putative heat shock 70 KD protein, mitochondrial
  misc_feature (1)..(660): Homolog of NCBI NO: 585273 NR Description: Heat shock 70 kDa protein, mitochondrial
  misc_feature (1)..(657): Homolog of NCBI NO: 34878657 NR Description: similar to grp75 [Rattus norvegicus]
  misc_feature (1)..(640): Homolog of NCBI NO: 31790767 NR Description: heat shock protein 70 precursor [Neocallimastix
  misc_feature (1)..(660): Homolog of NCBI NO: 7441844 NR Description: dnaK-type molecular chaperone PHSP1 precursor,
  misc_feature (1)..(660): Homolog of NCBI NO: 585272 NR Description: HEAT SHOCK 70 KD PROTEIN, MITOCHONDRIAL PRECURSOR
  misc_feature (1)..(660): Homolog of NCBI NO: 399940 NR Description: HEAT SHOCK 70 KD PROTEIN, MITOCHONDRIAL PRECURSOR
  misc_feature (1)..(660): Homolog of NCBI NO: 15242459 NR Description: heat shock protein mtHsc70-2 (Hsc70-5)
  misc_feature (1)..(661): Homolog of NCBI NO: 7441879 NR Description: dnaK-type molecular chaperone HSC70-11,
  misc_feature (1)..(660): Homolog of NCBI NO: 7441844 NR Description: dnaK-type molecular chaperone PHSP1 precursor,
  misc_feature (1)..(660): Homolog of NCBI NO: 585272 NR Description: HEAT SHOCK 70 KD PROTEIN, MITOCHONDRIAL PRECURSOR
  misc_feature (1)..(660): Homolog of NCBI NO: 399940 NR Description: HEAT SHOCK 70 KD PROTEIN, MITOCHONDRIAL PRECURSOR
  misc_feature (1)..(660): Homolog of NCBI NO: 15242459 NR Description: heat shock protein mtHsc70-2 (Hsc70-5)
  misc_feature (1)..(661): Homolog of NCBI NO: 7441879 NR Description: dnaK-type molecular chaperone HSC70-11,
  misc_feature (1)..(661): Homolog of NCBI NO: 7441881 NR Description: dnaK-type molecular chaperone HSC70-10,
  misc_feature (26)..(660): Homolog of NCBI NO: 27476086 NR Description: Putative heat shock 70 KD protein, mitochondrial
  misc_feature (1)..(657): Homolog of NCBI NO: 34878657 NR Description: similar to grp75 [Rattus norvegicus]
  misc_feature (1)..(661): Homolog of NCBI NO: 7441879 NR Description: dnaK-type molecular chaperone HSC70-11,
  misc_feature (1)..(660): Homolog of NCBI NO: 15242459 NR Description: heat shock protein mtHsc70-2 (Hsc70-5)
  misc_feature (1)..(660): Homolog of NCBI NO: 399940 NR Description: HEAT SHOCK 70 KD PROTEIN, MITOCHONDRIAL PRECURSOR
  misc_feature (1)..(660): Homolog of NCBI NO: 585272 NR Description: HEAT SHOCK 70 KD PROTEIN, MITOCHONDRIAL PRECURSOR
  misc_feature (1)..(660): Homolog of NCBI NO: 7441844 NR Description: dnaK-type molecular chaperone PHSP1 precursor,
MASVSAFKSVSANGKNSMFGKLGYLARPFCSRPVGNDVIGIDLGTTNSCVSVMEGKTARVIENAEGSRTTPSVVAMNQKGELLVGTPAKRQAVTNPTNTIFGSKRLIGRRFDDPQTQKEMKMVPYKIVKAPNGDAWVEANGQKFSPSQIGANVLTKMKETAEAYLGKSINKAVVTVPAYFNDAQRQATKDAGKIAGLDVQRIINEPTAAALSYGMNNKEGVIAVFDLGGGTFDVSILEISSGVFEVKATNGDTFLGGEDFDNTLLEYLVNEFKRSDNIDLTKDNLALQRLREAAEKAKIELSSTTQTEINLPFITADASGAKHLNITLTRSKFEGLVGKLIERTRSPCQNCLKDAGVTIKEVDEVLLVGGMTRVPKVQEIVSEIFGKSPCKGVNPDEAVAMGAAIQGGILRGDVKDLLLLDVVPLSLGIETLGAVFTKLIPRNTTIPTKKSQVFSTAADNQMQVGIKVLQGEREMAADNKVLGEFDLVGIPPAPRGMPQIEVTFDIDANGITTVSAKDKATGKEQNITIRSSGGLSDDEINRMVKEAELNAQKDQEKKQLIDLRNSADTTIYSVEKSLSEYREKIPAEIASEIETAVSDLRTAMAGEDVEDIKAKVEAANKAVSKIGEHMSKGSGSSGSDGSSGEGTSGTEQTPEAEFEEASGSRK

SEQ ID NO: 45795 - protein, 649 aa, Arabidopsis thaliana
  peptide (1)..(649): Ceres Seq. ID no. 13600855
  misc_feature (21)..(615): Pfam Name: Hsp70 protein Pfam Description: Hsp70 protein
  misc_feature (21)..(615): Pfam Name: Hsp70 protein Pfam Description: Hsp70 protein
  misc_feature (21)..(615): Pfam Name: Hsp70 protein Pfam Description: Hsp70 protein
  misc_feature (1)..(623): Homolog of NCBI NO: 31790767 NR Description: heat shock protein 70 precursor [Neocallimastix
  misc_feature (1)..(640): Homolog of NCBI NO: 34878657 NR Description: similar to grp75 [Rattus norvegicus]
  misc_feature (1)..(643): Homolog of NCBI NO: 585273 NR Description: Heat shock 70 kDa protein, mitochondrial
  misc_feature (9)..(643): Homolog of NCBI NO: 27476086 NR Description: Putative heat shock 70 KD protein, mitochondrial
  misc_feature (1)..(644): Homolog of NCBI NO: 7441881 NR Description: dnaK-type molecular chaperone HSC70-10,
  misc_feature (1)..(623): Homolog of NCBI NO: 31790767 NR Description: heat shock protein 70 precursor [Neocallimastix
  misc_feature (1)..(643): Homolog of NCBI NO: 585273 NR Description: Heat shock 70 kDa protein, mitochondrial
  misc_feature (1)..(644): Homolog of NCBI NO: 7441881 NR Description: dnaK-type molecular chaperone HSC70-10,
  misc_feature (9)..(643): Homolog of NCBI NO: 27476086 NR Description: Putative heat shock 70 KD protein, mitochondrial
  misc_feature (1)..(643): Homolog of NCBI NO: 585273 NR Description: Heat shock 70 kDa protein, mitochondrial
  misc_feature (1)..(640): Homolog of NCBI NO: 34878657 NR Description: similar to grp75 [Rattus norvegicus]
  misc_feature (1)..(623): Homolog of NCBI NO: 31790767 NR Description: heat shock protein 70 precursor [Neocallimastix
  misc_feature (1)..(643): Homolog of NCBI NO: 7441844 NR Description: dnaK-type molecular chaperone PHSP1 precursor,
  misc_feature (1)..(643): Homolog of NCBI NO: 585272 NR Description: HEAT SHOCK 70 KD PROTEIN, MITOCHONDRIAL PRECURSOR
  misc_feature (1)..(643): Homolog of NCBI NO: 399940 NR Description: HEAT SHOCK 70 KD PROTEIN, MITOCHONDRIAL PRECURSOR
  misc_feature (1)..(643): Homolog of NCBI NO: 15242459 NR Description: heat shock protein mtHsc70-2 (Hsc70-5)
  misc_feature (1)..(644): Homolog of NCBI NO: 7441879 NR Description: dnaK-type molecular chaperone HSC70-11,
  misc_feature (1)..(643): Homolog of NCBI NO: 7441844 NR Description: dnaK-type molecular chaperone PHSP1 precursor,
  misc_feature (1)..(643): Homolog of NCBI NO: 585272 NR Description: HEAT SHOCK 70 KD PROTEIN, MITOCHONDRIAL PRECURSOR
  misc_feature (1)..(643): Homolog of NCBI NO: 399940 NR Description: HEAT SHOCK 70 KD PROTEIN, MITOCHONDRIAL PRECURSOR
  misc_feature (1)..(643): Homolog of NCBI NO: 15242459 NR Description: heat shock protein mtHsc70-2 (Hsc70-5)
  misc_feature (1)..(644): Homolog of NCBI NO: 7441879 NR Description: dnaK-type molecular chaperone HSC70-11,
  misc_feature (1)..(644): Homolog of NCBI NO: 7441881 NR Description: dnaK-type molecular chaperone HSC70-10,
  misc_feature (9)..(643): Homolog of NCBI NO: 27476086 NR Description: Putative heat shock 70 KD protein, mitochondrial
  misc_feature (1)..(640): Homolog of NCBI NO: 34878657 NR Description: similar to grp75 [Rattus norvegicus]
  misc_feature (1)..(644): Homolog of NCBI NO: 7441879 NR Description: dnaK-type molecular chaperone HSC70-11,
  misc_feature (1)..(643): Homolog of NCBI NO: 15242459 NR Description: heat shock protein mtHsc70-2 (Hsc70-5)
  misc_feature (1)..(643): Homolog of NCBI NO: 399940 NR Description: HEAT SHOCK 70 KD PROTEIN, MITOCHONDRIAL PRECURSOR
  misc_feature (1)..(643): Homolog of NCBI NO: 585272 NR Description: HEAT SHOCK 70 KD PROTEIN, MITOCHONDRIAL PRECURSOR
  misc_feature (1)..(643): Homolog of NCBI NO: 7441844 NR Description: dnaK-type molecular chaperone PHSP1 precursor,
MFGKLGYLARPFCSRPVGNDVIGIDLGTTNSCVSVMEGKTARVIENAEGSRTTPSVVAMNQKGELLVGTPAKRQAVTNPTNTIFGSKRLIGRRFDDPQTQKEMKMVPYKIVKAPNGDAWVEANGQKFSPSQIGANVLTKMKETAEAYLGKSINKAVVTVPAYFNDAQRQATKDAGKIAGLDVQRIINEPTAAALSYGMNNKEGVIAVFDLGGGTFDVSILEISSGVFEVKATNGDTFLGGEDFDNTLLEYLVNEFKRSDNIDLTKDNLALQRLREAAEKAKIELSSTTQTEINLPFITADASGAKHLNITLTRSKFEGLVGKLIERTRSPCQNCLKDAGVTIKEVDEVLLVGGMTRVPKVQEIVSEIFGKSPCKGVNPDEAVAMGAAIQGGILRGDVKDLLLLDVVPLSLGIETLGAVFTKLIPRNTTIPTKKSQVFSTAADNQMQVGIKVLQGEREMAADNKVLGEFDLVGIPPAPRGMPQIEVTFDIDANGITTVSAKDKATGKEQNITIRSSGGLSDDEINRMVKEAELNAQKDQEKKQLIDLRNSADTTIYSVEKSLSEYREKIPAEIASEIETAVSDLRTAMAGEDVEDIKAKVEAANKAVSKIGEHMSKGSGSSGSDGSSGEGTSGTEQTPEAEFEEASGSRK

SEQ ID NO: 45796 - DNA, 1766 bp, Arabidopsis thaliana; identical to SEQ ID NO: 29046
  misc_feature (1)..(1766): Ceres Seq. ID no. 13647205
  misc_feature: MA Experiment ID: 20000315 Result: Down-regulated in Transcription
  misc_feature: MA Experiment 20000315 PARAMETER Experiment Name: At_14day_Shoots-Roots_Sub_P Parameter: Age (day) Value: 14
  misc_feature: MA Experiment 20000315 PARAMETER Experiment Name: At_14day_Shoots-Roots_Sub_P Parameter: Organism Value: A. thaliana
  misc_feature: MA Experiment 20000315 PARAMETER Experiment Name: At_14day_Shoots-Roots_Sub_P Parameter: Plant Line Value: WS
  misc_feature: MA Experiment 20000315 PARAMETER Experiment Name: At_14day_Shoots-Roots_Sub_P Parameter: Tissue Value: Shoots vs. Whole Plant
  misc_feature: MA Experiment ID: 20000329 Result: Down-regulated in Transcription
  misc_feature: MA Experiment 20000329 PARAMETER Experiment Name: At_4deg_Cold_Sub_P Parameter: Age (day) Value: 14
  misc_feature: MA Experiment 20000329 PARAMETER Experiment Name: At_4deg_Cold_Sub_P Parameter: Organism Value: A. thaliana
  misc_feature: MA Experiment 20000329 PARAMETER Experiment Name: At_4deg_Cold_Sub_P Parameter: Plant Line Value: WS
  misc_feature: MA Experiment 20000329 PARAMETER Experiment Name: At_4deg_Cold_Sub_P Parameter: Temperature (deg C) Value: 4 vs. 22
  misc_feature: MA Experiment 20000329 PARAMETER Experiment Name: At_4deg_Cold_Sub_P Parameter: Timepoint (hr) Value: 6
  misc_feature: MA Experiment 20000329 PARAMETER Experiment Name: At_4deg_Cold_Sub_P Parameter: Tissue Value: Aerial
  misc_feature: MA Experiment ID: 20000355 Result: Down-regulated in Transcription
  misc_feature: MA Experiment 20000355 PARAMETER Experiment Name: At_Siliques_Sub_P Parameter: Age (day) Value: 21
  misc_feature: MA Experiment 20000355 PARAMETER Experiment Name: At_Siliques_Sub_P Parameter: Organism Value: A. thaliana
  misc_feature: MA Experiment 20000355 PARAMETER Experiment Name: At_Siliques_Sub_P Parameter: Plant Line Value: WS
  misc_feature: MA Experiment 20000355 PARAMETER Experiment Name: At_Siliques_Sub_P Parameter: Tissue Value: Less Than 5mm Siliques vs. Whole Plant

SEQ ID NO: 45797 - protein, 345 aa, Arabidopsis thaliana; identical to SEQ ID NO: 29047
  peptide (1)..(345): Ceres Seq. ID no. 15218678
  misc_feature (101)..(151): Pfam Name: Carboxylesterase Pfam Description: Carboxylesterase
  misc_feature (101)..(151): Pfam Name: Carboxylesterase Pfam Description: Carboxylesterase
  misc_feature (30)..(341): Homolog of NCBI NO: 34904760 NR Description: similar to carboxylesterase
  misc_feature (13)..(345): Homolog of NCBI NO: 34904772 NR Description: similar to carboxylesterase
  misc_feature (16)..(343): Homolog of NCBI NO: 34904774 NR Description: similar to carboxylesterase
  misc_feature (16)..(343): Homolog of NCBI NO: 34393714 NR Description: putative esterase [Oryza sativa (japonica
  misc_feature (3)..(341): Homolog of NCBI NO: 34904770 NR Description: similar to carboxylesterase
  misc_feature (30)..(341): Homolog of NCBI NO: 34904760 NR Description: similar to carboxylesterase
  misc_feature (16)..(343): Homolog of NCBI NO: 34904774 NR Description: similar to carboxylesterase
  misc_feature (3)..(341): Homolog of NCBI NO: 34904770 NR Description: similar to carboxylesterase
  misc_feature (1)..(345): Homolog of NCBI NO: 15229905 NR Description: expressed protein [Arabidopsis thaliana]
  misc_feature (1)..(345): Homolog of NCBI NO: 15240483 NR Description: expressed protein [Arabidopsis thaliana]
  misc_feature (1)..(343): Homolog of NCBI NO: 15229371 NR Description: expressed protein [Arabidopsis thaliana]
  misc_feature (13)..(342): Homolog of NCBI NO: 21618039 NR Description: unknown [Arabidopsis thaliana]
  misc_feature (13)..(342): Homolog of NCBI NO: 15237783 NR Description: expressed protein [Arabidopsis thaliana]
  misc_feature (16)..(343): Homolog of NCBI NO: 34393714 NR Description: putative esterase [Oryza sativa (japonica
  misc_feature (13)..(345): Homolog of NCBI NO: 34904772 NR Description: similar to carboxylesterase
  misc_feature (13)..(342): Homolog of NCBI NO: 15237783 NR Description: expressed protein [Arabidopsis thaliana]
  misc_feature (13)..(342): Homolog of NCBI NO: 21618039 NR Description: unknown [Arabidopsis thaliana]
  misc_feature (1)..(343): Homolog of NCBI NO: 15229371 NR Description: expressed protein [Arabidopsis thaliana]
  misc_feature (1)..(345): Homolog of NCBI NO: 15240483 NR Description: expressed protein [Arabidopsis thaliana]
  misc_feature (1)..(345): Homolog of NCBI NO: 15229905 NR Description: expressed protein [Arabidopsis thaliana]

SEQ ID NO: 45798 - DNA, 2145 bp, Arabidopsis thaliana
  misc_feature (1)..(2145): Ceres Seq. ID no. 15168989
  misc_feature: MA Experiment ID: 20000329 Result: Down-regulated in Transcription
  misc_feature: MA Experiment 20000329 PARAMETER Experiment Name: At_4deg_Cold_Sub_P Parameter: Age (day) Value: 14
  misc_feature: MA Experiment 20000329 PARAMETER Experiment Name: At_4deg_Cold_Sub_P Parameter: Organism Value: A. thaliana
  misc_feature: MA Experiment 20000329 PARAMETER Experiment Name: At_4deg_Cold_Sub_P Parameter: Plant Line Value: WS
  misc_feature: MA Experiment 20000329 PARAMETER Experiment Name: At_4deg_Cold_Sub_P Parameter: Temperature (deg C) Value: 4 vs. 22
  misc_feature: MA Experiment 20000329 PARAMETER Experiment Name: At_4deg_Cold_Sub_P Parameter: Timepoint (hr) Value: 6
  misc_feature: MA Experiment 20000329 PARAMETER Experiment Name: At_4deg_Cold_Sub_P Parameter: Tissue Value: Aerial
  misc_feature: MA Experiment ID: 20000332 Result: Down-regulated in Transcription
  misc_feature: MA Experiment 20000332 PARAMETER Experiment Name: At_4deg_Cold_Sub_P Parameter: Age (day) Value: 14
  misc_feature: MA Experiment 20000332 PARAMETER Experiment Name: At_4deg_Cold_Sub_P Parameter: Organism Value: A. thaliana
  misc_feature: MA Experiment 20000332 PARAMETER Experiment Name: At_4deg_Cold_Sub_P Parameter: Plant Line Value: WS
  misc_feature: MA Experiment 20000332 PARAMETER Experiment Name: At_4deg_Cold_Sub_P Parameter: Temperature (deg C) Value: 4 vs. 22
  misc_feature: MA Experiment 20000332 PARAMETER Experiment Name: At_4deg_Cold_Sub_P Parameter: Timepoint (hr) Value: 2
  misc_feature: MA Experiment 20000332 PARAMETER Experiment Name: At_4deg_Cold_Sub_P Parameter: Tissue Value: Aerial
  misc_feature: MA Experiment ID: 20000348 Result: Up-regulated in Transcription
  misc_feature: MA Experiment 20000348 PARAMETER Experiment Name: At_100uM_ABA_Sub_P Parameter: Age (day) Value: 14
  misc_feature: MA Experiment 20000348 PARAMETER Experiment Name: At_100uM_ABA_Sub_P Parameter: Organism Value: A. thaliana
  misc_feature: MA Experiment 20000348 PARAMETER Experiment Name: At_100uM_ABA_Sub_P Parameter: Plant Line Value: WS
  misc_feature: MA Experiment 20000348 PARAMETER Experiment Name: At_100uM_ABA_Sub_P Parameter: Timepoint (hr) Value: 1
  misc_feature: MA Experiment 20000348 PARAMETER Experiment Name: At_100uM_ABA_Sub_P Parameter: Tissue Value: Aerial
  misc_feature: MA Experiment 20000348 PARAMETER Experiment Name: At_100uM_ABA_Sub_P Parameter: Treatment Value: 100uM ABA vs. No Treatment
  misc_feature: MA Experiment ID: 20000355 Result: Down-regulated in Transcription
  misc_feature: MA Experiment 20000355 PARAMETER Experiment Name: At_Siliques_Sub_P Parameter: Age (day) Value: 21
  misc_feature: MA Experiment 20000355 PARAMETER Experiment Name: At_Siliques_Sub_P Parameter: Organism Value: A. thaliana
  misc_feature: MA Experiment 20000355 PARAMETER Experiment Name: At_Siliques_Sub_P Parameter: Plant Line Value: WS
  misc_feature: MA Experiment 20000355 PARAMETER Experiment Name: At_Siliques_Sub_P Parameter: Tissue Value: Less Than 5mm Siliques vs. Whole Plant
tcacacactaaaagcttgcaaaaaccataagcttatctacttactcatctctctcacaaatcattttctcagacttctctctttctcttaaaccatgcctgaggcaccaaagaaagaatctttagaggttttcgatctgacgcttgaccaaaaaaacaagcaaaagcttcagttgatcgaagaactcacctctaacgccgaccaagtccaaagacaagtcttggaggagatcttgacccgcaatgctgacgtggagtatctcaggcgacacgacctcaacggtcgcactgaccgtgagactttcaaaaacatcatgcccgttatcacctacgaagatattgagcctgagatcaacaggatcgctaatggtgataaatcacctatcctctcttccaaacccatctctgagttcctcacaagctctgggacatctggtggggagaggaagctaatgccaacaatcgaagaggagctagacaggagatcactcctctacagtctcttgatgcctgtgatgagccagttcgttcctggtctcgaaaacggcaaaggaatgtatttcttgttcatcaagtccgaatccaagactccaggaggcctccctgctcgtcctgtcttaaccagttactacaaatcttcccatttcaaagaaagaccctatgatccttacaccaactacacaagccctaacgagaccatcctttgctctgactcttaccagagcatgtactctcagatgctttgtggcttatgtcaacaccaggaggttcttagagtcggcgctgtcttcgcctctggattcatcagagccatcaagtttcttgagaaacactggatcgagttggtccgtgacatcagaaccgggactctaagttccctgatcaccgatccttcagtgcgtgaggcggtcgccaagatccttaaaccgagcccaaagctagctgatttcgtggaatttgagtgcaagaagtcgtcctggcaagggattattactaggctgtggcctaacacaaagtatgtggatgtgattgtgaccgggacaatgtctcaatacattccaactttggactactacagtaatggcttgcctcttgtctgcacaatgtatgcttcctctgagtgttactttggtgtgaatctaaggccactctgcaaaccaagcgaggtctcttacacgctcataccatccatggcttatttcgagttcttgcctgttcatagaaacaacggtgttactaactccatcaaccttcctaaagcactcactgagaaagagcaacaagagcttgttgatctagttgatgtcaagcttggtcaggaatacgagcttgttgtcaccacttacgccgggctttgcagatacagagttggtgatttattgagagtgactggtttcaagaacaaagcgcctcaattcagtttcatatgtcgcaaaaatgtggtcttgagcatagattccgacaagaccgacgaggttgagcttcagaacgcggtgaagaacgcagtgacacaccttgtcccatttgatgcctcactctctgagtacacgagctatgcagacacaagttccatcccaggccattatgtcctgttttgggagctatgtttggatggaaacacaccgatccctccttcggtcttcgaggactgctgcttagctgtagaagagtcattcaacactgtttatagacaaggaagggttagtgacaagtccataggcccgcttgagatcaagattgttgagccagggacattcgataagctcatggattacgcaatcagcttgggagcatcgattaatcagtataagacgccgagatgcgtgaagtttgctccaattatcgagctattgaactcaagggttgttgatagttacttcagccccaagtgtcctaaatgggttcctggtcacaaacagtgggggagtaactaagatggaatgtggaacgtgaagagactctctttgagctagaaggtttgggacttggacttgcaaatgatgatgtcttctctaatcttaattttagtttaatcttttgttcttttttttttgttatccttttaatatccatagtccctgtgggtttgaaaaccagttgtacaaaaggcaaatcatgttttctccaaccaactctcatcactctc

SEQ ID NO: 45799 - protein, 612 aa, Arabidopsis thaliana
  peptide (1)..(612): Ceres Seq. ID no. 15168990
  misc_feature (23)..(585): Pfam Name: GH3 auxin-responsive promoter Pfam Description: GH3 auxin-responsive promoter
  misc_feature (280)..(591): Homolog of NCBI NO: 13542889 NR Description: D11lgp1 [Mus musculus]
  misc_feature (38)..(604): Homolog of NCBI NO: 40644906 NR Description: GH3-like protein [Physcomitrella patens]
  misc_feature (16)..(608): Homolog of NCBI NO: 15235538 NR Description: auxin-responsive GH3 - like protein [Arabidopsis
  misc_feature (19)..(608): Homolog of NCBI NO: 34909816 NR Description: putative auxin-responsive GH3 protein
  misc_feature (399)..(608): Homolog of NCBI NO: 15226032 NR Description: auxin-regulated protein -related [Arabidopsis
  misc_feature (19)..(399): Homolog of NCBI NO: 15226032 NR Description: auxin-regulated protein -related [Arabidopsis
  misc_feature (19)..(604): Homolog of NCBI NO: 4887010 NR Description: Nt-gh3 deduced protein [Nicotiana tabacum]
  misc_feature (1)..(612): Homolog of NCBI NO: 34910142 NR Description: putative auxin-responsive GH3
  misc_feature (1)..(612): Homolog of NCBI NO: 17978966 NR Description: AT5g54510/F24B18_13 [Arabidopsis thaliana]
  misc_feature (1)..(612): Homolog of NCBI NO: 15239653 NR Description: auxin-responsive-related protein [Arabidopsis
MPEAPKKESLEVFDLTLDQKNKQKLQLIEELTSNADQVQRQVLEEILTRNADVEYLRRHDLNGRTDRETFKNIMPVITYEDIEPEINRIANGDKSPILSSKPISEFLTSSGTSGGERKLMPTIEEELDRRSLLYSLLMPVMSQFVPGLENGKGMYFLFIKSESKTPGGLPARPVLTSYYKSSHFKERPYDPYTNYTSPNETILCSDSYQSMYSQMLCGLCQHQEVLRVGAVFASGFIRAIKFLEKHWIELVRDIRTGTLSSLITDPSVREAVAKILKPSPKLADFVEFECKKSSWQGIITRLWPNTKYVDVIVTGTMSQYIPTLDYYSNGLPLVCTMYASSECYFGVNLRPLCKPSEVSYTLIPSMAYFEFLPVHRNNGVTNSINLPKALTEKEQQELVDLVDVKLGQEYELVVTTYAGLCRYRVGDLLRVTGFKNKAPQFSFICRKNVVLSIDSDKTDEVELQNAVKNAVTHLVPFDASLSEYTSYADTSSIPGHYVLFWELCLDGNTPIPPSVFEDCCLAVEESFNTVYRQGRVSDKSIGPLEIKIVEPGTFDKLMDYAISLGASINQYKTPRCVKFAPIIELLNSRVVDSYFSPKCPKWVPGHKQWGSN

SEQ ID NO: 45800 - protein, 539 aa, Arabidopsis thaliana
  peptide (1)..(539): Ceres Seq. ID no. 15168991
  misc_feature (1)..(512): Pfam Name: GH3 auxin-responsive promoter Pfam Description: GH3 auxin-responsive promoter
  misc_feature (207)..(518): Homolog of NCBI NO: 13542889 NR Description: D11lgp1 [Mus musculus]
  misc_feature (1)..(531): Homolog of NCBI NO: 40644906 NR Description: GH3-like protein [Physcomitrella patens]
  misc_feature (1)..(535): Homolog of NCBI NO: 15235538 NR Description: auxin-responsive GH3 - like protein [Arabidopsis
  misc_feature (1)..(535): Homolog of NCBI NO: 34909816 NR Description: putative auxin-responsive GH3 protein
  misc_feature (326)..(535): Homolog of NCBI NO: 15226032 NR Description: auxin-regulated protein -related [Arabidopsis
  misc_feature (1)..(326): Homolog of NCBI NO: 15226032 NR Description: auxin-regulated protein -related [Arabidopsis
  misc_feature (1)..(531): Homolog of NCBI NO: 4887010 NR Description: Nt-gh3 deduced protein [Nicotiana tabacum]
  misc_feature (1)..(539): Homolog of NCBI NO: 34910142 NR Description: putative auxin-responsive GH3
  misc_feature (1)..(539): Homolog of NCBI NO: 17978966 NR Description: AT5g54510/F24B18_13 [Arabidopsis thaliana]
  misc_feature (1)..(539): Homolog of NCBI NO: 15239653 NR Description: auxin-responsive-related protein [Arabidopsis
MPVITYEDIEPEINRIANGDKSPILSSKPISEFLTSSGTSGGERKLMPTIEEELDRRSLLYSLLMPVMSQFVPGLENGKGMYFLFIKSESKTPGGLPARPVLTSYYKSSHFKERPYDPYTNYTSPNETILCSDSYQSMYSQMLCGLCQHQEVLRVGAVFASGFIRAIKFLEKHWIELVRDIRTGTLSSLITDPSVREAVAKILKPSPKLADFVEFECKKSSWQGIITRLWPNTKYVDVIVTGTMSQYIPTLDYYSNGLPLVCTMYASSECYFGVNLRPLCKPSEVSYTLIPSMAYFEFLPVHRNNGVTNSINLPKALTEKEQQELVDLVDVKLGQEYELVVTTYAGLCRYRVGDLLRVTGFKNKAPQFSFICRKNVVLSIDSDKTDEVELQNAVKNAVTHLVPFDASLSEYTSYADTSSIPGHYVLFWELCLDGNTPIPPSVFEDCCLAVEESFNTVYRQGRVSDKSIGPLEIKIVEPGTFDKLMDYAISLGASINQYKTPRCVKFAPIIELLNSRVVDSYFSPKCPKWVPGHKQWGSN

SEQ ID NO: 45801 - protein, 493 aa, Arabidopsis thaliana
  peptide (1)..(493): Ceres Seq. ID no. 15168992
  misc_feature (1)..(466): Pfam Name: GH3 auxin-responsive promoter Pfam Description: GH3 auxin-responsive promoter
  misc_feature (161)..(472): Homolog of NCBI NO: 13542889 NR Description: D11lgp1 [Mus musculus]
  misc_feature (1)..(485): Homolog of NCBI NO: 40644906 NR Description: GH3-like protein [Physcomitrella patens]
  misc_feature (1)..(489): Homolog of NCBI NO: 15235538 NR Description: auxin-responsive GH3 - like protein [Arabidopsis
  misc_feature (1)..(489): Homolog of NCBI NO: 34909816 NR Description: putative auxin-responsive GH3 protein
  misc_feature (280)..(489): Homolog of NCBI NO: 15226032 NR Description: auxin-regulated protein -related [Arabidopsis
  misc_feature (1)..(280): Homolog of NCBI NO: 15226032 NR Description: auxin-regulated protein -related [Arabidopsis
  misc_feature (1)..(485): Homolog of NCBI NO: 4887010 NR Description: Nt-gh3 deduced protein [Nicotiana tabacum]
  misc_feature (1)..(493): Homolog of NCBI NO: 34910142 NR Description: putative auxin-responsive GH3
  misc_feature (1)..(493): Homolog of NCBI NO: 17978966 NR Description: AT5g54510/F24B18_13 [Arabidopsis thaliana]
  misc_feature (1)..(493): Homolog of NCBI NO: 15239653 NR Description: auxin-responsive-related protein [Arabidopsis
MPTIEEELDRRSLLYSLLMPVMSQFVPGLENGKGMYFLFIKSESKTPGGLPARPVLTSYYKSSHFKERPYDPYTNYTSPNETILCSDSYQSMYSQMLCGLCQHQEVLRVGAVFASGFIRAIKFLEKHWIELVRDIRTGTLSSLITDPSVREAVAKILKPSPKLADFVEFECKKSSWQGIITRLWPNTKYVDVIVTGTMSQYIPTLDYYSNGLPLVCTMYASSECYFGVNLRPLCKPSEVSYTLIPSMAYFEFLPVHRNNGVTNSINLPKALTEKEQQELVDLVDVKLGQEYELVVTTYAGLCRYRVGDLLRVTGFKNKAPQFSFICRKNVVLSIDSDKTDEVELQNAVKNAVTHLVPFDASLSEYTSYADTSSIPGHYVLFWELCLDGNTPIPPSVFEDCCLAVEESFNTVYRQGRVSDKSIGPLEIKIVEPGTFDKLMDYAISLGASINQYKTPRCVKFAPIIELLNSRVVDSYFSPKCPKWVPGHKQWGSN

SEQ ID NO: 45802 - DNA, 2302 bp, Arabidopsis thaliana
  misc_feature (1)..(2302): Ceres Seq. ID no. 13646389
  misc_feature: MA Experiment ID: 20000234 Result: Down-regulated in Transcription
  misc_feature: MA Experiment 20000234 PARAMETER Experiment Name: At_Siliques_P Parameter: Age (day) Value: 21
  misc_feature: MA Experiment 20000234 PARAMETER Experiment Name: At_Siliques_P Parameter: Organism Value: A. thaliana
  misc_feature: MA Experiment 20000234 PARAMETER Experiment Name: At_Siliques_P Parameter: Plant Line Value: WS
  misc_feature: MA Experiment 20000234 PARAMETER Experiment Name: At_Siliques_P Parameter: Tissue Value: Less Than 5mm Siliques vs. Whole Plant
  misc_feature: MA Experiment ID: 20000264 Result: Down-regulated in Transcription
  misc_feature: MA Experiment 20000264 PARAMETER Experiment Name: At_Open_Flower_P Parameter: Age (day) Value: 21
  misc_feature: MA Experiment 20000264 PARAMETER Experiment Name: At_Open_Flower_P Parameter: Plant Line Value: WS
  misc_feature: MA Experiment 20000264 PARAMETER Experiment Name: At_Open_Flower_P Parameter: Tissue Value: Open Flower vs. Whole Plant
  misc_feature: MA Experiment ID: 20000265 Result: Down-regulated in Transcription
  misc_feature: MA Experiment 20000265 PARAMETER Experiment Name: At_Open_Flower_P Parameter: Age (day) Value: 21
  misc_feature: MA Experiment 20000265 PARAMETER Experiment Name: At_Open_Flower_P Parameter: Plant Line Value: WS
  misc_feature: MA Experiment 20000265 PARAMETER Experiment Name: At_Open_Flower_P Parameter: Tissue Value: Closed Flower vs. Whole Plant
  misc_feature: MA Experiment ID: 20000794 Result: Down-regulated in Transcription
  misc_feature: MA Experiment 20000794 PARAMETER Experiment Name: At_Petals_P Parameter: Age (day) Value: 23-25 days
  misc_feature: MA Experiment 20000794 PARAMETER Experiment Name: At_Petals_P Parameter: Plant Line Value: WS
  misc_feature: MA Experiment 20000794 PARAMETER Experiment Name: At_Petals_P Parameter: Tissue Value: Petals vs. Whole plant
  misc_feature: MA Experiment ID: 20001248 Result: Up-regulated in Transcription
  misc_feature: MA Experiment 20001248 PARAMETER Experiment Name: At_Far-red-induction_P Parameter: Age (day) Value: 7
  misc_feature: MA Experiment 20001248 PARAMETER Experiment Name: At_Far-red-induction_P Parameter: Light Value: Far-red vs. White
  misc_feature: MA Experiment 20001248 PARAMETER Experiment Name: At_Far-red-induction_P Parameter: Organism Value: A. thaliana
  misc_feature: MA Experiment 20001248 PARAMETER Experiment Name: At_Far-red-induction_P Parameter: Plant Line Value: Columbia
  misc_feature: MA Experiment 20001248 PARAMETER Experiment Name: At_Far-red-induction_P Parameter: Timepoint (hr) Value: 4
  misc_feature: MA Experiment 20001248 PARAMETER Experiment Name: At_Far-red-induction_P Parameter: Tissue Value: Whole Plant
  misc_feature: MA Experiment ID: 20001450 Result: Up-regulated in Transcription
  misc_feature: MA Experiment 20001450 PARAMETER Experiment Name: At_Far-red-induction_P Parameter: Age (day) Value: 7
  misc_feature: MA Experiment 20001450 PARAMETER Experiment Name: At_Far-red-induction_P Parameter: Light Value: Far-red vs. White
  misc_feature: MA Experiment 20001450 PARAMETER Experiment Name: At_Far-red-induction_P Parameter: Organism Value: A. thaliana
  misc_feature: MA Experiment 20001450 PARAMETER Experiment Name: At_Far-red-induction_P Parameter: Plant Line Value: Columbia
  misc_feature: MA Experiment 20001450 PARAMETER Experiment Name: At_Far-red-induction_P Parameter: Timepoint (hr) Value: 8
  misc_feature: MA Experiment 20001450 PARAMETER Experiment Name: At_Far-red-induction_P Parameter: Tissue Value: Whole Plant
  misc_feature: MA Experiment ID: 20001757 Result: Up-regulated in Transcription
  misc_feature: MA Experiment 20001757 PARAMETER Experiment Name: At_50mM_NH4NO3_L-to-H_P Parameter: Timepoint (hr) Value: 6
  misc_feature: MA Experiment 20001757 PARAMETER Experiment Name: At_50mM_NH4NO3_L-to-H_P Parameter: Tissue Value: Leaf
  misc_feature: MA Experiment 20001757 PARAMETER Experiment Name: At_50mM_NH4NO3_L-to-H_P Parameter: Treatment Value: 50mM NH4NO3 vs 100mM Mannitol
aaaacccctttttttcctcttccccgaagcaaaacccttctccttcttggcggctgcggccatttttttcttctttctctcttctattctatctcttaaaccctagattcgatctgggtttttcctgattccatttagggnttctctatcttcttttttttcttcttcttcttctttctctctttctctttggtcgcatccacttttatccgagaaggatctatccaaatctttgtttgtcgaatctcctctcatggctaccgttgctcctcctgctgatcaagctacagatctgttgcagaaactatccttggactcgccagcaaaagcttcagagatccctgagcctaacaagaagactgccgtctaccagtatggaggcgttgatgttcatggtcaagttccttcttatgatcgatctttgacaccaatgcttcccagtgatgctgctgacccttcagtttgctatgttcctaatccttacaatccctaccagtattacaatgtatatgggagtggtcaagagtggactgactacccagcttacacaaatcctgagggtgttgacatgaattctggaatttatggagagaatgggactgttgtgtatcctcagggttatgggtatgcagcgtatccttactcgccagcaactagccctgctccacagcttggcggggaagggcagttgtacggtgctcagcagtatcagtatcctaactattttccaaacagtggaccgtatgcttcatctgtggctacacctacccagccggatctctctgcaaacaaacctgctggtgtgaagacactacctgcggatagcaataatgttgcttctgctgctggtatcacaaaaggaagtaatggatcagctccagtgaaaccaactaaccaggctacccttaacacctcaagtaatttgtatggtatgggtgctccaggaggaggtttggctgctggttatcaggaccccaggtatgcctatgaagggtattatgctcctgtgccgtggcacgatggctctaagtactctgatgtgcagagacctgtttctggtagtggagttgcatcctcctattctaagtctagcacagtaccttcatcgaggaatcaaaactaccgctcaaattctcactacacgagcgtgcaccagccttcatcagtgactggctatggtacagctcaggggtactacaacaggatgtatcagaacaagttatatggtcagtatggtagcacagggagatctgctttgggttatggttcatctgggtatgattcaagaacaaatggaagaggatgggcggccacagacaacaaatacagaagctggggcaggggtaacagttactattacggaaatgagaacaatgtagatggtttgaatgaacttaacaggggacctagagctaagggcacaaagaaccagaagggaaatctagatgatagcttagaggttaaggagcagactggagaatcaaatgtaactgaggttggggaggcggataacacatgtgttgttcctgacagagaacagtacaataaagaagatttcccagtggattatgcaaatgccatgttctttatcatcaagtcatacagtgaagatgatgtgcacaagagcattaaatataatgtttgggctagcacaccaaatggaaacaagaagcttgctgcagcataccaggaagctcaacagaaagctggcggctgtcccatctttctgtttttctcggtcaatgcaagtggacaatttgttggtcttgctgaaatgacaggaccagttgatttcaacacaaatgtggagtactggcagcaagataagtggaccggctctttccccctcaagtggcatattgtgaaggatgtgccaaacagtttactgaagcatattactttagagaacaatgagaacaaacctgttaccaacagcagagacacacaagaggttaagttggagcaaggtttgaagattgtgaaaattttcaaggagcatagcagcaagacttgcattttggatgatttctcattctacgaggttcgacagaagactatcttggagaagaaagccaagcaaacccagaaacaggtaagcgaggagaaggtaaccgatgaaaagaaggaatctgcaactgcagagtcagcgagcaaggaatctcctgcagctgttcaaacgtccagtgatgttaaggttgctgagaatgggtctgttgctaaaccagtcacaggcgatgtggtggcaaatggttgctaactaagaggatggtgtcgctcacggcatgggcataaaactgactag

SEQ ID NO: 45803 - protein, 667 aa, Arabidopsis thaliana
  peptide (1)..(667): Ceres Seq. ID no. 13646390
  misc_feature (492)..(582): Pfam Name: YT521-B-like family Pfam Description: YT521-B-like family
  misc_feature (286)..(614): Homolog of NCBI NO: 6223640 NR Description: unknown protein [Arabidopsis thaliana]
  misc_feature (78)..(413): Homolog of NCBI NO: 18405397 NR Description: expressed protein [Arabidopsis thaliana]
  misc_feature (87)..(660): Homolog of NCBI NO: 34395023 NR Description: high-glucose-regulated protein 8-like
  misc_feature (291)..(667): Homolog of NCBI NO: 30697466 NR Description: expressed protein [Arabidopsis thaliana]
  misc_feature (291)..(667): Homolog of NCBI NO: 30697464 NR Description: expressed protein [Arabidopsis thaliana]
  misc_feature (291)..(667): Homolog of NCBI NO: 15912287 NR Description: AT5g61020/maf19_20 [Arabidopsis thaliana]
  misc_feature (8)..(666): Homolog of NCBI NO: 18087662 NR Description: putative RNA-binding protein [Oryza sativa]
  misc_feature (2)..(659): Homolog of NCBI NO: 22773231 NR Description: Putative RNA-binding protein
  misc_feature (130)..(617): Homolog of NCBI NO: 25372787 NR Description: Rubisco subunit binding-protein beta subunit
  misc_feature (130)..(623): Homolog of NCBI NO: 18405397 NR Description: expressed protein [Arabidopsis thaliana]
MATVAPPADQATDLLQKLSLDSPAKASEIPEPNKKTAVYQYGGVDVHGQVPSYDRSLTPMLPSDAADPSVCYVPNPYNPYQYYNVYGSGQEWTDYPAYTNPEGVDMNSGIYGENGTVVYPQGYGYAAYPYSPATSPAPQLGGEGQLYGAQQYQYPNYFPNSGPYASSVATPTQPDLSANKPAGVKTLPADSNNVASAAGITKGSNGSAPVKPTNQATLNTSSNLYGMGAPGGGLAAGYQDPRYAYEGYYAPVPWHDGSKYSDVQRPVSGSGVASSYSKSSTVPSSRNQNYRSNSHYTSVHQPSSVTGYGTAQGYYNRMYQNKLYGQYGSTGRSALGYGSSGYDSRTNGRGWAATDNKYRSWGRGNSYYYGNENNVDGLNELNRGPRAKGTKNQKGNLDDSLEVKEQTGESNVTEVGEADNTCVVPDREQYNKEDFPVDYANAMFFIIKSYSEDDVHKSIKYNVWASTPNGNKKLAAAYQEAQQKAGGCPIFLFFSVNASGQFVGLAEMTGPVDFNTNVEYWQQDKWTGSFPLKWHIVKDVPNSLLKHITLENNENKPVTNSRDTQEVKLEQGLKIVKIFKEHSSKTCILDDFSFYEVRQKTILEKKAKQTQKQVSEEKVTDEKKESATAESASKESPAAVQTSSDVKVAENGSVAKPVTGDVVANGC

SEQ ID NO: 45804 - protein, 608 aa, Arabidopsis thaliana
  peptide (1)..(608): Ceres Seq. ID no. 13646391
  misc_feature (433)..(523): Pfam Name: YT521-B-like family Pfam Description: YT521-B-like family
  misc_feature (227)..(555): Homolog of NCBI NO: 6223640 NR Description: unknown protein [Arabidopsis thaliana]
  misc_feature (19)..(354): Homolog of NCBI NO: 18405397 NR Description: expressed protein [Arabidopsis thaliana]
  misc_feature (28)..(601): Homolog of NCBI NO: 34395023 NR Description: high-glucose-regulated protein 8-like
  misc_feature (232)..(608): Homolog of NCBI NO: 30697466 NR Description: expressed protein [Arabidopsis thaliana]
  misc_feature (232)..(608): Homolog of NCBI NO: 30697464 NR Description: expressed protein [Arabidopsis thaliana]
  misc_feature (232)..(608): Homolog of NCBI NO: 15912287 NR Description: AT5g61020/maf19_20 [Arabidopsis thaliana]
  misc_feature (1)..(607): Homolog of NCBI NO: 18087662 NR Description: putative RNA-binding protein [Oryza sativa]
  misc_feature (1)..(600): Homolog of NCBI NO: 22773231 NR Description: Putative RNA-binding protein
  misc_feature (71)..(558): Homolog of NCBI NO: 25372787 NR Description: Rubisco subunit binding-protein beta subunit
  misc_feature (71)..(564): Homolog of NCBI NO: 18405397 NR Description: expressed protein [Arabidopsis thaliana]
MLPSDAADPSVCYVPNPYNPYQYYNVYGSGQEWTDYPAYTNPEGVDMNSGIYGENGTVVYPQGYGYAAYPYSPATSPAPQLGGEGQLYGAQQYQYPNYFPNSGPYASSVATPTQPDLSANKPAGVKTLPADSNNVASAAGITKGSNGSAPVKPTNQATLNTSSNLYGMGAPGGGLAAGYQDPRYAYEGYYAPVPWHDGSKYSDVQRPVSGSGVASSYSKSSTVPSSRNQNYRSNSHYTSVHQPSSVTGYGTAQGYYNRMYQNKLYGQYGSTGRSALGYGSSGYDSRTNGRGWAATDNKYRSWGRGNSYYYGNENNVDGLNELNRGPRAKGTKNQKGNLDDSLEVKEQTGESNVTEVGEADNTCVVPDREQYNKEDFPVDYANAMFFIIKSYSEDDVHKSIKYNVWASTPNGNKKLAAAYQEAQQKAGGCPIFLFFSVNASGQFVGLAEMTGPVDFNTNVEYWQQDKWTGSFPLKWHIVKDVPNSLLKHITLENNENKPVTNSRDTQEVKLEQGLKIVKIFKEHSSKTCILDDFSFYEVRQKTILEKKAKQTQKQVSEEKVTDEKKESATAESASKESPAAVQTSSDVKVAENGSVAKPVTGDVVANGC

SEQ ID NO: 45805 - protein, 562 aa, Arabidopsis thaliana
  peptide (1)..(562): Ceres Seq. ID no. 13646392
  misc_feature (387)..(477): Pfam Name: YT521-B-like family Pfam Description: YT521-B-like family
  misc_feature (181)..(509): Homolog of NCBI NO: 6223640 NR Description: unknown protein [Arabidopsis thaliana]
  misc_feature (1)..(308): Homolog of NCBI NO: 18405397 NR Description: expressed protein [Arabidopsis thaliana]
  misc_feature (1)..(555): Homolog of NCBI NO: 34395023 NR Description: high-glucose-regulated protein 8-like
  misc_feature (186)..(562): Homolog of NCBI NO: 30697464 NR Description: expressed protein [Arabidopsis thaliana]
  misc_feature (186)..(562): Homolog of NCBI NO: 30697466 NR Description: expressed protein [Arabidopsis thaliana]
  misc_feature (186)..(562): Homolog of NCBI NO: 15912287 NR Description: AT5g61020/maf19_20 [Arabidopsis thaliana]
  misc_feature (1)..(561): Homolog of NCBI NO: 18087662 NR Description: putative RNA-binding protein [Oryza sativa]
  misc_feature (1)..(554): Homolog of NCBI NO: 22773231 NR Description: Putative RNA-binding protein
  misc_feature (25)..(512): Homolog of NCBI NO: 25372787 NR Description: Rubisco subunit binding-protein beta subunit
  misc_feature (25)..(518): Homolog of NCBI NO: 18405397 NR Description: expressed protein [Arabidopsis thaliana]
MNSGIYGENGTVVYPQGYGYAAYPYSPATSPAPQLGGEGQLYGAQQYQYPNYFPNSGPYASSVATPTQPDLSANKPAGVKTLPADSNNVASAAGITKGSNGSAPVKPTNQATLNTSSNLYGMGAPGGGLAAGYQDPRYAYEGYYAPVPWHDGSKYSDVQRPVSGSGVASSYSKSSTVPSSRNQNYRSNSHYTSVHQPSSVTGYGTAQGYYNRMYQNKLYGQYGSTGRSALGYGSSGYDSRTNGRGWAATDNKYRSWGRGNSYYYGNENNVDGLNELNRGPRAKGTKNQKGNLDDSLEVKEQTGESNVTEVGEADNTCVVPDREQYNKEDFPVDYANAMFFIIKSYSEDDVHKSIKYNVWASTPNGNKKLAAAYQEAQQKAGGCPIFLFFSVNASGQFVGLAEMTGPVDFNTNVEYWQQDKWTGSFPLKWHIVKDVPNSLLKHITLENNENKPVTNSRDTQEVKLEQGLKIVKIFKEHSSKTCILDDFSFYEVRQKTILEKKAKQTQKQVSEEKVTDEKKESATAESASKESPAAVQTSSDVKVAENGSVAKPVTGDVVANGC

SEQ ID NO: 45806 - DNA, 1939 bp, Arabidopsis thaliana
  misc_feature (1)..(1939): Ceres Seq. ID no. 13647170
  misc_feature: MA Experiment ID: 20000180 Result: Up-regulated in Transcription
  misc_feature: MA Experiment 20000180 PARAMETER Experiment Name: At_Germinating_Seeds_P Parameter: Age (hr) Value: 24 vs. 0
  misc_feature: MA Experiment 20000180 PARAMETER Experiment Name: At_Germinating_Seeds_P Parameter: Tissue Value: Germinating Seeds
  misc_feature: MA Experiment ID: 20000184 Result: Down-regulated in Transcription
  misc_feature: MA Experiment 20000184 PARAMETER Experiment Name: At_Shoots__P Parameter: Age (day) Value: 7
  misc_feature: MA Experiment 20000184 PARAMETER Experiment Name: At_Shoots__P Parameter: Tissue Value: Shoots vs. Whole Plant
  misc_feature: MA Experiment ID: 20000264 Result: Down-regulated in Transcription
  misc_feature: MA Experiment 20000264 PARAMETER Experiment Name: At_Open_Flower_P Parameter: Age (day) Value: 21
  misc_feature: MA Experiment 20000264 PARAMETER Experiment Name: At_Open_Flower_P Parameter: Plant Line Value: WS
  misc_feature: MA Experiment 20000264 PARAMETER Experiment Name: At_Open_Flower_P Parameter: Tissue Value: Open Flower vs. Whole Plant
  misc_feature: MA Experiment ID: 20000265 Result: Down-regulated in Transcription
  misc_feature: MA Experiment 20000265 PARAMETER Experiment Name: At_Open_Flower_P Parameter: Age (day) Value: 21
  misc_feature: MA Experiment 20000265 PARAMETER Experiment Name: At_Open_Flower_P Parameter: Plant Line Value: WS
  misc_feature: MA Experiment 20000265 PARAMETER Experiment Name: At_Open_Flower_P Parameter: Tissue Value: Closed Flower vs. Whole Plant
  misc_feature: MA Experiment ID: 20000286 Result: Down-regulated in Transcription
  misc_feature: MA Experiment 20000286 PARAMETER Experiment Name: At_Open_Flower_P Parameter: Age (day) Value: 21
  misc_feature: MA Experiment 20000286 PARAMETER Experiment Name: At_Open_Flower_P Parameter: Plant Line Value: WS
  misc_feature: MA Experiment 20000286 PARAMETER Experiment Name: At_Open_Flower_P Parameter: Tissue Value: Half Open vs. Whole Plant
  misc_feature: MA Experiment ID: 20000438 Result: Down-regulated in Transcription
  misc_feature: MA Experiment 20000438 PARAMETER Experiment Name: At_Shoots__P Parameter: Age (day) Value: 14
  misc_feature: MA Experiment 20000438 PARAMETER Experiment Name: At_Shoots__P Parameter: Tissue Value: Shoots vs. Whole Plant
  misc_feature: MA Experiment ID: 20000453 Result: Up-regulated in Transcription
  misc_feature: MA Experiment 20000453 PARAMETER Experiment Name: At_100uM_ABA_P Parameter: Age (day) Value: 15
  misc_feature: MA Experiment 20000453 PARAMETER Experiment Name: At_100uM_ABA_P Parameter: Organism Value: A. thaliana
  misc_feature: MA Experiment 20000453 PARAMETER Experiment Name: At_100uM_ABA_P Parameter: Plant Line Value: WS
  misc_feature: MA Experiment 20000453 PARAMETER Experiment Name: At_100uM_ABA_P Parameter: Timepoint (hr) Value: 24
  misc_feature: MA Experiment 20000453 PARAMETER Experiment Name: At_100uM_ABA_P Parameter: Tissue Value: Aerial
  misc_feature: MA Experiment 20000453 PARAMETER Experiment Name: At_100uM_ABA_P Parameter: Treatment Value: 100uM ABA vs. No Treatment
  misc_feature: MA Experiment ID: 20001773 Result: Up-regulated in Transcription
  misc_feature: MA Experiment 20001773 PARAMETER Experiment Name: At_Far-red-enriched-adult_P Parameter: Age (day) Value: 30
  misc_feature: MA Experiment 20001773 PARAMETER Experiment Name: At_Far-red-enriched-adult_P Parameter: Light Value: Far-red enriched vs. White
  misc_feature: MA Experiment 20001773 PARAMETER Experiment Name: At_Far-red-enriched-adult_P Parameter: Organism Value: A. thaliana
  misc_feature: MA Experiment 20001773 PARAMETER Experiment Name: At_Far-red-enriched-adult_P Parameter: Plant Line Value: Columbia
  misc_feature: MA Experiment 20001773 PARAMETER Experiment Name: At_Far-red-enriched-adult_P Parameter: Timepoint (hr) Value: 48
  misc_feature: MA Experiment 20001773 PARAMETER Experiment Name: At_Far-red-enriched-adult_P Parameter: Tissue Value: Aerial
  misc_feature: MA Experiment ID: 20001906 Result: Down-regulated in Transcription
  misc_feature: MA Experiment 20001906 PARAMETER Experiment Name: At_Drought_Reproduction_P Parameter: Age (day) Value: 35
  misc_feature: MA Experiment 20001906 PARAMETER Experiment Name: At_Drought_Reproduction_P Parameter: Organism Value: A. thaliana
  misc_feature: MA Experiment 20001906 PARAMETER Experiment Name: At_Drought_Reproduction_P Parameter: Plant Line Value: WS
  misc_feature: MA Experiment 20001906 PARAMETER Experiment Name: At_Drought_Reproduction_P Parameter: Timepoint (day) Value: 5
  misc_feature: MA Experiment 20001906 PARAMETER Experiment Name: At_Drought_Reproduction_P Parameter: Tissue Value: Siliques
  misc_feature: MA Experiment 20001906 PARAMETER Experiment Name: At_Drought_Reproduction_P Parameter: Treatment Value: Drought vs. No Drought
gatttcccttactatttacgttctcttctttctcctccgacacactccaaaactcataaatctatctgatgcgaatttgactaactctttcgtaaattcaggatcttactwcaaatctttaactcaccaatcttcttcttattcaaagattagagagaaaatggacaacgagctgtttatgaacacagagtttccaccaccgccggagatggcgacgcatttcgaacaccaacagtcttcttcatcggccatgatgcttaattgggctttaatggatccaaatccgcatcaagattcttcctttttatgggaaaagtcaacggaacaacaacaacaacaaagcatctttgactctgctttaagctcattagtctcatcaccgacgccgtcaaattccaacttctccggcggtggcggtgacggttttctcatcagagaactcatcggaaagcttggaaacatcggtaataataataacaactccggtgagatctacggaactccgatgtctcgctccgcctcatgttacgcaactccgatgagctctccaccgccaccgacgaattcgaattctcagatgatgatgaacagaacgacgccgttgacggaattctcagcagatccgggttttgcggagagagcagctagattctcttgttttggtagtcggagctttaacggaagaaccaatacaaatcttccgattaacaacggtaataacatggtcaacaactccgggaagctgacacgtgtctccagcacaccagctcttaaggctcttgtttcaccggaagtcacacccggcggcgaattttcccggaagagaaaatctgtgcctaaaggaaaatccaaagaaaaccccatttctacagcttctccatctcctagtttctcaaagacggcggaaaagaatggtggaaaaggaggaagtaaaagttcagaagaaaaaggaggaaaaaggagaagagaagaagaagatgatgaagaagaagaaggagaaggtgaagggaacaaaagcaataacacaaaaccacctgagcctcctaaagattacattcatgttcgagctcgacgaggccaagcaaccgatagtcacagcctcgccgaacgagttcggagggagaaaattggtgaaaggatgaagcttcttcaagatcttgtgcctggatgcaataaggttactggaaaagcactgatgcttgatgaaattataaactacgtacaatcattgcaaagacaagttgagttcttgtcaatgaagttatcatcagtgaacgacaccaggctggattttaacgtggacgctcttgtgtcaaaggatgttatgattccatcaagtaacaaccgattgcatgaagaaggactccaatcaaagtcttcaagtcatcatcatcaacaacaacttaatatttataacaataattcacaattacttcccaatatttcttccaataacatgatgctccagtctcctatgaactctttggaaacctctaccttagccagaagcttcactcacttaccaacacttacccaatttactgactcaatttctcagtatcaaatgtttagcgaagaagatttacaaagcatagtaggaatgggagtggcagaaaaccccaacaatgaatctcaacacatgaaaattgagctttgatcaaccatttttttcaaggtctcaaggaagaaaacaagagaaaaaggattgatgggtgtacataaaccataccaatatttgtgatttattcatatactcatctccatatatatatgtatacacacttttatggaaataacctatatttttttactttttatactttatattatcatcttccaattcattattagcattattagggttcaattgtattgttatccactttggattccttttgcttttctgatgtaatatcaatgtaagtttcttaccatcctt

SEQ ID NO: 45807 - protein, 551 aa, Arabidopsis thaliana
  peptide (1)..(551): Ceres Seq. ID no. 15219190
  misc_feature (361)..(411): Pfam Name: Helix-loop-helix DNA-binding domain Pfam Description: Helix-loop-helix DNA-binding domain
  misc_feature (188)..(487): Homolog of NCBI NO: 15222679 NR Description: bHLH protein [Arabidopsis thaliana]
  misc_feature (222)..(447): Homolog of NCBI NO: 22331295 NR Description: bHLH protein [Arabidopsis thaliana]
  misc_feature (201)..(550): Homolog of NCBI NO: 29647487 NR Description: OJ1191_A10.7 [Oryza sativa (japonica
  misc_feature (60)..(321): Homolog of NCBI NO: 20127064 NR Description: putative bHLH transcription factor [Arabidopsis
  misc_feature (103)..(532): Homolog of NCBI NO: 34906952 NR Description: DNA-binding protein-like protein
  misc_feature (54)..(321): Homolog of NCBI NO: 15231450 NR Description: bHLH protein family [Arabidopsis thaliana]
  misc_feature (263)..(551): Homolog of NCBI NO: 20127064 NR Description: putative bHLH transcription factor [Arabidopsis
  misc_feature (263)..(551): Homolog of NCBI NO: 15231450 NR Description: bHLH protein family [Arabidopsis thaliana]
  misc_feature (54)..(551): Homolog of NCBI NO: 20127085 NR Description: putative bHLH transcription factor [Arabidopsis
  misc_feature (54)..(551): Homolog of NCBI NO: 15239013 NR Description: bHLH protein family [Arabidopsis thaliana]
  misc_feature (37)..(37): Xaa is any aa, unknown or other
ISLTIYVLFFLLRHTPKLINLSDANLTNSFVNSGSYXKSLTHQSSSYSKIREKMDNELFMNTEFPPPPEMATHFEHQQSSSSAMMLNWALMDPNPHQDSSFLWEKSTEQQQQQSIFDSALSSLVSSPTPSNSNFSGGGGDGFLIRELIGKLGNIGNNNNNSGEIYGTPMSRSASCYATPMSSPPPPTNSNSQMMMNRTTPLTEFSADPGFAERAARFSCFGSRSFNGRTNTNLPINNGNNMVNNSGKLTRVSSTPALKALVSPEVTPGGEFSRKRKSVPKGKSKENPISTASPSPSFSKTAEKNGGKGGSKSSEEKGGKRRREEEDDEEEEGEGEGNKSNNTKPPEPPKDYIHVRARRGQATDSHSLAERVRREKIGERMKLLQDLVPGCNKVTGKALMLDEIINYVQSLQRQVEFLSMKLSSVNDTRLDFNVDALVSKDVMIPSSNNRLHEEGLQSKSSSHHHQQQLNIYNNNSQLLPNISSNNMMLQSPMNSLETSTLARSFTHLPTLTQFTDSISQYQMFSEEDLQSIVGMGVAENPNNESQHMKIEL

SEQ ID NO: 45808 - protein, 498 aa, Arabidopsis thaliana
  peptide (1)..(498): Ceres Seq. ID no. 15219191
  misc_feature (308)..(358): Pfam Name: Helix-loop-helix DNA-binding domain Pfam Description: Helix-loop-helix DNA-binding domain
  misc_feature (135)..(434): Homolog of NCBI NO: 15222679 NR Description: bHLH protein [Arabidopsis thaliana]
  misc_feature (169)..(394): Homolog of NCBI NO: 22331295 NR Description: bHLH protein [Arabidopsis thaliana]
  misc_feature (148)..(497): Homolog of NCBI NO: 29647487 NR Description: OJ1191_A10.7 [Oryza sativa (japonica
  misc_feature (7)..(268): Homolog of NCBI NO: 20127064 NR Description: putative bHLH transcription factor [Arabidopsis
  misc_feature (50)..(479): Homolog of NCBI NO: 34906952 NR Description: DNA-binding protein-like protein
  misc_feature (1)..(268): Homolog of NCBI NO: 15231450 NR Description: bHLH protein family [Arabidopsis thaliana]
  misc_feature (210)..(498): Homolog of NCBI NO: 20127064 NR Description: putative bHLH transcription factor [Arabidopsis
  misc_feature (210)..(498): Homolog of NCBI NO: 15231450 NR Description: bHLH protein family [Arabidopsis thaliana]
  misc_feature (1)..(498): Homolog of NCBI NO: 20127085 NR Description: putative bHLH transcription factor [Arabidopsis
  misc_feature (1)..(498): Homolog of NCBI NO: 15239013 NR Description: bHLH protein family [Arabidopsis thaliana]
MDNELFMNTEFPPPPEMATHFEHQQSSSSAMMLNWALMDPNPHQDSSFLWEKSTEQQQQQSIFDSALSSLVSSPTPSNSNFSGGGGDGFLIRELIGKLGNIGNNNNNSGEIYGTPMSRSASCYATPMSSPPPPTNSNSQMMMNRTTPLTEFSADPGFAERAARFSCFGSRSFNGRTNTNLPINNGNNMVNNSGKLTRVSSTPALKALVSPEVTPGGEFSRKRKSVPKGKSKENPISTASPSPSFSKTAEKNGGKGGSKSSEEKGGKRRREEEDDEEEEGEGEGNKSNNTKPPEPPKDYIHVRARRGQATDSHSLAERVRREKIGERMKLLQDLVPGCNKVTGKALMLDEIINYVQSLQRQVEFLSMKLSSVNDTRLDFNVDALVSKDVMIPSSNNRLHEEGLQSKSSSHHHQQQLNIYNNNSQLLPNISSNNMMLQSPMNSLETSTLARSFTHLPTLTQFTDSISQYQMFSEEDLQSIVGMGVAENPNNESQHMKIEL

SEQ ID NO: 45809 - protein, 492 aa, Arabidopsis thaliana
  peptide (1)..(492): Ceres Seq. ID no. 15219192
  misc_feature (302)..(352): Pfam Name: Helix-loop-helix DNA-binding domain Pfam Description: Helix-loop-helix DNA-binding domain
  misc_feature (129)..(428): Homolog of NCBI NO: 15222679 NR Description: bHLH protein [Arabidopsis thaliana]
  misc_feature (163)..(388): Homolog of NCBI NO: 22331295 NR Description: bHLH protein [Arabidopsis thaliana]
  misc_feature (142)..(491): Homolog of NCBI NO: 29647487 NR Description: OJ1191_A10.7 [Oryza sativa (japonica
  misc_feature (1)..(262): Homolog of NCBI NO: 20127064 NR Description: putative bHLH transcription factor [Arabidopsis
  misc_feature (44)..(473): Homolog of NCBI NO: 34906952 NR Description: DNA-binding protein-like protein
  misc_feature (1)..(262): Homolog of NCBI NO: 15231450 NR Description: bHLH protein family [Arabidopsis thaliana]
  misc_feature (204)..(492): Homolog of NCBI NO: 20127064 NR Description: putative bHLH transcription factor [Arabidopsis
  misc_feature (204)..(492): Homolog of NCBI NO: 15231450 NR Description: bHLH protein family [Arabidopsis thaliana]
  misc_feature (1)..(492): Homolog of NCBI NO: 20127085 NR Description: putative bHLH transcription factor [Arabidopsis
  misc_feature (1)..(492): Homolog of NCBI NO: 15239013 NR Description: bHLH protein family [Arabidopsis thaliana]
MNTEFPPPPEMATHFEHQQSSSSAMMLNWALMDPNPHQDSSFLWEKSTEQQQQQSIFDSALSSLVSSPTPSNSNFSGGGGDGFLIRELIGKLGNIGNNNNNSGEIYGTPMSRSASCYATPMSSPPPPTNSNSQMMMNRTTPLTEFSADPGFAERAARFSCFGSRSFNGRTNTNLPINNGNNMVNNSGKLTRVSSTPALKALVSPEVTPGGEFSRKRKSVPKGKSKENPISTASPSPSFSKTAEKNGGKGGSKSSEEKGGKRRREEEDDEEEEGEGEGNKSNNTKPPEPPKDYIHVRARRGQATDSHSLAERVRREKIGERMKLLQDLVPGCNKVTGKALMLDEIINYVQSLQRQVEFLSMKLSSVNDTRLDFNVDALVSKDVMIPSSNNRLHEEGLQSKSSSHHHQQQLNIYNNNSQLLPNISSNNMMLQSPMNSLETSTLARSFTHLPTLTQFTDSISQYQMFSEEDLQSIVGMGVAENPNNESQHMKIEL

SEQ ID NO: 45810 - DNA, 1102 bp, Arabidopsis thaliana
  misc_feature (1)..(1102): Ceres Seq. ID no. 13646393
  misc_feature: MA Experiment ID: 108434 Result: Up-regulated in Transcription
  misc_feature: MA Experiment 108434 PARAMETER Experiment Name: At_Root_Tips_cDNA_P Parameter: Tissue Value: Root Tips
  misc_feature: MA Experiment ID: 108474 Result: Up-regulated in Transcription
  misc_feature: MA Experiment 108474 PARAMETER Experiment Name: At_Drought_Flowers_cDNA_P Parameter: Timepoint (hr) Value: null
  misc_feature: MA Experiment 108474 PARAMETER Experiment Name: At_Drought_Flowers_cDNA_P Parameter: Treatment Value: Drought vs. No Drought
  misc_feature: MA Experiment ID: 108489 Result: Up-regulated in Transcription
  misc_feature: MA Experiment ID: 108501 Result: Down-regulated in Transcription
  misc_feature: MA Experiment 108501 PARAMETER Experiment Name: At_ap2_floral_buds_cDNA_P Parameter: Plant Line Value: ap2 (Ler.)
  misc_feature: MA Experiment 108501 PARAMETER Experiment Name: At_ap2_floral_buds_cDNA_P Parameter: Tissue Value: Closed Flower
  misc_feature: MA Experiment ID: 108572 Result: Up-regulated in Transcription
  misc_feature: MA Experiment 108572 PARAMETER Experiment Name: At_Drought_cDNA_P Parameter: Timepoint (hr) Value: 1
  misc_feature: MA Experiment 108572 PARAMETER Experiment Name: At_Drought_cDNA_P Parameter: Tissue Value: Aerial
  misc_feature: MA Experiment 108572 PARAMETER Experiment Name: At_Drought_cDNA_P Parameter: Treatment Value: Drought vs. No Drought
  misc_feature: MA Experiment ID: 108585 Result: Up-regulated in Transcription
  misc_feature: MA Experiment 108585 PARAMETER Experiment Name: At_5mM_NaNP_cDNA_P Parameter: Timepoint (hr) Value: 6
  misc_feature: MA Experiment 108585 PARAMETER Experiment Name: At_5mM_NaNP_cDNA_P Parameter: Tissue Value: Aerial
  misc_feature: MA Experiment 108585 PARAMETER Experiment Name: At_5mM_NaNP_cDNA_P Parameter: Treatment Value: null
  misc_feature: MA Experiment ID: 108594 Result: Down-regulated in Transcription
  misc_feature: MA Experiment 108594 PARAMETER Experiment Name: At_Ler-rhl_Root_cDNA_P Parameter: Plant Line Value: null
  misc_feature: MA Experiment ID: 20000069 Result: Down-regulated in Transcription
  misc_feature: MA Experiment 20000069 PARAMETER Experiment Name: At_100uM_ABA_Mutants_cDNA_P Parameter: Plant Line Value: CS23
  misc_feature: MA Experiment 20000069 PARAMETER Experiment Name: At_100uM_ABA_Mutants_cDNA_P Parameter: Timepoint (hr) Value: 6
  misc_feature: MA Experiment 20000069 PARAMETER Experiment Name: At_100uM_ABA_Mutants_cDNA_P Parameter: Tissue Value: Aerial
  misc_feature: MA Experiment 20000069 PARAMETER Experiment Name: At_100uM_ABA_Mutants_cDNA_P Parameter: Treatment Value: 100uM ABA vs. No Treatment
  misc_feature: MA Experiment ID: 20000072 Result: Down-regulated in Transcription
  misc_feature: MA Experiment 20000072 PARAMETER Experiment Name: At_100uM_ABA_Mutants_cDNA_P Parameter: Plant Line Value: CS8105
  misc_feature: MA Experiment 20000072 PARAMETER Experiment Name: At_100uM_ABA_Mutants_cDNA_P Parameter: Timepoint (hr) Value: 6
  misc_feature: MA Experiment 20000072 PARAMETER Experiment Name: At_100uM_ABA_Mutants_cDNA_P Parameter: Tissue Value: Aerial
  misc_feature: MA Experiment 20000072 PARAMETER Experiment Name: At_100uM_ABA_Mutants_cDNA_P Parameter: Treatment Value: 100uM ABA vs. No Treatment
  misc_feature: MA Experiment ID: 20000184 Result: Up-regulated in Transcription
  misc_feature: MA Experiment 20000184 PARAMETER Experiment Name: At_Shoots__P Parameter: Age (day) Value: 7
  misc_feature: MA Experiment 20000184 PARAMETER Experiment Name: At_Shoots__P Parameter: Tissue Value: Shoots vs. Whole Plant
  misc_feature: MA Experiment ID: 20000185 Result: Up-regulated in Transcription
  misc_feature: MA Experiment 20000185 PARAMETER Experiment Name: At_Roots__P Parameter: Age (day) Value: 7 vs. 21
  misc_feature: MA Experiment 20000185 PARAMETER Experiment Name: At_Roots__P Parameter: Organism Value: A. thaliana
  misc_feature: MA Experiment 20000185 PARAMETER Experiment Name: At_Roots__P Parameter: Tissue Value: Roots vs. Whole Plant
  misc_feature: MA Experiment ID: 20000264 Result: Down-regulated in Transcription
  misc_feature: MA Experiment 20000264 PARAMETER Experiment Name: At_Open_Flower_P Parameter: Age (day) Value: 21
  misc_feature: MA Experiment 20000264 PARAMETER Experiment Name: At_Open_Flower_P Parameter: Plant Line Value: WS
  misc_feature: MA Experiment 20000264 PARAMETER Experiment Name: At_Open_Flower_P Parameter: Tissue Value: Open Flower vs. Whole Plant
  misc_feature: MA Experiment ID: 20000265 Result: Down-regulated in Transcription
  misc_feature: MA Experiment 20000265 PARAMETER Experiment Name: At_Open_Flower_P Parameter: Age (day) Value: 21
  misc_feature: MA Experiment 20000265 PARAMETER Experiment Name: At_Open_Flower_P Parameter: Plant Line Value: WS
  misc_feature: MA Experiment 20000265 PARAMETER Experiment Name: At_Open_Flower_P Parameter: Tissue Value: Closed Flower vs. Whole Plant
  misc_feature: MA Experiment ID: 20000286 Result: Down-regulated in Transcription
  misc_feature: MA Experiment 20000286 PARAMETER Experiment Name: At_Open_Flower_P Parameter: Age (day) Value: 21
  misc_feature: MA Experiment 20000286 PARAMETER Experiment Name: At_Open_Flower_P Parameter: Plant Line Value: WS
  misc_feature: MA Experiment 20000286 PARAMETER Experiment Name: At_Open_Flower_P Parameter: Tissue Value: Half Open vs. Whole Plant
  misc_feature: MA Experiment ID: 20000437 Result: Down-regulated in Transcription
  misc_feature: MA Experiment 20000437 PARAMETER Experiment Name: At_Drought_P Parameter: Age (day) Value: 8
  misc_feature: MA Experiment 20000437 PARAMETER Experiment Name: At_Drought_P Parameter: Organism Value: A. thaliana
  misc_feature: MA Experiment 20000437 PARAMETER Experiment Name: At_Drought_P Parameter: Plant Line Value: WS
  misc_feature: MA Experiment 20000437 PARAMETER Experiment Name: At_Drought_P Parameter: Timepoint (hr) Value: 24
  misc_feature: MA Experiment 20000437 PARAMETER Experiment Name: At_Drought_P Parameter: Tissue Value: Whole Plant
  misc_feature: MA Experiment 20000437 PARAMETER Experiment Name: At_Drought_P Parameter: Treatment Value: Drought vs. No Drought
  misc_feature: MA Experiment ID: 20000438 Result: Up-regulated in Transcription
  misc_feature: MA Experiment 20000438 PARAMETER Experiment Name: At_Shoots__P Parameter: Age (day) Value: 14
  misc_feature: MA Experiment 20000438 PARAMETER Experiment Name: At_Shoots__P Parameter: Tissue Value: Shoots vs. Whole Plant
  misc_feature: MA Experiment ID: 20000441 Result: Up-regulated in Transcription
  misc_feature: MA Experiment 20000441 PARAMETER Experiment Name: At_1uM_BR-BRZ__P Parameter: Tissue Value: Shoot Apices
  misc_feature: MA Experiment 20000441 PARAMETER Experiment Name: At_1uM_BR-BRZ__P Parameter: Treatment Value: 1uM BR vs. No Treatment
  misc_feature: MA Experiment ID: 20000495 Result: Up-regulated in Transcription
  misc_feature: MA Experiment 20000495 PARAMETER Experiment Name: At_Guard_Cells_P Parameter: Harvest Date Value: 8/2/2002
  misc_feature: MA Experiment 20000495 PARAMETER Experiment Name: At_Guard_Cells_P Parameter: Organism Value: A. thaliana
  misc_feature: MA Experiment 20000495 PARAMETER Experiment Name: At_Guard_Cells_P Parameter: Tissue Value: Guard Cells vs. Leaves
  misc_feature: MA Experiment ID: 20000709 Result: Up-regulated in Transcription
  misc_feature: MA Experiment 20000709 PARAMETER Experiment Name: At_15mM_NH4NO3_L-to-H_P Parameter: Age (hr) Value: 14
  misc_feature: MA Experiment 20000709 PARAMETER Experiment Name: At_15mM_NH4NO3_L-to-H_P Parameter: Organism Value: A. thaliana
  misc_feature: MA Experiment 20000709 PARAMETER Experiment Name: At_15mM_NH4NO3_L-to-H_P Parameter: Plant Line Value: WS
  misc_feature: MA Experiment 20000709 PARAMETER Experiment Name: At_15mM_NH4NO3_L-to-H_P Parameter: Timepoint (hr) Value: 4
  misc_feature: MA Experiment 20000709 PARAMETER Experiment Name: At_15mM_NH4NO3_L-to-H_P Parameter: Tissue Value: Aerial
  misc_feature: MA Experiment 20000709 PARAMETER Experiment Name: At_15mM_NH4NO3_L-to-H_P Parameter: Treatment Value: 15mM NH4NO3 vs. 30mM Mannitol
  misc_feature: MA Experiment ID: 20001451 Result: Up-regulated in Transcription
  misc_feature: MA Experiment 20001451 PARAMETER Experiment Name: At_Far-red-induction_P Parameter: Age (day) Value: 7
  misc_feature: MA Experiment 20001451 PARAMETER Experiment Name: At_Far-red-induction_P Parameter: Light Value: Far-red vs. White
  misc_feature: MA Experiment 20001451 PARAMETER Experiment Name: At_Far-red-induction_P Parameter: Organism Value: A. thaliana
  misc_feature: MA Experiment 20001451 PARAMETER Experiment Name: At_Far-red-induction_P Parameter: Plant Line Value: Columbia
  misc_feature: MA Experiment 20001451 PARAMETER Experiment Name: At_Far-red-induction_P Parameter: Timepoint (hr) Value: 24
  misc_feature: MA Experiment 20001451 PARAMETER Experiment Name: At_Far-red-induction_P Parameter: Tissue Value: Whole Plant
  misc_feature: MA Experiment ID: 20001457 Result: Up-regulated in Transcription
  misc_feature: MA Experiment 20001457 PARAMETER Experiment Name: At_50mM_NH4NO3_L-to-H_P Parameter: Age (day) Value: Undefined
  misc_feature: MA Experiment 20001457 PARAMETER Experiment Name: At_50mM_NH4NO3_L-to-H_P Parameter: Organism Value: Undefined
  misc_feature: MA Experiment 20001457 PARAMETER Experiment Name: At_50mM_NH4NO3_L-to-H_P Parameter: Plant Line Value: Undefined
  misc_feature: MA Experiment 20001457 PARAMETER Experiment Name: At_50mM_NH4NO3_L-to-H_P Parameter: Timepoint (hr) Value: 0.5
  misc_feature: MA Experiment 20001457 PARAMETER Experiment Name: At_50mM_NH4NO3_L-to-H_P Parameter: Tissue Value: Siliques
  misc_feature: MA Experiment 20001457 PARAMETER Experiment Name: At_50mM_NH4NO3_L-to-H_P Parameter: Treatment Value: 50mM NH4NO3 vs. 100mM Manitol
  misc_feature: MA Experiment ID: 20001458 Result: Up-regulated in Transcription
  misc_feature: MA Experiment 20001458 PARAMETER Experiment Name: At_50mM_NH4NO3_L-to-H_P Parameter: Age (day) Value: Undefined
  misc_feature: MA Experiment 20001458 PARAMETER Experiment Name: At_50mM_NH4NO3_L-to-H_P Parameter: Organism Value: Undefined
  misc_feature: MA Experiment 20001458 PARAMETER Experiment Name: At_50mM_NH4NO3_L-to-H_P Parameter: Plant Line Value: Undefined
  misc_feature: MA Experiment 20001458 PARAMETER Experiment Name: At_50mM_NH4NO3_L-to-H_P Parameter: Timepoint (hr) Value: 2
  misc_feature: MA Experiment 20001458 PARAMETER Experiment Name: At_50mM_NH4NO3_L-to-H_P Parameter: Tissue Value: Siliques
  misc_feature: MA Experiment 20001458 PARAMETER Experiment Name: At_50mM_NH4NO3_L-to-H_P Parameter: Treatment Value: 50mM NH4NO3 vs. 100mM Manitol
  misc_feature: MA Experiment ID: 20001459 Result: Up-regulated in Transcription
  misc_feature: MA Experiment 20001459 PARAMETER Experiment Name: At_50mM_NH4NO3_L-to-H_P Parameter: Age (day) Value: Undefined
  misc_feature: MA Experiment 20001459 PARAMETER Experiment Name: At_50mM_NH4NO3_L-to-H_P Parameter: Organism Value: Undefined
  misc_feature: MA Experiment 20001459 PARAMETER Experiment Name: At_50mM_NH4NO3_L-to-H_P Parameter: Plant Line Value: Undefined
  misc_feature: MA Experiment 20001459 PARAMETER Experiment Name: At_50mM_NH4NO3_L-to-H_P Parameter: Timepoint (hr) Value: 4
  misc_feature: MA Experiment 20001459 PARAMETER Experiment Name: At_50mM_NH4NO3_L-to-H_P Parameter: Tissue Value: Siliques
  misc_feature: MA Experiment 20001459 PARAMETER Experiment Name: At_50mM_NH4NO3_L-to-H_P Parameter: Treatment Value: 50mM NH4NO3 vs. 100mM Manitol
  misc_feature: MA Experiment ID: 20001557 Result: Down-regulated in Transcription
  misc_feature: MA Experiment 20001557 PARAMETER Experiment Name: At_Drought_Soil_Dry_P Parameter: Age (day) Value: 27
  misc_feature: MA Experiment 20001557 PARAMETER Experiment Name: At_Drought_Soil_Dry_P Parameter: Organism Value: A. thaliana
  misc_feature: MA Experiment 20001557 PARAMETER Experiment Name: At_Drought_Soil_Dry_P Parameter: Plant Line Value: WS
  misc_feature: MA Experiment 20001557 PARAMETER Experiment Name: At_Drought_Soil_Dry_P Parameter: Post Timepoint (hr) Value: 3
  misc_feature: MA Experiment 20001557 PARAMETER Experiment Name: At_Drought_Soil_Dry_P Parameter: Post-Treatment Value: Re-Water vs. No Drought
  misc_feature: MA Experiment 20001557 PARAMETER Experiment Name: At_Drought_Soil_Dry_P Parameter: Timepoint (day) Value: 13
  misc_feature: MA Experiment 20001557 PARAMETER Experiment Name: At_Drought_Soil_Dry_P Parameter: Treatment Value: Drought vs. No Drought
  misc_feature: MA Experiment ID: 20001559 Result: Down-regulated in Transcription
  misc_feature: MA Experiment 20001559 PARAMETER Experiment Name: At_Drought_Soil_Dry_P Parameter: Age (day) Value: 28
  misc_feature: MA Experiment 20001559 PARAMETER Experiment Name: At_Drought_Soil_Dry_P Parameter: Organism Value: A. thaliana
  misc_feature: MA Experiment 20001559 PARAMETER Experiment Name: At_Drought_Soil_Dry_P Parameter: Plant Line Value: WS
  misc_feature: MA Experiment 20001559 PARAMETER Experiment Name: At_Drought_Soil_Dry_P Parameter: Post Timepoint (hr) Value: 29
  misc_feature: MA Experiment 20001559 PARAMETER Experiment Name: At_Drought_Soil_Dry_P Parameter: Post-Treatment Value: Re-Water vs. No Drought
  misc_feature: MA Experiment 20001559 PARAMETER Experiment Name: At_Drought_Soil_Dry_P Parameter: Timepoint (day) Value: 14
  misc_feature: MA Experiment 20001559 PARAMETER Experiment Name: At_Drought_Soil_Dry_P Parameter: Treatment Value: Drought vs. No Drought
  misc_feature: MA Experiment ID: 20001755 Result: Up-regulated in Transcription
  misc_feature: MA Experiment 20001755 PARAMETER Experiment Name: At_50mM_NH4NO3_L-to-H_P Parameter: Timepoint (hr) Value: 2
  misc_feature: MA Experiment 20001755 PARAMETER Experiment Name: At_50mM_NH4NO3_L-to-H_P Parameter: Tissue Value: Leaf
  misc_feature: MA Experiment 20001755 PARAMETER Experiment Name: At_50mM_NH4NO3_L-to-H_P Parameter: Treatment Value: 50mM NH4NO3 vs 100mM Mannitol
  misc_feature: MA Experiment ID: 20001756 Result: Up-regulated in Transcription
  misc_feature: MA Experiment 20001756 PARAMETER Experiment Name: At_50mM_NH4NO3_L-to-H_P Parameter: Timepoint (hr) Value: 4
  misc_feature: MA Experiment 20001756 PARAMETER Experiment Name: At_50mM_NH4NO3_L-to-H_P Parameter: Tissue Value: Leaf
  misc_feature: MA Experiment 20001756 PARAMETER Experiment Name: At_50mM_NH4NO3_L-to-H_P Parameter: Treatment Value: 50mM NH4NO3 vs 100mM Mannitol
  misc_feature: MA Experiment ID: 20001757 Result: Up-regulated in Transcription
  misc_feature: MA Experiment 20001757 PARAMETER Experiment Name: At_50mM_NH4NO3_L-to-H_P Parameter: Timepoint (hr) Value: 6
  misc_feature: MA Experiment 20001757 PARAMETER Experiment Name: At_50mM_NH4NO3_L-to-H_P Parameter: Tissue Value: Leaf
  misc_feature: MA Experiment 20001757 PARAMETER Experiment Name: At_50mM_NH4NO3_L-to-H_P Parameter: Treatment Value: 50mM NH4NO3 vs 100mM Mannitol
  misc_feature: MA Experiment ID: 20001759 Result: Up-regulated in Transcription
  misc_feature: MA Experiment 20001759 PARAMETER Experiment Name: At_50mM_NH4NO3_L-to-H_P Parameter: Timepoint (hr) Value: 1
  misc_feature: MA Experiment 20001759 PARAMETER Experiment Name: At_50mM_NH4NO3_L-to-H_P Parameter: Tissue Value: Siliques
  misc_feature: MA Experiment 20001759 PARAMETER Experiment Name: At_50mM_NH4NO3_L-to-H_P Parameter: Treatment Value: 50mM NH4NO3 vs 100mM Mannitol
  misc_feature: MA Experiment ID: 20001760 Result: Up-regulated in Transcription
  misc_feature: MA Experiment 20001760 PARAMETER Experiment Name: At_50mM_NH4NO3_L-to-H_P Parameter: Timepoint (hr) Value: 2
  misc_feature: MA Experiment 20001760 PARAMETER Experiment Name: At_50mM_NH4NO3_L-to-H_P Parameter: Tissue Value: Siliques
  misc_feature: MA Experiment 20001760 PARAMETER Experiment Name: At_50mM_NH4NO3_L-to-H_P Parameter: Treatment Value: 50mM NH4NO3 vs 100mM Mannitol
  misc_feature: MA Experiment ID: 20001906 Result: Down-regulated in Transcription
  misc_feature: MA Experiment 20001906 PARAMETER Experiment Name: At_Drought_Reproduction_P Parameter: Age (day) Value: 35
  misc_feature: MA Experiment 20001906 PARAMETER Experiment Name: At_Drought_Reproduction_P Parameter: Organism Value: A. thaliana
  misc_feature: MA Experiment 20001906 PARAMETER Experiment Name: At_Drought_Reproduction_P Parameter: Plant Line Value: WS
  misc_feature: MA Experiment 20001906 PARAMETER Experiment Name: At_Drought_Reproduction_P Parameter: Timepoint (day) Value: 5
  misc_feature: MA Experiment 20001906 PARAMETER Experiment Name: At_Drought_Reproduction_P Parameter: Tissue Value: Siliques
  misc_feature: MA Experiment 20001906 PARAMETER Experiment Name: At_Drought_Reproduction_P Parameter: Treatment Value: Drought vs. No Drought
  misc_feature: MA Experiment ID: 20001908 Result: Down-regulated in Transcription
  misc_feature: MA Experiment 20001908 PARAMETER Experiment Name: At_Drought_Reproduction_P Parameter: Age (day) Value: 40
  misc_feature: MA Experiment 20001908 PARAMETER Experiment Name: At_Drought_Reproduction_P Parameter: Organism Value: A. thaliana
  misc_feature: MA Experiment 20001908 PARAMETER Experiment Name: At_Drought_Reproduction_P Parameter: Plant Line Value: WS
  misc_feature: MA Experiment 20001908 PARAMETER Experiment Name: At_Drought_Reproduction_P Parameter: Timepoint (day) Value: 10
  misc_feature: MA Experiment 20001908 PARAMETER Experiment Name: At_Drought_Reproduction_P Parameter: Tissue Value: Siliques
  misc_feature: MA Experiment 20001908 PARAMETER Experiment Name: At_Drought_Reproduction_P Parameter: Treatment Value: Drought vs. No Drought
gggggggggcccccgctgtgcaaagatatcactttcttgctcccaaagcaaaatcaactcttcttcttcttcttctcccagacatcagcaagattcaggagattaaaaccttaaattaaaacaatacaaactccaaattcaccggaggaaataacttaaaacttgaatctgaaaagatgagctgcaatggttgccgtgttctccggaaaggttgcagcgagaattgtatcctccggccatgtattcaatggattgaaaccgccgatgctcaaggccacgccaccgtcttcgtcgctaaattcttcggccgtgctggtctcatgtcctttatctccgctgttccggattctcaacgtcctgctttgtttcagtcgttgctctacgaagcttgtggaagaactgtcaatccagttaacggagcaatcggaatgttatggactggaaactggaatatctgtcaagcggctgttgaaacagtgcttcgcggcggttctttaagaccgatcccggagcttctcactcacggcggcggtttcgctggctttccttcgcctacatctgaagaagcatctgagatctgcaccgaaatgttgaatctccagcaaaatgattccaccgatcgtaacatctatcatcattcacgattctcaagctctagatctagatctactatggattcttcttctccgacgaaacgtaagagattatcatcggaagaccaaccatcttcggagcttgatctatctctcaaccctaattttcccattaagcaaacaacaccttcttctacacggcggcgatcagtaacaccgtcgatgaactcagaggactccgggacgacgacgactacgacggcgttttgtgacaagggtgatgtgtacggtaacggaggaggagaaacgaccaagttgcttaacctttttgtttaatgcaaaacggcgtcggttttctcagagttagtctagggttttaaatgtaattttacacattttcttcctttttcctggataaatattggaccggcgaattaacaactacgtcgttttgttctctaaaaaaaaaagaaaaaaaaaaaaaaaaaaaactcgagggggggcccggt

SEQ ID NO: 45811 - protein, 250 aa, Arabidopsis thaliana
  peptide (1)..(250): Ceres Seq. ID no. 13646394
  misc_feature (2)..(107): Pfam Name: Protein of unknown function DUF260 Pfam Description: Protein of unknown function DUF260
  misc_feature (1)..(111): Homolog of NCBI NO: 34895540 NR Description: unnamed protein product [Oryza sativa (japonica
  misc_feature (1)..(110): Homolog of NCBI NO: 40539088 NR Description: expressed protein [Oryza sativa (japonica
  misc_feature (1)..(186): Homolog of NCBI NO: 15219829 NR Description: lateral organ boundaries (LOB) domain family
  misc_feature (1)..(222): Homolog of NCBI NO: 34394489 NR Description: putative lateral organ boundaries (LOB) domain
  misc_feature (1)..(250): Homolog of NCBI NO: 15235604 NR Description: lateral organ boundaries (LOB) domain family
  misc_feature (1)..(250): Homolog of NCBI NO: 21592894 NR Description: unknown [Arabidopsis thaliana]
  misc_feature (1)..(249): Homolog of NCBI NO: 21553886 NR Description: unknown [Arabidopsis thaliana]
  misc_feature (1)..(249): Homolog of NCBI NO: 15229644 NR Description: lateral organ boundaries (LOB) domain protein,
  misc_feature (1)..(250): Homolog of NCBI NO: 21593577 NR Description: unknown [Arabidopsis thaliana]
  misc_feature (1)..(250): Homolog of NCBI NO: 15240739 NR Description: lateral organ boundaries (LOB) domain protein 37
MSCNGCRVLRKGCSENCILRPCIQWIETADAQGHATVFVAKFFGRAGLMSFISAVPDSQRPALFQSLLYEACGRTVNPVNGAIGMLWTGNWNICQAAVETVLRGGSLRPIPELLTHGGGFAGFPSPTSEEASEICTEMLNLQQNDSTDRNIYHHSRFSSSRSRSTMDSSSPTKRKRLSSEDQPSSELDLSLNPNFPIKQTTPSSTRRRSVTPSMNSEDSGTTTTTTAFCDKGDVYGNGGGETTKLLNLFV

SEQ ID NO: 45812 - protein, 202 aa, Arabidopsis thaliana
  peptide (1)..(202): Ceres Seq. ID no. 13646395
  misc_feature (1)..(59): Pfam Name: Protein of unknown function DUF260 Pfam Description: Protein of unknown function DUF260
  misc_feature (1)..(63): Homolog of NCBI NO: 34895540 NR Description: unnamed protein product [Oryza sativa (japonica
  misc_feature (1)..(62): Homolog of NCBI NO: 40539088 NR Description: expressed protein [Oryza sativa (japonica
  misc_feature (1)..(138): Homolog of NCBI NO: 15219829 NR Description: lateral organ boundaries (LOB) domain family
  misc_feature (1)..(174): Homolog of NCBI NO: 34394489 NR Description: putative lateral organ boundaries (LOB) domain
  misc_feature (1)..(202): Homolog of NCBI NO: 15235604 NR Description: lateral organ boundaries (LOB) domain family
  misc_feature (1)..(202): Homolog of NCBI NO: 21592894 NR Description: unknown [Arabidopsis thaliana]
  misc_feature (1)..(201): Homolog of NCBI NO: 21553886 NR Description: unknown [Arabidopsis thaliana]
  misc_feature (1)..(201): Homolog of NCBI NO: 15229644 NR Description: lateral organ boundaries (LOB) domain protein,
  misc_feature (1)..(202): Homolog of NCBI NO: 21593577 NR Description: unknown [Arabidopsis thaliana]
  misc_feature (1)..(202): Homolog of NCBI NO: 15240739 NR Description: lateral organ boundaries (LOB) domain protein 37
MSFISAVPDSQRPALFQSLLYEACGRTVNPVNGAIGMLWTGNWNICQAAVETVLRGGSLRPIPELLTHGGGFAGFPSPTSEEASEICTEMLNLQQNDSTDRNIYHHSRFSSSRSRSTMDSSSPTKRKRLSSEDQPSSELDLSLNPNFPIKQTTPSSTRRRSVTPSMNSEDSGTTTTTTAFCDKGDVYGNGGGETTKLLNLFV

SEQ ID NO: 45813 - protein, 166 aa, Arabidopsis thaliana
  peptide (1)..(166): Ceres Seq. ID no. 13646396
  misc_feature (1)..(27): Homolog of NCBI NO: 34895540 NR Description: unnamed protein product [Oryza sativa (japonica
  misc_feature (1)..(26): Homolog of NCBI NO: 40539088 NR Description: expressed protein [Oryza sativa (japonica
  misc_feature (1)..(102): Homolog of NCBI NO: 15219829 NR Description: lateral organ boundaries (LOB) domain family
  misc_feature (1)..(138): Homolog of NCBI NO: 34394489 NR Description: putative lateral organ boundaries (LOB) domain
  misc_feature (1)..(166): Homolog of NCBI NO: 15235604 NR Description: lateral organ boundaries (LOB) domain family
  misc_feature (1)..(166): Homolog of NCBI NO: 21592894 NR Description: unknown [Arabidopsis thaliana]
  misc_feature (1)..(165): Homolog of NCBI NO: 21553886 NR Description: unknown [Arabidopsis thaliana]
  misc_feature (1)..(165): Homolog of NCBI NO: 15229644 NR Description: lateral organ boundaries (LOB) domain protein,
  misc_feature (1)..(166): Homolog of NCBI NO: 21593577 NR Description: unknown [Arabidopsis thaliana]
  misc_feature (1)..(166): Homolog of NCBI NO: 15240739 NR Description: lateral organ boundaries (LOB) domain protein 37
MLWTGNWNICQAAVETVLRGGSLRPIPELLTHGGGFAGFPSPTSEEASEICTEMLNLQQNDSTDRNIYHHSRFSSSRSRSTMDSSSPTKRKRLSSEDQPSSELDLSLNPNFPIKQTTPSSTRRRSVTPSMNSEDSGTTTTTTAFCDKGDVYGNGGGETTKLLNLFV

SEQ ID NO: 45814 - DNA, 2622 bp, Arabidopsis thaliana
  misc_feature (1)..(2622): Ceres Seq. ID no. 13647162
  misc_feature: MA Experiment ID: 20000185 Result: Up-regulated in Transcription
  misc_feature: MA Experiment 20000185 PARAMETER Experiment Name: At_Roots__P Parameter: Age (day) Value: 7 vs. 21
  misc_feature: MA Experiment 20000185 PARAMETER Experiment Name: At_Roots__P Parameter: Organism Value: A. thaliana
  misc_feature: MA Experiment 20000185 PARAMETER Experiment Name: At_Roots__P Parameter: Tissue Value: Roots vs. Whole Plant
  misc_feature: MA Experiment ID: 20000438 Result: Up-regulated in Transcription
  misc_feature: MA Experiment 20000438 PARAMETER Experiment Name: At_Shoots__P Parameter: Age (day) Value: 14
  misc_feature: MA Experiment 20000438 PARAMETER Experiment Name: At_Shoots__P Parameter: Tissue Value: Shoots vs. Whole Plant
  misc_feature: MA Experiment ID: 20000452 Result: Up-regulated in Transcription
  misc_feature: MA Experiment 20000452 PARAMETER Experiment Name: At_CS6879_Shoots-Roots_P Parameter: Age (day) Value: 14
  misc_feature: MA Experiment 20000452 PARAMETER Experiment Name: At_CS6879_Shoots-Roots_P Parameter: Organism Value: A. thaliana
  misc_feature: MA Experiment 20000452 PARAMETER Experiment Name: At_CS6879_Shoots-Roots_P Parameter: Plant Line Value: CS6879 vs. WS
  misc_feature: MA Experiment 20000452 PARAMETER Experiment Name: At_CS6879_Shoots-Roots_P Parameter: Tissue Value: Shoots
  misc_feature: MA Experiment ID: 20000573 Result: Down-regulated in Transcription
  misc_feature: MA Experiment 20000573 PARAMETER Experiment Name: At_100uM_ABA_Mutants__P Parameter: Organism Value: A. thaliana
  misc_feature: MA Experiment 20000573 PARAMETER Experiment Name: At_100uM_ABA_Mutants__P Parameter: Plant Line Value: CS22 vs. Ler wt
  misc_feature: MA Experiment 20000573 PARAMETER Experiment Name: At_100uM_ABA_Mutants__P Parameter: Timepoint (hr) Value: N/A
  misc_feature: MA Experiment 20000573 PARAMETER Experiment Name: At_100uM_ABA_Mutants__P Parameter: Tissue Value: Whole Plant
  misc_feature: MA Experiment 20000573 PARAMETER Experiment Name: At_100uM_ABA_Mutants__P Parameter: Treatment Value: None
  misc_feature: MA Experiment ID: 20000574 Result: Down-regulated in Transcription
  misc_feature: MA Experiment 20000574 PARAMETER Experiment Name: At_100uM_ABA_Mutants__P Parameter: Organism Value: A. thaliana
  misc_feature: MA Experiment 20000574 PARAMETER Experiment Name: At_100uM_ABA_Mutants__P Parameter: Plant Line Value: CS23 vs. Ler wt
  misc_feature: MA Experiment 20000574 PARAMETER Experiment Name: At_100uM_ABA_Mutants__P Parameter: Timepoint (hr) Value: N/A
  misc_feature: MA Experiment 20000574 PARAMETER Experiment Name: At_100uM_ABA_Mutants__P Parameter: Tissue Value: Whole Plant
  misc_feature: MA Experiment 20000574 PARAMETER Experiment Name: At_100uM_ABA_Mutants__P Parameter: Treatment Value: None
  misc_feature: MA Experiment ID: 20001248 Result: Down-regulated in Transcription
  misc_feature: MA Experiment 20001248 PARAMETER Experiment Name: At_Far-red-induction_P Parameter: Age (day) Value: 7
  misc_feature: MA Experiment 20001248 PARAMETER Experiment Name: At_Far-red-induction_P Parameter: Light Value: Far-red vs. White
  misc_feature: MA Experiment 20001248 PARAMETER Experiment Name: At_Far-red-induction_P Parameter: Organism Value: A. thaliana
  misc_feature: MA Experiment 20001248 PARAMETER Experiment Name: At_Far-red-induction_P Parameter: Plant Line Value: Columbia
  misc_feature: MA Experiment 20001248 PARAMETER Experiment Name: At_Far-red-induction_P Parameter: Timepoint (hr) Value: 4
  misc_feature: MA Experiment 20001248 PARAMETER Experiment Name: At_Far-red-induction_P Parameter: Tissue Value: Whole Plant
atcacgagaaccacacaaatacgcggcaaagagagagaaagatagagagagagagagagagagagagaaagcggtggagtcgtgataagggagaagctctggatacagtctcttcccgtcgtcggagacggagtttatgcctattggctcctgaggttagattaagcttcgtatttagtggattttcttcttttgagatatggaacaagattacatctgctcagggtgctaccagtatcgagttttttcattgcaagaagcactcgattggcggtttcttgtgcactcagatttccttatcggctctttcgtgaactgcacctagtggtcagaccttctgcgatctttacggaaggtgtgatgcaaatttctgattcagggctgatgtttgcaagttatcctaccttcacacagtcctagagtgtcatctaaatctgttccctgcactcaaaaactagttggtccttcttccatatcctgttcttatgagagcttgttgaagaaggatgaatcagttttttttcaagttatgacttttcttagctgtgtcttttcctcgagtctctgaaccccttgagtgaaatgttgtgagcataagtttcgtccagctacccagaacattactttttgttagtgcgtcttccaattctcagtatgttttgtctttttctcttagcgtctttcttttgccttgttggtcaacccattgatgttcaaacttcaaagtaaataagggtcagtctacccagcgggagaatcattgatcttgctgccatacgaacaactggaagattaaagtgatagacatatttcagaagttctttacagagaaatacttaaggggatactttgcttcacctagaggcgatggagaggtatacattactcaaagaagttggtgacggaacatttgggaatgtttggcgagctgtcaataaacagacgaatgaagttgtggcaattaaaagaatgaagaagaagtatttctcttgggaagagtgtgtgaatctaagagaagtgaagtcacttagcagaatgaatcatccaaacattgtgaagctgaaggaagtcatccgggaaaatgatatcctatactttgtgtttgagtacatggagtgcaatctttaccagcttatgaaggatcgccctaagcattttgcagaatctgatatccgaaattggtgcttccaggtcttccaaggcctttcttatatgcatcagcgtggatacttccaccgtgatcttaagccagaaaatctattggtctcgaaagatgtcattaagattgctgatcttggcctggcccgggagatcgactcgagtccaccttatacagaatatgtctctacacgctggtatagggcacctgaagtactgctacaatcatatgtatacacgtcaaaagttgatatgtgggcgatgggtgctattatggcggagctgttgtctcttcgccctctctttcctggagctagtgaagcggatgagatatacaaaatctgcagtgtcataggcagcccaaccgaagagacctggttggaggggctgaaccttgccagcgttatcaattaccaattccctcagtttcccggtgtacatttatcaagtgtgatgccatatgctagtgcggatgcggttaaccttattgagcgcctttgctcgtgggatccctgcaatagaccgactactgcagaggctctacagcatccgttcttccaaagttgctactatattcccccatctctccgtcccaagctgtctgaaccaagagggtctctcgagcagcagcaatccgtgaagcgtttaccagcggctccgacttataatgctaataagccgttgaacacctacgttactccaaagacgaatgctccttttagcaatggtgtcaacagttatgttactccaaagacaaatgctccatttagcaatggtgtcaacagttatgttactgcaaagacgaatgctccttttagcaatggtgtcaacaattatgttgctccaaagatgaatgctccttttgacaatggtgcgacccagcagaaggtggatacgactaataataataaccagaacacggcgtggaacaacaaacctgtgagaagttataacgttaaagattcaaagtatagaccaccgggaaggaagagtccacttgcagcatctatggaaaagaactgggtcttttcccgtggagcatcagagactgcaaataaactggcaaatgcaacaattggaggaagatggactcaaagtcaaaggcaacaacaaccggcgatgaaggcagggtgggtgggagaaagtggtgacatgttcctcagacctacacagccttccaatccctactctaggaaaatcgccggttaagctgaaagattctgttatggcgcatctaagttacgagccctcatcaacaccttcacccgtcgttgtgcttttgattatcatcatcacctatctgagagtccaagttatttgaagacaacttatgttgattttttctcttttgtgtttcgttcttttaaacctctcttgtttgttcggtagtacttcccgtcttcatgacgattatgtatggagtgtttctttttacagttcgcaataaaagctctcgacattgca

SEQ ID NO: 45815 - protein, 499 aa, Arabidopsis thaliana
  peptide (1)..(499): Ceres Seq. ID no. 13647163
  misc_feature (4)..(283): Pfam Name: Protein kinase domain Pfam Description: Protein kinase domain
  misc_feature (4)..(283): Pfam Name: Protein kinase domain Pfam Description: Protein kinase domain
  misc_feature (1)..(350): Homolog of NCBI NO: 11496279 NR Description: male germ cell-associated kinase
  misc_feature (1)..(293): Homolog of NCBI NO: 34897492 NR Description: putative protein kinase [Oryza sativa (japonica
  misc_feature (1)..(438): Homolog of NCBI NO: 34897960 NR Description: serine/threonine-protein kinase Mak (male germ
  misc_feature (1)..(411): Homolog of NCBI NO: 27948450 NR Description: GAMYB-binding protein [Hordeum vulgare subsp.
  misc_feature (1)..(284): Homolog of NCBI NO: 7488272 NR Description: protein kinase homolog T18B16.80 - Arabidopsis
  misc_feature (1)..(350): Homolog of NCBI NO: 11496279 NR Description: male germ cell-associated kinase
  misc_feature (1)..(438): Homolog of NCBI NO: 34897960 NR Description: serine/threonine-protein kinase Mak (male germ
  misc_feature (1)..(284): Homolog of NCBI NO: 7488272 NR Description: protein kinase homolog T18B16.80 - Arabidopsis
  misc_feature (1)..(474): Homolog of NCBI NO: 9758733 NR Description: serine/threonine-protein kinase Mak (male germ
  misc_feature (1)..(499): Homolog of NCBI NO: 18422554 NR Description: protein kinase, putative [Arabidopsis thaliana]
  misc_feature (1)..(499): Homolog of NCBI NO: 15450860 NR Description: serine/threonine-protein kinase Mak (male germ
  misc_feature (1)..(457): Homolog of NCBI NO: 30684655 NR Description: protein kinase, putative [Arabidopsis thaliana]
  misc_feature (1)..(457): Homolog of NCBI NO: 18415242 NR Description: protein kinase, putative [Arabidopsis thaliana]
  misc_feature (1)..(411): Homolog of NCBI NO: 27948450 NR Description: GAMYB-binding protein [Hordeum vulgare subsp.
  misc_feature (1)..(293): Homolog of NCBI NO: 34897492 NR Description: putative protein kinase [Oryza sativa (japonica
  misc_feature (1)..(457): Homolog of NCBI NO: 18415242 NR Description: protein kinase, putative [Arabidopsis thaliana]
  misc_feature (1)..(457): Homolog of NCBI NO: 30684655 NR Description: protein kinase, putative [Arabidopsis thaliana]
  misc_feature (1)..(499): Homolog of NCBI NO: 15450860 NR Description: serine/threonine-protein kinase Mak (male germ
  misc_feature (1)..(499): Homolog of NCBI NO: 18422554 NR Description: protein kinase, putative [Arabidopsis thaliana]
  misc_feature (1)..(474): Homolog of NCBI NO: 9758733 NR Description: serine/threonine-protein kinase Mak (male germ
MERYTLLKEVGDGTFGNVWRAVNKQTNEVVAIKRMKKKYFSWEECVNLREVKSLSRMNHPNIVKLKEVIRENDILYFVFEYMECNLYQLMKDRPKHFAESDIRNWCFQVFQGLSYMHQRGYFHRDLKPENLLVSKDVIKIADLGLAREIDSSPPYTEYVSTRWYRAPEVLLQSYVYTSKVDMWAMGAIMAELLSLRPLFPGASEADEIYKICSVIGSPTEETWLEGLNLASVINYQFPQFPGVHLSSVMPYASADAVNLIERLCSWDPCNRPTTAEALQHPFFQSCYYIPPSLRPKLSEPRGSLEQQQSVKRLPAAPTYNANKPLNTYVTPKTNAPFSNGVNSYVTPKTNAPFSNGVNSYVTAKTNAPFSNGVNNYVAPKMNAPFDNGATQQKVDTTNNNNQNTAWNNKPVRSYNVKDSKYRPPGRKSPLAASMEKNWVFSRGASETANKLANATIGGRWTQSQRQQQPAMKAGWVGESGDMFLRPTQPSNPYSRKIAG

SEQ ID NO: 45816 - protein, 465 aa, Arabidopsis thaliana
  peptide (1)..(465): Ceres Seq. ID no. 13647164
  misc_feature (1)..(249): Pfam Name: Protein kinase domain Pfam Description: Protein kinase domain
  misc_feature (1)..(249): Pfam Name: Protein kinase domain Pfam Description: Protein kinase domain
  misc_feature (1)..(316): Homolog of NCBI NO: 11496279 NR Description: male germ cell-associated kinase
  misc_feature (1)..(259): Homolog of NCBI NO: 34897492 NR Description: putative protein kinase [Oryza sativa (japonica
  misc_feature (1)..(404): Homolog of NCBI NO: 34897960 NR Description: serine/threonine-protein kinase Mak (male germ
  misc_feature (1)..(377): Homolog of NCBI NO: 27948450 NR Description: GAMYB-binding protein [Hordeum vulgare subsp.
  misc_feature (1)..(250): Homolog of NCBI NO: 7488272 NR Description: protein kinase homolog T18B16.80 - Arabidopsis
  misc_feature (1)..(316): Homolog of NCBI NO: 11496279 NR Description: male germ cell-associated kinase
  misc_feature (1)..(404): Homolog of NCBI NO: 34897960 NR Description: serine/threonine-protein kinase Mak (male germ
  misc_feature (1)..(250): Homolog of NCBI NO: 7488272 NR Description: protein kinase homolog T18B16.80 - Arabidopsis
  misc_feature (1)..(440): Homolog of NCBI NO: 9758733 NR Description: serine/threonine-protein kinase Mak (male germ
  misc_feature (1)..(465): Homolog of NCBI NO: 18422554 NR Description: protein kinase, putative [Arabidopsis thaliana]
  misc_feature (1)..(465): Homolog of NCBI NO: 15450860 NR Description: serine/threonine-protein kinase Mak (male germ
  misc_feature (1)..(423): Homolog of NCBI NO: 30684655 NR Description: protein kinase, putative [Arabidopsis thaliana]
  misc_feature (1)..(423): Homolog of NCBI NO: 18415242 NR Description: protein kinase, putative [Arabidopsis thaliana]
  misc_feature (1)..(377): Homolog of NCBI NO: 27948450 NR Description: GAMYB-binding protein [Hordeum vulgare subsp.
  misc_feature (1)..(259): Homolog of NCBI NO: 34897492 NR Description: putative protein kinase [Oryza sativa (japonica
  misc_feature (1)..(423): Homolog of NCBI NO: 18415242 NR Description: protein kinase, putative [Arabidopsis thaliana]
  misc_feature (1)..(423): Homolog of NCBI NO: 30684655 NR Description: protein kinase, putative [Arabidopsis thaliana]
  misc_feature (1)..(465): Homolog of NCBI NO: 15450860 NR Description: serine/threonine-protein kinase Mak (male germ
  misc_feature (1)..(465): Homolog of NCBI NO: 18422554 NR Description: protein kinase, putative [Arabidopsis thaliana]
  misc_feature (1)..(440): Homolog of NCBI NO: 9758733 NR Description: serine/threonine-protein kinase Mak (male germ
MKKKYFSWEECVNLREVKSLSRMNHPNIVKLKEVIRENDILYFVFEYMECNLYQLMKDRPKHFAESDIRNWCFQVFQGLSYMHQRGYFHRDLKPENLLVSKDVIKIADLGLAREIDSSPPYTEYVSTRWYRAPEVLLQSYVYTSKVDMWAMGAIMAELLSLRPLFPGASEADEIYKICSVIGSPTEETWLEGLNLASVINYQFPQFPGVHLSSVMPYASADAVNLIERLCSWDPCNRPTTAEALQHPFFQSCYYIPPSLRPKLSEPRGSLEQQQSVKRLPAAPTYNANKPLNTYVTPKTNAPFSNGVNSYVTPKTNAPFSNGVNSYVTAKTNAPFSNGVNNYVAPKMNAPFDNGATQQKVDTTNNNNQNTAWNNKPVRSYNVKDSKYRPPGRKSPLAASMEKNWVFSRGASETANKLANATIGGRWTQSQRQQQPAMKAGWVGESGDMFLRPTQPSNPYSRKIAG

SEQ ID NO: 45817 - protein, 443 aa, Arabidopsis thaliana
  peptide (1)..(443): Ceres Seq. ID no. 13647165
  misc_feature (1)..(227): Pfam Name: Protein kinase domain Pfam Description: Protein kinase domain
  misc_feature (1)..(227): Pfam Name: Protein kinase domain Pfam Description: Protein kinase domain
  misc_feature (1)..(294): Homolog of NCBI NO: 11496279 NR Description: male germ cell-associated kinase
  misc_feature (1)..(237): Homolog of NCBI NO: 34897492 NR Description: putative protein kinase [Oryza sativa (japonica
  misc_feature (1)..(382): Homolog of NCBI NO: 34897960 NR Description: serine/threonine-protein kinase Mak (male germ
  misc_feature (1)..(355): Homolog of NCBI NO: 27948450 NR Description: GAMYB-binding protein [Hordeum vulgare subsp.
  misc_feature (1)..(228): Homolog of NCBI NO: 7488272 NR Description: protein kinase homolog T18B16.80 - Arabidopsis
  misc_feature (1)..(294): Homolog of NCBI NO: 11496279 NR Description: male germ cell-associated kinase
  misc_feature (1)..(382): Homolog of NCBI NO: 34897960 NR Description: serine/threonine-protein kinase Mak (male germ
  misc_feature (1)..(228): Homolog of NCBI NO: 7488272 NR Description: protein kinase homolog T18B16.80 - Arabidopsis
  misc_feature (1)..(418): Homolog of NCBI NO: 9758733 NR Description: serine/threonine-protein kinase Mak (male germ
  misc_feature (1)..(443): Homolog of NCBI NO: 18422554 NR Description: protein kinase, putative [Arabidopsis thaliana]
  misc_feature (1)..(443): Homolog of NCBI NO: 15450860 NR Description: serine/threonine-protein kinase Mak (male germ
  misc_feature (1)..(401): Homolog of NCBI NO: 30684655 NR Description: protein kinase, putative [Arabidopsis thaliana]
  misc_feature (1)..(401): Homolog of NCBI NO: 18415242 NR Description: protein kinase, putative [Arabidopsis thaliana]
  misc_feature (1)..(355): Homolog of NCBI NO: 27948450 NR Description: GAMYB-binding protein [Hordeum vulgare subsp.
  misc_feature (1)..(237): Homolog of NCBI NO: 34897492 NR Description: putative protein kinase [Oryza sativa (japonica
  misc_feature (1)..(401): Homolog of NCBI NO: 18415242 NR Description: protein kinase, putative [Arabidopsis thaliana]
  misc_feature (1)..(401): Homolog of NCBI NO: 30684655 NR Description: protein kinase, putative [Arabidopsis thaliana]
  misc_feature (1)..(443): Homolog of NCBI NO: 15450860 NR Description: serine/threonine-protein kinase Mak (male germ
  misc_feature (1)..(443): Homolog of NCBI NO: 18422554 NR Description: protein kinase, putative [Arabidopsis thaliana]
  misc_feature (1)..(418): Homolog of NCBI NO: 9758733 NR Description: serine/threonine-protein kinase Mak (male germ
MNHPNIVKLKEVIRENDILYFVFEYMECNLYQLMKDRPKHFAESDIRNWCFQVFQGLSYMHQRGYFHRDLKPENLLVSKDVIKIADLGLAREIDSSPPYTEYVSTRWYRAPEVLLQSYVYTSKVDMWAMGAIMAELLSLRPLFPGASEADEIYKICSVIGSPTEETWLEGLNLASVINYQFPQFPGVHLSSVMPYASADAVNLIERLCSWDPCNRPTTAEALQHPFFQSCYYIPPSLRPKLSEPRGSLEQQQSVKRLPAAPTYNANKPLNTYVTPKTNAPFSNGVNSYVTPKTNAPFSNGVNSYVTAKTNAPFSNGVNNYVAPKMNAPFDNGATQQKVDTTNNNNQNTAWNNKPVRSYNVKDSKYRPPGRKSPLAASMEKNWVFSRGASETANKLANATIGGRWTQSQRQQQPAMKAGWVGESGDMFLRPTQPSNPYSRKIAG

SEQ ID NO: 45818 - DNA, 2331 bp, Arabidopsis thaliana
  misc_feature (1)..(2331): Ceres Seq. ID no. 12561116
  misc_feature: MA Experiment ID: 20000315 Result: Down-regulated in Transcription
  misc_feature: MA Experiment 20000315 PARAMETER Experiment Name: At_14day_Shoots-Roots_Sub_P Parameter: Age (day) Value: 14
  misc_feature: MA Experiment 20000315 PARAMETER Experiment Name: At_14day_Shoots-Roots_Sub_P Parameter: Organism Value: A. thaliana
  misc_feature: MA Experiment 20000315 PARAMETER Experiment Name: At_14day_Shoots-Roots_Sub_P Parameter: Plant Line Value: WS
  misc_feature: MA Experiment 20000315 PARAMETER Experiment Name: At_14day_Shoots-Roots_Sub_P Parameter: Tissue Value: Shoots vs. Whole Plant
  misc_feature: MA Experiment ID: 20000328 Result: Down-regulated in Transcription
  misc_feature: MA Experiment 20000328 PARAMETER Experiment Name: At_42deg_Heat_Sub_P Parameter: Age (day) Value: 14
  misc_feature: MA Experiment 20000328 PARAMETER Experiment Name: At_42deg_Heat_Sub_P Parameter: Organism Value: A. thaliana
  misc_feature: MA Experiment 20000328 PARAMETER Experiment Name: At_42deg_Heat_Sub_P Parameter: Plant Line Value: WS
  misc_feature: MA Experiment 20000328 PARAMETER Experiment Name: At_42deg_Heat_Sub_P Parameter: Temperature (deg C) Value: 42 vs. 22
  misc_feature: MA Experiment 20000328 PARAMETER Experiment Name: At_42deg_Heat_Sub_P Parameter: Timepoint (hr) Value: 6
  misc_feature: MA Experiment 20000328 PARAMETER Experiment Name: At_42deg_Heat_Sub_P Parameter: Tissue Value: Aerial
  misc_feature: MA Experiment ID: 20000355 Result: Up-regulated in Transcription
  misc_feature: MA Experiment 20000355 PARAMETER Experiment Name: At_Siliques_Sub_P Parameter: Age (day) Value: 21
  misc_feature: MA Experiment 20000355 PARAMETER Experiment Name: At_Siliques_Sub_P Parameter: Organism Value: A. thaliana
  misc_feature: MA Experiment 20000355 PARAMETER Experiment Name: At_Siliques_Sub_P Parameter: Plant Line Value: WS
  misc_feature: MA Experiment 20000355 PARAMETER Experiment Name: At_Siliques_Sub_P Parameter: Tissue Value: Less Than 5mm Siliques vs. Whole Plant
  misc_feature: MA Experiment ID: 20000440 Result: Up-regulated in Transcription
  misc_feature: MA Experiment 20000440 PARAMETER Experiment Name: At_Closed-Flower__Sub_P Parameter: Tissue Value: Closed Flower vs. Whole Plant
atggcgggttttatcaatcttgaggattccccaatgtttcaaaaacaggtcttctccttggaagggacaagtgatgagcttaaagatcgttgtcagaagttatacaaaggtgttaagaagttcatgggagctttaggagaggcatctactggagttagtgcctttgcagattctcttgaagagtttggtgctggacatgatgatccagtcagtgtttcaattggaggtccagtaatatctaagttcataaatacacttcgagagctctcctcttataaggagtttcttcgctcacaggtggagcatgtattacttgagaggctgacaaactttatgactgttgatctacaagaagcaaaggagtctcggcgtcggttcgataaagctgtccattcttatgatcaggcacgcgaaaagtttgtgtcgctaaagaagaataccagaggagacattgttgctgagttggaagaggatttggagaactcgaagtcagcatttgagaaaagtcgtttcaatctagtaaattcactgatgaccattgaagcaaaaaagaagtacgagttcttggaatctataagtgcaattatggattcccatttcaaatattttaagcttggttatgatctattaagtcaattggagccttacatccatcaggtattgacatacgcacaacagtcaaaagaacagtctaagattgaacaagatcgatttgcacaacgcattcaagaattcaggactcaatctgaattagacagccaacaggcctctgctaaagcagatccctccgatgttggtggaaaccatgtttatagagctatcccccgtaaaaacgtagaagcaaactcagtttcaacagcagacaaggaagtaactaaacaagggtatctattaaagcgatcagctagtttgagagctgattggaaaaggagattctttgtgcttgacaaccatggatccctatactattacagaaacaccggtaataaatcagcgaaatctcagcattactacagtggtttaggagagcatagtagcggcgtctttgggagatttcgtacaagacacaatcgatcagcttcacagggaagcctagattgcaatatgatcgatctccgtacttcactgataaaattggacgcagaggacacagatcttcgactctgttttagaattatatctcctcaaaagacttacacactacaggctgaaaatggagctgataggatggattgggtaaataagatcacagcagctataacaatacgtctgaattctcattttctgcagcagtcaccagcaagatacttggataaaaagaatactagttctggtcctgccactgaaaacctcaccctgaatcaaaaagaagattataatcaaagactaaatgtgggggatgacgtccttacaatactcagagaaattcctggaaataacacttgtgcagaatgcaatgcacctgaccccgattgggcatcattgaatcttggagttttgatgtgcattgaatgctctggtgttcacaggaatctcggcgttcatatatccaaggtgagatcgctcacattggatgtgaaagtatgggagcctacaatcttggacttatttcggaacttaggcaacggatactgtaattcagtctgggaggagctacttcatcaccttgacgatgacagtgaaaagggatcgacagacacacttgcatcagtttcgaaaccatcttcagaagattggtttactctgaaggagaaatatattaacggaaagtacctggagaaagcactagttgtcaaagatgaaagagaagcaaattctactgcctcaagtagaatatgggaagcggttcaaagcaggaacataagagacatctaccgactcattgtaaaagcagatgcaaatatcatcaataccaagttcgatgatattactgaccttgatgtatatcaccaccaccatgttgatgcaccagatgaagtaaagaaaaggcacgatccaaatgcgtgtcagagaatcaagaattcgaacgaagcaagaaactgtcttcaaggctgctcattgttgcatgtggcgtgtcaaagcggtgacccaatcttgcttgaactgctgttgcagttcggggctgacataaacatgagagattaccacggacgaactccattacaccattgcatcgcatcagggaacaacgcatttgcaaaggttttgctgagaagaggtgctcgtccatcaatagaggatggtggaggattaagtgtgttggaaagggcaatggagatgggagccataaccgatgaagagctcttccttctattagcagagtgtcagtaa

SEQ ID NO: 45819 - protein, 776 aa, Arabidopsis thaliana
  peptide (1)..(776): Ceres Seq. ID no. 12561117
  misc_feature (467)..(604): Pfam Name: Putative GTPase activating protein for Arf Pfam Description: Putative GTPase activating protein for Arf
  misc_feature (4)..(202): Homolog of NCBI NO: 38175545 NR Description: putative ARF GTPase-activating domain-containing
  misc_feature (425)..(774): Homolog of NCBI NO: 38175545 NR Description: putative ARF GTPase-activating domain-containing
  misc_feature (325)..(431): Homolog of NCBI NO: 11358303 NR Description: hypothetical protein T31B5.120 - Arabidopsis
  misc_feature (20)..(319): Homolog of NCBI NO: 11358303 NR Description: hypothetical protein T31B5.120 - Arabidopsis
  misc_feature (461)..(774): Homolog of NCBI NO: 11358303 NR Description: hypothetical protein T31B5.120 - Arabidopsis
  misc_feature (325)..(431): Homolog of NCBI NO: 30684352 NR Description: ARF GTPase-activating domain-containing protein
  misc_feature (4)..(319): Homolog of NCBI NO: 30684352 NR Description: ARF GTPase-activating domain-containing protein
  misc_feature (461)..(774): Homolog of NCBI NO: 30684352 NR Description: ARF GTPase-activating domain-containing protein
  misc_feature (206)..(296): Homolog of NCBI NO: 25402625 NR Description: hypothetical protein [imported] - Arabidopsis
  misc_feature (327)..(775): Homolog of NCBI NO: 25402625 NR Description: hypothetical protein [imported] - Arabidopsis
MAGFINLEDSPMFQKQVFSLEGTSDELKDRCQKLYKGVKKFMGALGEASTGVSAFADSLEEFGAGHDDPVSVSIGGPVISKFINTLRELSSYKEFLRSQVEHVLLERLTNFMTVDLQEAKESRRRFDKAVHSYDQAREKFVSLKKNTRGDIVAELEEDLENSKSAFEKSRFNLVNSLMTIEAKKKYEFLESISAIMDSHFKYFKLGYDLLSQLEPYIHQVLTYAQQSKEQSKIEQDRFAQRIQEFRTQSELDSQQASAKADPSDVGGNHVYRAIPRKNVEANSVSTADKEVTKQGYLLKRSASLRADWKRRFFVLDNHGSLYYYRNTGNKSAKSQHYYSGLGEHSSGVFGRFRTRHNRSASQGSLDCNMIDLRTSLIKLDAEDTDLRLCFRIISPQKTYTLQAENGADRMDWVNKITAAITIRLNSHFLQQSPARYLDKKNTSSGPATENLTLNQKEDYNQRLNVGDDVLTILREIPGNNTCAECNAPDPDWASLNLGVLMCIECSGVHRNLGVHISKVRSLTLDVKVWEPTILDLFRNLGNGYCNSVWEELLHHLDDDSEKGSTDTLASVSKPSSEDWFTLKEKYINGKYLEKALVVKDEREANSTASSRIWEAVQSRNIRDIYRLIVKADANIINTKFDDITDLDVYHHHHVDAPDEVKKRHDPNACQRIKNSNEARNCLQGCSLLHVACQSGDPILLELLLQFGADINMRDYHGRTPLHHCIASGNNAFAKVLLRRGARPSIEDGGGLSVLERAMEMGAITDEELFLLLAECQ

SEQ ID NO: 45820 - protein, 765 aa, Arabidopsis thaliana
  peptide (1)..(765): Ceres Seq. ID no. 12561118
  misc_feature (456)..(593): Pfam Name: Putative GTPase activating protein for Arf Pfam Description: Putative GTPase activating protein for Arf
  misc_feature (1)..(191): Homolog of NCBI NO: 38175545 NR Description: putative ARF GTPase-activating domain-containing
  misc_feature (414)..(763): Homolog of NCBI NO: 38175545 NR Description: putative ARF GTPase-activating domain-containing
  misc_feature (314)..(420): Homolog of NCBI NO: 11358303 NR Description: hypothetical protein T31B5.120 - Arabidopsis
  misc_feature (9)..(308): Homolog of NCBI NO: 11358303 NR Description: hypothetical protein T31B5.120 - Arabidopsis
  misc_feature (450)..(763): Homolog of NCBI NO: 11358303 NR Description: hypothetical protein T31B5.120 - Arabidopsis
  misc_feature (314)..(420): Homolog of NCBI NO: 30684352 NR Description: ARF GTPase-activating domain-containing protein
  misc_feature (1)..(308): Homolog of NCBI NO: 30684352 NR Description: ARF GTPase-activating domain-containing protein
  misc_feature (450)..(763): Homolog of NCBI NO: 30684352 NR Description: ARF GTPase-activating domain-containing protein
  misc_feature (195)..(285): Homolog of NCBI NO: 25402625 NR Description: hypothetical protein [imported] - Arabidopsis
  misc_feature (316)..(764): Homolog of NCBI NO: 25402625 NR Description: hypothetical protein [imported] - Arabidopsis
MFQKQVFSLEGTSDELKDRCQKLYKGVKKFMGALGEASTGVSAFADSLEEFGAGHDDPVSVSIGGPVISKFINTLRELSSYKEFLRSQVEHVLLERLTNFMTVDLQEAKESRRRFDKAVHSYDQAREKFVSLKKNTRGDIVAELEEDLENSKSAFEKSRFNLVNSLMTIEAKKKYEFLESISAIMDSHFKYFKLGYDLLSQLEPYIHQVLTYAQQSKEQSKIEQDRFAQRIQEFRTQSELDSQQASAKADPSDVGGNHVYRAIPRKNVEANSVSTADKEVTKQGYLLKRSASLRADWKRRFFVLDNHGSLYYYRNTGNKSAKSQHYYSGLGEHSSGVFGRFRTRHNRSASQGSLDCNMIDLRTSLIKLDAEDTDLRLCFRIISPQKTYTLQAENGADRMDWVNKITAAITIRLNSHFLQQSPARYLDKKNTSSGPATENLTLNQKEDYNQRLNVGDDVLTILREIPGNNTCAECNAPDPDWASLNLGVLMCIECSGVHRNLGVHISKVRSLTLDVKVWEPTILDLFRNLGNGYCNSVWEELLHHLDDDSEKGSTDTLASVSKPSSEDWFTLKEKYINGKYLEKALVVKDEREANSTASSRIWEAVQSRNIRDIYRLIVKADANIINTKFDDITDLDVYHHHHVDAPDEVKKRHDPNACQRIKNSNEARNCLQGCSLLHVACQSGDPILLELLLQFGADINMRDYHGRTPLHHCIASGNNAFAKVLLRRGARPSIEDGGGLSVLERAMEMGAITDEELFLLLAECQ

SEQ ID NO: 45821 - protein, 735 aa, Arabidopsis thaliana
  peptide (1)..(735): Ceres Seq. ID no. 12561119
  misc_feature (426)..(563): Pfam Name: Putative GTPase activating protein for Arf Pfam Description: Putative GTPase activating protein for Arf
  misc_feature (1)..(161): Homolog of NCBI NO: 38175545 NR Description: putative ARF GTPase-activating domain-containing
  misc_feature (384)..(733): Homolog of NCBI NO: 38175545 NR Description: putative ARF GTPase-activating domain-containing
  misc_feature (284)..(390): Homolog of NCBI NO: 11358303 NR Description: hypothetical protein T31B5.120 - Arabidopsis
  misc_feature (1)..(278): Homolog of NCBI NO: 11358303 NR Description: hypothetical protein T31B5.120 - Arabidopsis
  misc_feature (420)..(733): Homolog of NCBI NO: 11358303 NR Description: hypothetical protein T31B5.120 - Arabidopsis
  misc_feature (284)..(390): Homolog of NCBI NO: 30684352 NR Description: ARF GTPase-activating domain-containing protein
  misc_feature (1)..(278): Homolog of NCBI NO: 30684352 NR Description: ARF GTPase-activating domain-containing protein
  misc_feature (420)..(733): Homolog of NCBI NO: 30684352 NR Description: ARF GTPase-activating domain-containing protein
  misc_feature (165)..(255): Homolog of NCBI NO: 25402625 NR Description: hypothetical protein [imported] - Arabidopsis
  misc_feature (286)..(734): Homolog of NCBI NO: 25402625 NR Description: hypothetical protein [imported] - Arabidopsis
MGALGEASTGVSAFADSLEEFGAGHDDPVSVSIGGPVISKFINTLRELSSYKEFLRSQVEHVLLERLTNFMTVDLQEAKESRRRFDKAVHSYDQAREKFVSLKKNTRGDIVAELEEDLENSKSAFEKSRFNLVNSLMTIEAKKKYEFLESISAIMDSHFKYFKLGYDLLSQLEPYIHQVLTYAQQSKEQSKIEQDRFAQRIQEFRTQSELDSQQASAKADPSDVGGNHVYRAIPRKNVEANSVSTADKEVTKQGYLLKRSASLRADWKRRFFVLDNHGSLYYYRNTGNKSAKSQHYYSGLGEHSSGVFGRFRTRHNRSASQGSLDCNMIDLRTSLIKLDAEDTDLRLCFRIISPQKTYTLQAENGADRMDWVNKITAAITIRLNSHFLQQSPARYLDKKNTSSGPATENLTLNQKEDYNQRLNVGDDVLTILREIPGNNTCAECNAPDPDWASLNLGVLMCIECSGVHRNLGVHISKVRSLTLDVKVWEPTILDLFRNLGNGYCNSVWEELLHHLDDDSEKGSTDTLASVSKPSSEDWFTLKEKYINGKYLEKALVVKDEREANSTASSRIWEAVQSRNIRDIYRLIVKADANIINTKFDDITDLDVYHHHHVDAPDEVKKRHDPNACQRIKNSNEARNCLQGCSLLHVACQSGDPILLELLLQFGADINMRDYHGRTPLHHCIASGNNAFAKVLLRRGARPSIEDGGGLSVLERAMEMGAITDEELFLLLAECQ

SEQ ID NO: 45822 - DNA, 2916 bp, Arabidopsis thaliana
  misc_feature (1)..(2916): Ceres Seq. ID no. 14309731
  misc_feature: MA Experiment ID: 20000166 Result: Up-regulated in Transcription
  misc_feature: MA Experiment 20000166 PARAMETER Experiment Name: At_100uM_ABA_P Parameter: Age (day) Value: 14
  misc_feature: MA Experiment 20000166 PARAMETER Experiment Name: At_100uM_ABA_P Parameter: Organism Value: A. thaliana
  misc_feature: MA Experiment 20000166 PARAMETER Experiment Name: At_100uM_ABA_P Parameter: Plant Line Value: WS
  misc_feature: MA Experiment 20000166 PARAMETER Experiment Name: At_100uM_ABA_P Parameter: Timepoint (hr) Value: 1
  misc_feature: MA Experiment 20000166 PARAMETER Experiment Name: At_100uM_ABA_P Parameter: Tissue Value: Aerial
  misc_feature: MA Experiment 20000166 PARAMETER Experiment Name: At_100uM_ABA_P Parameter: Treatment Value: 100uM ABA vs. No Treatment
  misc_feature: MA Experiment ID: 20000214 Result: Down-regulated in Transcription
  misc_feature: MA Experiment 20000214 PARAMETER Experiment Name: At_4deg_Cold_P Parameter: Timepoint (hr) Value: 6
  misc_feature: MA Experiment ID: 20000436 Result: Up-regulated in Transcription
  misc_feature: MA Experiment 20000436 PARAMETER Experiment Name: At_Drought_P Parameter: Age (day) Value: 7
  misc_feature: MA Experiment 20000436 PARAMETER Experiment Name: At_Drought_P Parameter: Organism Value: A. thaliana
  misc_feature: MA Experiment 20000436 PARAMETER Experiment Name: At_Drought_P Parameter: Plant Line Value: WS
  misc_feature: MA Experiment 20000436 PARAMETER Experiment Name: At_Drought_P Parameter: Timepoint (hr) Value: 12
  misc_feature: MA Experiment 20000436 PARAMETER Experiment Name: At_Drought_P Parameter: Tissue Value: Whole Plant
  misc_feature: MA Experiment 20000436 PARAMETER Experiment Name: At_Drought_P Parameter: Treatment Value: Drought vs. No Drought
  misc_feature: MA Experiment ID: 20000437 Result: Up-regulated in Transcription
  misc_feature: MA Experiment 20000437 PARAMETER Experiment Name: At_Drought_P Parameter: Age (day) Value: 8
  misc_feature: MA Experiment 20000437 PARAMETER Experiment Name: At_Drought_P Parameter: Organism Value: A. thaliana
  misc_feature: MA Experiment 20000437 PARAMETER Experiment Name: At_Drought_P Parameter: Plant Line Value: WS
  misc_feature: MA Experiment 20000437 PARAMETER Experiment Name: At_Drought_P Parameter: Timepoint (hr) Value: 24
  misc_feature: MA Experiment 20000437 PARAMETER Experiment Name: At_Drought_P Parameter: Tissue Value: Whole Plant
  misc_feature: MA Experiment 20000437 PARAMETER Experiment Name: At_Drought_P Parameter: Treatment Value: Drought vs. No Drought
  misc_feature: MA Experiment ID: 20001247 Result: Up-regulated in Transcription
  misc_feature: MA Experiment 20001247 PARAMETER Experiment Name: At_Far-red-induction_P Parameter: Age (day) Value: 7
  misc_feature: MA Experiment 20001247 PARAMETER Experiment Name: At_Far-red-induction_P Parameter: Light Value: Far-red vs. White
  misc_feature: MA Experiment 20001247 PARAMETER Experiment Name: At_Far-red-induction_P Parameter: Organism Value: A. thaliana
  misc_feature: MA Experiment 20001247 PARAMETER Experiment Name: At_Far-red-induction_P Parameter: Plant Line Value: Columbia
  misc_feature: MA Experiment 20001247 PARAMETER Experiment Name: At_Far-red-induction_P Parameter: Timepoint (hr) Value: 1
  misc_feature: MA Experiment 20001247 PARAMETER Experiment Name: At_Far-red-induction_P Parameter: Tissue Value: Whole Plant
  misc_feature: MA Experiment ID: 20001248 Result: Up-regulated in Transcription
  misc_feature: MA Experiment 20001248 PARAMETER Experiment Name: At_Far-red-induction_P Parameter: Age (day) Value: 7
  misc_feature: MA Experiment 20001248 PARAMETER Experiment Name: At_Far-red-induction_P Parameter: Light Value: Far-red vs. White
  misc_feature: MA Experiment 20001248 PARAMETER Experiment Name: At_Far-red-induction_P Parameter: Organism Value: A. thaliana
  misc_feature: MA Experiment 20001248 PARAMETER Experiment Name: At_Far-red-induction_P Parameter: Plant Line Value: Columbia
  misc_feature: MA Experiment 20001248 PARAMETER Experiment Name: At_Far-red-induction_P Parameter: Timepoint (hr) Value: 4
  misc_feature: MA Experiment 20001248 PARAMETER Experiment Name: At_Far-red-induction_P Parameter: Tissue Value: Whole Plant
  misc_feature: MA Experiment ID: 20001450 Result: Up-regulated in Transcription
  misc_feature: MA Experiment 20001450 PARAMETER Experiment Name: At_Far-red-induction_P Parameter: Age (day) Value: 7
  misc_feature: MA Experiment 20001450 PARAMETER Experiment Name: At_Far-red-induction_P Parameter: Light Value: Far-red vs. White
  misc_feature: MA Experiment 20001450 PARAMETER Experiment Name: At_Far-red-induction_P Parameter: Organism Value: A. thaliana
  misc_feature: MA Experiment 20001450 PARAMETER Experiment Name: At_Far-red-induction_P Parameter: Plant Line Value: Columbia
  misc_feature: MA Experiment 20001450 PARAMETER Experiment Name: At_Far-red-induction_P Parameter: Timepoint (hr) Value: 8
  misc_feature: MA Experiment 20001450 PARAMETER Experiment Name: At_Far-red-induction_P Parameter: Tissue Value: Whole Plant
  misc_feature: MA Experiment ID: 20001451 Result: Up-regulated in Transcription
  misc_feature: MA Experiment 20001451 PARAMETER Experiment Name: At_Far-red-induction_P Parameter: Age (day) Value: 7
  misc_feature: MA Experiment 20001451 PARAMETER Experiment Name: At_Far-red-induction_P Parameter: Light Value: Far-red vs. White
  misc_feature: MA Experiment 20001451 PARAMETER Experiment Name: At_Far-red-induction_P Parameter: Organism Value: A. thaliana
  misc_feature: MA Experiment 20001451 PARAMETER Experiment Name: At_Far-red-induction_P Parameter: Plant Line Value: Columbia
  misc_feature: MA Experiment 20001451 PARAMETER Experiment Name: At_Far-red-induction_P Parameter: Timepoint (hr) Value: 24
  misc_feature: MA Experiment 20001451 PARAMETER Experiment Name: At_Far-red-induction_P Parameter: Tissue Value: Whole Plant
  misc_feature: MA Experiment ID: 20001757 Result: Down-regulated in Transcription
  misc_feature: MA Experiment 20001757 PARAMETER Experiment Name: At_50mM_NH4NO3_L-to-H_P Parameter: Timepoint (hr) Value: 6
  misc_feature: MA Experiment 20001757 PARAMETER Experiment Name: At_50mM_NH4NO3_L-to-H_P Parameter: Tissue Value: Leaf
  misc_feature: MA Experiment 20001757 PARAMETER Experiment Name: At_50mM_NH4NO3_L-to-H_P Parameter: Treatment Value: 50mM NH4NO3 vs 100mM Mannitol
gacttttgaagctgtaataatattcttgaatctattcctttctttctctttctcatgtttaatcggtgaaggctttactctgtttctttcatcatgtttcaatcaaaagccttaactttttctttagctctttccattacaagagacctctagcttcatactttttataaaaattctctctttttctcagtttaatctcaagaaatggtttcaagatcgtattcaaatctgttggagttagcttcaggagactcaccaacgtttggacgcatgaaccgacaaatcccacgaatcatggccgttgctggaatcatgtcaaacatcgataatgactctaaagacactgatctgtctcctaaagatcgtatcatcattgtagccaatgaattacctatacgagctcagagaagggttgatggtaatggtagtggtagtagtagtagtagtacttgttgtagcaaaggttggaacttttcttgggatgagaattcacttcttctccaattgaaagatgggttaggagatgaagctattgaagttatctatgttggttgtttgaaagaagagattcctcttaatgagcaagaagaagtgtatcagattcttcttgagagtttcaagtgtgtgcctacgtttttgcctttggatttgtacactagatactaccatggattctgtaagcaacagctttggcctttgtttcattacatgttgccactttctcctgatcttggaggtaggtttgataggactttgtggcaagcttatgtctctgtgaacaagatttttgctgatagaattatggaggtgattaatcctgaggatgattttgtgtggatacatgattatcatttgatggttttgcctactttcttgaggaagaggtttaacagagtcaagcttggtttcttccttcatagtccatttccatcgtctgagatttacaaaactttgcctattcgtgaagagcttcttcgggctttgctaaactcggatttgatagggttccatacttttgactacgctaggcatttcttgtcttgttgtagtcgaatgcttggtcttacttatgaatctaagagaggatacattggacttgagtattatggtagaaccgtgagtatcaaaattctacctgttggaatccacatgggtcagcttcagtcggttttgagcttacccgagactgaaaggaaagtcggggaacttattgaacggtatggtcgaaaaggcaggacgatgctgcttggtgtggatgatatggacattttcaaagggattactttaaagctgttggctatggagcagctgcttatgcaacatcctgaatggcaagggaaggttgtgttggtgcagatagctaatccggcgagagggaaagggaaagatgttaaagagatgcaagctgagacgtattcaactgttaagcggattaatgaaacgtttgggagacccggttacgatcctatagtattgatcgatgcaccgttgaagttctatgaaagggttgcttattacgtagtagctgagtgttgtttggtgacagcggttagggatgggatgaatcttataccttatgagtacatagtttctcgtcaaggaaatgagaaactggacaaaattctgaagctggaggcgaataatcgtaacaagaaaagcatgctggtggtttctgagtttattggttgctctccatcgctaagcggagccattcgtgttaatccatggaatgttgatgcagtagctgatgcaatggatagtgcccttgaagtagctgaaccggagaagcagctaagacatgagaagcattacaagtatgtgagcacacatgatgttggctattgggctcgtagcttcctccaagatcttgagaggagttgtggtgagcatggacgaaggaggtgttggggaattgggtttggtctcagtttcagagttgtggcactagaccagagcttcaggaagctgtcaatggaacacatagtatcagcttataagaggacaaagacacgggctatccttttagactatgatgatactttaatgccacaaggctcgatcgataaaaggccttcatcgaagtcaatcgacaaattgaacaccttgtgtagggacaagggcaatctggtgttcattgttagtgctaaaagccgagaaactctatcggactggtttagtccttgtgagaagcttggtattgctgctgaacatggctattttctgaggctaaggaaggcagtagagtgggaaaactgtgtggcagcagtagattgttcttggaagcaaattgccgagcctgtgatggaactctacaccgagacaaccgatggctcaacaattgaagacaaggagactgctcttgtttggagttatgaggatgctgaccctgattttggctcatgtcaagctaaggaacttctagatcatcttgaaagtgtccttgccaatgaacctgtaacagtgaaacgaggacagaactatgttgaggtcaagccacagggcgtgagcaagggacttatagcgagaaggatgctttcgatgatgcaagaaagaggaacacttcctgagtttgttctatgtattggagatgaccggtctgacgaagacatgtttgaggtgatctgcagttccactgaaggcccttcgattgccccaagagctgagattttcgcttgtactgtcggtcaaaagcctagcaaggccaagtattacctggatgacactactgagattgtcaggttaatgcatggtttagcttctgttacagaccagatcactcctgtttaaacaatcacagagaaagtatcagagactagagatcttatgtttgtatatctaccacggaaaattgtaacaaagagagatcttatgtttgttgacaatcttagaatatatgagtaaggctttacatcctac

SEQ ID NO: 45823 - protein, 860 aa, Arabidopsis thaliana
  peptide (1)..(860): Ceres Seq. ID no. 14309732
  misc_feature (53)..(557): Pfam Name: Glycosyltransferase family 20 Pfam Description: Glycosyltransferase family 20
  misc_feature (32)..(465): Homolog of NCBI NO: 4100325 NR Description: SL-TPS/P [Selaginella lepidophylla]
  misc_feature (1)..(466): Homolog of NCBI NO: 15221478 NR Description: trehalose phosphatase family [Arabidopsis
  misc_feature (1)..(488): Homolog of NCBI NO: 7488400 NR Description: trehalose-6-phosphate synthase homolog DL4920W -
  misc_feature (296)..(860): Homolog of NCBI NO: 7488400 NR Description: trehalose-6-phosphate synthase homolog DL4920W -
  misc_feature (31)..(860): Homolog of NCBI NO: 7488401 NR Description: trehalose-6-phosphate synthase homolog F17O7.18 -
  misc_feature (17)..(855): Homolog of NCBI NO: 15221478 NR Description: trehalose phosphatase family [Arabidopsis
  misc_feature (1)..(854): Homolog of NCBI NO: 15219002 NR Description: trehalose phosphatase family [Arabidopsis
  misc_feature (1)..(860): Homolog of NCBI NO: 30698024 NR Description: alpha,alpha-trehalose-phosphate synthase, (trehalose-6-phosphate synthase/UDP-glucose-glucosephosphate
  misc_feature (1)..(860): Homolog of NCBI NO: 19568935 NR Description: putative trehalose synthase [Solanum tuberosum]
  misc_feature (1)..(859): Homolog of NCBI NO: 15220891 NR Description: trehalose phosphatase family [Arabidopsis
MVSRSYSNLLELASGDSPTFGRMNRQIPRIMAVAGIMSNIDNDSKDTDLSPKDRIIIVANELPIRAQRRVDGNGSGSSSSSTCCSKGWNFSWDENSLLLQLKDGLGDEAIEVIYVGCLKEEIPLNEQEEVYQILLESFKCVPTFLPLDLYTRYYHGFCKQQLWPLFHYMLPLSPDLGGRFDRTLWQAYVSVNKIFADRIMEVINPEDDFVWIHDYHLMVLPTFLRKRFNRVKLGFFLHSPFPSSEIYKTLPIREELLRALLNSDLIGFHTFDYARHFLSCCSRMLGLTYESKRGYIGLEYYGRTVSIKILPVGIHMGQLQSVLSLPETERKVGELIERYGRKGRTMLLGVDDMDIFKGITLKLLAMEQLLMQHPEWQGKVVLVQIANPARGKGKDVKEMQAETYSTVKRINETFGRPGYDPIVLIDAPLKFYERVAYYVVAECCLVTAVRDGMNLIPYEYIVSRQGNEKLDKILKLEANNRNKKSMLVVSEFIGCSPSLSGAIRVNPWNVDAVADAMDSALEVAEPEKQLRHEKHYKYVSTHDVGYWARSFLQDLERSCGEHGRRRCWGIGFGLSFRVVALDQSFRKLSMEHIVSAYKRTKTRAILLDYDDTLMPQGSIDKRPSSKSIDKLNTLCRDKGNLVFIVSAKSRETLSDWFSPCEKLGIAAEHGYFLRLRKAVEWENCVAAVDCSWKQIAEPVMELYTETTDGSTIEDKETALVWSYEDADPDFGSCQAKELLDHLESVLANEPVTVKRGQNYVEVKPQGVSKGLIARRMLSMMQERGTLPEFVLCIGDDRSDEDMFEVICSSTEGPSIAPRAEIFACTVGQKPSKAKYYLDDTTEIVRLMHGLASVTDQITPV

SEQ ID NO: 45824 - protein, 838 aa, Arabidopsis thaliana
  peptide (1)..(838): Ceres Seq. ID no. 14309733
  misc_feature (31)..(535): Pfam Name: Glycosyltransferase family 20 Pfam Description: Glycosyltransferase family 20
  misc_feature (10)..(443): Homolog of NCBI NO: 4100325 NR Description: SL-TPS/P [Selaginella lepidophylla]
  misc_feature (1)..(444): Homolog of NCBI NO: 15221478 NR Description: trehalose phosphatase family [Arabidopsis
  misc_feature (1)..(466): Homolog of NCBI NO: 7488400 NR Description: trehalose-6-phosphate synthase homolog DL4920W -
  misc_feature (274)..(838): Homolog of NCBI NO: 7488400 NR Description: trehalose-6-phosphate synthase homolog DL4920W -
  misc_feature (9)..(838): Homolog of NCBI NO: 7488401 NR Description: trehalose-6-phosphate synthase homolog F17O7.18 -
  misc_feature (1)..(833): Homolog of NCBI NO: 15221478 NR Description: trehalose phosphatase family [Arabidopsis
  misc_feature (1)..(832): Homolog of NCBI NO: 15219002 NR Description: trehalose phosphatase family [Arabidopsis
  misc_feature (1)..(838): Homolog of NCBI NO: 30698024 NR Description: alpha,alpha-trehalose-phosphate synthase, (trehalose-6-phosphate synthase/UDP-glucose-glucosephosphate
  misc_feature (1)..(838): Homolog of NCBI NO: 19568935 NR Description: putative trehalose synthase [Solanum tuberosum]
  misc_feature (1)..(837): Homolog of NCBI NO: 15220891 NR Description: trehalose phosphatase family [Arabidopsis
MNRQIPRIMAVAGIMSNIDNDSKDTDLSPKDRIIIVANELPIRAQRRVDGNGSGSSSSSTCCSKGWNFSWDENSLLLQLKDGLGDEAIEVIYVGCLKEEIPLNEQEEVYQILLESFKCVPTFLPLDLYTRYYHGFCKQQLWPLFHYMLPLSPDLGGRFDRTLWQAYVSVNKIFADRIMEVINPEDDFVWIHDYHLMVLPTFLRKRFNRVKLGFFLHSPFPSSEIYKTLPIREELLRALLNSDLIGFHTFDYARHFLSCCSRMLGLTYESKRGYIGLEYYGRTVSIKILPVGIHMGQLQSVLSLPETERKVGELIERYGRKGRTMLLGVDDMDIFKGITLKLLAMEQLLMQHPEWQGKVVLVQIANPARGKGKDVKEMQAETYSTVKRINETFGRPGYDPIVLIDAPLKFYERVAYYVVAECCLVTAVRDGMNLIPYEYIVSRQGNEKLDKILKLEANNRNKKSMLVVSEFIGCSPSLSGAIRVNPWNVDAVADAMDSALEVAEPEKQLRHEKHYKYVSTHDVGYWARSFLQDLERSCGEHGRRRCWGIGFGLSFRVVALDQSFRKLSMEHIVSAYKRTKTRAILLDYDDTLMPQGSIDKRPSSKSIDKLNTLCRDKGNLVFIVSAKSRETLSDWFSPCEKLGIAAEHGYFLRLRKAVEWENCVAAVDCSWKQIAEPVMELYTETTDGSTIEDKETALVWSYEDADPDFGSCQAKELLDHLESVLANEPVTVKRGQNYVEVKPQGVSKGLIARRMLSMMQERGTLPEFVLCIGDDRSDEDMFEVICSSTEGPSIAPRAEIFACTVGQKPSKAKYYLDDTTEIVRLMHGLASVTDQITPV

SEQ ID NO: 45825 - protein, 830 aa, Arabidopsis thaliana
  peptide (1)..(830): Ceres Seq. ID no. 14309734
  misc_feature (23)..(527): Pfam Name: Glycosyltransferase family 20 Pfam Description: Glycosyltransferase family 20
  misc_feature (2)..(435): Homolog of NCBI NO: 4100325 NR Description: SL-TPS/P [Selaginella lepidophylla]
  misc_feature (1)..(436): Homolog of NCBI NO: 15221478 NR Description: trehalose phosphatase family [Arabidopsis
  misc_feature (1)..(458): Homolog of NCBI NO: 7488400 NR Description: trehalose-6-phosphate synthase homolog DL4920W -
  misc_feature (266)..(830): Homolog of NCBI NO: 7488400 NR Description: trehalose-6-phosphate synthase homolog DL4920W -
  misc_feature (1)..(830): Homolog of NCBI NO: 7488401 NR Description: trehalose-6-phosphate synthase homolog F17O7.18 -
  misc_feature (1)..(825): Homolog of NCBI NO: 15221478 NR Description: trehalose phosphatase family [Arabidopsis
  misc_feature (1)..(824): Homolog of NCBI NO: 15219002 NR Description: trehalose phosphatase family [Arabidopsis
  misc_feature (1)..(830): Homolog of NCBI NO: 30698024 NR Description: alpha,alpha-trehalose-phosphate synthase, (trehalose-6-phosphate synthase/UDP-glucose-glucosephosphate
  misc_feature (1)..(830): Homolog of NCBI NO: 19568935 NR Description: putative trehalose synthase [Solanum tuberosum]
  misc_feature (1)..(829): Homolog of NCBI NO: 15220891 NR Description: trehalose phosphatase family [Arabidopsis
MAVAGIMSNIDNDSKDTDLSPKDRIIIVANELPIRAQRRVDGNGSGSSSSSTCCSKGWNFSWDENSLLLQLKDGLGDEAIEVIYVGCLKEEIPLNEQEEVYQILLESFKCVPTFLPLDLYTRYYHGFCKQQLWPLFHYMLPLSPDLGGRFDRTLWQAYVSVNKIFADRIMEVINPEDDFVWIHDYHLMVLPTFLRKRFNRVKLGFFLHSPFPSSEIYKTLPIREELLRALLNSDLIGFHTFDYARHFLSCCSRMLGLTYESKRGYIGLEYYGRTVSIKILPVGIHMGQLQSVLSLPETERKVGELIERYGRKGRTMLLGVDDMDIFKGITLKLLAMEQLLMQHPEWQGKVVLVQIANPARGKGKDVKEMQAETYSTVKRINETFGRPGYDPIVLIDAPLKFYERVAYYVVAECCLVTAVRDGMNLIPYEYIVSRQGNEKLDKILKLEANNRNKKSMLVVSEFIGCSPSLSGAIRVNPWNVDAVADAMDSALEVAEPEKQLRHEKHYKYVSTHDVGYWARSFLQDLERSCGEHGRRRCWGIGFGLSFRVVALDQSFRKLSMEHIVSAYKRTKTRAILLDYDDTLMPQGSIDKRPSSKSIDKLNTLCRDKGNLVFIVSAKSRETLSDWFSPCEKLGIAAEHGYFLRLRKAVEWENCVAAVDCSWKQIAEPVMELYTETTDGSTIEDKETALVWSYEDADPDFGSCQAKELLDHLESVLANEPVTVKRGQNYVEVKPQGVSKGLIARRMLSMMQERGTLPEFVLCIGDDRSDEDMFEVICSSTEGPSIAPRAEIFACTVGQKPSKAKYYLDDTTEIVRLMHGLASVTDQITPV

SEQ ID NO: 45826 - DNA, 1741 bp, Arabidopsis thaliana
  misc_feature (1)..(1741): Ceres Seq. ID no. 12604408
  misc_feature: MA Experiment ID: 20000179 Result: Up-regulated in Transcription
  misc_feature: MA Experiment 20000179 PARAMETER Experiment Name: At_Germinating_Seeds_P Parameter: Age (hr) Value: 6 vs. 0
  misc_feature: MA Experiment 20000179 PARAMETER Experiment Name: At_Germinating_Seeds_P Parameter: Tissue Value: Germinating Seeds
  misc_feature: MA Experiment ID: 20000180 Result: Up-regulated in Transcription
  misc_feature: MA Experiment 20000180 PARAMETER Experiment Name: At_Germinating_Seeds_P Parameter: Age (hr) Value: 24 vs. 0
  misc_feature: MA Experiment 20000180 PARAMETER Experiment Name: At_Germinating_Seeds_P Parameter: Tissue Value: Germinating Seeds
  misc_feature: MA Experiment ID: 20000185 Result: Down-regulated in Transcription
  misc_feature: MA Experiment 20000185 PARAMETER Experiment Name: At_Roots__P Parameter: Age (day) Value: 7 vs. 21
  misc_feature: MA Experiment 20000185 PARAMETER Experiment Name: At_Roots__P Parameter: Organism Value: A. thaliana
  misc_feature: MA Experiment 20000185 PARAMETER Experiment Name: At_Roots__P Parameter: Tissue Value: Roots vs. Whole Plant
  misc_feature: MA Experiment ID: 20000235 Result: Down-regulated in Transcription
  misc_feature: MA Experiment 20000235 PARAMETER Experiment Name: At_Siliques_P Parameter: Age (day) Value: 21
  misc_feature: MA Experiment 20000235 PARAMETER Experiment Name: At_Siliques_P Parameter: Organism Value: A. thaliana
  misc_feature: MA Experiment 20000235 PARAMETER Experiment Name: At_Siliques_P Parameter: Plant Line Value: WS
  misc_feature: MA Experiment 20000235 PARAMETER Experiment Name: At_Siliques_P Parameter: Tissue Value: 5-10mm Siliques vs. Whole Plant
  misc_feature: MA Experiment ID: 20000264 Result: Down-regulated in Transcription
  misc_feature: MA Experiment 20000264 PARAMETER Experiment Name: At_Open_Flower_P Parameter: Age (day) Value: 21
  misc_feature: MA Experiment 20000264 PARAMETER Experiment Name: At_Open_Flower_P Parameter: Plant Line Value: WS
  misc_feature: MA Experiment 20000264 PARAMETER Experiment Name: At_Open_Flower_P Parameter: Tissue Value: Open Flower vs. Whole Plant
  misc_feature: MA Experiment ID: 20000439 Result: Down-regulated in Transcription
  misc_feature: MA Experiment 20000439 PARAMETER Experiment Name: At_Roots__P Parameter: Age (day) Value: 14 vs. 21
  misc_feature: MA Experiment 20000439 PARAMETER Experiment Name: At_Roots__P Parameter: Organism Value: A. thaliana
  misc_feature: MA Experiment 20000439 PARAMETER Experiment Name: At_Roots__P Parameter: Tissue Value: Roots vs. Whole Plant
  misc_feature: MA Experiment ID: 20000794 Result: Down-regulated in Transcription
  misc_feature: MA Experiment 20000794 PARAMETER Experiment Name: At_Petals_P Parameter: Age (day) Value: 23-25 days
  misc_feature: MA Experiment 20000794 PARAMETER Experiment Name: At_Petals_P Parameter: Plant Line Value: WS
  misc_feature: MA Experiment 20000794 PARAMETER Experiment Name: At_Petals_P Parameter: Tissue Value: Petals vs. Whole plant
  misc_feature: MA Experiment ID: 20001247 Result: Up-regulated in Transcription
  misc_feature: MA Experiment 20001247 PARAMETER Experiment Name: At_Far-red-induction_P Parameter: Age (day) Value: 7
  misc_feature: MA Experiment 20001247 PARAMETER Experiment Name: At_Far-red-induction_P Parameter: Light Value: Far-red vs. White
  misc_feature: MA Experiment 20001247 PARAMETER Experiment Name: At_Far-red-induction_P Parameter: Organism Value: A. thaliana
  misc_feature: MA Experiment 20001247 PARAMETER Experiment Name: At_Far-red-induction_P Parameter: Plant Line Value: Columbia
  misc_feature: MA Experiment 20001247 PARAMETER Experiment Name: At_Far-red-induction_P Parameter: Timepoint (hr) Value: 1
  misc_feature: MA Experiment 20001247 PARAMETER Experiment Name: At_Far-red-induction_P Parameter: Tissue Value: Whole Plant
  misc_feature: MA Experiment ID: 20001248 Result: Up-regulated in Transcription
  misc_feature: MA Experiment 20001248 PARAMETER Experiment Name: At_Far-red-induction_P Parameter: Age (day) Value: 7
  misc_feature: MA Experiment 20001248 PARAMETER Experiment Name: At_Far-red-induction_P Parameter: Light Value: Far-red vs. White
  misc_feature: MA Experiment 20001248 PARAMETER Experiment Name: At_Far-red-induction_P Parameter: Organism Value: A. thaliana
  misc_feature: MA Experiment 20001248 PARAMETER Experiment Name: At_Far-red-induction_P Parameter: Plant Line Value: Columbia
  misc_feature: MA Experiment 20001248 PARAMETER Experiment Name: At_Far-red-induction_P Parameter: Timepoint (hr) Value: 4
  misc_feature: MA Experiment 20001248 PARAMETER Experiment Name: At_Far-red-induction_P Parameter: Tissue Value: Whole Plant
  misc_feature: MA Experiment ID: 20001450 Result: Up-regulated in Transcription
  misc_feature: MA Experiment 20001450 PARAMETER Experiment Name: At_Far-red-induction_P Parameter: Age (day) Value: 7
  misc_feature: MA Experiment 20001450 PARAMETER Experiment Name: At_Far-red-induction_P Parameter: Light Value: Far-red vs. White
  misc_feature: MA Experiment 20001450 PARAMETER Experiment Name: At_Far-red-induction_P Parameter: Organism Value: A. thaliana
  misc_feature: MA Experiment 20001450 PARAMETER Experiment Name: At_Far-red-induction_P Parameter: Plant Line Value: Columbia
  misc_feature: MA Experiment 20001450 PARAMETER Experiment Name: At_Far-red-induction_P Parameter: Timepoint (hr) Value: 8
  misc_feature: MA Experiment 20001450 PARAMETER Experiment Name: At_Far-red-induction_P Parameter: Tissue Value: Whole Plant
ataatagtgtgtcgttttccggtggcgacgagagggagaaccggagaagagatctctcgttcgtttttttcccggtaaatccggcgagaaaaagttcacattgaatctacgagaaaatttccttccatttcactccacgagttttcacctctcttgttcaatctctcaacgtctctccctcgtttctcgttttcgctttttccccttttcctcttctattttaccggaatccgagaatttttgatcagatctagtttcagaaataggttagttccaacaatgttgacggaacgaggaaggcgaatttctggtttcaatgggagtttcgaatttagcaatagaaaattccgtggttatggattcgtagatcgatctcaaggtttccatgaaaggagtccttcaagatcatgttctgtttcgaaaatccttcgtatcacgccaccaacctcgtctccaccgtcttcggcttctacatgcgctggttatatcgaacaccgggtctccaagttcgatactctcgccggcattgccattaagtatggcgttgaggttgcagatatcacgaagctgaatgggcttgtaactgatcttcagatgtttgctcttgagtctctccgaataccattacctggaagacatcctccttccccatgcttatctaatggctctctaaatcatggagaggattggtccgagcaagcttcatcctcagctagcaatggcaaccaccaggacgtatttgactccttccagtctttgaggttgaaccattcagaaaagaagatttctccagccatgaactccttgcaaggttattatggactgaaaccaaaaaacagaagagcttctgaaggttttgggatggcagtctacaagaacgaagcttctcaactccaagacaatgatcagtatctcactcccttccccgccaccagtactcccttatcccaccacagaaaatcaagaagcttggtagatgcagttatcgccgaggttaaccaatcacccaacccttcaaaagcaggaggaggagaagtgaactctactgataagccaatgagaagacgccaaaaatctgaagccgattttagttcacgagctccagaattgctgttgaaggaagagaacagaagcagcagtggcgcgttttctgcaatagctggaaaaaatttagcactgagatccaaagcatcaagcagagctaacttatcagcagaaaccagacatctcaattccataccaatcaatttgatggatgctcctgtgggagacagcttctcaagcgtgaggaaatctgttagcgcatctagtctacaagaaccaaactgtaacagcaacggttcatcgctatggccaacctcaaagtggaccctgaaacctgagttactcacacaagtagccatggctagttctatttttgacggattgcctaagccattaactggtcggagaaacaaaaaggctgtggactaaggttagttaggtacttaggttccgtcggtctcgttatcgactgtccacttttggtttttgtaatccaaaagcaagaagtcaatggcttttataatagattgaggagtaaatagaaagtaaaaagtgtattgctgcatttcattcattcaaaacaataaggcaaaataggttgtgacattgagagtcaaaattaggcattaaggttttgttgaatttaatttgtacgttagatgaataatcgaatatcagaatactgtattcaaagttt

SEQ ID NO: 45827 - protein, 397 aa, Arabidopsis thaliana
  peptide (1)..(397): Ceres Seq. ID no. 12604409
  misc_feature (72)..(115): Pfam Name: LysM domain Pfam Description: LysM domain
  misc_feature (58)..(117): Homolog of NCBI NO: 24431595 NR Description: Hypothetical protein [Oryza sativa (japonica
  misc_feature (251)..(397): Homolog of NCBI NO: 24431595 NR Description: Hypothetical protein [Oryza sativa (japonica
  misc_feature (252)..(397): Homolog of NCBI NO: 37535512 NR Description: unknown protein [Oryza sativa (japonica
  misc_feature (55)..(273): Homolog of NCBI NO: 37535512 NR Description: unknown protein [Oryza sativa (japonica
  misc_feature (4)..(397): Homolog of NCBI NO: 11291586 NR Description: hypothetical protein T22D6.140 - Arabidopsis
  misc_feature (1)..(397): Homolog of NCBI NO: 30682281 NR Description: expressed protein [Arabidopsis thaliana]
  misc_feature (1)..(397): Homolog of NCBI NO: 9759371 NR Description: gene_id:MYJ24.12~unknown protein [Arabidopsis
  misc_feature (1)..(397): Homolog of NCBI NO: 22327003 NR Description: unknown protein
MLTERGRRISGFNGSFEFSNRKFRGYGFVDRSQGFHERSPSRSCSVSKILRITPPTSSPPSSASTCAGYIEHRVSKFDTLAGIAIKYGVEVADITKLNGLVTDLQMFALESLRIPLPGRHPPSPCLSNGSLNHGEDWSEQASSSASNGNHQDVFDSFQSLRLNHSEKKISPAMNSLQGYYGLKPKNRRASEGFGMAVYKNEASQLQDNDQYLTPFPATSTPLSHHRKSRSLVDAVIAEVNQSPNPSKAGGGEVNSTDKPMRRRQKSEADFSSRAPELLLKEENRSSSGAFSAIAGKNLALRSKASSRANLSAETRHLNSIPINLMDAPVGDSFSSVRKSVSASSLQEPNCNSNGSSLWPTSKWTLKPELLTQVAMASSIFDGLPKPLTGRRNKKAVD

SEQ ID NO: 45828 - protein, 292 aa, Arabidopsis thaliana
  peptide (1)..(292): Ceres Seq. ID no. 12604410
  misc_feature (1)..(12): Homolog of NCBI NO: 24431595 NR Description: Hypothetical protein [Oryza sativa (japonica
  misc_feature (146)..(292): Homolog of NCBI NO: 24431595 NR Description: Hypothetical protein [Oryza sativa (japonica
  misc_feature (147)..(292): Homolog of NCBI NO: 37535512 NR Description: unknown protein [Oryza sativa (japonica
  misc_feature (1)..(168): Homolog of NCBI NO: 37535512 NR Description: unknown protein [Oryza sativa (japonica
  misc_feature (1)..(292): Homolog of NCBI NO: 11291586 NR Description: hypothetical protein T22D6.140 - Arabidopsis
  misc_feature (1)..(292): Homolog of NCBI NO: 30682281 NR Description: expressed protein [Arabidopsis thaliana]
  misc_feature (1)..(292): Homolog of NCBI NO: 9759371 NR Description: gene_id:MYJ24.12~unknown protein [Arabidopsis
  misc_feature (1)..(292): Homolog of NCBI NO: 22327003 NR Description: unknown protein
MFALESLRIPLPGRHPPSPCLSNGSLNHGEDWSEQASSSASNGNHQDVFDSFQSLRLNHSEKKISPAMNSLQGYYGLKPKNRRASEGFGMAVYKNEASQLQDNDQYLTPFPATSTPLSHHRKSRSLVDAVIAEVNQSPNPSKAGGGEVNSTDKPMRRRQKSEADFSSRAPELLLKEENRSSSGAFSAIAGKNLALRSKASSRANLSAETRHLNSIPINLMDAPVGDSFSSVRKSVSASSLQEPNCNSNGSSLWPTSKWTLKPELLTQVAMASSIFDGLPKPLTGRRNKKAVD

SEQ ID NO: 45829 - protein, 225 aa, Arabidopsis thaliana
  peptide (1)..(225): Ceres Seq. ID no. 12604411
  misc_feature (79)..(225): Homolog of NCBI NO: 24431595 NR Description: Hypothetical protein [Oryza sativa (japonica
  misc_feature (80)..(225): Homolog of NCBI NO: 37535512 NR Description: unknown protein [Oryza sativa (japonica
  misc_feature (1)..(101): Homolog of NCBI NO: 37535512 NR Description: unknown protein [Oryza sativa (japonica
  misc_feature (1)..(225): Homolog of NCBI NO: 11291586 NR Description: hypothetical protein T22D6.140 - Arabidopsis
  misc_feature (1)..(225): Homolog of NCBI NO: 30682281 NR Description: expressed protein [Arabidopsis thaliana]
  misc_feature (1)..(225): Homolog of NCBI NO: 9759371 NR Description: gene_id:MYJ24.12~unknown protein [Arabidopsis
  misc_feature (1)..(225): Homolog of NCBI NO: 22327003 NR Description: unknown protein
MNSLQGYYGLKPKNRRASEGFGMAVYKNEASQLQDNDQYLTPFPATSTPLSHHRKSRSLVDAVIAEVNQSPNPSKAGGGEVNSTDKPMRRRQKSEADFSSRAPELLLKEENRSSSGAFSAIAGKNLALRSKASSRANLSAETRHLNSIPINLMDAPVGDSFSSVRKSVSASSLQEPNCNSNGSSLWPTSKWTLKPELLTQVAMASSIFDGLPKPLTGRRNKKAVD

SEQ ID NO: 45830 - DNA, 2197 bp, Arabidopsis thaliana
  misc_feature (1)..(2197): Ceres Seq. ID no. 14309813
  misc_feature: MA Experiment ID: 20000173 Result: Up-regulated in Transcription
  misc_feature: MA Experiment 20000173 PARAMETER Experiment Name: At_42deg_Heat_P Parameter: Age (day) Value: 14
  misc_feature: MA Experiment 20000173 PARAMETER Experiment Name: At_42deg_Heat_P Parameter: Organism Value: A. thaliana
  misc_feature: MA Experiment 20000173 PARAMETER Experiment Name: At_42deg_Heat_P Parameter: Plant Line Value: WS
  misc_feature: MA Experiment 20000173 PARAMETER Experiment Name: At_42deg_Heat_P Parameter: Temperature (deg C) Value: 42 vs. 22
  misc_feature: MA Experiment 20000173 PARAMETER Experiment Name: At_42deg_Heat_P Parameter: Timepoint (hr) Value: 6
  misc_feature: MA Experiment 20000173 PARAMETER Experiment Name: At_42deg_Heat_P Parameter: Tissue Value: Aerial
  misc_feature: MA Experiment ID: 20000180 Result: Up-regulated in Transcription
  misc_feature: MA Experiment 20000180 PARAMETER Experiment Name: At_Germinating_Seeds_P Parameter: Age (hr) Value: 24 vs. 0
  misc_feature: MA Experiment 20000180 PARAMETER Experiment Name: At_Germinating_Seeds_P Parameter: Tissue Value: Germinating Seeds
  misc_feature: MA Experiment ID: 20000436 Result: Up-regulated in Transcription
  misc_feature: MA Experiment 20000436 PARAMETER Experiment Name: At_Drought_P Parameter: Age (day) Value: 7
  misc_feature: MA Experiment 20000436 PARAMETER Experiment Name: At_Drought_P Parameter: Organism Value: A. thaliana
  misc_feature: MA Experiment 20000436 PARAMETER Experiment Name: At_Drought_P Parameter: Plant Line Value: WS
  misc_feature: MA Experiment 20000436 PARAMETER Experiment Name: At_Drought_P Parameter: Timepoint (hr) Value: 12
  misc_feature: MA Experiment 20000436 PARAMETER Experiment Name: At_Drought_P Parameter: Tissue Value: Whole Plant
  misc_feature: MA Experiment 20000436 PARAMETER Experiment Name: At_Drought_P Parameter: Treatment Value: Drought vs. No Drought
  misc_feature: MA Experiment ID: 20000438 Result: Up-regulated in Transcription
  misc_feature: MA Experiment 20000438 PARAMETER Experiment Name: At_Shoots__P Parameter: Age (day) Value: 14
  misc_feature: MA Experiment 20000438 PARAMETER Experiment Name: At_Shoots__P Parameter: Tissue Value: Shoots vs. Whole Plant
  misc_feature: MA Experiment ID: 20000495 Result: Down-regulated in Transcription
  misc_feature: MA Experiment 20000495 PARAMETER Experiment Name: At_Guard_Cells_P Parameter: Harvest Date Value: 8/2/2002
  misc_feature: MA Experiment 20000495 PARAMETER Experiment Name: At_Guard_Cells_P Parameter: Organism Value: A. thaliana
  misc_feature: MA Experiment 20000495 PARAMETER Experiment Name: At_Guard_Cells_P Parameter: Tissue Value: Guard Cells vs. Leaves
  misc_feature: MA Experiment ID: 20000794 Result: Up-regulated in Transcription
  misc_feature: MA Experiment 20000794 PARAMETER Experiment Name: At_Petals_P Parameter: Age (day) Value: 23-25 days
  misc_feature: MA Experiment 20000794 PARAMETER Experiment Name: At_Petals_P Parameter: Plant Line Value: WS
  misc_feature: MA Experiment 20000794 PARAMETER Experiment Name: At_Petals_P Parameter: Tissue Value: Petals vs. Whole plant
  misc_feature: MA Experiment ID: 20001248 Result: Down-regulated in Transcription
  misc_feature: MA Experiment 20001248 PARAMETER Experiment Name: At_Far-red-induction_P Parameter: Age (day) Value: 7
  misc_feature: MA Experiment 20001248 PARAMETER Experiment Name: At_Far-red-induction_P Parameter: Light Value: Far-red vs. White
  misc_feature: MA Experiment 20001248 PARAMETER Experiment Name: At_Far-red-induction_P Parameter: Organism Value: A. thaliana
  misc_feature: MA Experiment 20001248 PARAMETER Experiment Name: At_Far-red-induction_P Parameter: Plant Line Value: Columbia
  misc_feature: MA Experiment 20001248 PARAMETER Experiment Name: At_Far-red-induction_P Parameter: Timepoint (hr) Value: 4
  misc_feature: MA Experiment 20001248 PARAMETER Experiment Name: At_Far-red-induction_P Parameter: Tissue Value: Whole Plant
  misc_feature: MA Experiment ID: 20001905 Result: Up-regulated in Transcription
  misc_feature: MA Experiment 20001905 PARAMETER Experiment Name: At_Drought_Reproduction_P Parameter: Age (day) Value: 40
  misc_feature: MA Experiment 20001905 PARAMETER Experiment Name: At_Drought_Reproduction_P Parameter: Organism Value: A. thaliana
  misc_feature: MA Experiment 20001905 PARAMETER Experiment Name: At_Drought_Reproduction_P Parameter: Plant Line Value: WS
  misc_feature: MA Experiment 20001905 PARAMETER Experiment Name: At_Drought_Reproduction_P Parameter: Timepoint (day) Value: 10
  misc_feature: MA Experiment 20001905 PARAMETER Experiment Name: At_Drought_Reproduction_P Parameter: Tissue Value: Rosettes
  misc_feature: MA Experiment 20001905 PARAMETER Experiment Name: At_Drought_Reproduction_P Parameter: Treatment Value: Drought vs. No Drought
  misc_feature: MA Experiment ID: 20001906 Result: Up-regulated in Transcription
  misc_feature: MA Experiment 20001906 PARAMETER Experiment Name: At_Drought_Reproduction_P Parameter: Age (day) Value: 35
  misc_feature: MA Experiment 20001906 PARAMETER Experiment Name: At_Drought_Reproduction_P Parameter: Organism Value: A. thaliana
  misc_feature: MA Experiment 20001906 PARAMETER Experiment Name: At_Drought_Reproduction_P Parameter: Plant Line Value: WS
  misc_feature: MA Experiment 20001906 PARAMETER Experiment Name: At_Drought_Reproduction_P Parameter: Timepoint (day) Value: 5
  misc_feature: MA Experiment 20001906 PARAMETER Experiment Name: At_Drought_Reproduction_P Parameter: Tissue Value: Siliques
  misc_feature: MA Experiment 20001906 PARAMETER Experiment Name: At_Drought_Reproduction_P Parameter: Treatment Value: Drought vs. No Drought
  misc_feature: MA Experiment ID: 20001911 Result: Up-regulated in Transcription
  misc_feature: MA Experiment 20001911 PARAMETER Experiment Name: At_Drought_Reproduction_P Parameter: Age (day) Value: 40
  misc_feature: MA Experiment 20001911 PARAMETER Experiment Name: At_Drought_Reproduction_P Parameter: Organism Value: A. thaliana
  misc_feature: MA Experiment 20001911 PARAMETER Experiment Name: At_Drought_Reproduction_P Parameter: Plant Line Value: WS
  misc_feature: MA Experiment 20001911 PARAMETER Experiment Name: At_Drought_Reproduction_P Parameter: Timepoint (day) Value: 10
  misc_feature: MA Experiment 20001911 PARAMETER Experiment Name: At_Drought_Reproduction_P Parameter: Tissue Value: Flowers
  misc_feature: MA Experiment 20001911 PARAMETER Experiment Name: At_Drought_Reproduction_P Parameter: Treatment Value: Drought vs. No Drought
gtctttctcttcttctgccaaattccacagatggctgcttcatcggcttgtcttctcggaaatggattatctgtctacacaaccaaacagaggttccaaaagcttgggcttgataggacatctaaagttacagttgtgaaggcttctttggatgagaagaaacatgaagggagaagaggtttctttaaactcttactaggaaacgctgctgctggagttggtttgcttgcaagtggaaacgctaatgcagacgaacaaggacaaggggtttcttcgtctagaatgtcttattctaggttcctagagtatttagacaagggaagggttgagaaagtagatttgtatgagaatgggactatagctattgtggaggccgtttctcctgagttgggtaaccggattcagcgtgtacgtgtgcagctacctggattgagtcaggagcttctccagaagttgagggctaagaatattgatttcgcagcacataatgctcaggaggaccaaggttctccaatactcaacttgattgggaatcttgcattccctgttattttgattggcggtttgttccttctctcgagaagatcctctggtggaatgggtggccctggtggtcctggcttcccactccaaattggtcagtcgaaagcaaagtttcagatggaaccaaacactggtgtaacttttgatgatgttgctggagtcgatgaagccaagcaagatttcatggaagtggtggagtttctgaagaagcctgagaggttcactgcggttggtgcccggatcccaaaaggtgttcttcttgttggtcctcctggtaccgggaaaaccctgttggcaaaagccattgctggtgaagctggtgtgcccttcttttccatctcgggttctgagtttgttgagatgtttgtcggtgttggtgcatcaagggtccgcgatcttttcaaaaaagccaaagaaaatgctccatgcattgttttcgtggatgaaatagatgctgttggtaggcaaagaggaactggaattggtggaggtaatgatgaaagagaacagacccttaatcagctcctgactgagatggatggttttgagggtaacactggtgttatcgtagttgctgcaaccaacagagccgacattcttgactccgctttgctaagaccagggcgttttgaccggcaggtatctgttgacgttccagacgttaagggaagaacagatatactcaaggttcactcggggaataagaaatttgaaagcggtgtttcacttgaagtaatagccatgagaacacctggatttagcggagctgatcttgcaaacctcttgaacgaggctgccatattggccggccgccgtggaaagactgcaatatcatcaaaagagattgatgactcaattgatagaattgtagctggcatggaaggaacagtcatgacagatgggaagagcaaaagcttggttgcttaccatgaagttggccatgccatatgtggaacattgactccagggcatgatgctgttcaaaaggtcacgttgataccacgaggccaggctagaggtctgacttggttcattccctcagatgacccaactctaatctccaaacagcaactctttgcaagaattgttggtggactcggtggtagagctgccgaagaagtcatctttggtgagtctgaggtgactactggtgcagttagtgacttgcaacagatcaccggtttggctaagcagatggtgacaacatttgggatgtctgaaatcggaccatggtcgctaatggattcatcggagcaaagcgatgtcattatgaggatgatggcaagaaactcaatgtctgagaagcttgcaaatgatattgatacagcggtgaagacattatcagacaaagcgtacgagatagctttgagccagattagaaacaatcgtgaagccatggacaagattgttgaaatacttcttgagaaagagactatgtcaggcgatgaattccgagcaatcctatctgaattcacagaaatcccacctgaaaaccgtgttgcttcttcaacatccacatcaacaccaacaccagcgtctgtctgagtaagagacctttgaatctctgtgtatattatcttgagatacttccccatactgtgtaacagcacatcttaatttccctagttggagtatatatgtatacgaattcgat

SEQ ID NO: 45831 - protein, 695 aa, Arabidopsis thaliana
  peptide (1)..(695): Ceres Seq. ID no. 14309814
  misc_feature (458)..(668): Pfam Name: Peptidase family M41 Pfam Description: Peptidase family M41
  misc_feature (81)..(669): Homolog of NCBI NO: 37521486 NR Description: cell division protein [Gloeobacter violaceus]
  misc_feature (94)..(674): Homolog of NCBI NO: 16329797 NR Description: cell division protein; FtsH [Synechocystis sp.
  misc_feature (76)..(680): Homolog of NCBI NO: 37522147 NR Description: cell division protein [Gloeobacter violaceus]
  misc_feature (82)..(680): Homolog of NCBI NO: 22298276 NR Description: cell division protein [Thermosynechococcus
  misc_feature (88)..(676): Homolog of NCBI NO: 11467752 NR Description: hypothetical chloroplast RF25 [Guillardia theta]
  misc_feature (87)..(679): Homolog of NCBI NO: 11465793 NR Description: ORF25 [Porphyra purpurea]
  misc_feature (10)..(676): Homolog of NCBI NO: 18417611 NR Description: FtsH protease, putative [Arabidopsis thaliana]
  misc_feature (195)..(695): Homolog of NCBI NO: 21954076 NR Description: putative FtsH protease [Arabidopsis thaliana]
  misc_feature (11)..(695): Homolog of NCBI NO: 3808101 NR Description: chloroplast protease [Capsicum annuum]
  misc_feature (11)..(695): Homolog of NCBI NO: 4325041 NR Description: FtsH-like protein Pftf precursor [Nicotiana
VFLFFCQIPQMAASSACLLGNGLSVYTTKQRFQKLGLDRTSKVTVVKASLDEKKHEGRRGFFKLLLGNAAAGVGLLASGNANADEQGQGVSSSRMSYSRFLEYLDKGRVEKVDLYENGTIAIVEAVSPELGNRIQRVRVQLPGLSQELLQKLRAKNIDFAAHNAQEDQGSPILNLIGNLAFPVILIGGLFLLSRRSSGGMGGPGGPGFPLQIGQSKAKFQMEPNTGVTFDDVAGVDEAKQDFMEVVEFLKKPERFTAVGARIPKGVLLVGPPGTGKTLLAKAIAGEAGVPFFSISGSEFVEMFVGVGASRVRDLFKKAKENAPCIVFVDEIDAVGRQRGTGIGGGNDEREQTLNQLLTEMDGFEGNTGVIVVAATNRADILDSALLRPGRFDRQVSVDVPDVKGRTDILKVHSGNKKFESGVSLEVIAMRTPGFSGADLANLLNEAAILAGRRGKTAISSKEIDDSIDRIVAGMEGTVMTDGKSKSLVAYHEVGHAICGTLTPGHDAVQKVTLIPRGQARGLTWFIPSDDPTLISKQQLFARIVGGLGGRAAEEVIFGESEVTTGAVSDLQQITGLAKQMVTTFGMSEIGPWSLMDSSEQSDVIMRMMARNSMSEKLANDIDTAVKTLSDKAYEIALSQIRNNREAMDKIVEILLEKETMSGDEFRAILSEFTEIPPENRVASSTSTSTPTPASV

SEQ ID NO: 45832 - protein, 685 aa, Arabidopsis thaliana
  peptide (1)..(685): Ceres Seq. ID no. 14309815
  misc_feature (448)..(658): Pfam Name: Peptidase family M41 Pfam Description: Peptidase family M41
  misc_feature (71)..(659): Homolog of NCBI NO: 37521486 NR Description: cell division protein [Gloeobacter violaceus]
  misc_feature (84)..(664): Homolog of NCBI NO: 16329797 NR Description: cell division protein; FtsH [Synechocystis sp.
  misc_feature (66)..(670): Homolog of NCBI NO: 37522147 NR Description: cell division protein [Gloeobacter violaceus]
  misc_feature (72)..(670): Homolog of NCBI NO: 22298276 NR Description: cell division protein [Thermosynechococcus
  misc_feature (78)..(666): Homolog of NCBI NO: 11467752 NR Description: hypothetical chloroplast RF25 [Guillardia theta]
  misc_feature (77)..(669): Homolog of NCBI NO: 11465793 NR Description: ORF25 [Porphyra purpurea]
  misc_feature (1)..(666): Homolog of NCBI NO: 18417611 NR Description: FtsH protease, putative [Arabidopsis thaliana]
  misc_feature (185)..(685): Homolog of NCBI NO: 21954076 NR Description: putative FtsH protease [Arabidopsis thaliana]
  misc_feature (1)..(685): Homolog of NCBI NO: 3808101 NR Description: chloroplast protease [Capsicum annuum]
  misc_feature (1)..(685): Homolog of NCBI NO: 4325041 NR Description: FtsH-like protein Pftf precursor [Nicotiana
MAASSACLLGNGLSVYTTKQRFQKLGLDRTSKVTVVKASLDEKKHEGRRGFFKLLLGNAAAGVGLLASGNANADEQGQGVSSSRMSYSRFLEYLDKGRVEKVDLYENGTIAIVEAVSPELGNRIQRVRVQLPGLSQELLQKLRAKNIDFAAHNAQEDQGSPILNLIGNLAFPVILIGGLFLLSRRSSGGMGGPGGPGFPLQIGQSKAKFQMEPNTGVTFDDVAGVDEAKQDFMEVVEFLKKPERFTAVGARIPKGVLLVGPPGTGKTLLAKAIAGEAGVPFFSISGSEFVEMFVGVGASRVRDLFKKAKENAPCIVFVDEIDAVGRQRGTGIGGGNDEREQTLNQLLTEMDGFEGNTGVIVVAATNRADILDSALLRPGRFDRQVSVDVPDVKGRTDILKVHSGNKKFESGVSLEVIAMRTPGFSGADLANLLNEAAILAGRRGKTAISSKEIDDSIDRIVAGMEGTVMTDGKSKSLVAYHEVGHAICGTLTPGHDAVQKVTLIPRGQARGLTWFIPSDDPTLISKQQLFARIVGGLGGRAAEEVIFGESEVTTGAVSDLQQITGLAKQMVTTFGMSEIGPWSLMDSSEQSDVIMRMMARNSMSEKLANDIDTAVKTLSDKAYEIALSQIRNNREAMDKIVEILLEKETMSGDEFRAILSEFTEIPPENRVASSTSTSTPTPASV

SEQ ID NO: 45833 - protein, 601 aa, Arabidopsis thaliana
  peptide (1)..(601): Ceres Seq. ID no. 14309816
  misc_feature (364)..(574): Pfam Name: Peptidase family M41 Pfam Description: Peptidase family M41
  misc_feature (1)..(575): Homolog of NCBI NO: 37521486 NR Description: cell division protein [Gloeobacter violaceus]
  misc_feature (1)..(580): Homolog of NCBI NO: 16329797 NR Description: cell division protein; FtsH [Synechocystis sp.
  misc_feature (1)..(586): Homolog of NCBI NO: 37522147 NR Description: cell division protein [Gloeobacter violaceus]
  misc_feature (1)..(586): Homolog of NCBI NO: 22298276 NR Description: cell division protein [Thermosynechococcus
  misc_feature (1)..(582): Homolog of NCBI NO: 11467752 NR Description: hypothetical chloroplast RF25 [Guillardia theta]
  misc_feature (1)..(585): Homolog of NCBI NO: 11465793 NR Description: ORF25 [Porphyra purpurea]
  misc_feature (1)..(582): Homolog of NCBI NO: 18417611 NR Description: FtsH protease, putative [Arabidopsis thaliana]
  misc_feature (101)..(601): Homolog of NCBI NO: 21954076 NR Description: putative FtsH protease [Arabidopsis thaliana]
  misc_feature (1)..(601): Homolog of NCBI NO: 3808101 NR Description: chloroplast protease [Capsicum annuum]
  misc_feature (1)..(601): Homolog of NCBI NO: 4325041 NR Description: FtsH-like protein Pftf precursor [Nicotiana
MSYSRFLEYLDKGRVEKVDLYENGTIAIVEAVSPELGNRIQRVRVQLPGLSQELLQKLRAKNIDFAAHNAQEDQGSPILNLIGNLAFPVILIGGLFLLSRRSSGGMGGPGGPGFPLQIGQSKAKFQMEPNTGVTFDDVAGVDEAKQDFMEVVEFLKKPERFTAVGARIPKGVLLVGPPGTGKTLLAKAIAGEAGVPFFSISGSEFVEMFVGVGASRVRDLFKKAKENAPCIVFVDEIDAVGRQRGTGIGGGNDEREQTLNQLLTEMDGFEGNTGVIVVAATNRADILDSALLRPGRFDRQVSVDVPDVKGRTDILKVHSGNKKFESGVSLEVIAMRTPGFSGADLANLLNEAAILAGRRGKTAISSKEIDDSIDRIVAGMEGTVMTDGKSKSLVAYHEVGHAICGTLTPGHDAVQKVTLIPRGQARGLTWFIPSDDPTLISKQQLFARIVGGLGGRAAEEVIFGESEVTTGAVSDLQQITGLAKQMVTTFGMSEIGPWSLMDSSEQSDVIMRMMARNSMSEKLANDIDTAVKTLSDKAYEIALSQIRNNREAMDKIVEILLEKETMSGDEFRAILSEFTEIPPENRVASSTSTSTPTPASV

SEQ ID NO: 45834 - DNA, 1598 bp, Arabidopsis thaliana
  misc_feature (1)..(1598): Ceres Seq. ID no. 12600174
  misc_feature: MA Experiment ID: 20000171 Result: Down-regulated in Transcription
  misc_feature: MA Experiment 20000171 PARAMETER Experiment Name: At_42deg_Heat_P Parameter: Age (day) Value: 14
  misc_feature: MA Experiment 20000171 PARAMETER Experiment Name: At_42deg_Heat_P Parameter: Organism Value: A. thaliana
  misc_feature: MA Experiment 20000171 PARAMETER Experiment Name: At_42deg_Heat_P Parameter: Plant Line Value: WS
  misc_feature: MA Experiment 20000171 PARAMETER Experiment Name: At_42deg_Heat_P Parameter: Temperature (deg C) Value: 42 vs. 22
  misc_feature: MA Experiment 20000171 PARAMETER Experiment Name: At_42deg_Heat_P Parameter: Timepoint (hr) Value: 1
  misc_feature: MA Experiment 20000171 PARAMETER Experiment Name: At_42deg_Heat_P Parameter: Tissue Value: Aerial
  misc_feature: MA Experiment ID: 20000173 Result: Down-regulated in Transcription
  misc_feature: MA Experiment 20000173 PARAMETER Experiment Name: At_42deg_Heat_P Parameter: Age (day) Value: 14
  misc_feature: MA Experiment 20000173 PARAMETER Experiment Name: At_42deg_Heat_P Parameter: Organism Value: A. thaliana
  misc_feature: MA Experiment 20000173 PARAMETER Experiment Name: At_42deg_Heat_P Parameter: Plant Line Value: WS
  misc_feature: MA Experiment 20000173 PARAMETER Experiment Name: At_42deg_Heat_P Parameter: Temperature (deg C) Value: 42 vs. 22
  misc_feature: MA Experiment 20000173 PARAMETER Experiment Name: At_42deg_Heat_P Parameter: Timepoint (hr) Value: 6
  misc_feature: MA Experiment 20000173 PARAMETER Experiment Name: At_42deg_Heat_P Parameter: Tissue Value: Aerial
  misc_feature: MA Experiment ID: 20000180 Result: Up-regulated in Transcription
  misc_feature: MA Experiment 20000180 PARAMETER Experiment Name: At_Germinating_Seeds_P Parameter: Age (hr) Value: 24 vs. 0
  misc_feature: MA Experiment 20000180 PARAMETER Experiment Name: At_Germinating_Seeds_P Parameter: Tissue Value: Germinating Seeds
  misc_feature: MA Experiment ID: 20000182 Result: Up-regulated in Transcription
  misc_feature: MA Experiment 20000182 PARAMETER Experiment Name: At_2mM_SA_P Parameter: Age (day) Value: 14
  misc_feature: MA Experiment 20000182 PARAMETER Experiment Name: At_2mM_SA_P Parameter: Organism Value: A. thaliana
  misc_feature: MA Experiment 20000182 PARAMETER Experiment Name: At_2mM_SA_P Parameter: Plant Line Value: WS
  misc_feature: MA Experiment 20000182 PARAMETER Experiment Name: At_2mM_SA_P Parameter: Timepoint (hr) Value: 6
  misc_feature: MA Experiment 20000182 PARAMETER Experiment Name: At_2mM_SA_P Parameter: Tissue Value: Aerial
  misc_feature: MA Experiment 20000182 PARAMETER Experiment Name: At_2mM_SA_P Parameter: Treatment Value: 2mM SA vs. No Treatment
  misc_feature: MA Experiment ID: 20000227 Result: Down-regulated in Transcription
  misc_feature: MA Experiment 20000227 PARAMETER Experiment Name: At_Root-Tips-vs-Tops_P Parameter: Tissue Value: Root Tips vs. Root Tops
  misc_feature: MA Experiment ID: 20000264 Result: Down-regulated in Transcription
  misc_feature: MA Experiment 20000264 PARAMETER Experiment Name: At_Open_Flower_P Parameter: Age (day) Value: 21
  misc_feature: MA Experiment 20000264 PARAMETER Experiment Name: At_Open_Flower_P Parameter: Plant Line Value: WS
  misc_feature: MA Experiment 20000264 PARAMETER Experiment Name: At_Open_Flower_P Parameter: Tissue Value: Open Flower vs. Whole Plant
  misc_feature: MA Experiment ID: 20000286 Result: Down-regulated in Transcription
  misc_feature: MA Experiment 20000286 PARAMETER Experiment Name: At_Open_Flower_P Parameter: Age (day) Value: 21
  misc_feature: MA Experiment 20000286 PARAMETER Experiment Name: At_Open_Flower_P Parameter: Plant Line Value: WS
  misc_feature: MA Experiment 20000286 PARAMETER Experiment Name: At_Open_Flower_P Parameter: Tissue Value: Half Open vs. Whole Plant
  misc_feature: MA Experiment ID: 20000437 Result: Down-regulated in Transcription
  misc_feature: MA Experiment 20000437 PARAMETER Experiment Name: At_Drought_P Parameter: Age (day) Value: 8
  misc_feature: MA Experiment 20000437 PARAMETER Experiment Name: At_Drought_P Parameter: Organism Value: A. thaliana
  misc_feature: MA Experiment 20000437 PARAMETER Experiment Name: At_Drought_P Parameter: Plant Line Value: WS
  misc_feature: MA Experiment 20000437 PARAMETER Experiment Name: At_Drought_P Parameter: Timepoint (hr) Value: 24
  misc_feature: MA Experiment 20000437 PARAMETER Experiment Name: At_Drought_P Parameter: Tissue Value: Whole Plant
  misc_feature: MA Experiment 20000437 PARAMETER Experiment Name: At_Drought_P Parameter: Treatment Value: Drought vs. No Drought
  misc_feature: MA Experiment ID: 20000794 Result: Down-regulated in Transcription
  misc_feature: MA Experiment 20000794 PARAMETER Experiment Name: At_Petals_P Parameter: Age (day) Value: 23-25 days
  misc_feature: MA Experiment 20000794 PARAMETER Experiment Name: At_Petals_P Parameter: Plant Line Value: WS
  misc_feature: MA Experiment 20000794 PARAMETER Experiment Name: At_Petals_P Parameter: Tissue Value: Petals vs. Whole plant
  misc_feature: MA Experiment ID: 20001904 Result: Down-regulated in Transcription
  misc_feature: MA Experiment 20001904 PARAMETER Experiment Name: At_Drought_Reproduction_P Parameter: Age (day) Value: 37
  misc_feature: MA Experiment 20001904 PARAMETER Experiment Name: At_Drought_Reproduction_P Parameter: Organism Value: A. thaliana
  misc_feature: MA Experiment 20001904 PARAMETER Experiment Name: At_Drought_Reproduction_P Parameter: Plant Line Value: WS
  misc_feature: MA Experiment 20001904 PARAMETER Experiment Name: At_Drought_Reproduction_P Parameter: Timepoint (day) Value: 7
  misc_feature: MA Experiment 20001904 PARAMETER Experiment Name: At_Drought_Reproduction_P Parameter: Tissue Value: Rosettes
  misc_feature: MA Experiment 20001904 PARAMETER Experiment Name: At_Drought_Reproduction_P Parameter: Treatment Value: Drought vs. No Drought
agcttgagcttctctctcaacgaaagaactcaagctttccaacactataaatctataatacagcttttattctcaaattttgtttgtcttaccatcattaccaaaccatgcaagccgcaacgtcgtgtgatctcaagttccgatcaacagatccgacgtctaggaacaaatgtttctcccacgcgattccaaagcgcgtggctgttacgtgcggttataggtcggagtcgtttagcttccctaacggtgtctccgtgagtcgatctgattggcaaagctcatgtgccattttatctagtaaagttgcttctgttgaaaataccggtggtttagcggacaaaatcgccgccgttaatggtcacacgaacggctctgtgaatcttggtctcgtcgccgttgagtcaactaacggaaagttagctcctgctcagccgttgactattactgatctatctccggcaccgttgcatggttctagtctacgtgtagcttaccaaggcgttcccggagcttactcggaagcagctgccggaaaagcttatcccaattgcgacgccattccttgtgaccagtttgacgttgcttttcaggcggtggagctttggatcgctgatcgagctgtgcttccggtggagaactcactcggtggttcgatccatcgaaactatgatcttcttctccgtcaccgtcttcacatcgttggagaagttcagattccggtccaccattgcctcctcgcactcccgggagtccgaactgactgtgtttcgcgggtgatctctcacccgcaagccctagcgcagacggaacactccctcgacgtccttacaccacatgcagcgcgtgaggctttccatgacacagcggctgctgcggagtatatctcagctaacgacctacatgacacggcggctgtggcgagcgcacgcgccgctgagctttacaacctccagatattagcggatgggattcaagacgacccggggaacgtcactcgtttcctaatgttggcgcgtgagcctataatcccacgcacggaccggccattcaagactagcatcgtctttgctgcccaagagcacaaaggaactagcgtcctctttaaagtcctctcggctttcgctttcagagacattagcctgaccaagatcgagtcccggcctcaccataaccgcccgcttagggttgttggtgacgggagctttgggacgtcgaagaacttcgagtacatgttttacgtggattttgaggcatcgatggctgagccgcgtgcacagaacgcgcttgcggaggttcaagagtacacgtcgttcctaagggtgctgggaagttaccccatggatatgacaccatggtccatgacatccacagaagaagcatgaccccatcgccaaaaacaaactcaccaataaatttattaaattattctgttctttctttttttgtgaaaattgtagtatacattgaaattaaaccgtaaatgtagagctcattattcacgtggtgattaggagaaaacaaaattttatttgtctgttactagctaccagatatatcttacattcttacttaatagttatgaacattgtggtttattc

SEQ ID NO: 45835 - protein, 424 aa, Arabidopsis thaliana
  peptide (1)..(424): Ceres Seq. ID no. 12600175
  misc_feature (127)..(306): Pfam Name: Prephenate dehydratase Pfam Description: Prephenate dehydratase
  misc_feature (83)..(414): Homolog of NCBI NO: 15231489 NR Description: putative P-protein: chorismate mutase, prephenate
  misc_feature (108)..(413): Homolog of NCBI NO: 14596233 NR Description: Unknown protein [Arabidopsis thaliana]
  misc_feature (108)..(413): Homolog of NCBI NO: 15221096 NR Description: putative chloroplast prephenate dehydratase
  misc_feature (108)..(414): Homolog of NCBI NO: 34394031 NR Description: putative prephenate dehydratase
  misc_feature (43)..(421): Homolog of NCBI NO: 38347597 NR Description: OSJNBa0042I15.10 [Oryza sativa (japonica
  misc_feature (52)..(421): Homolog of NCBI NO: 18390869 NR Description: expressed protein
  misc_feature (12)..(424): Homolog of NCBI NO: 21593283 NR Description: putative chorismate mutase/prephenate dehydratase
  misc_feature (12)..(424): Homolog of NCBI NO: 15226259 NR Description: putative chorismate mutase/prephenate dehydratase
  misc_feature (1)..(423): Homolog of NCBI NO: 15242928 NR Description: chorismate mutase/prephenate dehydratase-like
  misc_feature (1)..(424): Homolog of NCBI NO: 15230489 NR Description: putative chloroplast prephenate dehydratase
MQAATSCDLKFRSTDPTSRNKCFSHAIPKRVAVTCGYRSESFSFPNGVSVSRSDWQSSCAILSSKVASVENTGGLADKIAAVNGHTNGSVNLGLVAVESTNGKLAPAQPLTITDLSPAPLHGSSLRVAYQGVPGAYSEAAAGKAYPNCDAIPCDQFDVAFQAVELWIADRAVLPVENSLGGSIHRNYDLLLRHRLHIVGEVQIPVHHCLLALPGVRTDCVSRVISHPQALAQTEHSLDVLTPHAAREAFHDTAAAAEYISANDLHDTAAVASARAAELYNLQILADGIQDDPGNVTRFLMLAREPIIPRTDRPFKTSIVFAAQEHKGTSVLFKVLSAFAFRDISLTKIESRPHHNRPLRVVGDGSFGTSKNFEYMFYVDFEASMAEPRAQNALAEVQEYTSFLRVLGSYPMDMTPWSMTSTEEA

SEQ ID NO: 45836 - DNA, 1649 bp, Arabidopsis thaliana
  misc_feature (1)..(1649): Ceres Seq. ID no. 12561108
  misc_feature: MA Experiment ID: 20000315 Result: Down-regulated in Transcription
  misc_feature: MA Experiment 20000315 PARAMETER Experiment Name: At_14day_Shoots-Roots_Sub_P Parameter: Age (day) Value: 14
  misc_feature: MA Experiment 20000315 PARAMETER Experiment Name: At_14day_Shoots-Roots_Sub_P Parameter: Organism Value: A. thaliana
  misc_feature: MA Experiment 20000315 PARAMETER Experiment Name: At_14day_Shoots-Roots_Sub_P Parameter: Plant Line Value: WS
  misc_feature: MA Experiment 20000315 PARAMETER Experiment Name: At_14day_Shoots-Roots_Sub_P Parameter: Tissue Value: Shoots vs. Whole Plant
  misc_feature: MA Experiment ID: 20000328 Result: Down-regulated in Transcription
  misc_feature: MA Experiment 20000328 PARAMETER Experiment Name: At_42deg_Heat_Sub_P Parameter: Age (day) Value: 14
  misc_feature: MA Experiment 20000328 PARAMETER Experiment Name: At_42deg_Heat_Sub_P Parameter: Organism Value: A. thaliana
  misc_feature: MA Experiment 20000328 PARAMETER Experiment Name: At_42deg_Heat_Sub_P Parameter: Plant Line Value: WS
  misc_feature: MA Experiment 20000328 PARAMETER Experiment Name: At_42deg_Heat_Sub_P Parameter: Temperature (deg C) Value: 42 vs. 22
  misc_feature: MA Experiment 20000328 PARAMETER Experiment Name: At_42deg_Heat_Sub_P Parameter: Timepoint (hr) Value: 6
  misc_feature: MA Experiment 20000328 PARAMETER Experiment Name: At_42deg_Heat_Sub_P Parameter: Tissue Value: Aerial
  misc_feature: MA Experiment ID: 20000355 Result: Up-regulated in Transcription
  misc_feature: MA Experiment 20000355 PARAMETER Experiment Name: At_Siliques_Sub_P Parameter: Age (day) Value: 21
  misc_feature: MA Experiment 20000355 PARAMETER Experiment Name: At_Siliques_Sub_P Parameter: Organism Value: A. thaliana
  misc_feature: MA Experiment 20000355 PARAMETER Experiment Name: At_Siliques_Sub_P Parameter: Plant Line Value: WS
  misc_feature: MA Experiment 20000355 PARAMETER Experiment Name: At_Siliques_Sub_P Parameter: Tissue Value: Less Than 5mm Siliques vs. Whole Plant
  misc_feature: MA Experiment ID: 20000440 Result: Up-regulated in Transcription
  misc_feature: MA Experiment 20000440 PARAMETER Experiment Name: At_Closed-Flower__Sub_P Parameter: Tissue Value: Closed Flower vs. Whole Plant
gtcttcttcctttgtctctcctctgatatacattgtgttctccttctcagaaaccctagatttctctcaatcaaatctagcttttctcttagggggagatttgatttttttctctgcaagactgtaacagtaggagaagctactttcctctgttttcttaatttcaaatctgcaatcgtactttttcgagttctataagtgaactcagattttagctttttttttttagggttcataagaacaaattggattttgagctcacagtataaataacccgactttgattactgggtaattttaaaaccgccattgttgttctctttactacttttgggaattagggtttatgatttctgggtattagattagataaatttgtttcctttttttgttaatcaatttaaaaatctcttatttctgttaaagacttgtaattttggagtttttaatgcatggacggaagagaagcaatggcatttccaggctcgcattctcagtactatcttcaaagaggagcctttactaatctcgcaccttcccaagtcgcgagtgggcttcacgcgccgccgccacatacgggattgaggccaatgtctaaccctaacattcatcaccctcaggctaacaatccaggacctcctttctcggattttggacacaccattcacatgggagtggtctcctctgcttctgatgctgatgtgcaaccgccaccgccaccgccaccaccagaggaaccgatggttaagaggaaacgtggacggccaagaaagtatggagaaccgatggttagtaataagtctagggactcttctccaatgtctgatcctaatgaacctaaacgggccagaggtcgacctcctggaactggaaggaagcaacgcttggctaatcttggtgagtggatgaatacttcagctggacttgcttttgcacctcatgtgatcagcattggagcaggagaagacattgctgcgaaagttttgtcattttcacaacaaagacctcgggctctttgtataatgtcaggcactggaaccatttcttcagtcactctgtgcaaacccggttcaaccgatcgtcacttaacatacgagggaccttttgagattataagttttggtggatcttatttggtgaatgaagaaggtggatccagaagtcgaacaggcggattgagtgtctctctttctcgtcccgatggtagtattattgccggtggagttgacatgcttatcgcagccaaccttgttcaggtggtggcatgtagttttgtatacggagcaagggcaaagactcataataacaataacaagaccatcagacaagaaaaggaaccaaatgaagaggacaacaatagtgaaatggagaccacaccgggtagtgcagctgaaccagcagcatctgcgggtcagcagacgccacagaacttctcttctcagggaataagggggtggcccggttcaggctcaggctctggcagatcacttgacatttgcagaaacccactcactgattttgatttgactcgtggatgatatacactattagtctttgaagcagcagcatacaaaatgtgattgctgtacatatgttattgtagatttctctctgggaatgttgaaatcagacatttaaggattgatact

SEQ ID NO: 45837 - protein, 361 aa, Arabidopsis thaliana
  peptide (1)..(361): Ceres Seq. ID no. 12561109
  misc_feature (7)..(361): Homolog of NCBI NO: 11281387 NR Description: probable DNA-binding protein - Arabidopsis
  misc_feature (1)..(361): Homolog of NCBI NO: 30695388 NR Description: DNA-binding protein -related [Arabidopsis
  misc_feature (1)..(361): Homolog of NCBI NO: 15225902 NR Description: putative AT-hook DNA-binding protein
  misc_feature (1)..(338): Homolog of NCBI NO: 7488825 NR Description: probable DNA-binding protein - garden pea
  misc_feature (1)..(338): Homolog of NCBI NO: 2213534 NR Description: DNA-binding PD1-like protein [Pisum sativum]
  misc_feature (65)..(361): Homolog of NCBI NO: 6633838 NR Description: F2K11.15 [Arabidopsis thaliana]
  misc_feature (65)..(361): Homolog of NCBI NO: 30696854 NR Description: DNA-binding protein -related [Arabidopsis
  misc_feature (1)..(324): Homolog of NCBI NO: 6633838 NR Description: F2K11.15 [Arabidopsis thaliana]
  misc_feature (7)..(361): Homolog of NCBI NO: 17979309 NR Description: putative DNA-binding protein [Arabidopsis
  misc_feature (1)..(361): Homolog of NCBI NO: 22330402 NR Description: DNA-binding protein, putative
MDGREAMAFPGSHSQYYLQRGAFTNLAPSQVASGLHAPPPHTGLRPMSNPNIHHPQANNPGPPFSDFGHTIHMGVVSSASDADVQPPPPPPPPEEPMVKRKRGRPRKYGEPMVSNKSRDSSPMSDPNEPKRARGRPPGTGRKQRLANLGEWMNTSAGLAFAPHVISIGAGEDIAAKVLSFSQQRPRALCIMSGTGTISSVTLCKPGSTDRHLTYEGPFEIISFGGSYLVNEEGGSRSRTGGLSVSLSRPDGSIIAGGVDMLIAANLVQVVACSFVYGARAKTHNNNNKTIRQEKEPNEEDNNSEMETTPGSAAEPAASAGQQTPQNFSSQGIRGWPGSGSGSGRSLDICRNPLTDFDLTRG

SEQ ID NO: 45838 - protein, 355 aa, Arabidopsis thaliana
  peptide (1)..(355): Ceres Seq. ID no. 12561110
  misc_feature (1)..(355): Homolog of NCBI NO: 11281387 NR Description: probable DNA-binding protein - Arabidopsis
  misc_feature (1)..(355): Homolog of NCBI NO: 30695388 NR Description: DNA-binding protein -related [Arabidopsis
  misc_feature (1)..(355): Homolog of NCBI NO: 15225902 NR Description: putative AT-hook DNA-binding protein
  misc_feature (1)..(332): Homolog of NCBI NO: 7488825 NR Description: probable DNA-binding protein - garden pea
  misc_feature (1)..(332): Homolog of NCBI NO: 2213534 NR Description: DNA-binding PD1-like protein [Pisum sativum]
  misc_feature (59)..(355): Homolog of NCBI NO: 6633838 NR Description: F2K11.15 [Arabidopsis thaliana]
  misc_feature (59)..(355): Homolog of NCBI NO: 30696854 NR Description: DNA-binding protein -related [Arabidopsis
  misc_feature (1)..(318): Homolog of NCBI NO: 6633838 NR Description: F2K11.15 [Arabidopsis thaliana]
  misc_feature (1)..(355): Homolog of NCBI NO: 17979309 NR Description: putative DNA-binding protein [Arabidopsis
  misc_feature (1)..(355): Homolog of NCBI NO: 22330402 NR Description: DNA-binding protein, putative
MAFPGSHSQYYLQRGAFTNLAPSQVASGLHAPPPHTGLRPMSNPNIHHPQANNPGPPFSDFGHTIHMGVVSSASDADVQPPPPPPPPEEPMVKRKRGRPRKYGEPMVSNKSRDSSPMSDPNEPKRARGRPPGTGRKQRLANLGEWMNTSAGLAFAPHVISIGAGEDIAAKVLSFSQQRPRALCIMSGTGTISSVTLCKPGSTDRHLTYEGPFEIISFGGSYLVNEEGGSRSRTGGLSVSLSRPDGSIIAGGVDMLIAANLVQVVACSFVYGARAKTHNNNNKTIRQEKEPNEEDNNSEMETTPGSAAEPAASAGQQTPQNFSSQGIRGWPGSGSGSGRSLDICRNPLTDFDLTRG

SEQ ID NO: 45839 - protein, 315 aa, Arabidopsis thaliana
  peptide (1)..(315): Ceres Seq. ID no. 12561111
  misc_feature (1)..(315): Homolog of NCBI NO: 11281387 NR Description: probable DNA-binding protein - Arabidopsis
  misc_feature (1)..(315): Homolog of NCBI NO: 30695388 NR Description: DNA-binding protein -related [Arabidopsis
  misc_feature (1)..(315): Homolog of NCBI NO: 15225902 NR Description: putative AT-hook DNA-binding protein
  misc_feature (1)..(292): Homolog of NCBI NO: 7488825 NR Description: probable DNA-binding protein - garden pea
  misc_feature (1)..(292): Homolog of NCBI NO: 2213534 NR Description: DNA-binding PD1-like protein [Pisum sativum]
  misc_feature (19)..(315): Homolog of NCBI NO: 6633838 NR Description: F2K11.15 [Arabidopsis thaliana]
  misc_feature (19)..(315): Homolog of NCBI NO: 30696854 NR Description: DNA-binding protein -related [Arabidopsis
  misc_feature (1)..(278): Homolog of NCBI NO: 6633838 NR Description: F2K11.15 [Arabidopsis thaliana]
  misc_feature (1)..(315): Homolog of NCBI NO: 17979309 NR Description: putative DNA-binding protein [Arabidopsis
  misc_feature (1)..(315): Homolog of NCBI NO: 22330402 NR Description: DNA-binding protein, putative
MSNPNIHHPQANNPGPPFSDFGHTIHMGVVSSASDADVQPPPPPPPPEEPMVKRKRGRPRKYGEPMVSNKSRDSSPMSDPNEPKRARGRPPGTGRKQRLANLGEWMNTSAGLAFAPHVISIGAGEDIAAKVLSFSQQRPRALCIMSGTGTISSVTLCKPGSTDRHLTYEGPFEIISFGGSYLVNEEGGSRSRTGGLSVSLSRPDGSIIAGGVDMLIAANLVQVVACSFVYGARAKTHNNNNKTIRQEKEPNEEDNNSEMETTPGSAAEPAASAGQQTPQNFSSQGIRGWPGSGSGSGRSLDICRNPLTDFDLTRG

SEQ ID NO: 45840 - DNA, 1516 bp, Arabidopsis thaliana
  misc_feature (1)..(1516): Ceres Seq. ID no. 12604425
  misc_feature: MA Experiment ID: 20000227 Result: Up-regulated in Transcription
  misc_feature: MA Experiment 20000227 PARAMETER Experiment Name: At_Root-Tips-vs-Tops_P Parameter: Tissue Value: Root Tips vs. Root Tops
  misc_feature: MA Experiment ID: 20000234 Result: Up-regulated in Transcription
  misc_feature: MA Experiment 20000234 PARAMETER Experiment Name: At_Siliques_P Parameter: Age (day) Value: 21
  misc_feature: MA Experiment 20000234 PARAMETER Experiment Name: At_Siliques_P Parameter: Organism Value: A. thaliana
  misc_feature: MA Experiment 20000234 PARAMETER Experiment Name: At_Siliques_P Parameter: Plant Line Value: WS
  misc_feature: MA Experiment 20000234 PARAMETER Experiment Name: At_Siliques_P Parameter: Tissue Value: Less Than 5mm Siliques vs. Whole Plant
  misc_feature: MA Experiment ID: 20000264 Result: Up-regulated in Transcription
  misc_feature: MA Experiment 20000264 PARAMETER Experiment Name: At_Open_Flower_P Parameter: Age (day) Value: 21
  misc_feature: MA Experiment 20000264 PARAMETER Experiment Name: At_Open_Flower_P Parameter: Plant Line Value: WS
  misc_feature: MA Experiment 20000264 PARAMETER Experiment Name: At_Open_Flower_P Parameter: Tissue Value: Open Flower vs. Whole Plant
  misc_feature: MA Experiment ID: 20001557 Result: Up-regulated in Transcription
  misc_feature: MA Experiment 20001557 PARAMETER Experiment Name: At_Drought_Soil_Dry_P Parameter: Age (day) Value: 27
  misc_feature: MA Experiment 20001557 PARAMETER Experiment Name: At_Drought_Soil_Dry_P Parameter: Organism Value: A. thaliana
  misc_feature: MA Experiment 20001557 PARAMETER Experiment Name: At_Drought_Soil_Dry_P Parameter: Plant Line Value: WS
  misc_feature: MA Experiment 20001557 PARAMETER Experiment Name: At_Drought_Soil_Dry_P Parameter: Post Timepoint (hr) Value: 3
  misc_feature: MA Experiment 20001557 PARAMETER Experiment Name: At_Drought_Soil_Dry_P Parameter: Post-Treatment Value: Re-Water vs. No Drought
  misc_feature: MA Experiment 20001557 PARAMETER Experiment Name: At_Drought_Soil_Dry_P Parameter: Timepoint (day) Value: 13
  misc_feature: MA Experiment 20001557 PARAMETER Experiment Name: At_Drought_Soil_Dry_P Parameter: Treatment Value: Drought vs. No Drought
  misc_feature: MA Experiment ID: 20001558 Result: Up-regulated in Transcription
  misc_feature: MA Experiment 20001558 PARAMETER Experiment Name: At_Drought_Soil_Dry_P Parameter: Age (day) Value: 27
  misc_feature: MA Experiment 20001558 PARAMETER Experiment Name: At_Drought_Soil_Dry_P Parameter: Organism Value: A. thaliana
  misc_feature: MA Experiment 20001558 PARAMETER Experiment Name: At_Drought_Soil_Dry_P Parameter: Plant Line Value: WS
  misc_feature: MA Experiment 20001558 PARAMETER Experiment Name: At_Drought_Soil_Dry_P Parameter: Post Timepoint (hr) Value: 6
  misc_feature: MA Experiment 20001558 PARAMETER Experiment Name: At_Drought_Soil_Dry_P Parameter: Post-Treatment Value: Re-Water vs. No Drought
  misc_feature: MA Experiment 20001558 PARAMETER Experiment Name: At_Drought_Soil_Dry_P Parameter: Timepoint (day) Value: 13
  misc_feature: MA Experiment 20001558 PARAMETER Experiment Name: At_Drought_Soil_Dry_P Parameter: Treatment Value: Drought vs. No Drought
  misc_feature: MA Experiment ID: 20001560 Result: Up-regulated in Transcription
  misc_feature: MA Experiment 20001560 PARAMETER Experiment Name: At_Drought_Soil_Dry_P Parameter: Age (day) Value: 28
  misc_feature: MA Experiment 20001560 PARAMETER Experiment Name: At_Drought_Soil_Dry_P Parameter: Organism Value: A. thaliana
  misc_feature: MA Experiment 20001560 PARAMETER Experiment Name: At_Drought_Soil_Dry_P Parameter: Plant Line Value: WS
  misc_feature: MA Experiment 20001560 PARAMETER Experiment Name: At_Drought_Soil_Dry_P Parameter: Post Timepoint (hr) Value: None
  misc_feature: MA Experiment 20001560 PARAMETER Experiment Name: At_Drought_Soil_Dry_P Parameter: Post-Treatment Value: None
  misc_feature: MA Experiment 20001560 PARAMETER Experiment Name: At_Drought_Soil_Dry_P Parameter: Timepoint (day) Value: 14
  misc_feature: MA Experiment 20001560 PARAMETER Experiment Name: At_Drought_Soil_Dry_P Parameter: Treatment Value: Drought vs. No Drought
  misc_feature: MA Experiment ID: 20001757 Result: Up-regulated in Transcription
  misc_feature: MA Experiment 20001757 PARAMETER Experiment Name: At_50mM_NH4NO3_L-to-H_P Parameter: Timepoint (hr) Value: 6
  misc_feature: MA Experiment 20001757 PARAMETER Experiment Name: At_50mM_NH4NO3_L-to-H_P Parameter: Tissue Value: Leaf
  misc_feature: MA Experiment 20001757 PARAMETER Experiment Name: At_50mM_NH4NO3_L-to-H_P Parameter: Treatment Value: 50mM NH4NO3 vs 100mM Mannitol
acacatagcgaaaaccctagtacctttatttgagccaacactttcatttctctccttctccaccagttttcccccaatcgctcctccttaaaccctaacatttttgcttcccctgtttcgattctcgagagttatcagagatgagttcggacgatgagagagacgagaaggagctgagtcttacctctcctgaagtcgtcaccaagtacaagagcgccgctgagatcgttaacaaggcgttacaggttgttttagctgaatgcaaaccaaaagctaagattgttgatatctgtgagaaaggagactcttttattaaagagcaaacagcaagcatgtacaagaattctaagaagaagattgagagaggtgttgcgttccctacatgcatttctgtgaacaacactgttggtcatttttcaccgcttgctagtgatgagtctgtgttggaagatggtgacatggttaaaatcgatatgggatgtcatattgatgggttcattgcccttgttggtcacacacatgttcttcaagaagggcctcttagtgggcgtaaggctgatgttatcgctgccgcaaatactgcagctgatgttgctctaaggctcgtacgtcctggaaaaaagaacactgatgtaactgaagctattcagaaggtagctgcagcttatgactgcaaaattgttgaaggtgttctttcccaccagctgaaacagcatgtgatagatggaaacaaggttgtgcttagtgtatccagccctgaaacaactgttgacgaagtggaatttgaagagaatgaagtctatgcaatagatattgtggcaagtactggtgatggcaagccaaagctattagacgagaagcaaacaactatttacaagaaagatgaaagtgttaactatcagttgaagatgaaggcctccagattcataatcagcgaaattaaacagaacttcccccgtatgccattcactgcaaggtcactggaggagaaaagggcacggcttggacttgtggagtgtgtgaaccatggtcatttgcaaccatatcctgttctttacgagaagcctggggattttgttgctcagattaagttcacagttttgctgatgccaaatggatcagataggatcacttcacatacacttcaggaacttcctaaaaagaccatcgaagaccctgagatcaaagggtggttagctttgggcatcaagaagaagaaaggtggtggaaagaagaagaaagcccaaaaggcgggagagaaaggagaggcttcaacagaggctgagccaatggacgcaagtagtaatgctcaagaatgagtaggaagatttgtctttgtttcttttaaagaatttttgaaacttgaggtacctctttcgttgtatgtttgggtttcaagagagtctcttcttaaacaaaaaaaaacaaacaatagtttaccacctttgtgcatatttttgcacaaagcacttttcatcatcatttctttgcttgtcctaatcttatctcattctct

SEQ ID NO: 45841 - protein, 392 aa, Arabidopsis thaliana
  peptide (1)..(392): Ceres Seq. ID no. 12604426
  misc_feature (1)..(382): Homolog of NCBI NO: 34862215 NR Description: similar to proliferation-associated protein 1
  misc_feature (1)..(385): Homolog of NCBI NO: 13632817 NR Description: Proliferation-associated protein 2G4 (Cell cycle
  misc_feature (1)..(385): Homolog of NCBI NO: 5453842 NR Description: proliferation-associated 2G4, 38kDa
  misc_feature (3)..(373): Homolog of NCBI NO: 26788026 NR Description: SI:dZ150I12.2 (novel protein similar to human
  misc_feature (1)..(390): Homolog of NCBI NO: 34193902 NR Description: Proliferation-associated protein 1 [Danio rerio]
  misc_feature (1)..(389): Homolog of NCBI NO: 7447216 NR Description: probable DNA-binding protein GBP16 - rice
  misc_feature (3)..(389): Homolog of NCBI NO: 9652218 NR Description: putative DNA binding protein [Atriplex hortensis]
  misc_feature (1)..(392): Homolog of NCBI NO: 30693537 NR Description: nuclear DNA-binding protein G2p -related
  misc_feature (1)..(392): Homolog of NCBI NO: 13430628 NR Description: putative nuclear DNA-binding protein G2p
  misc_feature (1)..(392): Homolog of NCBI NO: 15231039 NR Description: putative nuclear DNA-binding protein G2p
MSSDDERDEKELSLTSPEVVTKYKSAAEIVNKALQVVLAECKPKAKIVDICEKGDSFIKEQTASMYKNSKKKIERGVAFPTCISVNNTVGHFSPLASDESVLEDGDMVKIDMGCHIDGFIALVGHTHVLQEGPLSGRKADVIAAANTAADVALRLVRPGKKNTDVTEAIQKVAAAYDCKIVEGVLSHQLKQHVIDGNKVVLSVSSPETTVDEVEFEENEVYAIDIVASTGDGKPKLLDEKQTTIYKKDESVNYQLKMKASRFIISEIKQNFPRMPFTARSLEEKRARLGLVECVNHGHLQPYPVLYEKPGDFVAQIKFTVLLMPNGSDRITSHTLQELPKKTIEDPEIKGWLALGIKKKKGGGKKKKAQKAGEKGEASTEAEPMDASSNAQE

SEQ ID NO: 45842 - protein, 328 aa, Arabidopsis thaliana
  peptide (1)..(328): Ceres Seq. ID no. 12604427
  misc_feature (1)..(318): Homolog of NCBI NO: 34862215 NR Description: similar to proliferation-associated protein 1
  misc_feature (1)..(321): Homolog of NCBI NO: 13632817 NR Description: Proliferation-associated protein 2G4 (Cell cycle
  misc_feature (1)..(321): Homolog of NCBI NO: 5453842 NR Description: proliferation-associated 2G4, 38kDa
  misc_feature (1)..(309): Homolog of NCBI NO: 26788026 NR Description: SI:dZ150I12.2 (novel protein similar to human
  misc_feature (1)..(326): Homolog of NCBI NO: 34193902 NR Description: Proliferation-associated protein 1 [Danio rerio]
  misc_feature (1)..(325): Homolog of NCBI NO: 7447216 NR Description: probable DNA-binding protein GBP16 - rice
  misc_feature (1)..(325): Homolog of NCBI NO: 9652218 NR Description: putative DNA binding protein [Atriplex hortensis]
  misc_feature (1)..(328): Homolog of NCBI NO: 30693537 NR Description: nuclear DNA-binding protein G2p -related
  misc_feature (1)..(328): Homolog of NCBI NO: 13430628 NR Description: putative nuclear DNA-binding protein G2p
  misc_feature (1)..(328): Homolog of NCBI NO: 15231039 NR Description: putative nuclear DNA-binding protein G2p
MYKNSKKKIERGVAFPTCISVNNTVGHFSPLASDESVLEDGDMVKIDMGCHIDGFIALVGHTHVLQEGPLSGRKADVIAAANTAADVALRLVRPGKKNTDVTEAIQKVAAAYDCKIVEGVLSHQLKQHVIDGNKVVLSVSSPETTVDEVEFEENEVYAIDIVASTGDGKPKLLDEKQTTIYKKDESVNYQLKMKASRFIISEIKQNFPRMPFTARSLEEKRARLGLVECVNHGHLQPYPVLYEKPGDFVAQIKFTVLLMPNGSDRITSHTLQELPKKTIEDPEIKGWLALGIKKKKGGGKKKKAQKAGEKGEASTEAEPMDASSNAQE

SEQ ID NO: 45843 - protein, 286 aa, Arabidopsis thaliana
  peptide (1)..(286): Ceres Seq. ID no. 12604428
  misc_feature (1)..(276): Homolog of NCBI NO: 34862215 NR Description: similar to proliferation-associated protein 1
  misc_feature (1)..(279): Homolog of NCBI NO: 13632817 NR Description: Proliferation-associated protein 2G4 (Cell cycle
  misc_feature (1)..(279): Homolog of NCBI NO: 5453842 NR Description: proliferation-associated 2G4, 38kDa
  misc_feature (1)..(267): Homolog of NCBI NO: 26788026 NR Description: SI:dZ150I12.2 (novel protein similar to human
  misc_feature (1)..(284): Homolog of NCBI NO: 34193902 NR Description: Proliferation-associated protein 1 [Danio rerio]
  misc_feature (1)..(283): Homolog of NCBI NO: 7447216 NR Description: probable DNA-binding protein GBP16 - rice
  misc_feature (1)..(283): Homolog of NCBI NO: 9652218 NR Description: putative DNA binding protein [Atriplex hortensis]
  misc_feature (1)..(286): Homolog of NCBI NO: 30693537 NR Description: nuclear DNA-binding protein G2p -related
  misc_feature (1)..(286): Homolog of NCBI NO: 13430628 NR Description: putative nuclear DNA-binding protein G2p
  misc_feature (1)..(286): Homolog of NCBI NO: 15231039 NR Description: putative nuclear DNA-binding protein G2p
MVKIDMGCHIDGFIALVGHTHVLQEGPLSGRKADVIAAANTAADVALRLVRPGKKNTDVTEAIQKVAAAYDCKIVEGVLSHQLKQHVIDGNKVVLSVSSPETTVDEVEFEENEVYAIDIVASTGDGKPKLLDEKQTTIYKKDESVNYQLKMKASRFIISEIKQNFPRMPFTARSLEEKRARLGLVECVNHGHLQPYPVLYEKPGDFVAQIKFTVLLMPNGSDRITSHTLQELPKKTIEDPEIKGWLALGIKKKKGGGKKKKAQKAGEKGEASTEAEPMDASSNAQE

SEQ ID NO: 45844 - DNA, 2004 bp, Arabidopsis thaliana
  misc_feature (1)..(2004): Ceres Seq. ID no. 13646789
  misc_feature: MA Experiment ID: 20000438 Result: Down-regulated in Transcription
  misc_feature: MA Experiment 20000438 PARAMETER Experiment Name: At_Shoots__P Parameter: Age (day) Value: 14
  misc_feature: MA Experiment 20000438 PARAMETER Experiment Name: At_Shoots__P Parameter: Tissue Value: Shoots vs. Whole Plant
  misc_feature: MA Experiment ID: 20000794 Result: Up-regulated in Transcription
  misc_feature: MA Experiment 20000794 PARAMETER Experiment Name: At_Petals_P Parameter: Age (day) Value: 23-25 days
  misc_feature: MA Experiment 20000794 PARAMETER Experiment Name: At_Petals_P Parameter: Plant Line Value: WS
  misc_feature: MA Experiment 20000794 PARAMETER Experiment Name: At_Petals_P Parameter: Tissue Value: Petals vs. Whole plant
  misc_feature: MA Experiment ID: 20001450 Result: Up-regulated in Transcription
  misc_feature: MA Experiment 20001450 PARAMETER Experiment Name: At_Far-red-induction_P Parameter: Age (day) Value: 7
  misc_feature: MA Experiment 20001450 PARAMETER Experiment Name: At_Far-red-induction_P Parameter: Light Value: Far-red vs. White
  misc_feature: MA Experiment 20001450 PARAMETER Experiment Name: At_Far-red-induction_P Parameter: Organism Value: A. thaliana
  misc_feature: MA Experiment 20001450 PARAMETER Experiment Name: At_Far-red-induction_P Parameter: Plant Line Value: Columbia
  misc_feature: MA Experiment 20001450 PARAMETER Experiment Name: At_Far-red-induction_P Parameter: Timepoint (hr) Value: 8
  misc_feature: MA Experiment 20001450 PARAMETER Experiment Name: At_Far-red-induction_P Parameter: Tissue Value: Whole Plant
gatagtcatcgatcaatacacataacattccctaataagttaatttagtggctacgtttgacggaaaaaaaaaaaagagaagaaggaaatcaggaatgatctgattcttcgacgaaaggggaagaggttgttgaattcaaaatctctctctcttctctgtctctctcgcgtgagctaggtgcagatttttccagatctcaacattgaaattcaaactcaaagctagagagggagagattatagagagatagagagggagagaatcggttcggagaagaagaagaagacgaacacggaagctgaaacaatgattacgatcccataccttaccgctgtatcaacgtatttcagctacggcttgcttttcgcgtttggtcagcttcgcgattactctcgcctaatcttcgattggtggcgcaccaacaatctccagggatacgctccgatctgcttggcgcatgaggatttctacatccgacgattgtatcatcggattcaggactgttttggacgtcccatttcaagtgcacctgatgcttggattgatgtggttgagagagtctctgacgataacaacaagacgttaaagcgaactacaaagactagcaggtgccttaatttgggttcctacaattatcttggatttggttctttcgatgaatattgcacgcctcgtgtcattgagtctctgaagaaattttcagcaagtacatgtagctctcgcgttgatgcaggaactacatctgtgcatgcagaacttgaggattgtgttgctaaatatgtcggacaacctgctgctgttatttttggcatgggttatgcaacaaactcggctatcattcccgtcttgattggaaagggagggttgataataagcgattctttgaaccatacttcgattgtcaacggcgctcgaggttcaggagctactatccgtgttttccaacacaacacacctggtcatctggaaaaagtattgaaagaacaaatcgccgagggacaacccaggacgcatagaccgtggaagaaaattattgttgttgttgagggtatttacagcatggaaggggaaatttgtcatctgcccgagattgtttcaatatgcaagaagtataaggcatatgtttacttggacgaagctcacagcattggagcaattggcaagacaggaagaggtgtttgtgaactccttggagttgacacttctgatgtggacataatgatgggaactttcacgaaatcttttgggtcttgtggtggctatattgcgggatcaaaggacctcatccaatatttgaagcaccaatgcccggctcacctttacgccacatcaatttcaactccttccgcgacacaaatcatatcggcgataaaggttatccttggagaggatggttcaaacagaggggcacaaaagttagcaagaataagggagaacagcaactttttcagggctgagttgcagaagatggggtttgaagttcttggagacaatgattcaccagtcatgccaataatgctttacaatccagcaaaaattccagcattctcaagggaatgtttgcgagaaaacttggcggtggtggtcgtcggtttcccagctacacccctattgctagccagggctcgtatttgcatatccgcatctcactcaagagaagatcttataaaagccctacaggttataagcaaagcaggtgaccttaccgggatcaaatattttccggcagctccaaaaaagcaagaagtagagaaaaatggcatcaaattggattaaacccgtaaggcaacagtttctttccaagagatgtttggctagcaattagctgtagtgtacaattatctcgctgttcgtctttgtcttgtcgtgaaacatgtgattgttgtcattcttctctctttattatttttattgtttttgtcagagttaataattgtatagtgtccctctatatattgttgccccaaaatttttacagatgttatcgcagtcatctttgctcc

SEQ ID NO: 45845 - protein, 489 aa, Arabidopsis thaliana
  peptide (1)..(489): Ceres Seq. ID no. 13646790
  misc_feature (133)..(461): Pfam Name: Aminotransferase class I and II Pfam Description: Aminotransferase class I and II
  misc_feature (5)..(471): Homolog of NCBI NO: 2137762 NR Description: serine C-palmitoyltransferase (EC 2.3.1.50) Lcb2
  misc_feature (5)..(471): Homolog of NCBI NO: 4758668 NR Description: serine palmitoyltransferase, long chain base
  misc_feature (142)..(485): Homolog of NCBI NO: 15229024 NR Description: serine C-palmitoyltransferase, putative
  misc_feature (101)..(485): Homolog of NCBI NO: 11279408 NR Description: serine C-palmitoyltransferase (EC 2.3.1.50)
  misc_feature (1)..(483): Homolog of NCBI NO: 34907092 NR Description: putative serine palmitoyltransferase
  misc_feature (1)..(489): Homolog of NCBI NO: 27753609 NR Description: serine palmitoyltransferase [Lotus japonicus]
  misc_feature (1)..(489): Homolog of NCBI NO: 4995890 NR Description: serine palmitoyltransferase [Solanum tuberosum]
  misc_feature (1)..(489): Homolog of NCBI NO: 9309380 NR Description: serine palmitoyltransferase [Arabidopsis thaliana]
  misc_feature (1)..(489): Homolog of NCBI NO: 15237805 NR Description: serine C-palmitoyltransferase, putative
  misc_feature (1)..(489): Homolog of NCBI NO: 15229023 NR Description: serine C-palmitoyltransferase, putative
MITIPYLTAVSTYFSYGLLFAFGQLRDYSRLIFDWWRTNNLQGYAPICLAHEDFYIRRLYHRIQDCFGRPISSAPDAWIDVVERVSDDNNKTLKRTTKTSRCLNLGSYNYLGFGSFDEYCTPRVIESLKKFSASTCSSRVDAGTTSVHAELEDCVAKYVGQPAAVIFGMGYATNSAIIPVLIGKGGLIISDSLNHTSIVNGARGSGATIRVFQHNTPGHLEKVLKEQIAEGQPRTHRPWKKIIVVVEGIYSMEGEICHLPEIVSICKKYKAYVYLDEAHSIGAIGKTGRGVCELLGVDTSDVDIMMGTFTKSFGSCGGYIAGSKDLIQYLKHQCPAHLYATSISTPSATQIISAIKVILGEDGSNRGAQKLARIRENSNFFRAELQKMGFEVLGDNDSPVMPIMLYNPAKIPAFSRECLRENLAVVVVGFPATPLLLARARICISASHSREDLIKALQVISKAGDLTGIKYFPAAPKKQEVEKNGIKLD

SEQ ID NO: 45846 - protein, 321 aa, Arabidopsis thaliana
  peptide (1)..(321): Ceres Seq. ID no. 13646791
  misc_feature (1)..(293): Pfam Name: Aminotransferase class I and II Pfam Description: Aminotransferase class I and II
  misc_feature (1)..(303): Homolog of NCBI NO: 2137762 NR Description: serine C-palmitoyltransferase (EC 2.3.1.50) Lcb2
  misc_feature (1)..(303): Homolog of NCBI NO: 4758668 NR Description: serine palmitoyltransferase, long chain base
  misc_feature (1)..(317): Homolog of NCBI NO: 15229024 NR Description: serine C-palmitoyltransferase, putative
  misc_feature (1)..(317): Homolog of NCBI NO: 11279408 NR Description: serine C-palmitoyltransferase (EC 2.3.1.50)
  misc_feature (1)..(315): Homolog of NCBI NO: 34907092 NR Description: putative serine palmitoyltransferase
  misc_feature (1)..(321): Homolog of NCBI NO: 27753609 NR Description: serine palmitoyltransferase [Lotus japonicus]
  misc_feature (1)..(321): Homolog of NCBI NO: 4995890 NR Description: serine palmitoyltransferase [Solanum tuberosum]
  misc_feature (1)..(321): Homolog of NCBI NO: 9309380 NR Description: serine palmitoyltransferase [Arabidopsis thaliana]
  misc_feature (1)..(321): Homolog of NCBI NO: 15237805 NR Description: serine C-palmitoyltransferase, putative
  misc_feature (1)..(321): Homolog of NCBI NO: 15229023 NR Description: serine C-palmitoyltransferase, putative
MGYATNSAIIPVLIGKGGLIISDSLNHTSIVNGARGSGATIRVFQHNTPGHLEKVLKEQIAEGQPRTHRPWKKIIVVVEGIYSMEGEICHLPEIVSICKKYKAYVYLDEAHSIGAIGKTGRGVCELLGVDTSDVDIMMGTFTKSFGSCGGYIAGSKDLIQYLKHQCPAHLYATSISTPSATQIISAIKVILGEDGSNRGAQKLARIRENSNFFRAELQKMGFEVLGDNDSPVMPIMLYNPAKIPAFSRECLRENLAVVVVGFPATPLLLARARICISASHSREDLIKALQVISKAGDLTGIKYFPAAPKKQEVEKNGIKLD

SEQ ID NO: 45847 - DNA, 2309 bp, Arabidopsis thaliana
  misc_feature (1)..(2309): Ceres Seq. ID no. 12603870
  misc_feature: MA Experiment ID: 20000171 Result: Up-regulated in Transcription
  misc_feature: MA Experiment 20000171 PARAMETER Experiment Name: At_42deg_Heat_P Parameter: Age (day) Value: 14
  misc_feature: MA Experiment 20000171 PARAMETER Experiment Name: At_42deg_Heat_P Parameter: Organism Value: A. thaliana
  misc_feature: MA Experiment 20000171 PARAMETER Experiment Name: At_42deg_Heat_P Parameter: Plant Line Value: WS
  misc_feature: MA Experiment 20000171 PARAMETER Experiment Name: At_42deg_Heat_P Parameter: Temperature (deg C) Value: 42 vs. 22
  misc_feature: MA Experiment 20000171 PARAMETER Experiment Name: At_42deg_Heat_P Parameter: Timepoint (hr) Value: 1
  misc_feature: MA Experiment 20000171 PARAMETER Experiment Name: At_42deg_Heat_P Parameter: Tissue Value: Aerial
  misc_feature: MA Experiment ID: 20000173 Result: Up-regulated in Transcription
  misc_feature: MA Experiment 20000173 PARAMETER Experiment Name: At_42deg_Heat_P Parameter: Age (day) Value: 14
  misc_feature: MA Experiment 20000173 PARAMETER Experiment Name: At_42deg_Heat_P Parameter: Organism Value: A. thaliana
  misc_feature: MA Experiment 20000173 PARAMETER Experiment Name: At_42deg_Heat_P Parameter: Plant Line Value: WS
  misc_feature: MA Experiment 20000173 PARAMETER Experiment Name: At_42deg_Heat_P Parameter: Temperature (deg C) Value: 42 vs. 22
  misc_feature: MA Experiment 20000173 PARAMETER Experiment Name: At_42deg_Heat_P Parameter: Timepoint (hr) Value: 6
  misc_feature: MA Experiment 20000173 PARAMETER Experiment Name: At_42deg_Heat_P Parameter: Tissue Value: Aerial
  misc_feature: MA Experiment ID: 20000180 Result: Up-regulated in Transcription
  misc_feature: MA Experiment 20000180 PARAMETER Experiment Name: At_Germinating_Seeds_P Parameter: Age (hr) Value: 24 vs. 0
  misc_feature: MA Experiment 20000180 PARAMETER Experiment Name: At_Germinating_Seeds_P Parameter: Tissue Value: Germinating Seeds
  misc_feature: MA Experiment ID: 20000185 Result: Up-regulated in Transcription
  misc_feature: MA Experiment 20000185 PARAMETER Experiment Name: At_Roots__P Parameter: Age (day) Value: 7 vs. 21
  misc_feature: MA Experiment 20000185 PARAMETER Experiment Name: At_Roots__P Parameter: Organism Value: A. thaliana
  misc_feature: MA Experiment 20000185 PARAMETER Experiment Name: At_Roots__P Parameter: Tissue Value: Roots vs. Whole Plant
  misc_feature: MA Experiment ID: 20000227 Result: Up-regulated in Transcription
  misc_feature: MA Experiment 20000227 PARAMETER Experiment Name: At_Root-Tips-vs-Tops_P Parameter: Tissue Value: Root Tips vs. Root Tops
  misc_feature: MA Experiment ID: 20000439 Result: Up-regulated in Transcription
  misc_feature: MA Experiment 20000439 PARAMETER Experiment Name: At_Roots__P Parameter: Age (day) Value: 14 vs. 21
  misc_feature: MA Experiment 20000439 PARAMETER Experiment Name: At_Roots__P Parameter: Organism Value: A. thaliana
  misc_feature: MA Experiment 20000439 PARAMETER Experiment Name: At_Roots__P Parameter: Tissue Value: Roots vs. Whole Plant
  misc_feature: MA Experiment ID: 20000794 Result: Up-regulated in Transcription
  misc_feature: MA Experiment 20000794 PARAMETER Experiment Name: At_Petals_P Parameter: Age (day) Value: 23-25 days
  misc_feature: MA Experiment 20000794 PARAMETER Experiment Name: At_Petals_P Parameter: Plant Line Value: WS
  misc_feature: MA Experiment 20000794 PARAMETER Experiment Name: At_Petals_P Parameter: Tissue Value: Petals vs. Whole plant
  misc_feature: MA Experiment ID: 20001910 Result: Up-regulated in Transcription
  misc_feature: MA Experiment 20001910 PARAMETER Experiment Name: At_Drought_Reproduction_P Parameter: Age (day) Value: 37
  misc_feature: MA Experiment 20001910 PARAMETER Experiment Name: At_Drought_Reproduction_P Parameter: Organism Value: A. thaliana
  misc_feature: MA Experiment 20001910 PARAMETER Experiment Name: At_Drought_Reproduction_P Parameter: Plant Line Value: WS
  misc_feature: MA Experiment 20001910 PARAMETER Experiment Name: At_Drought_Reproduction_P Parameter: Timepoint (day) Value: 7
  misc_feature: MA Experiment 20001910 PARAMETER Experiment Name: At_Drought_Reproduction_P Parameter: Tissue Value: Flowers
  misc_feature: MA Experiment 20001910 PARAMETER Experiment Name: At_Drought_Reproduction_P Parameter: Treatment Value: Drought vs. No Drought
acaattagtatcttcgaagaagaaagaaagaaactctaataatggattattaagaataatcctcacactaatctcctccattcttcccattttttccccatcttaatttcctcaaaaacaccaaaaaaaaaagacaaaaaaaaaaaaacaaaaacagagaaaaaaacagttagatagggttttaaaatttttcccggcgaaaaatggagaaatctggaaatcaccatcacgcaaatgaatcatcggaaaatcatgatcacaaatctgaagatcacgagaataaacaacattccgatgaactgcattcatcgacgccggaatcacaatcggaatcctccgaacatagcctcgtcgaggtgatggaagccgtcgtcgatttcattcaaacactttcttccgagaaagatccgttaggagagatctcaccagcggtggagtcattcccggaggcggtggattcattggtgtcaaaaatggaatcttccgggcttgggcgggacgaaacagaggactctgtattcatcgacgccgttaaccggatttcgaaatcggttatgagattgagagagcttaaattagattcaacaccggtttcttcttggttaaaccgggcgagttcggttcaacaccgtgctgtttctcttctcgacgaagagtttcgtcatcttctagatcgttccagagaggaggagaagaagaacaacaacaacaacaaccaccacgacgggagcaattccgatcacaacaattcttcaacaaatgattcagatcgatgcgttttacaagaccatgaggaggcagaggaagaaagtttccatgatttttcaccggaatcgatctcgacgttgaaaaagatcgccggagcgatgatctccgccggttacgaagcagagtgttgtatgtcatacgaaatgtcgagacggcacgcgttcaaggaagagctaaccgaggttggattcgaagggatcaacgttgaagacgtgcagagaataggttgggaatctctcgaaggtgaaatcgcttcgtggatctcaatcgttcgccgttgctccaccgtgcttttccccggcgagctttctctctgtaacgccgtctttccggatcaagatcattcctctgtccgtaaacgtcttttcaccggtttggtctccgctgttacaatccggtttcttgatttctccggtgcggtggtgctgacgaaacggtcgtcggagaagcttttcaagttcttagacatgtacgagacgcttcgtgatttgattcctgcggtggaacaatctgattcagatttgatccaggagattaaactggctcagacgcggctaggagaagcagcagtgacgatattcggagagctagagaagtcgataaagagcgataatggacgaactccggtaccgagcggcgcagttcatccattaacacgttacaccatgaactacctcaaatacgcttgtgagtataaagaaacattagaccaagtgttccaacactatgaagcgaatcaaacagataacaaacctgaaccagagaccaaacctaggcagcagcaacgagaagacgatgaagagtacaaagtttcagctttcgctagacaaatgataagggtgatggaattgcttgacgcaaatcttgagatcaaatcgagactgtacagagacccatcactgagatttatattcttgatgaataatggaagatacattttgcagaagattaaagggtctatcgagataagggatttgatgggacagtcatggacgaggaagagatctacggagctgagacagtatcataagagttaccagagagagacttgggggaaagtgttacagtgtatgaatcaagaagggttacaggtgaacgggaaggtgtcgaagccggttttgaaggagaggtttaagattttcaatgctatgttcgatgagattcacaagacgcagagcacttggattgtgagtgatgagcagatgcaatcggagctaagggtgtcgatttcgtcgttggtgattccggcttatcggtctttctttgggaggtataagcaacatcttgattcagggaaacagacggataagtatgttaagtatcagcctgaggatattgaatctttcattgatgacttgtttgatggcaacccaacttctatggcacgcaagagataactccgtgtctcataagctatgaggagaaaaaaaaaccctacttgttccttctgcttctttttttttacctcaaaacttctatcgttatctttcattaccttcttgtttatagaacccatgagaagctaccgtgaaaacttctga

SEQ ID NO: 45848 - protein, 653 aa, Arabidopsis thaliana
  peptide (1)..(653): Ceres Seq. ID no. 12603871
  misc_feature (51)..(643): Pfam Name: Exo70 exocyst complex subunit Pfam Description: Exo70 exocyst complex subunit
  misc_feature (40)..(645): Homolog of NCBI NO: 30695880 NR Description: exocyst subunit EXO70 family [Arabidopsis
  misc_feature (40)..(645): Homolog of NCBI NO: 9758920 NR Description: gb|AAD25781.1~gene_id:MXI22.10~strong similarity
  misc_feature (31)..(653): Homolog of NCBI NO: 15218495 NR Description: unknown protein; protein id: At1g72470.1
  misc_feature (208)..(647): Homolog of NCBI NO: 30682979 NR Description: exocyst subunit EXO70 family [Arabidopsis
  misc_feature (208)..(647): Homolog of NCBI NO: 23270388 NR Description: unknown protein [Arabidopsis thaliana]
  misc_feature (36)..(653): Homolog of NCBI NO: 15221040 NR Description: hypothetical protein
  misc_feature (99)..(648): Homolog of NCBI NO: 100226 NR Description: tomato leucine zipper-containing protein - tomato
  misc_feature (465)..(647): Homolog of NCBI NO: 15237198 NR Description: leucine zipper-containing protein
  misc_feature (21)..(439): Homolog of NCBI NO: 15237198 NR Description: leucine zipper-containing protein
  misc_feature (7)..(653): Homolog of NCBI NO: 15240761 NR Description: leucine zipper protein-like; protein id:
MEKSGNHHHANESSENHDHKSEDHENKQHSDELHSSTPESQSESSEHSLVEVMEAVVDFIQTLSSEKDPLGEISPAVESFPEAVDSLVSKMESSGLGRDETEDSVFIDAVNRISKSVMRLRELKLDSTPVSSWLNRASSVQHRAVSLLDEEFRHLLDRSREEEKKNNNNNNHHDGSNSDHNNSSTNDSDRCVLQDHEEAEEESFHDFSPESISTLKKIAGAMISAGYEAECCMSYEMSRRHAFKEELTEVGFEGINVEDVQRIGWESLEGEIASWISIVRRCSTVLFPGELSLCNAVFPDQDHSSVRKRLFTGLVSAVTIRFLDFSGAVVLTKRSSEKLFKFLDMYETLRDLIPAVEQSDSDLIQEIKLAQTRLGEAAVTIFGELEKSIKSDNGRTPVPSGAVHPLTRYTMNYLKYACEYKETLDQVFQHYEANQTDNKPEPETKPRQQQREDDEEYKVSAFARQMIRVMELLDANLEIKSRLYRDPSLRFIFLMNNGRYILQKIKGSIEIRDLMGQSWTRKRSTELRQYHKSYQRETWGKVLQCMNQEGLQVNGKVSKPVLKERFKIFNAMFDEIHKTQSTWIVSDEQMQSELRVSISSLVIPAYRSFFGRYKQHLDSGKQTDKYVKYQPEDIESFIDDLFDGNPTSMARKR

SEQ ID NO: 45849 - protein, 601 aa, Arabidopsis thaliana
  peptide (1)..(601): Ceres Seq. ID no. 12603872
  misc_feature (1)..(591): Pfam Name: Exo70 exocyst complex subunit Pfam Description: Exo70 exocyst complex subunit
  misc_feature (1)..(593): Homolog of NCBI NO: 30695880 NR Description: exocyst subunit EXO70 family [Arabidopsis
  misc_feature (1)..(593): Homolog of NCBI NO: 9758920 NR Description: gb|AAD25781.1~gene_id:MXI22.10~strong similarity
  misc_feature (1)..(601): Homolog of NCBI NO: 15218495 NR Description: unknown protein; protein id: At1g72470.1
  misc_feature (156)..(595): Homolog of NCBI NO: 30682979 NR Description: exocyst subunit EXO70 family [Arabidopsis
  misc_feature (156)..(595): Homolog of NCBI NO: 23270388 NR Description: unknown protein [Arabidopsis thaliana]
  misc_feature (1)..(601): Homolog of NCBI NO: 15221040 NR Description: hypothetical protein
  misc_feature (47)..(596): Homolog of NCBI NO: 100226 NR Description: tomato leucine zipper-containing protein - tomato
  misc_feature (413)..(595): Homolog of NCBI NO: 15237198 NR Description: leucine zipper-containing protein
  misc_feature (1)..(387): Homolog of NCBI NO: 15237198 NR Description: leucine zipper-containing protein
  misc_feature (1)..(601): Homolog of NCBI NO: 15240761 NR Description: leucine zipper protein-like; protein id:
MEAVVDFIQTLSSEKDPLGEISPAVESFPEAVDSLVSKMESSGLGRDETEDSVFIDAVNRISKSVMRLRELKLDSTPVSSWLNRASSVQHRAVSLLDEEFRHLLDRSREEEKKNNNNNNHHDGSNSDHNNSSTNDSDRCVLQDHEEAEEESFHDFSPESISTLKKIAGAMISAGYEAECCMSYEMSRRHAFKEELTEVGFEGINVEDVQRIGWESLEGEIASWISIVRRCSTVLFPGELSLCNAVFPDQDHSSVRKRLFTGLVSAVTIRFLDFSGAVVLTKRSSEKLFKFLDMYETLRDLIPAVEQSDSDLIQEIKLAQTRLGEAAVTIFGELEKSIKSDNGRTPVPSGAVHPLTRYTMNYLKYACEYKETLDQVFQHYEANQTDNKPEPETKPRQQQREDDEEYKVSAFARQMIRVMELLDANLEIKSRLYRDPSLRFIFLMNNGRYILQKIKGSIEIRDLMGQSWTRKRSTELRQYHKSYQRETWGKVLQCMNQEGLQVNGKVSKPVLKERFKIFNAMFDEIHKTQSTWIVSDEQMQSELRVSISSLVIPAYRSFFGRYKQHLDSGKQTDKYVKYQPEDIESFIDDLFDGNPTSMARKR

SEQ ID NO: 45850 - protein, 563 aa, Arabidopsis thaliana
  peptide (1)..(563): Ceres Seq. ID no. 12603873
  misc_feature (1)..(553): Pfam Name: Exo70 exocyst complex subunit Pfam Description: Exo70 exocyst complex subunit
  misc_feature (1)..(555): Homolog of NCBI NO: 30695880 NR Description: exocyst subunit EXO70 family [Arabidopsis
  misc_feature (1)..(555): Homolog of NCBI NO: 9758920 NR Description: gb|AAD25781.1~gene_id:MXI22.10~strong similarity
  misc_feature (1)..(563): Homolog of NCBI NO: 15218495 NR Description: unknown protein; protein id: At1g72470.1
  misc_feature (118)..(557): Homolog of NCBI NO: 30682979 NR Description: exocyst subunit EXO70 family [Arabidopsis
  misc_feature (118)..(557): Homolog of NCBI NO: 23270388 NR Description: unknown protein [Arabidopsis thaliana]
  misc_feature (1)..(563): Homolog of NCBI NO: 15221040 NR Description: hypothetical protein
  misc_feature (9)..(558): Homolog of NCBI NO: 100226 NR Description: tomato leucine zipper-containing protein - tomato
  misc_feature (375)..(557): Homolog of NCBI NO: 15237198 NR Description: leucine zipper-containing protein
  misc_feature (1)..(349): Homolog of NCBI NO: 15237198 NR Description: leucine zipper-containing protein
  misc_feature (1)..(563): Homolog of NCBI NO: 15240761 NR Description: leucine zipper protein-like; protein id:
MESSGLGRDETEDSVFIDAVNRISKSVMRLRELKLDSTPVSSWLNRASSVQHRAVSLLDEEFRHLLDRSREEEKKNNNNNNHHDGSNSDHNNSSTNDSDRCVLQDHEEAEEESFHDFSPESISTLKKIAGAMISAGYEAECCMSYEMSRRHAFKEELTEVGFEGINVEDVQRIGWESLEGEIASWISIVRRCSTVLFPGELSLCNAVFPDQDHSSVRKRLFTGLVSAVTIRFLDFSGAVVLTKRSSEKLFKFLDMYETLRDLIPAVEQSDSDLIQEIKLAQTRLGEAAVTIFGELEKSIKSDNGRTPVPSGAVHPLTRYTMNYLKYACEYKETLDQVFQHYEANQTDNKPEPETKPRQQQREDDEEYKVSAFARQMIRVMELLDANLEIKSRLYRDPSLRFIFLMNNGRYILQKIKGSIEIRDLMGQSWTRKRSTELRQYHKSYQRETWGKVLQCMNQEGLQVNGKVSKPVLKERFKIFNAMFDEIHKTQSTWIVSDEQMQSELRVSISSLVIPAYRSFFGRYKQHLDSGKQTDKYVKYQPEDIESFIDDLFDGNPTSMARKR

SEQ ID NO: 45851 - DNA, 1018 bp, Arabidopsis thaliana
  misc_feature (1)..(1018): Ceres Seq. ID no. 13576188
  misc_feature: MA Experiment ID: 108462 Result: Up-regulated in Transcription
  misc_feature: MA Experiment 108462 PARAMETER Experiment Name: At_Germinating_Seeds_cDNA_P Parameter: Age (day) Value: 2 vs. 0
  misc_feature: MA Experiment 108462 PARAMETER Experiment Name: At_Germinating_Seeds_cDNA_P Parameter: Tissue Value: Germinating Seeds
  misc_feature: MA Experiment ID: 108573 Result: Down-regulated in Transcription
  misc_feature: MA Experiment 108573 PARAMETER Experiment Name: At_Drought_cDNA_P Parameter: Timepoint (hr) Value: 6
  misc_feature: MA Experiment 108573 PARAMETER Experiment Name: At_Drought_cDNA_P Parameter: Tissue Value: Aerial
  misc_feature: MA Experiment 108573 PARAMETER Experiment Name: At_Drought_cDNA_P Parameter: Treatment Value: Drought vs. No Drought
  misc_feature: MA Experiment ID: 108595 Result: Down-regulated in Transcription
  misc_feature: MA Experiment 108595 PARAMETER Experiment Name: At_Ler-pi_Ovule_cDNA_P Parameter: Plant Line Value: null
  misc_feature: MA Experiment ID: 20000069 Result: Down-regulated in Transcription
  misc_feature: MA Experiment 20000069 PARAMETER Experiment Name: At_100uM_ABA_Mutants_cDNA_P Parameter: Plant Line Value: CS23
  misc_feature: MA Experiment 20000069 PARAMETER Experiment Name: At_100uM_ABA_Mutants_cDNA_P Parameter: Timepoint (hr) Value: 6
  misc_feature: MA Experiment 20000069 PARAMETER Experiment Name: At_100uM_ABA_Mutants_cDNA_P Parameter: Tissue Value: Aerial
  misc_feature: MA Experiment 20000069 PARAMETER Experiment Name: At_100uM_ABA_Mutants_cDNA_P Parameter: Treatment Value: 100uM ABA vs. No Treatment
  misc_feature: MA Experiment ID: 20000070 Result: Down-regulated in Transcription
  misc_feature: MA Experiment 20000070 PARAMETER Experiment Name: At_100uM_ABA_Mutants_cDNA_P Parameter: Plant Line Value: CS24
  misc_feature: MA Experiment 20000070 PARAMETER Experiment Name: At_100uM_ABA_Mutants_cDNA_P Parameter: Timepoint (hr) Value: 6
  misc_feature: MA Experiment 20000070 PARAMETER Experiment Name: At_100uM_ABA_Mutants_cDNA_P Parameter: Tissue Value: Aerial
  misc_feature: MA Experiment 20000070 PARAMETER Experiment Name: At_100uM_ABA_Mutants_cDNA_P Parameter: Treatment Value: 100uM ABA vs. No Treatment
  misc_feature: MA Experiment ID: 20000071 Result: Down-regulated in Transcription
  misc_feature: MA Experiment 20000071 PARAMETER Experiment Name: At_100uM_ABA_Mutants_cDNA_P Parameter: Plant Line Value: CS8104
  misc_feature: MA Experiment 20000071 PARAMETER Experiment Name: At_100uM_ABA_Mutants_cDNA_P Parameter: Timepoint (hr) Value: 6
  misc_feature: MA Experiment 20000071 PARAMETER Experiment Name: At_100uM_ABA_Mutants_cDNA_P Parameter: Tissue Value: Aerial
  misc_feature: MA Experiment 20000071 PARAMETER Experiment Name: At_100uM_ABA_Mutants_cDNA_P Parameter: Treatment Value: 100uM ABA vs. No Treatment
  misc_feature: MA Experiment ID: 20000086 Result: Down-regulated in Transcription
  misc_feature: MA Experiment 20000086 PARAMETER Experiment Name: At_100uM_ABA_Mutants_cDNA_P Parameter: Plant Line Value: CS22
  misc_feature: MA Experiment 20000086 PARAMETER Experiment Name: At_100uM_ABA_Mutants_cDNA_P Parameter: Timepoint (hr) Value: 6
  misc_feature: MA Experiment 20000086 PARAMETER Experiment Name: At_100uM_ABA_Mutants_cDNA_P Parameter: Tissue Value: Aerial
  misc_feature: MA Experiment 20000086 PARAMETER Experiment Name: At_100uM_ABA_Mutants_cDNA_P Parameter: Treatment Value: 100uM ABA vs. No Treatment
  misc_feature: MA Experiment ID: 20000088 Result: Down-regulated in Transcription
  misc_feature: MA Experiment 20000088 PARAMETER Experiment Name: At_100uM_ABA_Mutants_cDNA_P Parameter: Plant Line Value: Landsberg
  misc_feature: MA Experiment 20000088 PARAMETER Experiment Name: At_100uM_ABA_Mutants_cDNA_P Parameter: Timepoint (hr) Value: 6
  misc_feature: MA Experiment 20000088 PARAMETER Experiment Name: At_100uM_ABA_Mutants_cDNA_P Parameter: Tissue Value: Aerial
  misc_feature: MA Experiment 20000088 PARAMETER Experiment Name: At_100uM_ABA_Mutants_cDNA_P Parameter: Treatment Value: 100uM ABA vs. No Treatment
  misc_feature: MA Experiment ID: 20000089 Result: Down-regulated in Transcription
  misc_feature: MA Experiment ID: 20000090 Result: Down-regulated in Transcription
  misc_feature: MA Experiment ID: 20000117 Result: Down-regulated in Transcription
  misc_feature: MA Experiment 20000117 PARAMETER Experiment Name: At_100uM_ABA_Mutants_cDNA_P Parameter: Plant Line Value: Columbia
  misc_feature: MA Experiment 20000117 PARAMETER Experiment Name: At_100uM_ABA_Mutants_cDNA_P Parameter: Timepoint (hr) Value: 6
  misc_feature: MA Experiment 20000117 PARAMETER Experiment Name: At_100uM_ABA_Mutants_cDNA_P Parameter: Tissue Value: Aerial
  misc_feature: MA Experiment 20000117 PARAMETER Experiment Name: At_100uM_ABA_Mutants_cDNA_P Parameter: Treatment Value: 100uM ABA vs. No Treatment
  misc_feature: MA Experiment ID: 20000180 Result: Up-regulated in Transcription
  misc_feature: MA Experiment 20000180 PARAMETER Experiment Name: At_Germinating_Seeds_P Parameter: Age (hr) Value: 24 vs. 0
  misc_feature: MA Experiment 20000180 PARAMETER Experiment Name: At_Germinating_Seeds_P Parameter: Tissue Value: Germinating Seeds
  misc_feature: MA Experiment ID: 20000184 Result: Up-regulated in Transcription
  misc_feature: MA Experiment 20000184 PARAMETER Experiment Name: At_Shoots__P Parameter: Age (day) Value: 7
  misc_feature: MA Experiment 20000184 PARAMETER Experiment Name: At_Shoots__P Parameter: Tissue Value: Shoots vs. Whole Plant
  misc_feature: MA Experiment ID: 20000185 Result: Down-regulated in Transcription
  misc_feature: MA Experiment 20000185 PARAMETER Experiment Name: At_Roots__P Parameter: Age (day) Value: 7 vs. 21
  misc_feature: MA Experiment 20000185 PARAMETER Experiment Name: At_Roots__P Parameter: Organism Value: A. thaliana
  misc_feature: MA Experiment 20000185 PARAMETER Experiment Name: At_Roots__P Parameter: Tissue Value: Roots vs. Whole Plant
  misc_feature: MA Experiment ID: 20000224 Result: Up-regulated in Transcription
  misc_feature: MA Experiment ID: 20000286 Result: Down-regulated in Transcription
  misc_feature: MA Experiment 20000286 PARAMETER Experiment Name: At_Open_Flower_P Parameter: Age (day) Value: 21
  misc_feature: MA Experiment 20000286 PARAMETER Experiment Name: At_Open_Flower_P Parameter: Plant Line Value: WS
  misc_feature: MA Experiment 20000286 PARAMETER Experiment Name: At_Open_Flower_P Parameter: Tissue Value: Half Open vs. Whole Plant
  misc_feature: MA Experiment ID: 20000438 Result: Up-regulated in Transcription
  misc_feature: MA Experiment 20000438 PARAMETER Experiment Name: At_Shoots__P Parameter: Age (day) Value: 14
  misc_feature: MA Experiment 20000438 PARAMETER Experiment Name: At_Shoots__P Parameter: Tissue Value: Shoots vs. Whole Plant
  misc_feature: MA Experiment ID: 20000439 Result: Down-regulated in Transcription
  misc_feature: MA Experiment 20000439 PARAMETER Experiment Name: At_Roots__P Parameter: Age (day) Value: 14 vs. 21
  misc_feature: MA Experiment 20000439 PARAMETER Experiment Name: At_Roots__P Parameter: Organism Value: A. thaliana
  misc_feature: MA Experiment 20000439 PARAMETER Experiment Name: At_Roots__P Parameter: Tissue Value: Roots vs. Whole Plant
  misc_feature: MA Experiment ID: 20000573 Result: Down-regulated in Transcription
  misc_feature: MA Experiment 20000573 PARAMETER Experiment Name: At_100uM_ABA_Mutants__P Parameter: Organism Value: A. thaliana
  misc_feature: MA Experiment 20000573 PARAMETER Experiment Name: At_100uM_ABA_Mutants__P Parameter: Plant Line Value: CS22 vs. Ler wt
  misc_feature: MA Experiment 20000573 PARAMETER Experiment Name: At_100uM_ABA_Mutants__P Parameter: Timepoint (hr) Value: N/A
  misc_feature: MA Experiment 20000573 PARAMETER Experiment Name: At_100uM_ABA_Mutants__P Parameter: Tissue Value: Whole Plant
  misc_feature: MA Experiment 20000573 PARAMETER Experiment Name: At_100uM_ABA_Mutants__P Parameter: Treatment Value: None
  misc_feature: MA Experiment ID: 20000794 Result: Down-regulated in Transcription
  misc_feature: MA Experiment 20000794 PARAMETER Experiment Name: At_Petals_P Parameter: Age (day) Value: 23-25 days
  misc_feature: MA Experiment 20000794 PARAMETER Experiment Name: At_Petals_P Parameter: Plant Line Value: WS
  misc_feature: MA Experiment 20000794 PARAMETER Experiment Name: At_Petals_P Parameter: Tissue Value: Petals vs. Whole plant
  misc_feature: MA Experiment ID: 20001248 Result: Down-regulated in Transcription
  misc_feature: MA Experiment 20001248 PARAMETER Experiment Name: At_Far-red-induction_P Parameter: Age (day) Value: 7
  misc_feature: MA Experiment 20001248 PARAMETER Experiment Name: At_Far-red-induction_P Parameter: Light Value: Far-red vs. White
  misc_feature: MA Experiment 20001248 PARAMETER Experiment Name: At_Far-red-induction_P Parameter: Organism Value: A. thaliana
  misc_feature: MA Experiment 20001248 PARAMETER Experiment Name: At_Far-red-induction_P Parameter: Plant Line Value: Columbia
  misc_feature: MA Experiment 20001248 PARAMETER Experiment Name: At_Far-red-induction_P Parameter: Timepoint (hr) Value: 4
  misc_feature: MA Experiment 20001248 PARAMETER Experiment Name: At_Far-red-induction_P Parameter: Tissue Value: Whole Plant
  misc_feature: MA Experiment ID: 20001757 Result: Up-regulated in Transcription
  misc_feature: MA Experiment 20001757 PARAMETER Experiment Name: At_50mM_NH4NO3_L-to-H_P Parameter: Timepoint (hr) Value: 6
  misc_feature: MA Experiment 20001757 PARAMETER Experiment Name: At_50mM_NH4NO3_L-to-H_P Parameter: Tissue Value: Leaf
  misc_feature: MA Experiment 20001757 PARAMETER Experiment Name: At_50mM_NH4NO3_L-to-H_P Parameter: Treatment Value: 50mM NH4NO3 vs 100mM Mannitol
  misc_feature: MA Experiment ID: 20001904 Result: Down-regulated in Transcription
  misc_feature: MA Experiment 20001904 PARAMETER Experiment Name: At_Drought_Reproduction_P Parameter: Age (day) Value: 37
  misc_feature: MA Experiment 20001904 PARAMETER Experiment Name: At_Drought_Reproduction_P Parameter: Organism Value: A. thaliana
  misc_feature: MA Experiment 20001904 PARAMETER Experiment Name: At_Drought_Reproduction_P Parameter: Plant Line Value: WS
  misc_feature: MA Experiment 20001904 PARAMETER Experiment Name: At_Drought_Reproduction_P Parameter: Timepoint (day) Value: 7
  misc_feature: MA Experiment 20001904 PARAMETER Experiment Name: At_Drought_Reproduction_P Parameter: Tissue Value: Rosettes
  misc_feature: MA Experiment 20001904 PARAMETER Experiment Name: At_Drought_Reproduction_P Parameter: Treatment Value: Drought vs. No Drought
  misc_feature: MA Experiment ID: 20001905 Result: Down-regulated in Transcription
  misc_feature: MA Experiment 20001905 PARAMETER Experiment Name: At_Drought_Reproduction_P Parameter: Age (day) Value: 40
  misc_feature: MA Experiment 20001905 PARAMETER Experiment Name: At_Drought_Reproduction_P Parameter: Organism Value: A. thaliana
  misc_feature: MA Experiment 20001905 PARAMETER Experiment Name: At_Drought_Reproduction_P Parameter: Plant Line Value: WS
  misc_feature: MA Experiment 20001905 PARAMETER Experiment Name: At_Drought_Reproduction_P Parameter: Timepoint (day) Value: 10
  misc_feature: MA Experiment 20001905 PARAMETER Experiment Name: At_Drought_Reproduction_P Parameter: Tissue Value: Rosettes
  misc_feature: MA Experiment 20001905 PARAMETER Experiment Name: At_Drought_Reproduction_P Parameter: Treatment Value: Drought vs. No Drought
  misc_feature: MA Experiment ID: 20001906 Result: Down-regulated in Transcription
  misc_feature: MA Experiment 20001906 PARAMETER Experiment Name: At_Drought_Reproduction_P Parameter: Age (day) Value: 35
  misc_feature: MA Experiment 20001906 PARAMETER Experiment Name: At_Drought_Reproduction_P Parameter: Organism Value: A. thaliana
  misc_feature: MA Experiment 20001906 PARAMETER Experiment Name: At_Drought_Reproduction_P Parameter: Plant Line Value: WS
  misc_feature: MA Experiment 20001906 PARAMETER Experiment Name: At_Drought_Reproduction_P Parameter: Timepoint (day) Value: 5
  misc_feature: MA Experiment 20001906 PARAMETER Experiment Name: At_Drought_Reproduction_P Parameter: Tissue Value: Siliques
  misc_feature: MA Experiment 20001906 PARAMETER Experiment Name: At_Drought_Reproduction_P Parameter: Treatment Value: Drought vs. No Drought
gaacttcactctctatcttcccctgacgtgactcttctctctcttcctctccatcaatggcgaccacaaactctctccaccaccaccaccactcctctccttcttacacacaccaccgcaacaatctccattgccaatctcacttcggaccaacttctctttccctcaaacaacccacttccgccgcaacattctcactaatctgctctgcttcttccacctcctcctccaccaccgccgtatctgccgtttcaaccacaaacgcctccgccacaactgccgaaaccgcgaccatattcgacgttctggagaaccatctcgtcaatcaaaacttcagacaagccgacgaggagacacggagattactcattcagatatccggagaagccgccgtgaaacgtggctacgttttcttctccgaggtgaaaacaatctcccccgaagatcttcaagctatcgacaatctatggattaaacacagtgatggtagattcggatacagcgtgcaacgcaaaatctggttaaaagtgaagaaagatttcacaagattcttcgttaaagttgagtggatgaagcttcttgacacagaggttgttcaatacaattacagagcgtttcctgacgaattcaagtgggagcttaacgatgaaacgcctttaggacacttaccgctcacaaacgccttgagaggaacgcagcttctgaaatgcgttttaagccatcctgcgtttgcgacagctgatgataacagtggagaaacagaagacgagcttaacagaggtgttgcggtggctaaggaacaggcaggagtaggagcagacaaaagagtgtttaaaacaaattacagcttctgatgtctttctccttcttttttttttttttttaatattgattttctgatattgtgaaagtataaacaaatctctgtaatcatatcattaattaaatcggatttctcttcaatgtcagttccattgtgattatggatgtatgaacaaagccagatcattagttaatg

SEQ ID NO: 45852 - protein, 265 aa, Arabidopsis thaliana
  peptide (1)..(265): Ceres Seq. ID no. 13576189
  misc_feature (100)..(226): Homolog of NCBI NO: 23042867 NR Description: hypothetical protein [Trichodesmium erythraeum
  misc_feature (104)..(226): Homolog of NCBI NO: 23126475 NR Description: hypothetical protein [Nostoc punctiforme]
  misc_feature (88)..(225): Homolog of NCBI NO: 11465668 NR Description: ORF238 [Porphyra purpurea]
  misc_feature (81)..(225): Homolog of NCBI NO: 22299137 NR Description: ORF_ID:tlr1594~hypothetical protein
  misc_feature (73)..(231): Homolog of NCBI NO: 33861481 NR Description: conserved hypothetical protein
  misc_feature (81)..(226): Homolog of NCBI NO: 17229318 NR Description: hypothetical protein [Nostoc sp. PCC 7120]
  misc_feature (84)..(226): Homolog of NCBI NO: 23042866 NR Description: hypothetical protein [Trichodesmium erythraeum
  misc_feature (1)..(265): Homolog of NCBI NO: 17380924 NR Description: unknown protein [Arabidopsis thaliana]
  misc_feature (1)..(265): Homolog of NCBI NO: 32816239 NR Description: GUN4 mutant [Arabidopsis thaliana]
  misc_feature (1)..(265): Homolog of NCBI NO: 15231674 NR Description: expressed protein [Arabidopsis thaliana]
MATTNSLHHHHHSSPSYTHHRNNLHCQSHFGPTSLSLKQPTSAATFSLICSASSTSSSTTAVSAVSTTNASATTAETATIFDVLENHLVNQNFRQADEETRRLLIQISGEAAVKRGYVFFSEVKTISPEDLQAIDNLWIKHSDGRFGYSVQRKIWLKVKKDFTRFFVKVEWMKLLDTEVVQYNYRAFPDEFKWELNDETPLGHLPLTNALRGTQLLKCVLSHPAFATADDNSGETEDELNRGVAVAKEQAGVGADKRVFKTNYSF

SEQ ID NO: 45853 - DNA, 2745 bp, Arabidopsis thaliana; identical to SEQ ID NO: 45606
  misc_feature (1)..(2745): Ceres Seq. ID no. 13591675
  misc_feature: MA Experiment ID: 20000185 Result: Down-regulated in Transcription
  misc_feature: MA Experiment 20000185 PARAMETER Experiment Name: At_Roots__P Parameter: Age (day) Value: 7 vs. 21
  misc_feature: MA Experiment 20000185 PARAMETER Experiment Name: At_Roots__P Parameter: Organism Value: A. thaliana
  misc_feature: MA Experiment 20000185 PARAMETER Experiment Name: At_Roots__P Parameter: Tissue Value: Roots vs. Whole Plant
  misc_feature: MA Experiment ID: 20000234 Result: Down-regulated in Transcription
  misc_feature: MA Experiment 20000234 PARAMETER Experiment Name: At_Siliques_P Parameter: Age (day) Value: 21
  misc_feature: MA Experiment 20000234 PARAMETER Experiment Name: At_Siliques_P Parameter: Organism Value: A. thaliana
  misc_feature: MA Experiment 20000234 PARAMETER Experiment Name: At_Siliques_P Parameter: Plant Line Value: WS
  misc_feature: MA Experiment 20000234 PARAMETER Experiment Name: At_Siliques_P Parameter: Tissue Value: Less Than 5mm Siliques vs. Whole Plant
  misc_feature: MA Experiment ID: 20000286 Result: Down-regulated in Transcription
  misc_feature: MA Experiment 20000286 PARAMETER Experiment Name: At_Open_Flower_P Parameter: Age (day) Value: 21
  misc_feature: MA Experiment 20000286 PARAMETER Experiment Name: At_Open_Flower_P Parameter: Plant Line Value: WS
  misc_feature: MA Experiment 20000286 PARAMETER Experiment Name: At_Open_Flower_P Parameter: Tissue Value: Half Open vs. Whole Plant
  misc_feature: MA Experiment ID: 20000445 Result: Down-regulated in Transcription
  misc_feature: MA Experiment 20000445 PARAMETER Experiment Name: At_100uM_NAA__P Parameter: Age (day) Value: 14
  misc_feature: MA Experiment 20000445 PARAMETER Experiment Name: At_100uM_NAA__P Parameter: Organism Value: A. thaliana
  misc_feature: MA Experiment 20000445 PARAMETER Experiment Name: At_100uM_NAA__P Parameter: Plant Line Value: WS
  misc_feature: MA Experiment 20000445 PARAMETER Experiment Name: At_100uM_NAA__P Parameter: Timepoint (hr) Value: 6
  misc_feature: MA Experiment 20000445 PARAMETER Experiment Name: At_100uM_NAA__P Parameter: Tissue Value: Aerial
  misc_feature: MA Experiment 20000445 PARAMETER Experiment Name: At_100uM_NAA__P Parameter: Treatment Value: 100uM NAA vs. No Treatment
  misc_feature: MA Experiment ID: 20000496 Result: Up-regulated in Transcription
  misc_feature: MA Experiment 20000496 PARAMETER Experiment Name: At_Guard_Cells_P Parameter: Harvest Date Value: 7/19/2002
  misc_feature: MA Experiment 20000496 PARAMETER Experiment Name: At_Guard_Cells_P Parameter: Organism Value: Canola
  misc_feature: MA Experiment 20000496 PARAMETER Experiment Name: At_Guard_Cells_P Parameter: Tissue Value: Guard Cells vs. Leaves
  misc_feature: MA Experiment ID: 20000709 Result: Down-regulated in Transcription
  misc_feature: MA Experiment 20000709 PARAMETER Experiment Name: At_15mM_NH4NO3_L-to-H_P Parameter: Age (hr) Value: 14
  misc_feature: MA Experiment 20000709 PARAMETER Experiment Name: At_15mM_NH4NO3_L-to-H_P Parameter: Organism Value: A. thaliana
  misc_feature: MA Experiment 20000709 PARAMETER Experiment Name: At_15mM_NH4NO3_L-to-H_P Parameter: Plant Line Value: WS
  misc_feature: MA Experiment 20000709 PARAMETER Experiment Name: At_15mM_NH4NO3_L-to-H_P Parameter: Timepoint (hr) Value: 4
  misc_feature: MA Experiment 20000709 PARAMETER Experiment Name: At_15mM_NH4NO3_L-to-H_P Parameter: Tissue Value: Aerial
  misc_feature: MA Experiment 20000709 PARAMETER Experiment Name: At_15mM_NH4NO3_L-to-H_P Parameter: Treatment Value: 15mM NH4NO3 vs. 30mM Mannitol
  misc_feature: MA Experiment ID: 20001451 Result: Up-regulated in Transcription
  misc_feature: MA Experiment 20001451 PARAMETER Experiment Name: At_Far-red-induction_P Parameter: Age (day) Value: 7
  misc_feature: MA Experiment 20001451 PARAMETER Experiment Name: At_Far-red-induction_P Parameter: Light Value: Far-red vs. White
  misc_feature: MA Experiment 20001451 PARAMETER Experiment Name: At_Far-red-induction_P Parameter: Organism Value: A. thaliana
  misc_feature: MA Experiment 20001451 PARAMETER Experiment Name: At_Far-red-induction_P Parameter: Plant Line Value: Columbia
  misc_feature: MA Experiment 20001451 PARAMETER Experiment Name: At_Far-red-induction_P Parameter: Timepoint (hr) Value: 24
  misc_feature: MA Experiment 20001451 PARAMETER Experiment Name: At_Far-red-induction_P Parameter: Tissue Value: Whole Plant
  misc_feature: MA Experiment ID: 20001557 Result: Up-regulated in Transcription
  misc_feature: MA Experiment 20001557 PARAMETER Experiment Name: At_Drought_Soil_Dry_P Parameter: Age (day) Value: 27
  misc_feature: MA Experiment 20001557 PARAMETER Experiment Name: At_Drought_Soil_Dry_P Parameter: Organism Value: A. thaliana
  misc_feature: MA Experiment 20001557 PARAMETER Experiment Name: At_Drought_Soil_Dry_P Parameter: Plant Line Value: WS
  misc_feature: MA Experiment 20001557 PARAMETER Experiment Name: At_Drought_Soil_Dry_P Parameter: Post Timepoint (hr) Value: 3
  misc_feature: MA Experiment 20001557 PARAMETER Experiment Name: At_Drought_Soil_Dry_P Parameter: Post-Treatment Value: Re-Water vs. No Drought
  misc_feature: MA Experiment 20001557 PARAMETER Experiment Name: At_Drought_Soil_Dry_P Parameter: Timepoint (day) Value: 13
  misc_feature: MA Experiment 20001557 PARAMETER Experiment Name: At_Drought_Soil_Dry_P Parameter: Treatment Value: Drought vs. No Drought
  misc_feature: MA Experiment ID: 20001756 Result: Down-regulated in Transcription
  misc_feature: MA Experiment 20001756 PARAMETER Experiment Name: At_50mM_NH4NO3_L-to-H_P Parameter: Timepoint (hr) Value: 4
  misc_feature: MA Experiment 20001756 PARAMETER Experiment Name: At_50mM_NH4NO3_L-to-H_P Parameter: Tissue Value: Leaf
  misc_feature: MA Experiment 20001756 PARAMETER Experiment Name: At_50mM_NH4NO3_L-to-H_P Parameter: Treatment Value: 50mM NH4NO3 vs 100mM Mannitol
  misc_feature: MA Experiment ID: 20001757 Result: Up-regulated in Transcription
  misc_feature: MA Experiment 20001757 PARAMETER Experiment Name: At_50mM_NH4NO3_L-to-H_P Parameter: Timepoint (hr) Value: 6
  misc_feature: MA Experiment 20001757 PARAMETER Experiment Name: At_50mM_NH4NO3_L-to-H_P Parameter: Tissue Value: Leaf
  misc_feature: MA Experiment 20001757 PARAMETER Experiment Name: At_50mM_NH4NO3_L-to-H_P Parameter: Treatment Value: 50mM NH4NO3 vs 100mM Mannitol
  misc_feature: MA Experiment ID: 20001761 Result: Up-regulated in Transcription
  misc_feature: MA Experiment 20001761 PARAMETER Experiment Name: At_50mM_NH4NO3_L-to-H_P Parameter: Timepoint (hr) Value: 4
  misc_feature: MA Experiment 20001761 PARAMETER Experiment Name: At_50mM_NH4NO3_L-to-H_P Parameter: Tissue Value: Siliques
  misc_feature: MA Experiment 20001761 PARAMETER Experiment Name: At_50mM_NH4NO3_L-to-H_P Parameter: Treatment Value: 50mM NH4NO3 vs 100mM Mannitol

SEQ ID NO: 45854 - protein, 98 aa, Arabidopsis thaliana; identical to SEQ ID NO: 45607
  peptide (1)..(98): Ceres Seq. ID no. 13591676

SEQ ID NO: 45855 - protein, 55 aa, Arabidopsis thaliana; identical to SEQ ID NO: 45608
  peptide (1)..(55): Ceres Seq. ID no. 13591677
  misc_feature (1)..(41): Homolog of NCBI NO: 34876464 NR Description: similar to putative transcription factor [Rattus
  misc_feature (1)..(39): Homolog of NCBI NO: 5531330 NR Description: putative transcription factor [Periplaneta
  misc_feature (1)..(41): Homolog of NCBI NO: 34876464 NR Description: similar to putative transcription factor [Rattus
  misc_feature (1)..(39): Homolog of NCBI NO: 5531330 NR Description: putative transcription factor [Periplaneta
  misc_feature (1)..(41): Homolog of NCBI NO: 34876464 NR Description: similar to putative transcription factor [Rattus
  misc_feature (1)..(39): Homolog of NCBI NO: 5531330 NR Description: putative transcription factor [Periplaneta
  misc_feature (1)..(41): Homolog of NCBI NO: 34876464 NR Description: similar to putative transcription factor [Rattus
  misc_feature (1)..(39): Homolog of NCBI NO: 5531330 NR Description: putative transcription factor [Periplaneta
  misc_feature (1)..(41): Homolog of NCBI NO: 34876464 NR Description: similar to putative transcription factor [Rattus
  misc_feature (1)..(39): Homolog of NCBI NO: 5531330 NR Description: putative transcription factor [Periplaneta

SEQ ID NO: 45856 - DNA, 1926 bp, Arabidopsis thaliana
  misc_feature (1)..(1926): Ceres Seq. ID no. 13576164
atctcgccggaagattgattcatccgttgattaatcggagctccttagttttgattccgttatggagagtttgattgcgcttgtgaacaagattcagagagcctgtacggctctgggagatcacggcgagggaagctccctcccaactctctgggactcattgcctgcaattgccgtcgtcggtggtcagagttctggaaagtcttcagtgctagagagtgttgttggaaaagattttctacctcgtggagctgggattgttacacgcagacctcttgtcctgcagcttcatagaattgatgaagggaaagagtatgcagagtttatgcatcttccaaagaagaagttcacagattttgctgctgtgaggcaggagatctcggatgagacagatcgtgaaactggtcgcagcagcaaagtaatatccacagtcccaattcatctcagtatcttctctcctaatgttgtgaatttgacacttgtcgatcttcctgggctaacaaaggtagctgttgatggccagcctgaaagcattgttcaagacatcgagaacatggtcagatcgtttattgagaagcccaactgcatcatacttgctatttcccctgcaaatcaggatcttgcaacatctgatgccattaagatctctcgtgaagttgatcccaaaggagacaggacttttggagttttaacaaaaattgatctcatggaccaaggcactaatgctgttgatatacttgaaggaaggggatacaaattaaggtatccttgggttggtgttgtaaaccggtctcaagctgacattaataaaagtgttgatatgattgctgctcgtcggcgtgaacgtgattacttccagactagcccagagtacagacatttaactgaaagaatgggttcagagtatttaggaaagatgctctctaagcatttggaagttgttatcaagtctagaatcccgggacttcagtctcttatcacaaagacaatttccgagttagagacagagctaagccgtcttgggaagcctgtagcagctgatgctggtggaaaactttatatgatcatggaaatttgccgtgcctttgatcaaacttttaaagaacacctggatggcacgcgttcaggtggtgaaaagataaattctgtgttcgacaatcaattcccagctgccattaaaagactgcaattcgacaaacatctctccatggacaatgtacggaaactgatcactgaagcagatggatatcaacctcatctcatagctcctgaacaaggttatcgccggctcatagaatcatgcttagtctccattagaggccctgctgaagcagctgttgatgcggttcattccattctcaaggatcttatccacaaatccatgggcgaaacatctgaactgaagcaatatccaacactcagagtagaagtatcaggtgcagccgtggattcattggatcgaatgagagacgaaagcaggaaagcaactctgttactagtggacatggagtctggttacttaacggtcgagttcttcaggaaactcccgcaagattctgaaaaaggtgggaatccgacacattcgatattcgacagatacaacgatgcttatctccgaagaatcggctcaaatgtgttgtcatatgtgaacatggtctgcgctggcttgagaaactccataccgaaatccattgtttactgtcaagtccgtgaagcaaaacgaagccttctagacatcttcttcaccgaacttggccagaaagagatgagcaaattgtcgaaattgttggatgaggatcctgcggttcagcagcgaaggacttcgattgcgaagaggctggaattgtatagaagtgctcaaacggatattgaagcagttgcttggtccaagtagagagacgagaccctctcttcacactccatttt

SEQ ID NO: 45857 - protein, 610 aa, Arabidopsis thaliana
  peptide (1)..(610): Ceres Seq. ID no. 13576165
  misc_feature (222)..(508): Pfam Name: Dynamin central region Pfam Description: Dynamin central region
  misc_feature (1)..(487): Homolog of NCBI NO: 40807066 NR Description: Unknown (protein for MGC:77233) [Danio rerio]
  misc_feature (1)..(610): Homolog of NCBI NO: 37536976 NR Description: putative phragmoplastin [Oryza sativa (japonica
  misc_feature (1)..(610): Homolog of NCBI NO: 2267213 NR Description: dynamin-like GTP binding protein [Arabidopsis
  misc_feature (1)..(152): Homolog of NCBI NO: 34911188 NR Description: putative dynamin-like protein
  misc_feature (129)..(610): Homolog of NCBI NO: 34911188 NR Description: putative dynamin-like protein
  misc_feature (1)..(610): Homolog of NCBI NO: 5931765 NR Description: phragmoplastin [Nicotiana tabacum]
  misc_feature (1)..(610): Homolog of NCBI NO: 2129825 NR Description: phragmoplastin 12 - soybean
  misc_feature (1)..(610): Homolog of NCBI NO: 20453081 NR Description: AT5g42080/MJC20_19 [Arabidopsis thaliana]
  misc_feature (1)..(610): Homolog of NCBI NO: 2129826 NR Description: phragmoplastin 5 - soybean
  misc_feature (1)..(610): Homolog of NCBI NO: 30693985 NR Description: dynamin-related protein (pir||S59558)
MESLIALVNKIQRACTALGDHGEGSSLPTLWDSLPAIAVVGGQSSGKSSVLESVVGKDFLPRGAGIVTRRPLVLQLHRIDEGKEYAEFMHLPKKKFTDFAAVRQEISDETDRETGRSSKVISTVPIHLSIFSPNVVNLTLVDLPGLTKVAVDGQPESIVQDIENMVRSFIEKPNCIILAISPANQDLATSDAIKISREVDPKGDRTFGVLTKIDLMDQGTNAVDILEGRGYKLRYPWVGVVNRSQADINKSVDMIAARRRERDYFQTSPEYRHLTERMGSEYLGKMLSKHLEVVIKSRIPGLQSLITKTISELETELSRLGKPVAADAGGKLYMIMEICRAFDQTFKEHLDGTRSGGEKINSVFDNQFPAAIKRLQFDKHLSMDNVRKLITEADGYQPHLIAPEQGYRRLIESCLVSIRGPAEAAVDAVHSILKDLIHKSMGETSELKQYPTLRVEVSGAAVDSLDRMRDESRKATLLLVDMESGYLTVEFFRKLPQDSEKGGNPTHSIFDRYNDAYLRRIGSNVLSYVNMVCAGLRNSIPKSIVYCQVREAKRSLLDIFFTELGQKEMSKLSKLLDEDPAVQQRRTSIAKRLELYRSAQTDIEAVAWSK

SEQ ID NO: 45858 - protein, 522 aa, Arabidopsis thaliana
  peptide (1)..(522): Ceres Seq. ID no. 13576166
  misc_feature (134)..(420): Pfam Name: Dynamin central region Pfam Description: Dynamin central region
  misc_feature (1)..(399): Homolog of NCBI NO: 40807066 NR Description: Unknown (protein for MGC:77233) [Danio rerio]
  misc_feature (1)..(522): Homolog of NCBI NO: 37536976 NR Description: putative phragmoplastin [Oryza sativa (japonica
  misc_feature (1)..(522): Homolog of NCBI NO: 2267213 NR Description: dynamin-like GTP binding protein [Arabidopsis
  misc_feature (1)..(64): Homolog of NCBI NO: 34911188 NR Description: putative dynamin-like protein
  misc_feature (41)..(522): Homolog of NCBI NO: 34911188 NR Description: putative dynamin-like protein
  misc_feature (1)..(522): Homolog of NCBI NO: 5931765 NR Description: phragmoplastin [Nicotiana tabacum]
  misc_feature (1)..(522): Homolog of NCBI NO: 2129825 NR Description: phragmoplastin 12 - soybean
  misc_feature (1)..(522): Homolog of NCBI NO: 20453081 NR Description: AT5g42080/MJC20_19 [Arabidopsis thaliana]
  misc_feature (1)..(522): Homolog of NCBI NO: 2129826 NR Description: phragmoplastin 5 - soybean
  misc_feature (1)..(522): Homolog of NCBI NO: 30693985 NR Description: dynamin-related protein (pir||S59558)
MHLPKKKFTDFAAVRQEISDETDRETGRSSKVISTVPIHLSIFSPNVVNLTLVDLPGLTKVAVDGQPESIVQDIENMVRSFIEKPNCIILAISPANQDLATSDAIKISREVDPKGDRTFGVLTKIDLMDQGTNAVDILEGRGYKLRYPWVGVVNRSQADINKSVDMIAARRRERDYFQTSPEYRHLTERMGSEYLGKMLSKHLEVVIKSRIPGLQSLITKTISELETELSRLGKPVAADAGGKLYMIMEICRAFDQTFKEHLDGTRSGGEKINSVFDNQFPAAIKRLQFDKHLSMDNVRKLITEADGYQPHLIAPEQGYRRLIESCLVSIRGPAEAAVDAVHSILKDLIHKSMGETSELKQYPTLRVEVSGAAVDSLDRMRDESRKATLLLVDMESGYLTVEFFRKLPQDSEKGGNPTHSIFDRYNDAYLRRIGSNVLSYVNMVCAGLRNSIPKSIVYCQVREAKRSLLDIFFTELGQKEMSKLSKLLDEDPAVQQRRTSIAKRLELYRSAQTDIEAVAWSK

SEQ ID NO: 45859 - protein, 446 aa, Arabidopsis thaliana
  peptide (1)..(446): Ceres Seq. ID no. 13576167
  misc_feature (58)..(344): Pfam Name: Dynamin central region Pfam Description: Dynamin central region
  misc_feature (1)..(323): Homolog of NCBI NO: 539581 NR Description: dynamin, internal form 2, short C-terminal form -
  misc_feature (1)..(323): Homolog of NCBI NO: 40807066 NR Description: Unknown (protein for MGC:77233) [Danio rerio]
  misc_feature (1)..(446): Homolog of NCBI NO: 37536976 NR Description: putative phragmoplastin [Oryza sativa (japonica
  misc_feature (1)..(446): Homolog of NCBI NO: 2267213 NR Description: dynamin-like GTP binding protein [Arabidopsis
  misc_feature (1)..(446): Homolog of NCBI NO: 34911188 NR Description: putative dynamin-like protein
  misc_feature (1)..(446): Homolog of NCBI NO: 5931765 NR Description: phragmoplastin [Nicotiana tabacum]
  misc_feature (1)..(446): Homolog of NCBI NO: 2129825 NR Description: phragmoplastin 12 - soybean
  misc_feature (1)..(446): Homolog of NCBI NO: 20453081 NR Description: AT5g42080/MJC20_19 [Arabidopsis thaliana]
  misc_feature (1)..(446): Homolog of NCBI NO: 2129826 NR Description: phragmoplastin 5 - soybean
  misc_feature (1)..(446): Homolog of NCBI NO: 30693985 NR Description: dynamin-related protein (pir||S59558)
MVRSFIEKPNCIILAISPANQDLATSDAIKISREVDPKGDRTFGVLTKIDLMDQGTNAVDILEGRGYKLRYPWVGVVNRSQADINKSVDMIAARRRERDYFQTSPEYRHLTERMGSEYLGKMLSKHLEVVIKSRIPGLQSLITKTISELETELSRLGKPVAADAGGKLYMIMEICRAFDQTFKEHLDGTRSGGEKINSVFDNQFPAAIKRLQFDKHLSMDNVRKLITEADGYQPHLIAPEQGYRRLIESCLVSIRGPAEAAVDAVHSILKDLIHKSMGETSELKQYPTLRVEVSGAAVDSLDRMRDESRKATLLLVDMESGYLTVEFFRKLPQDSEKGGNPTHSIFDRYNDAYLRRIGSNVLSYVNMVCAGLRNSIPKSIVYCQVREAKRSLLDIFFTELGQKEMSKLSKLLDEDPAVQQRRTSIAKRLELYRSAQTDIEAVAWSK

SEQ ID NO: 45860 - DNA, 1872 bp, Arabidopsis thaliana
  misc_feature (1)..(1872): Ceres Seq. ID no. 12600568
  misc_feature: MA Experiment ID: 20000180 Result: Up-regulated in Transcription
  misc_feature: MA Experiment 20000180 PARAMETER Experiment Name: At_Germinating_Seeds_P Parameter: Age (hr) Value: 24 vs. 0
  misc_feature: MA Experiment 20000180 PARAMETER Experiment Name: At_Germinating_Seeds_P Parameter: Tissue Value: Germinating Seeds
  misc_feature: MA Experiment ID: 20000234 Result: Up-regulated in Transcription
  misc_feature: MA Experiment 20000234 PARAMETER Experiment Name: At_Siliques_P Parameter: Age (day) Value: 21
  misc_feature: MA Experiment 20000234 PARAMETER Experiment Name: At_Siliques_P Parameter: Organism Value: A. thaliana
  misc_feature: MA Experiment 20000234 PARAMETER Experiment Name: At_Siliques_P Parameter: Plant Line Value: WS
  misc_feature: MA Experiment 20000234 PARAMETER Experiment Name: At_Siliques_P Parameter: Tissue Value: Less Than 5mm Siliques vs. Whole Plant
  misc_feature: MA Experiment ID: 20000235 Result: Up-regulated in Transcription
  misc_feature: MA Experiment 20000235 PARAMETER Experiment Name: At_Siliques_P Parameter: Age (day) Value: 21
  misc_feature: MA Experiment 20000235 PARAMETER Experiment Name: At_Siliques_P Parameter: Organism Value: A. thaliana
  misc_feature: MA Experiment 20000235 PARAMETER Experiment Name: At_Siliques_P Parameter: Plant Line Value: WS
  misc_feature: MA Experiment 20000235 PARAMETER Experiment Name: At_Siliques_P Parameter: Tissue Value: 5-10mm Siliques vs. Whole Plant
  misc_feature: MA Experiment ID: 20000264 Result: Up-regulated in Transcription
  misc_feature: MA Experiment 20000264 PARAMETER Experiment Name: At_Open_Flower_P Parameter: Age (day) Value: 21
  misc_feature: MA Experiment 20000264 PARAMETER Experiment Name: At_Open_Flower_P Parameter: Plant Line Value: WS
  misc_feature: MA Experiment 20000264 PARAMETER Experiment Name: At_Open_Flower_P Parameter: Tissue Value: Open Flower vs. Whole Plant
  misc_feature: MA Experiment ID: 20000265 Result: Up-regulated in Transcription
  misc_feature: MA Experiment 20000265 PARAMETER Experiment Name: At_Open_Flower_P Parameter: Age (day) Value: 21
  misc_feature: MA Experiment 20000265 PARAMETER Experiment Name: At_Open_Flower_P Parameter: Plant Line Value: WS
  misc_feature: MA Experiment 20000265 PARAMETER Experiment Name: At_Open_Flower_P Parameter: Tissue Value: Closed Flower vs. Whole Plant
  misc_feature: MA Experiment ID: 20000286 Result: Up-regulated in Transcription
  misc_feature: MA Experiment 20000286 PARAMETER Experiment Name: At_Open_Flower_P Parameter: Age (day) Value: 21
  misc_feature: MA Experiment 20000286 PARAMETER Experiment Name: At_Open_Flower_P Parameter: Plant Line Value: WS
  misc_feature: MA Experiment 20000286 PARAMETER Experiment Name: At_Open_Flower_P Parameter: Tissue Value: Half Open vs. Whole Plant
  misc_feature: MA Experiment ID: 20000437 Result: Down-regulated in Transcription
  misc_feature: MA Experiment 20000437 PARAMETER Experiment Name: At_Drought_P Parameter: Age (day) Value: 8
  misc_feature: MA Experiment 20000437 PARAMETER Experiment Name: At_Drought_P Parameter: Organism Value: A. thaliana
  misc_feature: MA Experiment 20000437 PARAMETER Experiment Name: At_Drought_P Parameter: Plant Line Value: WS
  misc_feature: MA Experiment 20000437 PARAMETER Experiment Name: At_Drought_P Parameter: Timepoint (hr) Value: 24
  misc_feature: MA Experiment 20000437 PARAMETER Experiment Name: At_Drought_P Parameter: Tissue Value: Whole Plant
  misc_feature: MA Experiment 20000437 PARAMETER Experiment Name: At_Drought_P Parameter: Treatment Value: Drought vs. No Drought
  misc_feature: MA Experiment ID: 20000441 Result: Down-regulated in Transcription
  misc_feature: MA Experiment 20000441 PARAMETER Experiment Name: At_1uM_BR-BRZ__P Parameter: Tissue Value: Shoot Apices
  misc_feature: MA Experiment 20000441 PARAMETER Experiment Name: At_1uM_BR-BRZ__P Parameter: Treatment Value: 1uM BR vs. No Treatment
  misc_feature: MA Experiment ID: 20000451 Result: Down-regulated in Transcription
  misc_feature: MA Experiment 20000451 PARAMETER Experiment Name: At_CS6879_Shoots-Roots_P Parameter: Age (day) Value: 14
  misc_feature: MA Experiment 20000451 PARAMETER Experiment Name: At_CS6879_Shoots-Roots_P Parameter: Organism Value: A. thaliana
  misc_feature: MA Experiment 20000451 PARAMETER Experiment Name: At_CS6879_Shoots-Roots_P Parameter: Plant Line Value: CS6879 vs. WS
  misc_feature: MA Experiment 20000451 PARAMETER Experiment Name: At_CS6879_Shoots-Roots_P Parameter: Tissue Value: Roots
  misc_feature: MA Experiment ID: 20000573 Result: Down-regulated in Transcription
  misc_feature: MA Experiment 20000573 PARAMETER Experiment Name: At_100uM_ABA_Mutants__P Parameter: Organism Value: A. thaliana
  misc_feature: MA Experiment 20000573 PARAMETER Experiment Name: At_100uM_ABA_Mutants__P Parameter: Plant Line Value: CS22 vs. Ler wt
  misc_feature: MA Experiment 20000573 PARAMETER Experiment Name: At_100uM_ABA_Mutants__P Parameter: Timepoint (hr) Value: N/A
  misc_feature: MA Experiment 20000573 PARAMETER Experiment Name: At_100uM_ABA_Mutants__P Parameter: Tissue Value: Whole Plant
  misc_feature: MA Experiment 20000573 PARAMETER Experiment Name: At_100uM_ABA_Mutants__P Parameter: Treatment Value: None
  misc_feature: MA Experiment ID: 20000574 Result: Down-regulated in Transcription
  misc_feature: MA Experiment 20000574 PARAMETER Experiment Name: At_100uM_ABA_Mutants__P Parameter: Organism Value: A. thaliana
  misc_feature: MA Experiment 20000574 PARAMETER Experiment Name: At_100uM_ABA_Mutants__P Parameter: Plant Line Value: CS23 vs. Ler wt
  misc_feature: MA Experiment 20000574 PARAMETER Experiment Name: At_100uM_ABA_Mutants__P Parameter: Timepoint (hr) Value: N/A
  misc_feature: MA Experiment 20000574 PARAMETER Experiment Name: At_100uM_ABA_Mutants__P Parameter: Tissue Value: Whole Plant
  misc_feature: MA Experiment 20000574 PARAMETER Experiment Name: At_100uM_ABA_Mutants__P Parameter: Treatment Value: None
  misc_feature: MA Experiment ID: 20001248 Result: Down-regulated in Transcription
  misc_feature: MA Experiment 20001248 PARAMETER Experiment Name: At_Far-red-induction_P Parameter: Age (day) Value: 7
  misc_feature: MA Experiment 20001248 PARAMETER Experiment Name: At_Far-red-induction_P Parameter: Light Value: Far-red vs. White
  misc_feature: MA Experiment 20001248 PARAMETER Experiment Name: At_Far-red-induction_P Parameter: Organism Value: A. thaliana
  misc_feature: MA Experiment 20001248 PARAMETER Experiment Name: At_Far-red-induction_P Parameter: Plant Line Value: Columbia
  misc_feature: MA Experiment 20001248 PARAMETER Experiment Name: At_Far-red-induction_P Parameter: Timepoint (hr) Value: 4
  misc_feature: MA Experiment 20001248 PARAMETER Experiment Name: At_Far-red-induction_P Parameter: Tissue Value: Whole Plant
  misc_feature: MA Experiment ID: 20001450 Result: Down-regulated in Transcription
  misc_feature: MA Experiment 20001450 PARAMETER Experiment Name: At_Far-red-induction_P Parameter: Age (day) Value: 7
  misc_feature: MA Experiment 20001450 PARAMETER Experiment Name: At_Far-red-induction_P Parameter: Light Value: Far-red vs. White
  misc_feature: MA Experiment 20001450 PARAMETER Experiment Name: At_Far-red-induction_P Parameter: Organism Value: A. thaliana
  misc_feature: MA Experiment 20001450 PARAMETER Experiment Name: At_Far-red-induction_P Parameter: Plant Line Value: Columbia
  misc_feature: MA Experiment 20001450 PARAMETER Experiment Name: At_Far-red-induction_P Parameter: Timepoint (hr) Value: 8
  misc_feature: MA Experiment 20001450 PARAMETER Experiment Name: At_Far-red-induction_P Parameter: Tissue Value: Whole Plant
  misc_feature: MA Experiment ID: 20001451 Result: Down-regulated in Transcription
  misc_feature: MA Experiment 20001451 PARAMETER Experiment Name: At_Far-red-induction_P Parameter: Age (day) Value: 7
  misc_feature: MA Experiment 20001451 PARAMETER Experiment Name: At_Far-red-induction_P Parameter: Light Value: Far-red vs. White
  misc_feature: MA Experiment 20001451 PARAMETER Experiment Name: At_Far-red-induction_P Parameter: Organism Value: A. thaliana
  misc_feature: MA Experiment 20001451 PARAMETER Experiment Name: At_Far-red-induction_P Parameter: Plant Line Value: Columbia
  misc_feature: MA Experiment 20001451 PARAMETER Experiment Name: At_Far-red-induction_P Parameter: Timepoint (hr) Value: 24
  misc_feature: MA Experiment 20001451 PARAMETER Experiment Name: At_Far-red-induction_P Parameter: Tissue Value: Whole Plant
  misc_feature: MA Experiment ID: 20001556 Result: Up-regulated in Transcription
  misc_feature: MA Experiment 20001556 PARAMETER Experiment Name: At_Drought_Soil_Dry_P Parameter: Age (day) Value: 26
  misc_feature: MA Experiment 20001556 PARAMETER Experiment Name: At_Drought_Soil_Dry_P Parameter: Organism Value: A. thaliana
  misc_feature: MA Experiment 20001556 PARAMETER Experiment Name: At_Drought_Soil_Dry_P Parameter: Plant Line Value: WS
  misc_feature: MA Experiment 20001556 PARAMETER Experiment Name: At_Drought_Soil_Dry_P Parameter: Post Timepoint (hr) Value: None
  misc_feature: MA Experiment 20001556 PARAMETER Experiment Name: At_Drought_Soil_Dry_P Parameter: Post-Treatment Value: None
  misc_feature: MA Experiment 20001556 PARAMETER Experiment Name: At_Drought_Soil_Dry_P Parameter: Timepoint (day) Value: 12
  misc_feature: MA Experiment 20001556 PARAMETER Experiment Name: At_Drought_Soil_Dry_P Parameter: Treatment Value: Drought vs. No Drought
  misc_feature: MA Experiment ID: 20001557 Result: Up-regulated in Transcription
  misc_feature: MA Experiment 20001557 PARAMETER Experiment Name: At_Drought_Soil_Dry_P Parameter: Age (day) Value: 27
  misc_feature: MA Experiment 20001557 PARAMETER Experiment Name: At_Drought_Soil_Dry_P Parameter: Organism Value: A. thaliana
  misc_feature: MA Experiment 20001557 PARAMETER Experiment Name: At_Drought_Soil_Dry_P Parameter: Plant Line Value: WS
  misc_feature: MA Experiment 20001557 PARAMETER Experiment Name: At_Drought_Soil_Dry_P Parameter: Post Timepoint (hr) Value: 3
  misc_feature: MA Experiment 20001557 PARAMETER Experiment Name: At_Drought_Soil_Dry_P Parameter: Post-Treatment Value: Re-Water vs. No Drought
  misc_feature: MA Experiment 20001557 PARAMETER Experiment Name: At_Drought_Soil_Dry_P Parameter: Timepoint (day) Value: 13
  misc_feature: MA Experiment 20001557 PARAMETER Experiment Name: At_Drought_Soil_Dry_P Parameter: Treatment Value: Drought vs. No Drought
  misc_feature: MA Experiment ID: 20001558 Result: Up-regulated in Transcription
  misc_feature: MA Experiment 20001558 PARAMETER Experiment Name: At_Drought_Soil_Dry_P Parameter: Age (day) Value: 27
  misc_feature: MA Experiment 20001558 PARAMETER Experiment Name: At_Drought_Soil_Dry_P Parameter: Organism Value: A. thaliana
  misc_feature: MA Experiment 20001558 PARAMETER Experiment Name: At_Drought_Soil_Dry_P Parameter: Plant Line Value: WS
  misc_feature: MA Experiment 20001558 PARAMETER Experiment Name: At_Drought_Soil_Dry_P Parameter: Post Timepoint (hr) Value: 6
  misc_feature: MA Experiment 20001558 PARAMETER Experiment Name: At_Drought_Soil_Dry_P Parameter: Post-Treatment Value: Re-Water vs. No Drought
  misc_feature: MA Experiment 20001558 PARAMETER Experiment Name: At_Drought_Soil_Dry_P Parameter: Timepoint (day) Value: 13
  misc_feature: MA Experiment 20001558 PARAMETER Experiment Name: At_Drought_Soil_Dry_P Parameter: Treatment Value: Drought vs. No Drought
  misc_feature: MA Experiment ID: 20001757 Result: Down-regulated in Transcription
  misc_feature: MA Experiment 20001757 PARAMETER Experiment Name: At_50mM_NH4NO3_L-to-H_P Parameter: Timepoint (hr) Value: 6
  misc_feature: MA Experiment 20001757 PARAMETER Experiment Name: At_50mM_NH4NO3_L-to-H_P Parameter: Tissue Value: Leaf
  misc_feature: MA Experiment 20001757 PARAMETER Experiment Name: At_50mM_NH4NO3_L-to-H_P Parameter: Treatment Value: 50mM NH4NO3 vs 100mM Mannitol
aaaaaaaaaaaaaaaaacacttgttcatttacatcaaaatgatcactgcagctctacacgaacctcagattcacaaaccaaccgatacatccgtcgtctccgatgatgtgcttcctcattctcctcctacgcctcgcattttccggtcaaagcttccggacattgacatccctaaccacctccctctccacacttactgcttcgaaaaactctcatctgtttccgacaagccttgtctcatcgttggctccaccgggaaaagctacacctacggcgaaacacacctaatctgtcggagagtcgcttccgggttatacaagttaggtatcagaaaaggtgacgtcatcatgatccttctccaaaactcagccgagttcgttttctccttcatgggtgcttccatgatcggagccgtctcaaccaccgcaaaccctttctacacttctcaagagctttataaacagcttaaatcttccggagccaaactcataatcactcactctcaatacgtcgataaacttaaaaacctcggagaaaacctcacgctgatcactaccgatgaaccaacaccggagaattgtctaccattctcgacactcatcaccgacgacgaaacaaacccatttcaagaaaccgtcgatatcggcggtgacgatgcggcggcgttaccattctcatcgggaacaacagggttaccaaaaggagttgttttgacacacaagagcttaatcacaagcgttgcacaacaagtagatggagataacccaaatctttacctcaaatcaaacgacgtcatactctgcgttttaccacttttccatatctactctctcaatagcgtcctcctcaattcactccgatccggcgccacggttcttttaatgcataagtttgagatcggtgcgttattggatcttattcaaagacatagagtgacaatagcggcgcttgtaccgccgctagtgatcgctctagctaaaaacccgacggttaattcttatgatctctcctccgttagattcgttctttccggtgcagctcctttaggtaaagaacttcaagatagtcttcgtcgccgtctccctcaagccatccttggccagggatatggtatgacggaggcaggaccagtgttgtcaatgagccttgggttcgctaaagaaccgataccgacaaaatcaggttcatgtgggactgtggtccgaaacgcagagcttaaagtggttcaccttgagacacgtctctctcttggatacaaccaacctggtgagatttgtatccgcggtcaacagatcatgaaagagtacttgaacgatccagaagccacttcagcaacaatagacgaagaaggttggcttcacacaggagacattggatatgttgatgaagatgatgagattttcattgttgatcgacttaaagaagtcatcaagttcaaaggctttcaggtccctccagctgagctagagagtttgctaatcaatcaccattcaattgccgatgcagctgttgttccgcaaaatgatgaagtcgctggggaagttccggtggctttcgtggtgcgatcaaatggaaatgatatcactgaagaagatgttaaagaatatgttgccaaacaggtggtgttctataagagattgcacaaggtcttctttgttgcttccattcctaaatctccttcgggaaaaatactaagaaaggacctcaaagctaagctttgttgaatgtagttctttttaatatattccattgatgatttaaacgttcatttgtatccacaatgctttgtgtctcttttattttttaagatcctttgacgcaatagatgttggacactaagagtatgcttaagatactgaattattttggatc

SEQ ID NO: 45861 - protein, 573 aa, Arabidopsis thaliana
  peptide (1)..(573): Ceres Seq. ID no. 12600569
  misc_feature (89)..(503): Pfam Name: AMP-binding enzyme Pfam Description: AMP-binding enzyme
  misc_feature (13)..(485): Homolog of NCBI NO: 30697142 NR Description: 4-coumarate:CoA ligase 3 (4-coumaroyl-CoA
  misc_feature (13)..(573): Homolog of NCBI NO: 15217838 NR Description: 4-coumarate:CoA ligase 3
KKKKKHLFIYIKMITAALHEPQIHKPTDTSVVSDDVLPHSPPTPRIFRSKLPDIDIPNHLPLHTYCFEKLSSVSDKPCLIVGSTGKSYTYGETHLICRRVASGLYKLGIRKGDVIMILLQNSAEFVFSFMGASMIGAVSTTANPFYTSQELYKQLKSSGAKLIITHSQYVDKLKNLGENLTLITTDEPTPENCLPFSTLITDDETNPFQETVDIGGDDAAALPFSSGTTGLPKGVVLTHKSLITSVAQQVDGDNPNLYLKSNDVILCVLPLFHIYSLNSVLLNSLRSGATVLLMHKFEIGALLDLIQRHRVTIAALVPPLVIALAKNPTVNSYDLSSVRFVLSGAAPLGKELQDSLRRRLPQAILGQGYGMTEAGPVLSMSLGFAKEPIPTKSGSCGTVVRNAELKVVHLETRLSLGYNQPGEICIRGQQIMKEYLNDPEATSATIDEEGWLHTGDIGYVDEDDEIFIVDRLKEVIKFKGFQVPPAELESLLINHHSIADAAVVPQNDEVAGEVPVAFVVRSNGNDITEEDVKEYVAKQVVFYKRLHKVFFVASIPKSPSGKILRKDLKAKLC

SEQ ID NO: 45862 - protein, 561 aa, Arabidopsis thaliana
  peptide (1)..(561): Ceres Seq. ID no. 12600570
  misc_feature (77)..(491): Pfam Name: AMP-binding enzyme Pfam Description: AMP-binding enzyme
  misc_feature (1)..(473): Homolog of NCBI NO: 30697142 NR Description: 4-coumarate:CoA ligase 3 (4-coumaroyl-CoA
  misc_feature (1)..(561): Homolog of NCBI NO: 15217838 NR Description: 4-coumarate:CoA ligase 3
MITAALHEPQIHKPTDTSVVSDDVLPHSPPTPRIFRSKLPDIDIPNHLPLHTYCFEKLSSVSDKPCLIVGSTGKSYTYGETHLICRRVASGLYKLGIRKGDVIMILLQNSAEFVFSFMGASMIGAVSTTANPFYTSQELYKQLKSSGAKLIITHSQYVDKLKNLGENLTLITTDEPTPENCLPFSTLITDDETNPFQETVDIGGDDAAALPFSSGTTGLPKGVVLTHKSLITSVAQQVDGDNPNLYLKSNDVILCVLPLFHIYSLNSVLLNSLRSGATVLLMHKFEIGALLDLIQRHRVTIAALVPPLVIALAKNPTVNSYDLSSVRFVLSGAAPLGKELQDSLRRRLPQAILGQGYGMTEAGPVLSMSLGFAKEPIPTKSGSCGTVVRNAELKVVHLETRLSLGYNQPGEICIRGQQIMKEYLNDPEATSATIDEEGWLHTGDIGYVDEDDEIFIVDRLKEVIKFKGFQVPPAELESLLINHHSIADAAVVPQNDEVAGEVPVAFVVRSNGNDITEEDVKEYVAKQVVFYKRLHKVFFVASIPKSPSGKILRKDLKAKLC

SEQ ID NO: 45863 - protein, 458 aa, Arabidopsis thaliana
  peptide (1)..(458): Ceres Seq. ID no. 12600571
  misc_feature (1)..(388): Pfam Name: AMP-binding enzyme Pfam Description: AMP-binding enzyme
  misc_feature (1)..(370): Homolog of NCBI NO: 30697142 NR Description: 4-coumarate:CoA ligase 3 (4-coumaroyl-CoA
  misc_feature (1)..(458): Homolog of NCBI NO: 15217838 NR Description: 4-coumarate:CoA ligase 3
MILLQNSAEFVFSFMGASMIGAVSTTANPFYTSQELYKQLKSSGAKLIITHSQYVDKLKNLGENLTLITTDEPTPENCLPFSTLITDDETNPFQETVDIGGDDAAALPFSSGTTGLPKGVVLTHKSLITSVAQQVDGDNPNLYLKSNDVILCVLPLFHIYSLNSVLLNSLRSGATVLLMHKFEIGALLDLIQRHRVTIAALVPPLVIALAKNPTVNSYDLSSVRFVLSGAAPLGKELQDSLRRRLPQAILGQGYGMTEAGPVLSMSLGFAKEPIPTKSGSCGTVVRNAELKVVHLETRLSLGYNQPGEICIRGQQIMKEYLNDPEATSATIDEEGWLHTGDIGYVDEDDEIFIVDRLKEVIKFKGFQVPPAELESLLINHHSIADAAVVPQNDEVAGEVPVAFVVRSNGNDITEEDVKEYVAKQVVFYKRLHKVFFVASIPKSPSGKILRKDLKAKLC

SEQ ID NO: 45864 - DNA, 1966 bp, Arabidopsis thaliana
  misc_feature (1)..(1966): Ceres Seq. ID no. 13591692
  misc_feature: MA Experiment ID: 20000179 Result: Up-regulated in Transcription
  misc_feature: MA Experiment 20000179 PARAMETER Experiment Name: At_Germinating_Seeds_P Parameter: Age (hr) Value: 6 vs. 0
  misc_feature: MA Experiment 20000179 PARAMETER Experiment Name: At_Germinating_Seeds_P Parameter: Tissue Value: Germinating Seeds
  misc_feature: MA Experiment ID: 20000180 Result: Up-regulated in Transcription
  misc_feature: MA Experiment 20000180 PARAMETER Experiment Name: At_Germinating_Seeds_P Parameter: Age (hr) Value: 24 vs. 0
  misc_feature: MA Experiment 20000180 PARAMETER Experiment Name: At_Germinating_Seeds_P Parameter: Tissue Value: Germinating Seeds
  misc_feature: MA Experiment ID: 20000214 Result: Up-regulated in Transcription
  misc_feature: MA Experiment 20000214 PARAMETER Experiment Name: At_4deg_Cold_P Parameter: Timepoint (hr) Value: 6
  misc_feature: MA Experiment ID: 20000794 Result: Up-regulated in Transcription
  misc_feature: MA Experiment 20000794 PARAMETER Experiment Name: At_Petals_P Parameter: Age (day) Value: 23-25 days
  misc_feature: MA Experiment 20000794 PARAMETER Experiment Name: At_Petals_P Parameter: Plant Line Value: WS
  misc_feature: MA Experiment 20000794 PARAMETER Experiment Name: At_Petals_P Parameter: Tissue Value: Petals vs. Whole plant
  misc_feature: MA Experiment ID: 20001248 Result: Down-regulated in Transcription
  misc_feature: MA Experiment 20001248 PARAMETER Experiment Name: At_Far-red-induction_P Parameter: Age (day) Value: 7
  misc_feature: MA Experiment 20001248 PARAMETER Experiment Name: At_Far-red-induction_P Parameter: Light Value: Far-red vs. White
  misc_feature: MA Experiment 20001248 PARAMETER Experiment Name: At_Far-red-induction_P Parameter: Organism Value: A. thaliana
  misc_feature: MA Experiment 20001248 PARAMETER Experiment Name: At_Far-red-induction_P Parameter: Plant Line Value: Columbia
  misc_feature: MA Experiment 20001248 PARAMETER Experiment Name: At_Far-red-induction_P Parameter: Timepoint (hr) Value: 4
  misc_feature: MA Experiment 20001248 PARAMETER Experiment Name: At_Far-red-induction_P Parameter: Tissue Value: Whole Plant
  misc_feature: MA Experiment ID: 20001557 Result: Up-regulated in Transcription
  misc_feature: MA Experiment 20001557 PARAMETER Experiment Name: At_Drought_Soil_Dry_P Parameter: Age (day) Value: 27
  misc_feature: MA Experiment 20001557 PARAMETER Experiment Name: At_Drought_Soil_Dry_P Parameter: Organism Value: A. thaliana
  misc_feature: MA Experiment 20001557 PARAMETER Experiment Name: At_Drought_Soil_Dry_P Parameter: Plant Line Value: WS
  misc_feature: MA Experiment 20001557 PARAMETER Experiment Name: At_Drought_Soil_Dry_P Parameter: Post Timepoint (hr) Value: 3
  misc_feature: MA Experiment 20001557 PARAMETER Experiment Name: At_Drought_Soil_Dry_P Parameter: Post-Treatment Value: Re-Water vs. No Drought
  misc_feature: MA Experiment 20001557 PARAMETER Experiment Name: At_Drought_Soil_Dry_P Parameter: Timepoint (day) Value: 13
  misc_feature: MA Experiment 20001557 PARAMETER Experiment Name: At_Drought_Soil_Dry_P Parameter: Treatment Value: Drought vs. No Drought
  misc_feature: MA Experiment ID: 20001559 Result: Down-regulated in Transcription
  misc_feature: MA Experiment 20001559 PARAMETER Experiment Name: At_Drought_Soil_Dry_P Parameter: Age (day) Value: 28
  misc_feature: MA Experiment 20001559 PARAMETER Experiment Name: At_Drought_Soil_Dry_P Parameter: Organism Value: A. thaliana
  misc_feature: MA Experiment 20001559 PARAMETER Experiment Name: At_Drought_Soil_Dry_P Parameter: Plant Line Value: WS
  misc_feature: MA Experiment 20001559 PARAMETER Experiment Name: At_Drought_Soil_Dry_P Parameter: Post Timepoint (hr) Value: 29
  misc_feature: MA Experiment 20001559 PARAMETER Experiment Name: At_Drought_Soil_Dry_P Parameter: Post-Treatment Value: Re-Water vs. No Drought
  misc_feature: MA Experiment 20001559 PARAMETER Experiment Name: At_Drought_Soil_Dry_P Parameter: Timepoint (day) Value: 14
  misc_feature: MA Experiment 20001559 PARAMETER Experiment Name: At_Drought_Soil_Dry_P Parameter: Treatment Value: Drought vs. No Drought
agggctcgaaatctctctcaaaaccctctcaaaaattccaaaacataatctcatttctcaagtttaacattttcgagcccctttagaacagtggagaaagatccacacagataaaaaaacgggtgagttttatatcaaatagacgaaaatgcccctgtcggcgacggcggatacaagcaagacggtgaagctggagaggtacaatagctacctccggaagattcacagcaccaaagttctcaacgcttcttctaaagttcttttccgagcaacgcttctcgtagctcttgtcctcgtcctcatcttcgccatcaactaccctccactctccgatagccgcgccgccgcagcacaccacctccaccgtcgtagcttcttatccaccggactcttctcctcctcctcttcttcctcctctatcggtggagccgcgtgggaaaagcgcgttagacaatcctcaacagccaaacgaccacacggtctctccgtcctagtcaccggagctgccggattcgtcggatcccactgctcacttgcgctgcgaaaacgtggcgatggagtcttaggattcgacaacttcaacgattactatgacccatcactcaaaagagcaagacaagagctcttggagaaacaacaagtgttcatcgtcgaaggtgatctcaacgatggaccactcttacgtaaactcttcgacgttgtccctttcactcacatccttcacttagccgctcaagccggagtacgttacgctatgaaaaaccctcaatcttacatcgcctccaacatcgccggattcgttaaccttcttgaagtggctaaagcagctaatccacaacctgcgattgtttgggcttcctctagctctgtttacggtctcaacactgagaatccattctctgaagaacaccgaacagaccaaccagcgagtctttacgcagcaaccaagaaagctggtgaagagatcgcacatacttacaaccacatctacggtctctccttaaccggactccggttctttacggtttacggtccatggggaagaccagacatggcttacttcttcttcactaaagacatcctccacggtaaatcaatcgacatttacagaactcaggacaatcaagaagtggcgcgtgacttcacctacatcgatgacatcgttaaaggttgtgtcggtgcgttagacacggctgagaaaagcaccggaagcggcggaaagaagagaggacaagctcagctacgtgtttacaatctaggaaacacgtccccggttccggttgggagattggtctcgatcttggaaggattgttagggacaaaagctaagaagcatcttatcaaaatgccaagaaacggtgacgtgccttacacgcatgctaatgtgagtttagcgtataaagatttcgggtacaaaccgacgacggatctcgcggcggggctgaggaagttcgtcaagtggtacgttggttattatgggattcagccgagggtaaaaaaggaaacttctcacgccgaagattccgcttaataattttctctctaccaccatctctctcatcatcacatgcttgtttatttttcttacaaaaaaaaaaaaaatcatttacagggacagatttctgtatttttctttatttaaaaattgctccccaaaaaaaaaaaatcataaatgtttttgtggtggtcctttttttagggggatcaaagtgtgggaattaaattgttacagctgtatgttataatagaaagatatatagaaatgaggagaggaaaaaaaagaagaaaggggtagaagaattgaaaatatatgtgggattgttatgtaataaatgaaataggttatgatcttgctggaaagtgtttagagcagatcttagccgttggatttttataatcaaggaatgaaacctgtgatccattattataccaactgtaacataaattttattctctctttttatct

SEQ ID NO: 45865 - protein, 460 aa, Arabidopsis thaliana
  peptide (1)..(460): Ceres Seq. ID no. 13591693
  misc_feature (114)..(443): Pfam Name: NAD dependent epimerase/dehydratase family Pfam Description: NAD dependent epimerase/dehydratase family
  misc_feature (114)..(443): Pfam Name: NAD dependent epimerase/dehydratase family Pfam Description: NAD dependent epimerase/dehydratase family
  misc_feature (114)..(443): Pfam Name: NAD dependent epimerase/dehydratase family Pfam Description: NAD dependent epimerase/dehydratase family
  misc_feature (114)..(443): Pfam Name: NAD dependent epimerase/dehydratase family Pfam Description: NAD dependent epimerase/dehydratase family
  misc_feature (65)..(450): Homolog of NCBI NO: 15234745 NR Description: nucleotide sugar epimerase family [Arabidopsis
  misc_feature (25)..(443): Homolog of NCBI NO: 15293119 NR Description: putative nucleotide sugar epimerase [Arabidopsis
  misc_feature (25)..(443): Homolog of NCBI NO: 15234486 NR Description: nucleotide sugar epimerase family [Arabidopsis
  misc_feature (14)..(443): Homolog of NCBI NO: 15225451 NR Description: nucleotide sugar epimerase family [Arabidopsis
  misc_feature (1)..(443): Homolog of NCBI NO: 29647497 NR Description: OJ1191_A10.21 [Oryza sativa (japonica
  misc_feature (65)..(450): Homolog of NCBI NO: 15234745 NR Description: nucleotide sugar epimerase family [Arabidopsis
  misc_feature (25)..(443): Homolog of NCBI NO: 15234486 NR Description: nucleotide sugar epimerase family [Arabidopsis
  misc_feature (1)..(443): Homolog of NCBI NO: 29647497 NR Description: OJ1191_A10.21 [Oryza sativa (japonica
  misc_feature (14)..(443): Homolog of NCBI NO: 15225451 NR Description: nucleotide sugar epimerase family [Arabidopsis
  misc_feature (25)..(443): Homolog of NCBI NO: 15234486 NR Description: nucleotide sugar epimerase family [Arabidopsis
  misc_feature (25)..(443): Homolog of NCBI NO: 15293119 NR Description: putative nucleotide sugar epimerase [Arabidopsis
  misc_feature (65)..(450): Homolog of NCBI NO: 15234745 NR Description: nucleotide sugar epimerase family [Arabidopsis
  misc_feature (1)..(460): Homolog of NCBI NO: 15229524 NR Description: NAD-dependent epimerase/dehydratase family
  misc_feature (1)..(460): Homolog of NCBI NO: 24417280 NR Description: unknown [Arabidopsis thaliana]
  misc_feature (90)..(443): Homolog of NCBI NO: 15217591 NR Description: nucleotide sugar epimerase family [Arabidopsis
  misc_feature (90)..(443): Homolog of NCBI NO: 21536982 NR Description: nucleotide sugar epimerase, putative [Arabidopsis
  misc_feature (90)..(443): Homolog of NCBI NO: 15236712 NR Description: nucleotide sugar epimerase family [Arabidopsis
  misc_feature (1)..(460): Homolog of NCBI NO: 15229524 NR Description: NAD-dependent epimerase/dehydratase family
  misc_feature (1)..(460): Homolog of NCBI NO: 24417280 NR Description: unknown [Arabidopsis thaliana]
  misc_feature (90)..(443): Homolog of NCBI NO: 15217591 NR Description: nucleotide sugar epimerase family [Arabidopsis
  misc_feature (90)..(443): Homolog of NCBI NO: 21536982 NR Description: nucleotide sugar epimerase, putative [Arabidopsis
  misc_feature (90)..(443): Homolog of NCBI NO: 15236712 NR Description: nucleotide sugar epimerase family [Arabidopsis
  misc_feature (1)..(443): Homolog of NCBI NO: 29647497 NR Description: OJ1191_A10.21 [Oryza sativa (japonica
  misc_feature (14)..(443): Homolog of NCBI NO: 15225451 NR Description: nucleotide sugar epimerase family [Arabidopsis
  misc_feature (25)..(443): Homolog of NCBI NO: 15234486 NR Description: nucleotide sugar epimerase family [Arabidopsis
  misc_feature (25)..(443): Homolog of NCBI NO: 15293119 NR Description: putative nucleotide sugar epimerase [Arabidopsis
  misc_feature (65)..(450): Homolog of NCBI NO: 15234745 NR Description: nucleotide sugar epimerase family [Arabidopsis
  misc_feature (1)..(460): Homolog of NCBI NO: 15229524 NR Description: NAD-dependent epimerase/dehydratase family
  misc_feature (1)..(460): Homolog of NCBI NO: 24417280 NR Description: unknown [Arabidopsis thaliana]
  misc_feature (90)..(443): Homolog of NCBI NO: 15217591 NR Description: nucleotide sugar epimerase family [Arabidopsis
  misc_feature (90)..(443): Homolog of NCBI NO: 21536982 NR Description: nucleotide sugar epimerase, putative [Arabidopsis
  misc_feature (90)..(443): Homolog of NCBI NO: 15236712 NR Description: nucleotide sugar epimerase family [Arabidopsis
  misc_feature (1)..(443): Homolog of NCBI NO: 29647497 NR Description: OJ1191_A10.21 [Oryza sativa (japonica
  misc_feature (14)..(443): Homolog of NCBI NO: 15225451 NR Description: nucleotide sugar epimerase family [Arabidopsis
  misc_feature (25)..(443): Homolog of NCBI NO: 15293119 NR Description: putative nucleotide sugar epimerase [Arabidopsis
  misc_feature (90)..(443): Homolog of NCBI NO: 15236712 NR Description: nucleotide sugar epimerase family [Arabidopsis
  misc_feature (90)..(443): Homolog of NCBI NO: 21536982 NR Description: nucleotide sugar epimerase, putative [Arabidopsis
  misc_feature (90)..(443): Homolog of NCBI NO: 15217591 NR Description: nucleotide sugar epimerase family [Arabidopsis
  misc_feature (1)..(460): Homolog of NCBI NO: 24417280 NR Description: unknown [Arabidopsis thaliana]
  misc_feature (1)..(460): Homolog of NCBI NO: 15229524 NR Description: NAD-dependent epimerase/dehydratase family
MPLSATADTSKTVKLERYNSYLRKIHSTKVLNASSKVLFRATLLVALVLVLIFAINYPPLSDSRAAAAHHLHRRSFLSTGLFSSSSSSSSIGGAAWEKRVRQSSTAKRPHGLSVLVTGAAGFVGSHCSLALRKRGDGVLGFDNFNDYYDPSLKRARQELLEKQQVFIVEGDLNDGPLLRKLFDVVPFTHILHLAAQAGVRYAMKNPQSYIASNIAGFVNLLEVAKAANPQPAIVWASSSSVYGLNTENPFSEEHRTDQPASLYAATKKAGEEIAHTYNHIYGLSLTGLRFFTVYGPWGRPDMAYFFFTKDILHGKSIDIYRTQDNQEVARDFTYIDDIVKGCVGALDTAEKSTGSGGKKRGQAQLRVYNLGNTSPVPVGRLVSILEGLLGTKAKKHLIKMPRNGDVPYTHANVSLAYKDFGYKPTTDLAAGLRKFVKWYVGYYGIQPRVKKETSHAEDSA

SEQ ID NO: 45866 - protein, 258 aa, Arabidopsis thaliana
  peptide (1)..(258): Ceres Seq. ID no. 13591694
  misc_feature (1)..(241): Pfam Name: NAD dependent epimerase/dehydratase family Pfam Description: NAD dependent epimerase/dehydratase family
  misc_feature (1)..(241): Pfam Name: NAD dependent epimerase/dehydratase family Pfam Description: NAD dependent epimerase/dehydratase family
  misc_feature (1)..(241): Pfam Name: NAD dependent epimerase/dehydratase family Pfam Description: NAD dependent epimerase/dehydratase family
  misc_feature (1)..(241): Pfam Name: NAD dependent epimerase/dehydratase family Pfam Description: NAD dependent epimerase/dehydratase family
  misc_feature (1)..(248): Homolog of NCBI NO: 15234745 NR Description: nucleotide sugar epimerase family [Arabidopsis
  misc_feature (1)..(241): Homolog of NCBI NO: 15293119 NR Description: putative nucleotide sugar epimerase [Arabidopsis
  misc_feature (1)..(241): Homolog of NCBI NO: 15234486 NR Description: nucleotide sugar epimerase family [Arabidopsis
  misc_feature (1)..(241): Homolog of NCBI NO: 15225451 NR Description: nucleotide sugar epimerase family [Arabidopsis
  misc_feature (1)..(241): Homolog of NCBI NO: 29647497 NR Description: OJ1191_A10.21 [Oryza sativa (japonica
  misc_feature (1)..(248): Homolog of NCBI NO: 15234745 NR Description: nucleotide sugar epimerase family [Arabidopsis
  misc_feature (1)..(241): Homolog of NCBI NO: 15234486 NR Description: nucleotide sugar epimerase family [Arabidopsis
  misc_feature (1)..(241): Homolog of NCBI NO: 29647497 NR Description: OJ1191_A10.21 [Oryza sativa (japonica
  misc_feature (1)..(241): Homolog of NCBI NO: 15225451 NR Description: nucleotide sugar epimerase family [Arabidopsis
  misc_feature (1)..(241): Homolog of NCBI NO: 15234486 NR Description: nucleotide sugar epimerase family [Arabidopsis
  misc_feature (1)..(241): Homolog of NCBI NO: 15293119 NR Description: putative nucleotide sugar epimerase [Arabidopsis
  misc_feature (1)..(248): Homolog of NCBI NO: 15234745 NR Description: nucleotide sugar epimerase family [Arabidopsis
  misc_feature (1)..(258): Homolog of NCBI NO: 15229524 NR Description: NAD-dependent epimerase/dehydratase family
  misc_feature (1)..(258): Homolog of NCBI NO: 24417280 NR Description: unknown [Arabidopsis thaliana]
  misc_feature (1)..(241): Homolog of NCBI NO: 15217591 NR Description: nucleotide sugar epimerase family [Arabidopsis
  misc_feature (1)..(241): Homolog of NCBI NO: 21536982 NR Description: nucleotide sugar epimerase, putative [Arabidopsis
  misc_feature (1)..(241): Homolog of NCBI NO: 15236712 NR Description: nucleotide sugar epimerase family [Arabidopsis
  misc_feature (1)..(258): Homolog of NCBI NO: 15229524 NR Description: NAD-dependent epimerase/dehydratase family
  misc_feature (1)..(258): Homolog of NCBI NO: 24417280 NR Description: unknown [Arabidopsis thaliana]
  misc_feature (1)..(241): Homolog of NCBI NO: 15217591 NR Description: nucleotide sugar epimerase family [Arabidopsis
  misc_feature (1)..(241): Homolog of NCBI NO: 21536982 NR Description: nucleotide sugar epimerase, putative [Arabidopsis
  misc_feature (1)..(241): Homolog of NCBI NO: 15236712 NR Description: nucleotide sugar epimerase family [Arabidopsis
  misc_feature (1)..(241): Homolog of NCBI NO: 29647497 NR Description: OJ1191_A10.21 [Oryza sativa (japonica
  misc_feature (1)..(241): Homolog of NCBI NO: 15225451 NR Description: nucleotide sugar epimerase family [Arabidopsis
  misc_feature (1)..(241): Homolog of NCBI NO: 15234486 NR Description: nucleotide sugar epimerase family [Arabidopsis
  misc_feature (1)..(241): Homolog of NCBI NO: 15293119 NR Description: putative nucleotide sugar epimerase [Arabidopsis
  misc_feature (1)..(248): Homolog of NCBI NO: 15234745 NR Description: nucleotide sugar epimerase family [Arabidopsis
  misc_feature (1)..(258): Homolog of NCBI NO: 15229524 NR Description: NAD-dependent epimerase/dehydratase family
  misc_feature (1)..(258): Homolog of NCBI NO: 24417280 NR Description: unknown [Arabidopsis thaliana]
  misc_feature (1)..(241): Homolog of NCBI NO: 15217591 NR Description: nucleotide sugar epimerase family [Arabidopsis
  misc_feature (1)..(241): Homolog of NCBI NO: 21536982 NR Description: nucleotide sugar epimerase, putative [Arabidopsis
  misc_feature (1)..(241): Homolog of NCBI NO: 15236712 NR Description: nucleotide sugar epimerase family [Arabidopsis
  misc_feature (1)..(241): Homolog of NCBI NO: 29647497 NR Description: OJ1191_A10.21 [Oryza sativa (japonica
  misc_feature (1)..(241): Homolog of NCBI NO: 15225451 NR Description: nucleotide sugar epimerase family [Arabidopsis
  misc_feature (1)..(241): Homolog of NCBI NO: 15293119 NR Description: putative nucleotide sugar epimerase [Arabidopsis
  misc_feature (1)..(241): Homolog of NCBI NO: 15236712 NR Description: nucleotide sugar epimerase family [Arabidopsis
  misc_feature (1)..(241): Homolog of NCBI NO: 21536982 NR Description: nucleotide sugar epimerase, putative [Arabidopsis
  misc_feature (1)..(241): Homolog of NCBI NO: 15217591 NR Description: nucleotide sugar epimerase family [Arabidopsis
  misc_feature (1)..(258): Homolog of NCBI NO: 24417280 NR Description: unknown [Arabidopsis thaliana]
  misc_feature (1)..(258): Homolog of NCBI NO: 15229524 NR Description: NAD-dependent epimerase/dehydratase family
MKNPQSYIASNIAGFVNLLEVAKAANPQPAIVWASSSSVYGLNTENPFSEEHRTDQPASLYAATKKAGEEIAHTYNHIYGLSLTGLRFFTVYGPWGRPDMAYFFFTKDILHGKSIDIYRTQDNQEVARDFTYIDDIVKGCVGALDTAEKSTGSGGKKRGQAQLRVYNLGNTSPVPVGRLVSILEGLLGTKAKKHLIKMPRNGDVPYTHANVSLAYKDFGYKPTTDLAAGLRKFVKWYVGYYGIQPRVKKETSHAEDSA

SEQ ID NO: 45867 - DNA, 2424 bp, Arabidopsis thaliana
  misc_feature (1)..(2424): Ceres Seq. ID no. 15172387
  misc_feature: MA Experiment ID: 20000173 Result: Up-regulated in Transcription
  misc_feature: MA Experiment 20000173 PARAMETER Experiment Name: At_42deg_Heat_P Parameter: Age (day) Value: 14
  misc_feature: MA Experiment 20000173 PARAMETER Experiment Name: At_42deg_Heat_P Parameter: Organism Value: A. thaliana
  misc_feature: MA Experiment 20000173 PARAMETER Experiment Name: At_42deg_Heat_P Parameter: Plant Line Value: WS
  misc_feature: MA Experiment 20000173 PARAMETER Experiment Name: At_42deg_Heat_P Parameter: Temperature (deg C) Value: 42 vs. 22
  misc_feature: MA Experiment 20000173 PARAMETER Experiment Name: At_42deg_Heat_P Parameter: Timepoint (hr) Value: 6
  misc_feature: MA Experiment 20000173 PARAMETER Experiment Name: At_42deg_Heat_P Parameter: Tissue Value: Aerial
  misc_feature: MA Experiment ID: 20000179 Result: Down-regulated in Transcription
  misc_feature: MA Experiment 20000179 PARAMETER Experiment Name: At_Germinating_Seeds_P Parameter: Age (hr) Value: 6 vs. 0
  misc_feature: MA Experiment 20000179 PARAMETER Experiment Name: At_Germinating_Seeds_P Parameter: Tissue Value: Germinating Seeds
  misc_feature: MA Experiment ID: 20000180 Result: Down-regulated in Transcription
  misc_feature: MA Experiment 20000180 PARAMETER Experiment Name: At_Germinating_Seeds_P Parameter: Age (hr) Value: 24 vs. 0
  misc_feature: MA Experiment 20000180 PARAMETER Experiment Name: At_Germinating_Seeds_P Parameter: Tissue Value: Germinating Seeds
  misc_feature: MA Experiment ID: 20000495 Result: Up-regulated in Transcription
  misc_feature: MA Experiment 20000495 PARAMETER Experiment Name: At_Guard_Cells_P Parameter: Harvest Date Value: 8/2/2002
  misc_feature: MA Experiment 20000495 PARAMETER Experiment Name: At_Guard_Cells_P Parameter: Organism Value: A. thaliana
  misc_feature: MA Experiment 20000495 PARAMETER Experiment Name: At_Guard_Cells_P Parameter: Tissue Value: Guard Cells vs. Leaves
  misc_feature: MA Experiment ID: 20001555 Result: Down-regulated in Transcription
  misc_feature: MA Experiment 20001555 PARAMETER Experiment Name: At_Drought_Soil_Dry_P Parameter: Age (day) Value: 24
  misc_feature: MA Experiment 20001555 PARAMETER Experiment Name: At_Drought_Soil_Dry_P Parameter: Organism Value: A. thaliana
  misc_feature: MA Experiment 20001555 PARAMETER Experiment Name: At_Drought_Soil_Dry_P Parameter: Plant Line Value: WS
  misc_feature: MA Experiment 20001555 PARAMETER Experiment Name: At_Drought_Soil_Dry_P Parameter: Post Timepoint (hr) Value: None
  misc_feature: MA Experiment 20001555 PARAMETER Experiment Name: At_Drought_Soil_Dry_P Parameter: Post-Treatment Value: None
  misc_feature: MA Experiment 20001555 PARAMETER Experiment Name: At_Drought_Soil_Dry_P Parameter: Timepoint (day) Value: 10
  misc_feature: MA Experiment 20001555 PARAMETER Experiment Name: At_Drought_Soil_Dry_P Parameter: Treatment Value: Drought vs. No Drought
  misc_feature: MA Experiment ID: 20001556 Result: Down-regulated in Transcription
  misc_feature: MA Experiment 20001556 PARAMETER Experiment Name: At_Drought_Soil_Dry_P Parameter: Age (day) Value: 26
  misc_feature: MA Experiment 20001556 PARAMETER Experiment Name: At_Drought_Soil_Dry_P Parameter: Organism Value: A. thaliana
  misc_feature: MA Experiment 20001556 PARAMETER Experiment Name: At_Drought_Soil_Dry_P Parameter: Plant Line Value: WS
  misc_feature: MA Experiment 20001556 PARAMETER Experiment Name: At_Drought_Soil_Dry_P Parameter: Post Timepoint (hr) Value: None
  misc_feature: MA Experiment 20001556 PARAMETER Experiment Name: At_Drought_Soil_Dry_P Parameter: Post-Treatment Value: None
  misc_feature: MA Experiment 20001556 PARAMETER Experiment Name: At_Drought_Soil_Dry_P Parameter: Timepoint (day) Value: 12
  misc_feature: MA Experiment 20001556 PARAMETER Experiment Name: At_Drought_Soil_Dry_P Parameter: Treatment Value: Drought vs. No Drought
  misc_feature: MA Experiment ID: 20001911 Result: Up-regulated in Transcription
  misc_feature: MA Experiment 20001911 PARAMETER Experiment Name: At_Drought_Reproduction_P Parameter: Age (day) Value: 40
  misc_feature: MA Experiment 20001911 PARAMETER Experiment Name: At_Drought_Reproduction_P Parameter: Organism Value: A. thaliana
  misc_feature: MA Experiment 20001911 PARAMETER Experiment Name: At_Drought_Reproduction_P Parameter: Plant Line Value: WS
  misc_feature: MA Experiment 20001911 PARAMETER Experiment Name: At_Drought_Reproduction_P Parameter: Timepoint (day) Value: 10
  misc_feature: MA Experiment 20001911 PARAMETER Experiment Name: At_Drought_Reproduction_P Parameter: Tissue Value: Flowers
  misc_feature: MA Experiment 20001911 PARAMETER Experiment Name: At_Drought_Reproduction_P Parameter: Treatment Value: Drought vs. No Drought
ggaaaatctctccgccaaaattactctctccttaaacctcttcaccttctctctctcccctcctctgtatctatctcaaatctctctctctgtatctttaactcttattctagttttaatttaagtgtcggaaaaaacccttgttacacagtcatggcggtgatgaacggtggtcgtgcgacgaagcgagcgaggcgtagcaacagaatctcagctgatctttacgatttctctactttcccgacggcggagatcaacggcgagtcgacgactttgccgccgttccgagacggtgtgagaaccttcctcgcgacccacgcgcgtgtcactttccctccttcgacgctcttctcgagtttgatgacgtggcagatcatgcttagacctggagattcgacggacggttcagatctctcttctaaactcgtctctctcgacgttgtggaggaggatgtgacgagatcctctagatctgtttactgtgaacactgctgtgtcgttggttggagtagtcatccagtgtgtagaaagaggtaccgcttcatcataaggtcaggaggagacactaaggcttgcacgaggtgtggtaatactcagaatttgtctgaaggtagcaattgcaaatggtgcagcatggctttagacattgaaaactgggtttactctcagctagaggataacactcacctccttcacggcgttatccactctaatggctacgctcatctactgtgtcttaatggaagagaaggtggctctggttttttgactggtcgtgccattatggacttctgggataggctttgttcctcccttgctgttcgaaaagctagtgtgatggatgtgtcaaggaagtatgggatggactaccggttgcttcatgggattactagagggtgttcgtggtacagtgagtggggttatgaattcaaatcggggagctatgcactcaccaaagaagcttaccagagtgcagtggatactttatctgcgattcctctctctgagtttttgttccaggggaggaaaccaagaactcagctccactccattattagcttctaccaatcactctcgtgttcagagcttgtgactgtcaaagacctcttctcctttctcctacagatgattcgtgagaacagttccaaacctgcatctaagtcgtctgtactgtgtgcttggtctaaaagtgatgtggaacgtgtacagcaaaccatggttaagatactgaaagcttcaggacgcccacaagccaactgggttacaaggtgggctctcaagaggtctatttgcaaatcagcctctccacaactgattgattactgtctcaagcattttggaggggttttggtggatgatggatctcgagtagtcagctcacgttgcaatcctggttcaaacgactttgagtacaggcttgaatctgtcaacaatgtgcaccgcttatctaatcaagatgtaaataatgcatcagtggagcatgtcaaacaggatttaagatatttgtatgaaactttattgcacccacaaaccatggccgagtttaggtctcgagctacaagagaaaaaatgattgacgcagccacaaaaatactggactgtaagcatttcataaaagattacctgtctagcacagtgaaccccgttgcaatcaacctctggtgctgtgttgagctttcggatgaactcaaagaatccccagcccctccacctgaacggttggttttgccattgaacgctactgtttccgaccttaaaatcgaagctgctaaggcttttcaggaagtgtatgcaatgttcaagaggtttgaagttgaggagctcctaggttacggttctatagatgactctattaccctgaaatttctagttggcacaaacggggtcatacggattaaagggagatgctcaaaacacgggctccttagataccgcatggagagaggggtggataattggaaagttgattgcaagtgtggcacaaaggatgatgatggcgagaggatgttggcctgtgatggatgtggtgtgtggcaccacactagatgtattgggatcaataacgctgatgccctaccttccaagttcctttgtttcagatgcattgagttgtacagcaagaaaccaaagcaatctaaaaaagagcgtggatctagtcaagtgcccaaagctggctttgtttgtagaggtgagtcagctgctatgggcagtggatctaatttatccgtaacacttagagtaggctgactgtatttatgatctttctgtatataggttcttatctaggcacaaaactgcaaatggcttaaggtttctacccgtgattgtaactaacacatgaccacttcaagatttcaatcctaagcttaaaagtgttatgtaaacatgggattaagacatttatgaaagtcgaatgttttgttt

SEQ ID NO: 45868 - protein, 748 aa, Arabidopsis thaliana
  peptide (1)..(748): Ceres Seq. ID no. 15172388
  misc_feature (656)..(704): Pfam Name: PHD-finger Pfam Description: PHD-finger
  misc_feature (229)..(374): Homolog of NCBI NO: 18071367 NR Description: putative collagen [Oryza sativa (japonica
  misc_feature (392)..(701): Homolog of NCBI NO: 18071367 NR Description: putative collagen [Oryza sativa (japonica
  misc_feature (95)..(183): Homolog of NCBI NO: 15226359 NR Description: hypothetical protein [Arabidopsis thaliana]
  misc_feature (227)..(391): Homolog of NCBI NO: 15226359 NR Description: hypothetical protein [Arabidopsis thaliana]
  misc_feature (394)..(708): Homolog of NCBI NO: 15226359 NR Description: hypothetical protein [Arabidopsis thaliana]
  misc_feature (464)..(701): Homolog of NCBI NO: 15554513 NR Description: male sterility 1 protein [Arabidopsis thaliana]
  misc_feature (143)..(487): Homolog of NCBI NO: 15554513 NR Description: male sterility 1 protein [Arabidopsis thaliana]
  misc_feature (464)..(701): Homolog of NCBI NO: 15242181 NR Description: expressed protein [Arabidopsis thaliana]
  misc_feature (143)..(487): Homolog of NCBI NO: 15242181 NR Description: expressed protein [Arabidopsis thaliana]
  misc_feature (54)..(738): Homolog of NCBI NO: 34907348 NR Description: putative male sterility 1 protein
GKSLRQNYSLLKPLHLLSLPSSVSISNLSLCIFNSYSSFNLSVGKNPCYTVMAVMNGGRATKRARRSNRISADLYDFSTFPTAEINGESTTLPPFRDGVRTFLATHARVTFPPSTLFSSLMTWQIMLRPGDSTDGSDLSSKLVSLDVVEEDVTRSSRSVYCEHCCVVGWSSHPVCRKRYRFIIRSGGDTKACTRCGNTQNLSEGSNCKWCSMALDIENWVYSQLEDNTHLLHGVIHSNGYAHLLCLNGREGGSGFLTGRAIMDFWDRLCSSLAVRKASVMDVSRKYGMDYRLLHGITRGCSWYSEWGYEFKSGSYALTKEAYQSAVDTLSAIPLSEFLFQGRKPRTQLHSIISFYQSLSCSELVTVKDLFSFLLQMIRENSSKPASKSSVLCAWSKSDVERVQQTMVKILKASGRPQANWVTRWALKRSICKSASPQLIDYCLKHFGGVLVDDGSRVVSSRCNPGSNDFEYRLESVNNVHRLSNQDVNNASVEHVKQDLRYLYETLLHPQTMAEFRSRATREKMIDAATKILDCKHFIKDYLSSTVNPVAINLWCCVELSDELKESPAPPPERLVLPLNATVSDLKIEAAKAFQEVYAMFKRFEVEELLGYGSIDDSITLKFLVGTNGVIRIKGRCSKHGLLRYRMERGVDNWKVDCKCGTKDDDGERMLACDGCGVWHHTRCIGINNADALPSKFLCFRCIELYSKKPKQSKKERGSSQVPKAGFVCRGESAAMGSGSNLSVTLRVG

SEQ ID NO: 45869 - protein, 697 aa, Arabidopsis thaliana
  peptide (1)..(697): Ceres Seq. ID no. 15172389
  misc_feature (605)..(653): Pfam Name: PHD-finger Pfam Description: PHD-finger
  misc_feature (178)..(323): Homolog of NCBI NO: 18071367 NR Description: putative collagen [Oryza sativa (japonica
  misc_feature (341)..(650): Homolog of NCBI NO: 18071367 NR Description: putative collagen [Oryza sativa (japonica
  misc_feature (44)..(132): Homolog of NCBI NO: 15226359 NR Description: hypothetical protein [Arabidopsis thaliana]
  misc_feature (176)..(340): Homolog of NCBI NO: 15226359 NR Description: hypothetical protein [Arabidopsis thaliana]
  misc_feature (343)..(657): Homolog of NCBI NO: 15226359 NR Description: hypothetical protein [Arabidopsis thaliana]
  misc_feature (413)..(650): Homolog of NCBI NO: 15554513 NR Description: male sterility 1 protein [Arabidopsis thaliana]
  misc_feature (92)..(436): Homolog of NCBI NO: 15554513 NR Description: male sterility 1 protein [Arabidopsis thaliana]
  misc_feature (413)..(650): Homolog of NCBI NO: 15242181 NR Description: expressed protein [Arabidopsis thaliana]
  misc_feature (92)..(436): Homolog of NCBI NO: 15242181 NR Description: expressed protein [Arabidopsis thaliana]
  misc_feature (3)..(687): Homolog of NCBI NO: 34907348 NR Description: putative male sterility 1 protein
MAVMNGGRATKRARRSNRISADLYDFSTFPTAEINGESTTLPPFRDGVRTFLATHARVTFPPSTLFSSLMTWQIMLRPGDSTDGSDLSSKLVSLDVVEEDVTRSSRSVYCEHCCVVGWSSHPVCRKRYRFIIRSGGDTKACTRCGNTQNLSEGSNCKWCSMALDIENWVYSQLEDNTHLLHGVIHSNGYAHLLCLNGREGGSGFLTGRAIMDFWDRLCSSLAVRKASVMDVSRKYGMDYRLLHGITRGCSWYSEWGYEFKSGSYALTKEAYQSAVDTLSAIPLSEFLFQGRKPRTQLHSIISFYQSLSCSELVTVKDLFSFLLQMIRENSSKPASKSSVLCAWSKSDVERVQQTMVKILKASGRPQANWVTRWALKRSICKSASPQLIDYCLKHFGGVLVDDGSRVVSSRCNPGSNDFEYRLESVNNVHRLSNQDVNNASVEHVKQDLRYLYETLLHPQTMAEFRSRATREKMIDAATKILDCKHFIKDYLSSTVNPVAINLWCCVELSDELKESPAPPPERLVLPLNATVSDLKIEAAKAFQEVYAMFKRFEVEELLGYGSIDDSITLKFLVGTNGVIRIKGRCSKHGLLRYRMERGVDNWKVDCKCGTKDDDGERMLACDGCGVWHHTRCIGINNADALPSKFLCFRCIELYSKKPKQSKKERGSSQVPKAGFVCRGESAAMGSGSNLSVTLRVG

SEQ ID NO: 45870 - protein, 694 aa, Arabidopsis thaliana
  peptide (1)..(694): Ceres Seq. ID no. 15172390
  misc_feature (602)..(650): Pfam Name: PHD-finger Pfam Description: PHD-finger
  misc_feature (175)..(320): Homolog of NCBI NO: 18071367 NR Description: putative collagen [Oryza sativa (japonica
  misc_feature (338)..(647): Homolog of NCBI NO: 18071367 NR Description: putative collagen [Oryza sativa (japonica
  misc_feature (41)..(129): Homolog of NCBI NO: 15226359 NR Description: hypothetical protein [Arabidopsis thaliana]
  misc_feature (173)..(337): Homolog of NCBI NO: 15226359 NR Description: hypothetical protein [Arabidopsis thaliana]
  misc_feature (340)..(654): Homolog of NCBI NO: 15226359 NR Description: hypothetical protein [Arabidopsis thaliana]
  misc_feature (410)..(647): Homolog of NCBI NO: 15554513 NR Description: male sterility 1 protein [Arabidopsis thaliana]
  misc_feature (89)..(433): Homolog of NCBI NO: 15554513 NR Description: male sterility 1 protein [Arabidopsis thaliana]
  misc_feature (410)..(647): Homolog of NCBI NO: 15242181 NR Description: expressed protein [Arabidopsis thaliana]
  misc_feature (89)..(433): Homolog of NCBI NO: 15242181 NR Description: expressed protein [Arabidopsis thaliana]
  misc_feature (1)..(684): Homolog of NCBI NO: 34907348 NR Description: putative male sterility 1 protein
MNGGRATKRARRSNRISADLYDFSTFPTAEINGESTTLPPFRDGVRTFLATHARVTFPPSTLFSSLMTWQIMLRPGDSTDGSDLSSKLVSLDVVEEDVTRSSRSVYCEHCCVVGWSSHPVCRKRYRFIIRSGGDTKACTRCGNTQNLSEGSNCKWCSMALDIENWVYSQLEDNTHLLHGVIHSNGYAHLLCLNGREGGSGFLTGRAIMDFWDRLCSSLAVRKASVMDVSRKYGMDYRLLHGITRGCSWYSEWGYEFKSGSYALTKEAYQSAVDTLSAIPLSEFLFQGRKPRTQLHSIISFYQSLSCSELVTVKDLFSFLLQMIRENSSKPASKSSVLCAWSKSDVERVQQTMVKILKASGRPQANWVTRWALKRSICKSASPQLIDYCLKHFGGVLVDDGSRVVSSRCNPGSNDFEYRLESVNNVHRLSNQDVNNASVEHVKQDLRYLYETLLHPQTMAEFRSRATREKMIDAATKILDCKHFIKDYLSSTVNPVAINLWCCVELSDELKESPAPPPERLVLPLNATVSDLKIEAAKAFQEVYAMFKRFEVEELLGYGSIDDSITLKFLVGTNGVIRIKGRCSKHGLLRYRMERGVDNWKVDCKCGTKDDDGERMLACDGCGVWHHTRCIGINNADALPSKFLCFRCIELYSKKPKQSKKERGSSQVPKAGFVCRGESAAMGSGSNLSVTLRVG

SEQ ID NO: 45871 - DNA, 2667 bp, Arabidopsis thaliana
  misc_feature (1)..(2667): Ceres Seq. ID no. 14315767
  misc_feature: MA Experiment ID: 20000171 Result: Down-regulated in Transcription
  misc_feature: MA Experiment 20000171 PARAMETER Experiment Name: At_42deg_Heat_P Parameter: Age (day) Value: 14
  misc_feature: MA Experiment 20000171 PARAMETER Experiment Name: At_42deg_Heat_P Parameter: Organism Value: A. thaliana
  misc_feature: MA Experiment 20000171 PARAMETER Experiment Name: At_42deg_Heat_P Parameter: Plant Line Value: WS
  misc_feature: MA Experiment 20000171 PARAMETER Experiment Name: At_42deg_Heat_P Parameter: Temperature (deg C) Value: 42 vs. 22
  misc_feature: MA Experiment 20000171 PARAMETER Experiment Name: At_42deg_Heat_P Parameter: Timepoint (hr) Value: 1
  misc_feature: MA Experiment 20000171 PARAMETER Experiment Name: At_42deg_Heat_P Parameter: Tissue Value: Aerial
  misc_feature: MA Experiment ID: 20000173 Result: Down-regulated in Transcription
  misc_feature: MA Experiment 20000173 PARAMETER Experiment Name: At_42deg_Heat_P Parameter: Age (day) Value: 14
  misc_feature: MA Experiment 20000173 PARAMETER Experiment Name: At_42deg_Heat_P Parameter: Organism Value: A. thaliana
  misc_feature: MA Experiment 20000173 PARAMETER Experiment Name: At_42deg_Heat_P Parameter: Plant Line Value: WS
  misc_feature: MA Experiment 20000173 PARAMETER Experiment Name: At_42deg_Heat_P Parameter: Temperature (deg C) Value: 42 vs. 22
  misc_feature: MA Experiment 20000173 PARAMETER Experiment Name: At_42deg_Heat_P Parameter: Timepoint (hr) Value: 6
  misc_feature: MA Experiment 20000173 PARAMETER Experiment Name: At_42deg_Heat_P Parameter: Tissue Value: Aerial
  misc_feature: MA Experiment ID: 20000179 Result: Up-regulated in Transcription
  misc_feature: MA Experiment 20000179 PARAMETER Experiment Name: At_Germinating_Seeds_P Parameter: Age (hr) Value: 6 vs. 0
  misc_feature: MA Experiment 20000179 PARAMETER Experiment Name: At_Germinating_Seeds_P Parameter: Tissue Value: Germinating Seeds
  misc_feature: MA Experiment ID: 20000184 Result: Up-regulated in Transcription
  misc_feature: MA Experiment 20000184 PARAMETER Experiment Name: At_Shoots__P Parameter: Age (day) Value: 7
  misc_feature: MA Experiment 20000184 PARAMETER Experiment Name: At_Shoots__P Parameter: Tissue Value: Shoots vs. Whole Plant
  misc_feature: MA Experiment ID: 20000227 Result: Up-regulated in Transcription
  misc_feature: MA Experiment 20000227 PARAMETER Experiment Name: At_Root-Tips-vs-Tops_P Parameter: Tissue Value: Root Tips vs. Root Tops
  misc_feature: MA Experiment ID: 20000234 Result: Up-regulated in Transcription
  misc_feature: MA Experiment 20000234 PARAMETER Experiment Name: At_Siliques_P Parameter: Age (day) Value: 21
  misc_feature: MA Experiment 20000234 PARAMETER Experiment Name: At_Siliques_P Parameter: Organism Value: A. thaliana
  misc_feature: MA Experiment 20000234 PARAMETER Experiment Name: At_Siliques_P Parameter: Plant Line Value: WS
  misc_feature: MA Experiment 20000234 PARAMETER Experiment Name: At_Siliques_P Parameter: Tissue Value: Less Than 5mm Siliques vs. Whole Plant
  misc_feature: MA Experiment ID: 20000235 Result: Up-regulated in Transcription
  misc_feature: MA Experiment 20000235 PARAMETER Experiment Name: At_Siliques_P Parameter: Age (day) Value: 21
  misc_feature: MA Experiment 20000235 PARAMETER Experiment Name: At_Siliques_P Parameter: Organism Value: A. thaliana
  misc_feature: MA Experiment 20000235 PARAMETER Experiment Name: At_Siliques_P Parameter: Plant Line Value: WS
  misc_feature: MA Experiment 20000235 PARAMETER Experiment Name: At_Siliques_P Parameter: Tissue Value: 5-10mm Siliques vs. Whole Plant
  misc_feature: MA Experiment ID: 20000264 Result: Up-regulated in Transcription
  misc_feature: MA Experiment 20000264 PARAMETER Experiment Name: At_Open_Flower_P Parameter: Age (day) Value: 21
  misc_feature: MA Experiment 20000264 PARAMETER Experiment Name: At_Open_Flower_P Parameter: Plant Line Value: WS
  misc_feature: MA Experiment 20000264 PARAMETER Experiment Name: At_Open_Flower_P Parameter: Tissue Value: Open Flower vs. Whole Plant
  misc_feature: MA Experiment ID: 20000265 Result: Up-regulated in Transcription
  misc_feature: MA Experiment 20000265 PARAMETER Experiment Name: At_Open_Flower_P Parameter: Age (day) Value: 21
  misc_feature: MA Experiment 20000265 PARAMETER Experiment Name: At_Open_Flower_P Parameter: Plant Line Value: WS
  misc_feature: MA Experiment 20000265 PARAMETER Experiment Name: At_Open_Flower_P Parameter: Tissue Value: Closed Flower vs. Whole Plant
  misc_feature: MA Experiment ID: 20000286 Result: Up-regulated in Transcription
  misc_feature: MA Experiment 20000286 PARAMETER Experiment Name: At_Open_Flower_P Parameter: Age (day) Value: 21
  misc_feature: MA Experiment 20000286 PARAMETER Experiment Name: At_Open_Flower_P Parameter: Plant Line Value: WS
  misc_feature: MA Experiment 20000286 PARAMETER Experiment Name: At_Open_Flower_P Parameter: Tissue Value: Half Open vs. Whole Plant
  misc_feature: MA Experiment ID: 20000437 Result: Down-regulated in Transcription
  misc_feature: MA Experiment 20000437 PARAMETER Experiment Name: At_Drought_P Parameter: Age (day) Value: 8
  misc_feature: MA Experiment 20000437 PARAMETER Experiment Name: At_Drought_P Parameter: Organism Value: A. thaliana
  misc_feature: MA Experiment 20000437 PARAMETER Experiment Name: At_Drought_P Parameter: Plant Line Value: WS
  misc_feature: MA Experiment 20000437 PARAMETER Experiment Name: At_Drought_P Parameter: Timepoint (hr) Value: 24
  misc_feature: MA Experiment 20000437 PARAMETER Experiment Name: At_Drought_P Parameter: Tissue Value: Whole Plant
  misc_feature: MA Experiment 20000437 PARAMETER Experiment Name: At_Drought_P Parameter: Treatment Value: Drought vs. No Drought
  misc_feature: MA Experiment ID: 20000438 Result: Up-regulated in Transcription
  misc_feature: MA Experiment 20000438 PARAMETER Experiment Name: At_Shoots__P Parameter: Age (day) Value: 14
  misc_feature: MA Experiment 20000438 PARAMETER Experiment Name: At_Shoots__P Parameter: Tissue Value: Shoots vs. Whole Plant
  misc_feature: MA Experiment ID: 20000439 Result: Up-regulated in Transcription
  misc_feature: MA Experiment 20000439 PARAMETER Experiment Name: At_Roots__P Parameter: Age (day) Value: 14 vs. 21
  misc_feature: MA Experiment 20000439 PARAMETER Experiment Name: At_Roots__P Parameter: Organism Value: A. thaliana
  misc_feature: MA Experiment 20000439 PARAMETER Experiment Name: At_Roots__P Parameter: Tissue Value: Roots vs. Whole Plant
  misc_feature: MA Experiment ID: 20000495 Result: Up-regulated in Transcription
  misc_feature: MA Experiment 20000495 PARAMETER Experiment Name: At_Guard_Cells_P Parameter: Harvest Date Value: 8/2/2002
  misc_feature: MA Experiment 20000495 PARAMETER Experiment Name: At_Guard_Cells_P Parameter: Organism Value: A. thaliana
  misc_feature: MA Experiment 20000495 PARAMETER Experiment Name: At_Guard_Cells_P Parameter: Tissue Value: Guard Cells vs. Leaves
  misc_feature: MA Experiment ID: 20000496 Result: Up-regulated in Transcription
  misc_feature: MA Experiment 20000496 PARAMETER Experiment Name: At_Guard_Cells_P Parameter: Harvest Date Value: 7/19/2002
  misc_feature: MA Experiment 20000496 PARAMETER Experiment Name: At_Guard_Cells_P Parameter: Organism Value: Canola
  misc_feature: MA Experiment 20000496 PARAMETER Experiment Name: At_Guard_Cells_P Parameter: Tissue Value: Guard Cells vs. Leaves
  misc_feature: MA Experiment ID: 20001248 Result: Down-regulated in Transcription
  misc_feature: MA Experiment 20001248 PARAMETER Experiment Name: At_Far-red-induction_P Parameter: Age (day) Value: 7
  misc_feature: MA Experiment 20001248 PARAMETER Experiment Name: At_Far-red-induction_P Parameter: Light Value: Far-red vs. White
  misc_feature: MA Experiment 20001248 PARAMETER Experiment Name: At_Far-red-induction_P Parameter: Organism Value: A. thaliana
  misc_feature: MA Experiment 20001248 PARAMETER Experiment Name: At_Far-red-induction_P Parameter: Plant Line Value: Columbia
  misc_feature: MA Experiment 20001248 PARAMETER Experiment Name: At_Far-red-induction_P Parameter: Timepoint (hr) Value: 4
  misc_feature: MA Experiment 20001248 PARAMETER Experiment Name: At_Far-red-induction_P Parameter: Tissue Value: Whole Plant
acctattattcatgaatgcattgaagatgtcacagtgagaacaaaaaaaaagttttccaggcatggcttcacgtgatgacatcttcctcgaccaagaacttcgagaaaagatactcagaaagtgaagtgagagagagagaaaatgccggggaattttaatgcttcttcttctcttcttagtgctcactaccagaagatttctttccgccattaaagagcagagtagagcagagctctcactttcttcttcttcttcttcattttttacctttcccttttttgcttcgatcgagatgctttagcataatggggcagatctggaaagtgacttaataatagaaagtgatggctttgaggagattcatgggatgctttttacggaaactcgatttcgaactgtatcaatcatttctgtttcttttatgagctgaggaaaagagccactctttctgatttgattgattcatcattcatcgacaatggcttcttcttcttcttcttcgtcttcgagtacggtgtcgttcgtagtctttgcatttacagtcttcttctgtttggttactccggcgagatctagcgacgtcgaagctttactaagcttgaaatcttcaatcgatccatctaattcgatttcttggagaggaacagatctctgcaactggcaaggtgttagagaatgtatgaatggaagagtctccaagcttgttcttgagtacttgaatctcaccggctcacttaacgagaagagtttgaaccagttggatcaacttagggttcttagtttcaaagctaactctctctccggttcaatccctaacctctccggtttggttaacctcaaatcggtttatcttaacgataacaacttctccggcgacttcccggagtctctcacgtctcttcaccgattgaaaactattttcctctccggaaacagactgtccggtcgaatccctagctcgttgcttcgtctctctcgtctttacacgctcaatgttgaggacaatctcttcactggttcgattcctcctcttaaccagacaagtctcagatacttcaatgtatccaacaataagctctctggtcaaattccactgacacgagctttgaagcagtttgatgagtcatcgtttaccggaaacgtcgctctttgcggcgatcagattggaagtccatgcggaatctcacctgcgccgtctgcgaaaccaacgcctatacctaagtctaagaagagcaaagcgaagctgatcgggattatcgccggaagcgttgccggcggagtactaatccttatcttgctattgacgttgcttatcgtctgctggcgacggaagcggcggaaccaggcaccgagggaagatagaaaaggtaaaggaatagcggaagcagaaggagcaacaactgcagagacagagagagacattgagaggaaagacagaggattctcatgggaaagaggcgaagaaggagcagtgggaactctggttttccttggaaccagtgattcaggcgagacggtagtgagatacaccatggaagatctgcttaaagcttcggcagagacactgggaagaggaacgttggggagcacgtacaaggctgtgatggagtctgggttcattgtcactgtgaagaggctcaagaacgcaaggtatcctcgcatggaggagttcaagagacatgttgagatccttggacagctcaaacacccaaatctggtgcctctcagagcctattttcaagccaaggaagaacgcttgctcgtctacgattacttccctaatggcagtctctttactcttattcacggaactagggcttctggaagtgggaagcctcttcactggacttcatgcctgaaaatagctgaggacttggcctcagctctgctctacatacatcagaatcctggcttgactcatgggaatttgaaatcgtccaatgtcttgttaggtcctgattttgagtcctgcctcacggattacggcctcagcactctccatgaccctgactcagttgaagaaacaagcgcagtgtctctcttttacaaagctccagagtgcagagacccacggaaagcctctacacagcccgctgatgtgtatagctttggggttcttcttctcgagcttctaacaggtagaacaccattccaggaccttgttcaagaatatgggtcagatatctcaagatgggtgcgtgcagtgagagaggaagagactgaatcaggtgaggaaccgacttcttcaggcaacgaagcatcagaggagaaacttcaggcacttttaagtatcgcaacggtttgtgtgaccattcaacccgataaccggcctgtgatgagagaggtgttgaagatggtgagggatgcaagggctgaagcaccattctcgtctaacagtagcgaacattcgcccgggagatggtcggataccgttcagagattgccaagggatgatcaagtgagcatttagagaaattgggtgggccttcttcattgctttcatagaatgacacgtatgattcttgaagtagggttcatagtgtaaagcttcttttttattttgtaacgccattttgattcatcgaccttgtaggacttgcataagatctattgaattgaaatgctggcattgagtagttgaagaacagaagaatcttttttttttc

SEQ ID NO: 45872 - protein, 663 aa, Arabidopsis thaliana
  peptide (1)..(663): Ceres Seq. ID no. 14315768
  misc_feature (91)..(579): Homolog of NCBI NO: 32488914 NR Description: OSJNBb0059K02.5 [Oryza sativa (japonica
  misc_feature (40)..(230): Homolog of NCBI NO: 1931655 NR Description: receptor-kinase isolog, 5' partial; 115640-113643
  misc_feature (32)..(642): Homolog of NCBI NO: 33146664 NR Description: putative receptor-like protein kinase
  misc_feature (1)..(651): Homolog of NCBI NO: 14190425 NR Description: At1g68400/T2E12_5 [Arabidopsis thaliana]
  misc_feature (1)..(651): Homolog of NCBI NO: 15221403 NR Description: leucine-rich repeat transmembrane protein kinase,
  misc_feature (8)..(650): Homolog of NCBI NO: 15292873 NR Description: putative receptor protein kinase [Arabidopsis
  misc_feature (8)..(650): Homolog of NCBI NO: 15225780 NR Description: leucine-rich repeat transmembrane protein kinase,
  misc_feature (106)..(663): Homolog of NCBI NO: 1931655 NR Description: receptor-kinase isolog, 5' partial; 115640-113643
  misc_feature (15)..(663): Homolog of NCBI NO: 25404281 NR Description: probable receptor kinase F8A5.15
  misc_feature (8)..(663): Homolog of NCBI NO: 30696443 NR Description: leucine rich repeat protein family [Arabidopsis
MASSSSSSSSSTVSFVVFAFTVFFCLVTPARSSDVEALLSLKSSIDPSNSISWRGTDLCNWQGVRECMNGRVSKLVLEYLNLTGSLNEKSLNQLDQLRVLSFKANSLSGSIPNLSGLVNLKSVYLNDNNFSGDFPESLTSLHRLKTIFLSGNRLSGRIPSSLLRLSRLYTLNVEDNLFTGSIPPLNQTSLRYFNVSNNKLSGQIPLTRALKQFDESSFTGNVALCGDQIGSPCGISPAPSAKPTPIPKSKKSKAKLIGIIAGSVAGGVLILILLLTLLIVCWRRKRRNQAPREDRKGKGIAEAEGATTAETERDIERKDRGFSWERGEEGAVGTLVFLGTSDSGETVVRYTMEDLLKASAETLGRGTLGSTYKAVMESGFIVTVKRLKNARYPRMEEFKRHVEILGQLKHPNLVPLRAYFQAKEERLLVYDYFPNGSLFTLIHGTRASGSGKPLHWTSCLKIAEDLASALLYIHQNPGLTHGNLKSSNVLLGPDFESCLTDYGLSTLHDPDSVEETSAVSLFYKAPECRDPRKASTQPADVYSFGVLLLELLTGRTPFQDLVQEYGSDISRWVRAVREEETESGEEPTSSGNEASEEKLQALLSIATVCVTIQPDNRPVMREVLKMVRDARAEAPFSSNSSEHSPGRWSDTVQRLPRDDQVSI

SEQ ID NO: 45873 - protein, 596 aa, Arabidopsis thaliana
  peptide (1)..(596): Ceres Seq. ID no. 14315769
  misc_feature (24)..(512): Homolog of NCBI NO: 32488914 NR Description: OSJNBb0059K02.5 [Oryza sativa (japonica
  misc_feature (1)..(163): Homolog of NCBI NO: 1931655 NR Description: receptor-kinase isolog, 5' partial; 115640-113643
  misc_feature (1)..(575): Homolog of NCBI NO: 33146664 NR Description: putative receptor-like protein kinase
  misc_feature (1)..(584): Homolog of NCBI NO: 14190425 NR Description: At1g68400/T2E12_5 [Arabidopsis thaliana]
  misc_feature (1)..(584): Homolog of NCBI NO: 15221403 NR Description: leucine-rich repeat transmembrane protein kinase,
  misc_feature (1)..(583): Homolog of NCBI NO: 15292873 NR Description: putative receptor protein kinase [Arabidopsis
  misc_feature (1)..(583): Homolog of NCBI NO: 15225780 NR Description: leucine-rich repeat transmembrane protein kinase,
  misc_feature (39)..(596): Homolog of NCBI NO: 1931655 NR Description: receptor-kinase isolog, 5' partial; 115640-113643
  misc_feature (1)..(596): Homolog of NCBI NO: 25404281 NR Description: probable receptor kinase F8A5.15
  misc_feature (1)..(596): Homolog of NCBI NO: 30696443 NR Description: leucine rich repeat protein family [Arabidopsis
MNGRVSKLVLEYLNLTGSLNEKSLNQLDQLRVLSFKANSLSGSIPNLSGLVNLKSVYLNDNNFSGDFPESLTSLHRLKTIFLSGNRLSGRIPSSLLRLSRLYTLNVEDNLFTGSIPPLNQTSLRYFNVSNNKLSGQIPLTRALKQFDESSFTGNVALCGDQIGSPCGISPAPSAKPTPIPKSKKSKAKLIGIIAGSVAGGVLILILLLTLLIVCWRRKRRNQAPREDRKGKGIAEAEGATTAETERDIERKDRGFSWERGEEGAVGTLVFLGTSDSGETVVRYTMEDLLKASAETLGRGTLGSTYKAVMESGFIVTVKRLKNARYPRMEEFKRHVEILGQLKHPNLVPLRAYFQAKEERLLVYDYFPNGSLFTLIHGTRASGSGKPLHWTSCLKIAEDLASALLYIHQNPGLTHGNLKSSNVLLGPDFESCLTDYGLSTLHDPDSVEETSAVSLFYKAPECRDPRKASTQPADVYSFGVLLLELLTGRTPFQDLVQEYGSDISRWVRAVREEETESGEEPTSSGNEASEEKLQALLSIATVCVTIQPDNRPVMREVLKMVRDARAEAPFSSNSSEHSPGRWSDTVQRLPRDDQVSI

SEQ ID NO: 45874 - DNA, 1845 bp, Arabidopsis thaliana
  misc_feature (1)..(1845): Ceres Seq. ID no. 12561071
  misc_feature: MA Experiment ID: 20000439 Result: Up-regulated in Transcription
  misc_feature: MA Experiment 20000439 PARAMETER Experiment Name: At_Roots__P Parameter: Age (day) Value: 14 vs. 21
  misc_feature: MA Experiment 20000439 PARAMETER Experiment Name: At_Roots__P Parameter: Organism Value: A. thaliana
  misc_feature: MA Experiment 20000439 PARAMETER Experiment Name: At_Roots__P Parameter: Tissue Value: Roots vs. Whole Plant
  misc_feature: MA Experiment ID: 20000495 Result: Up-regulated in Transcription
  misc_feature: MA Experiment 20000495 PARAMETER Experiment Name: At_Guard_Cells_P Parameter: Harvest Date Value: 8/2/2002
  misc_feature: MA Experiment 20000495 PARAMETER Experiment Name: At_Guard_Cells_P Parameter: Organism Value: A. thaliana
  misc_feature: MA Experiment 20000495 PARAMETER Experiment Name: At_Guard_Cells_P Parameter: Tissue Value: Guard Cells vs. Leaves
atggacaagcatcatcatcaacatcttttattacagcatcatcaacatcttcaccatcatcagaagctctctcttgccaaatcatccagacaaagctgtagtgaatggatctttcgagatgttccaagtgatataaccatagaagtaaacggtggaaactttgctctgcataagttccctttagtctctagaagtggaagaatccgaagaatagttgcagaacatagagattcagatatctccaaagtggagcttcttaatctcccaggaggagcagagacattcgaactagcagcaaaattctgctatgggattaacttcgagatcacttcttcgaacgttgcacagctcttttgtgtctctgattacctcgagatgacggaagagtactccaaagataacttggcttcaagaacagaggagtatcttgagagcatcgtatgcaagaatcttgagatgtgtgttcaagtcttgaaacaatccgagattcttctccctcttgcagatgaactgaatatcataggtagatgtatcgatgccattgcctcgaaggcttgcgctgagcagatcgcttcaagcttttcgaggttggagtatagtagctcagggaggcttcatatgagcagacaagtgaaaagcagtggtgatggaggagattggtggatcgaagatctttcggttctgaggattgatttgtatcagagagttatgaatgcaatgaagtgtcgtggtgtacgtccagaaagtataggagcttctttggttagttacgctgagagagagctaacaaagagatctgaacatgaacaaaccattgttgagacaattgttacgcttttgccagtcgaaaacctcgtggttccgatcagtttcctattcgggttactgagaagagcagtgattcttgatacttcagtttcctgcaggcttgatcttgagaggaggttaggttctcagctcgatatggcgactcttgacgatctcttgatcccgtcttttcgtcatgcaggagacactttgttcgacattgacacggttcacagaatcttagtgaatttctcacagcaaggaggagatgatagtgaggatgaagagtctgtgtttgaatgcgatagtccacattcgccttcacaaaccgccatgtttaaagttgcaaagcttgtagacagttatcttgctgagatagctcccgatgctaaccttgacctttctaagttcttgcttatcgcagaagccttaccgcctcatgctcgcacccttcacgatggtttataccgcgccattgatctctatcttaaggcacatcaagggttatcagattcagacaagaagaaactatcaaaacttattgacttccagaaactctcacaagaagctggagcacacgctgcacaaaacgagcggcttcctctgcaatccatagttcaagttctctactttgagcaactcaagcttcgaagctccttgtgctcttcttactcagacgaagagccaaagccaaagcagcaacaacagcagtcatggagaatcaatagcggagctctcagtgcaacaatgtcccccaaagacaactatgcgtctctgaggagagaaaaccgagaactgaagctcgagttagctaggttgagaatgagactcaacgacctagagaaagaacatatatgtatgaagagagatatgcagaggtctcattcgcgcaaattcatgagcagtttctcaaagaaaatggggaaacttagcttctttgggcatagctcttcaagaggatcaagctctccatcaaagcagtctttcagaacagattcaaaggtactgatggagagaacttgcgcaagcacagattag

SEQ ID NO: 45875 - protein, 614 aa, Arabidopsis thaliana
  peptide (1)..(614): Ceres Seq. ID no. 12561072
  misc_feature (218)..(460): Pfam Name: NPH3 family Pfam Description: NPH3 family
  misc_feature (251)..(586): Homolog of NCBI NO: 6959488 NR Description: RPT2 [Arabidopsis thaliana]
  misc_feature (219)..(262): Homolog of NCBI NO: 30684610 NR Description: expressed protein [Arabidopsis thaliana]
  misc_feature (28)..(188): Homolog of NCBI NO: 30684610 NR Description: expressed protein [Arabidopsis thaliana]
  misc_feature (259)..(586): Homolog of NCBI NO: 30684610 NR Description: expressed protein [Arabidopsis thaliana]
  misc_feature (21)..(287): Homolog of NCBI NO: 22328160 NR Description: similar to non-phototropic hypocotyl-like protein
  misc_feature (260)..(552): Homolog of NCBI NO: 22328160 NR Description: similar to non-phototropic hypocotyl-like protein
  misc_feature (37)..(603): Homolog of NCBI NO: 15231953 NR Description: putative non-phototropic hypocotyl; protein id:
  misc_feature (37)..(583): Homolog of NCBI NO: 27542757 NR Description: hypothetical protein-like protein [Sorghum
  misc_feature (32)..(608): Homolog of NCBI NO: 15231935 NR Description: hypothetical protein; protein id: At3g08570.1
  misc_feature (1)..(315): Homolog of NCBI NO: 26449601 NR Description: non-phototropic hypocotyl-like protein
MDKHHHQHLLLQHHQHLHHHQKLSLAKSSRQSCSEWIFRDVPSDITIEVNGGNFALHKFPLVSRSGRIRRIVAEHRDSDISKVELLNLPGGAETFELAAKFCYGINFEITSSNVAQLFCVSDYLEMTEEYSKDNLASRTEEYLESIVCKNLEMCVQVLKQSEILLPLADELNIIGRCIDAIASKACAEQIASSFSRLEYSSSGRLHMSRQVKSSGDGGDWWIEDLSVLRIDLYQRVMNAMKCRGVRPESIGASLVSYAERELTKRSEHEQTIVETIVTLLPVENLVVPISFLFGLLRRAVILDTSVSCRLDLERRLGSQLDMATLDDLLIPSFRHAGDTLFDIDTVHRILVNFSQQGGDDSEDEESVFECDSPHSPSQTAMFKVAKLVDSYLAEIAPDANLDLSKFLLIAEALPPHARTLHDGLYRAIDLYLKAHQGLSDSDKKKLSKLIDFQKLSQEAGAHAAQNERLPLQSIVQVLYFEQLKLRSSLCSSYSDEEPKPKQQQQQSWRINSGALSATMSPKDNYASLRRENRELKLELARLRMRLNDLEKEHICMKRDMQRSHSRKFMSSFSKKMGKLSFFGHSSSRGSSSPSKQSFRTDSKVLMERTCASTD

SEQ ID NO: 45876 - protein, 489 aa, Arabidopsis thaliana
  peptide (1)..(489): Ceres Seq. ID no. 12561073
  misc_feature (93)..(335): Pfam Name: NPH3 family Pfam Description: NPH3 family
  misc_feature (126)..(461): Homolog of NCBI NO: 6959488 NR Description: RPT2 [Arabidopsis thaliana]
  misc_feature (94)..(137): Homolog of NCBI NO: 30684610 NR Description: expressed protein [Arabidopsis thaliana]
  misc_feature (1)..(63): Homolog of NCBI NO: 30684610 NR Description: expressed protein [Arabidopsis thaliana]
  misc_feature (134)..(461): Homolog of NCBI NO: 30684610 NR Description: expressed protein [Arabidopsis thaliana]
  misc_feature (1)..(162): Homolog of NCBI NO: 22328160 NR Description: similar to non-phototropic hypocotyl-like protein
  misc_feature (135)..(427): Homolog of NCBI NO: 22328160 NR Description: similar to non-phototropic hypocotyl-like protein
  misc_feature (1)..(478): Homolog of NCBI NO: 15231953 NR Description: putative non-phototropic hypocotyl; protein id:
  misc_feature (1)..(458): Homolog of NCBI NO: 27542757 NR Description: hypothetical protein-like protein [Sorghum
  misc_feature (1)..(483): Homolog of NCBI NO: 15231935 NR Description: hypothetical protein; protein id: At3g08570.1
  misc_feature (1)..(190): Homolog of NCBI NO: 26449601 NR Description: non-phototropic hypocotyl-like protein
MTEEYSKDNLASRTEEYLESIVCKNLEMCVQVLKQSEILLPLADELNIIGRCIDAIASKACAEQIASSFSRLEYSSSGRLHMSRQVKSSGDGGDWWIEDLSVLRIDLYQRVMNAMKCRGVRPESIGASLVSYAERELTKRSEHEQTIVETIVTLLPVENLVVPISFLFGLLRRAVILDTSVSCRLDLERRLGSQLDMATLDDLLIPSFRHAGDTLFDIDTVHRILVNFSQQGGDDSEDEESVFECDSPHSPSQTAMFKVAKLVDSYLAEIAPDANLDLSKFLLIAEALPPHARTLHDGLYRAIDLYLKAHQGLSDSDKKKLSKLIDFQKLSQEAGAHAAQNERLPLQSIVQVLYFEQLKLRSSLCSSYSDEEPKPKQQQQQSWRINSGALSATMSPKDNYASLRRENRELKLELARLRMRLNDLEKEHICMKRDMQRSHSRKFMSSFSKKMGKLSFFGHSSSRGSSSPSKQSFRTDSKVLMERTCASTD

SEQ ID NO: 45877 - protein, 462 aa, Arabidopsis thaliana
  peptide (1)..(462): Ceres Seq. ID no. 12561074
  misc_feature (66)..(308): Pfam Name: NPH3 family Pfam Description: NPH3 family
  misc_feature (99)..(434): Homolog of NCBI NO: 6959488 NR Description: RPT2 [Arabidopsis thaliana]
  misc_feature (67)..(110): Homolog of NCBI NO: 30684610 NR Description: expressed protein [Arabidopsis thaliana]
  misc_feature (1)..(36): Homolog of NCBI NO: 30684610 NR Description: expressed protein [Arabidopsis thaliana]
  misc_feature (107)..(434): Homolog of NCBI NO: 30684610 NR Description: expressed protein [Arabidopsis thaliana]
  misc_feature (1)..(135): Homolog of NCBI NO: 22328160 NR Description: similar to non-phototropic hypocotyl-like protein
  misc_feature (108)..(400): Homolog of NCBI NO: 22328160 NR Description: similar to non-phototropic hypocotyl-like protein
  misc_feature (1)..(451): Homolog of NCBI NO: 15231953 NR Description: putative non-phototropic hypocotyl; protein id:
  misc_feature (1)..(431): Homolog of NCBI NO: 27542757 NR Description: hypothetical protein-like protein [Sorghum
  misc_feature (1)..(456): Homolog of NCBI NO: 15231935 NR Description: hypothetical protein; protein id: At3g08570.1
  misc_feature (1)..(163): Homolog of NCBI NO: 26449601 NR Description: non-phototropic hypocotyl-like protein
MCVQVLKQSEILLPLADELNIIGRCIDAIASKACAEQIASSFSRLEYSSSGRLHMSRQVKSSGDGGDWWIEDLSVLRIDLYQRVMNAMKCRGVRPESIGASLVSYAERELTKRSEHEQTIVETIVTLLPVENLVVPISFLFGLLRRAVILDTSVSCRLDLERRLGSQLDMATLDDLLIPSFRHAGDTLFDIDTVHRILVNFSQQGGDDSEDEESVFECDSPHSPSQTAMFKVAKLVDSYLAEIAPDANLDLSKFLLIAEALPPHARTLHDGLYRAIDLYLKAHQGLSDSDKKKLSKLIDFQKLSQEAGAHAAQNERLPLQSIVQVLYFEQLKLRSSLCSSYSDEEPKPKQQQQQSWRINSGALSATMSPKDNYASLRRENRELKLELARLRMRLNDLEKEHICMKRDMQRSHSRKFMSSFSKKMGKLSFFGHSSSRGSSSPSKQSFRTDSKVLMERTCASTD

SEQ ID NO: 45878 - DNA, 1734 bp, Arabidopsis thaliana
  misc_feature (1)..(1734): Ceres Seq. ID no. 12561021
  misc_feature: MA Experiment ID: 20000171 Result: Down-regulated in Transcription
  misc_feature: MA Experiment 20000171 PARAMETER Experiment Name: At_42deg_Heat_P Parameter: Age (day) Value: 14
  misc_feature: MA Experiment 20000171 PARAMETER Experiment Name: At_42deg_Heat_P Parameter: Organism Value: A. thaliana
  misc_feature: MA Experiment 20000171 PARAMETER Experiment Name: At_42deg_Heat_P Parameter: Plant Line Value: WS
  misc_feature: MA Experiment 20000171 PARAMETER Experiment Name: At_42deg_Heat_P Parameter: Temperature (deg C) Value: 42 vs. 22
  misc_feature: MA Experiment 20000171 PARAMETER Experiment Name: At_42deg_Heat_P Parameter: Timepoint (hr) Value: 1
  misc_feature: MA Experiment 20000171 PARAMETER Experiment Name: At_42deg_Heat_P Parameter: Tissue Value: Aerial
  misc_feature: MA Experiment ID: 20000173 Result: Down-regulated in Transcription
  misc_feature: MA Experiment 20000173 PARAMETER Experiment Name: At_42deg_Heat_P Parameter: Age (day) Value: 14
  misc_feature: MA Experiment 20000173 PARAMETER Experiment Name: At_42deg_Heat_P Parameter: Organism Value: A. thaliana
  misc_feature: MA Experiment 20000173 PARAMETER Experiment Name: At_42deg_Heat_P Parameter: Plant Line Value: WS
  misc_feature: MA Experiment 20000173 PARAMETER Experiment Name: At_42deg_Heat_P Parameter: Temperature (deg C) Value: 42 vs. 22
  misc_feature: MA Experiment 20000173 PARAMETER Experiment Name: At_42deg_Heat_P Parameter: Timepoint (hr) Value: 6
  misc_feature: MA Experiment 20000173 PARAMETER Experiment Name: At_42deg_Heat_P Parameter: Tissue Value: Aerial
  misc_feature: MA Experiment ID: 20000180 Result: Up-regulated in Transcription
  misc_feature: MA Experiment 20000180 PARAMETER Experiment Name: At_Germinating_Seeds_P Parameter: Age (hr) Value: 24 vs. 0
  misc_feature: MA Experiment 20000180 PARAMETER Experiment Name: At_Germinating_Seeds_P Parameter: Tissue Value: Germinating Seeds
  misc_feature: MA Experiment ID: 20000184 Result: Up-regulated in Transcription
  misc_feature: MA Experiment 20000184 PARAMETER Experiment Name: At_Shoots__P Parameter: Age (day) Value: 7
  misc_feature: MA Experiment 20000184 PARAMETER Experiment Name: At_Shoots__P Parameter: Tissue Value: Shoots vs. Whole Plant
  misc_feature: MA Experiment ID: 20000234 Result: Down-regulated in Transcription
  misc_feature: MA Experiment 20000234 PARAMETER Experiment Name: At_Siliques_P Parameter: Age (day) Value: 21
  misc_feature: MA Experiment 20000234 PARAMETER Experiment Name: At_Siliques_P Parameter: Organism Value: A. thaliana
  misc_feature: MA Experiment 20000234 PARAMETER Experiment Name: At_Siliques_P Parameter: Plant Line Value: WS
  misc_feature: MA Experiment 20000234 PARAMETER Experiment Name: At_Siliques_P Parameter: Tissue Value: Less Than 5mm Siliques vs. Whole Plant
  misc_feature: MA Experiment ID: 20000265 Result: Down-regulated in Transcription
  misc_feature: MA Experiment 20000265 PARAMETER Experiment Name: At_Open_Flower_P Parameter: Age (day) Value: 21
  misc_feature: MA Experiment 20000265 PARAMETER Experiment Name: At_Open_Flower_P Parameter: Plant Line Value: WS
  misc_feature: MA Experiment 20000265 PARAMETER Experiment Name: At_Open_Flower_P Parameter: Tissue Value: Closed Flower vs. Whole Plant
  misc_feature: MA Experiment ID: 20000267 Result: Down-regulated in Transcription
  misc_feature: MA Experiment 20000267 PARAMETER Experiment Name: At_Drought_P Parameter: Age (day) Value: 7
  misc_feature: MA Experiment 20000267 PARAMETER Experiment Name: At_Drought_P Parameter: Organism Value: A. thaliana
  misc_feature: MA Experiment 20000267 PARAMETER Experiment Name: At_Drought_P Parameter: Plant Line Value: WS
  misc_feature: MA Experiment 20000267 PARAMETER Experiment Name: At_Drought_P Parameter: Timepoint (hr) Value: 6
  misc_feature: MA Experiment 20000267 PARAMETER Experiment Name: At_Drought_P Parameter: Tissue Value: Whole Plant
  misc_feature: MA Experiment 20000267 PARAMETER Experiment Name: At_Drought_P Parameter: Treatment Value: Drought vs. No Drought
  misc_feature: MA Experiment ID: 20000441 Result: Up-regulated in Transcription
  misc_feature: MA Experiment 20000441 PARAMETER Experiment Name: At_1uM_BR-BRZ__P Parameter: Tissue Value: Shoot Apices
  misc_feature: MA Experiment 20000441 PARAMETER Experiment Name: At_1uM_BR-BRZ__P Parameter: Treatment Value: 1uM BR vs. No Treatment
  misc_feature: MA Experiment ID: 20000443 Result: Up-regulated in Transcription
  misc_feature: MA Experiment 20000443 PARAMETER Experiment Name: At_1uM_BR-BRZ__P Parameter: Tissue Value: Shoot Apices
  misc_feature: MA Experiment 20000443 PARAMETER Experiment Name: At_1uM_BR-BRZ__P Parameter: Treatment Value: 1uM BRZ vs. No Treatment
  misc_feature: MA Experiment ID: 20000445 Result: Up-regulated in Transcription
  misc_feature: MA Experiment 20000445 PARAMETER Experiment Name: At_100uM_NAA__P Parameter: Age (day) Value: 14
  misc_feature: MA Experiment 20000445 PARAMETER Experiment Name: At_100uM_NAA__P Parameter: Organism Value: A. thaliana
  misc_feature: MA Experiment 20000445 PARAMETER Experiment Name: At_100uM_NAA__P Parameter: Plant Line Value: WS
  misc_feature: MA Experiment 20000445 PARAMETER Experiment Name: At_100uM_NAA__P Parameter: Timepoint (hr) Value: 6
  misc_feature: MA Experiment 20000445 PARAMETER Experiment Name: At_100uM_NAA__P Parameter: Tissue Value: Aerial
  misc_feature: MA Experiment 20000445 PARAMETER Experiment Name: At_100uM_NAA__P Parameter: Treatment Value: 100uM NAA vs. No Treatment
  misc_feature: MA Experiment ID: 20000495 Result: Up-regulated in Transcription
  misc_feature: MA Experiment 20000495 PARAMETER Experiment Name: At_Guard_Cells_P Parameter: Harvest Date Value: 8/2/2002
  misc_feature: MA Experiment 20000495 PARAMETER Experiment Name: At_Guard_Cells_P Parameter: Organism Value: A. thaliana
  misc_feature: MA Experiment 20000495 PARAMETER Experiment Name: At_Guard_Cells_P Parameter: Tissue Value: Guard Cells vs. Leaves
  misc_feature: MA Experiment ID: 20000573 Result: Up-regulated in Transcription
  misc_feature: MA Experiment 20000573 PARAMETER Experiment Name: At_100uM_ABA_Mutants__P Parameter: Organism Value: A. thaliana
  misc_feature: MA Experiment 20000573 PARAMETER Experiment Name: At_100uM_ABA_Mutants__P Parameter: Plant Line Value: CS22 vs. Ler wt
  misc_feature: MA Experiment 20000573 PARAMETER Experiment Name: At_100uM_ABA_Mutants__P Parameter: Timepoint (hr) Value: N/A
  misc_feature: MA Experiment 20000573 PARAMETER Experiment Name: At_100uM_ABA_Mutants__P Parameter: Tissue Value: Whole Plant
  misc_feature: MA Experiment 20000573 PARAMETER Experiment Name: At_100uM_ABA_Mutants__P Parameter: Treatment Value: None
  misc_feature: MA Experiment ID: 20000574 Result: Up-regulated in Transcription
  misc_feature: MA Experiment 20000574 PARAMETER Experiment Name: At_100uM_ABA_Mutants__P Parameter: Organism Value: A. thaliana
  misc_feature: MA Experiment 20000574 PARAMETER Experiment Name: At_100uM_ABA_Mutants__P Parameter: Plant Line Value: CS23 vs. Ler wt
  misc_feature: MA Experiment 20000574 PARAMETER Experiment Name: At_100uM_ABA_Mutants__P Parameter: Timepoint (hr) Value: N/A
  misc_feature: MA Experiment 20000574 PARAMETER Experiment Name: At_100uM_ABA_Mutants__P Parameter: Tissue Value: Whole Plant
  misc_feature: MA Experiment 20000574 PARAMETER Experiment Name: At_100uM_ABA_Mutants__P Parameter: Treatment Value: None
  misc_feature: MA Experiment ID: 20001248 Result: Up-regulated in Transcription
  misc_feature: MA Experiment 20001248 PARAMETER Experiment Name: At_Far-red-induction_P Parameter: Age (day) Value: 7
  misc_feature: MA Experiment 20001248 PARAMETER Experiment Name: At_Far-red-induction_P Parameter: Light Value: Far-red vs. White
  misc_feature: MA Experiment 20001248 PARAMETER Experiment Name: At_Far-red-induction_P Parameter: Organism Value: A. thaliana
  misc_feature: MA Experiment 20001248 PARAMETER Experiment Name: At_Far-red-induction_P Parameter: Plant Line Value: Columbia
  misc_feature: MA Experiment 20001248 PARAMETER Experiment Name: At_Far-red-induction_P Parameter: Timepoint (hr) Value: 4
  misc_feature: MA Experiment 20001248 PARAMETER Experiment Name: At_Far-red-induction_P Parameter: Tissue Value: Whole Plant
  misc_feature: MA Experiment ID: 20001450 Result: Up-regulated in Transcription
  misc_feature: MA Experiment 20001450 PARAMETER Experiment Name: At_Far-red-induction_P Parameter: Age (day) Value: 7
  misc_feature: MA Experiment 20001450 PARAMETER Experiment Name: At_Far-red-induction_P Parameter: Light Value: Far-red vs. White
  misc_feature: MA Experiment 20001450 PARAMETER Experiment Name: At_Far-red-induction_P Parameter: Organism Value: A. thaliana
  misc_feature: MA Experiment 20001450 PARAMETER Experiment Name: At_Far-red-induction_P Parameter: Plant Line Value: Columbia
  misc_feature: MA Experiment 20001450 PARAMETER Experiment Name: At_Far-red-induction_P Parameter: Timepoint (hr) Value: 8
  misc_feature: MA Experiment 20001450 PARAMETER Experiment Name: At_Far-red-induction_P Parameter: Tissue Value: Whole Plant
  misc_feature: MA Experiment ID: 20001556 Result: Down-regulated in Transcription
  misc_feature: MA Experiment 20001556 PARAMETER Experiment Name: At_Drought_Soil_Dry_P Parameter: Age (day) Value: 26
  misc_feature: MA Experiment 20001556 PARAMETER Experiment Name: At_Drought_Soil_Dry_P Parameter: Organism Value: A. thaliana
  misc_feature: MA Experiment 20001556 PARAMETER Experiment Name: At_Drought_Soil_Dry_P Parameter: Plant Line Value: WS
  misc_feature: MA Experiment 20001556 PARAMETER Experiment Name: At_Drought_Soil_Dry_P Parameter: Post Timepoint (hr) Value: None
  misc_feature: MA Experiment 20001556 PARAMETER Experiment Name: At_Drought_Soil_Dry_P Parameter: Post-Treatment Value: None
  misc_feature: MA Experiment 20001556 PARAMETER Experiment Name: At_Drought_Soil_Dry_P Parameter: Timepoint (day) Value: 12
  misc_feature: MA Experiment 20001556 PARAMETER Experiment Name: At_Drought_Soil_Dry_P Parameter: Treatment Value: Drought vs. No Drought
  misc_feature: MA Experiment ID: 20001557 Result: Up-regulated in Transcription
  misc_feature: MA Experiment 20001557 PARAMETER Experiment Name: At_Drought_Soil_Dry_P Parameter: Age (day) Value: 27
  misc_feature: MA Experiment 20001557 PARAMETER Experiment Name: At_Drought_Soil_Dry_P Parameter: Organism Value: A. thaliana
  misc_feature: MA Experiment 20001557 PARAMETER Experiment Name: At_Drought_Soil_Dry_P Parameter: Plant Line Value: WS
  misc_feature: MA Experiment 20001557 PARAMETER Experiment Name: At_Drought_Soil_Dry_P Parameter: Post Timepoint (hr) Value: 3
  misc_feature: MA Experiment 20001557 PARAMETER Experiment Name: At_Drought_Soil_Dry_P Parameter: Post-Treatment Value: Re-Water vs. No Drought
  misc_feature: MA Experiment 20001557 PARAMETER Experiment Name: At_Drought_Soil_Dry_P Parameter: Timepoint (day) Value: 13
  misc_feature: MA Experiment 20001557 PARAMETER Experiment Name: At_Drought_Soil_Dry_P Parameter: Treatment Value: Drought vs. No Drought
  misc_feature: MA Experiment ID: 20001770 Result: Up-regulated in Transcription
  misc_feature: MA Experiment 20001770 PARAMETER Experiment Name: At_Far-red-enriched-adult_P Parameter: Age (day) Value: 28
  misc_feature: MA Experiment 20001770 PARAMETER Experiment Name: At_Far-red-enriched-adult_P Parameter: Light Value: Far-red enriched vs. White
  misc_feature: MA Experiment 20001770 PARAMETER Experiment Name: At_Far-red-enriched-adult_P Parameter: Organism Value: A. thaliana
  misc_feature: MA Experiment 20001770 PARAMETER Experiment Name: At_Far-red-enriched-adult_P Parameter: Plant Line Value: Columbia
  misc_feature: MA Experiment 20001770 PARAMETER Experiment Name: At_Far-red-enriched-adult_P Parameter: Timepoint (hr) Value: 8
  misc_feature: MA Experiment 20001770 PARAMETER Experiment Name: At_Far-red-enriched-adult_P Parameter: Tissue Value: Aerial
  misc_feature: MA Experiment ID: 20001906 Result: Down-regulated in Transcription
  misc_feature: MA Experiment 20001906 PARAMETER Experiment Name: At_Drought_Reproduction_P Parameter: Age (day) Value: 35
  misc_feature: MA Experiment 20001906 PARAMETER Experiment Name: At_Drought_Reproduction_P Parameter: Organism Value: A. thaliana
  misc_feature: MA Experiment 20001906 PARAMETER Experiment Name: At_Drought_Reproduction_P Parameter: Plant Line Value: WS
  misc_feature: MA Experiment 20001906 PARAMETER Experiment Name: At_Drought_Reproduction_P Parameter: Timepoint (day) Value: 5
  misc_feature: MA Experiment 20001906 PARAMETER Experiment Name: At_Drought_Reproduction_P Parameter: Tissue Value: Siliques
  misc_feature: MA Experiment 20001906 PARAMETER Experiment Name: At_Drought_Reproduction_P Parameter: Treatment Value: Drought vs. No Drought
  misc_feature: MA Experiment ID: 20001908 Result: Down-regulated in Transcription
  misc_feature: MA Experiment 20001908 PARAMETER Experiment Name: At_Drought_Reproduction_P Parameter: Age (day) Value: 40
  misc_feature: MA Experiment 20001908 PARAMETER Experiment Name: At_Drought_Reproduction_P Parameter: Organism Value: A. thaliana
  misc_feature: MA Experiment 20001908 PARAMETER Experiment Name: At_Drought_Reproduction_P Parameter: Plant Line Value: WS
  misc_feature: MA Experiment 20001908 PARAMETER Experiment Name: At_Drought_Reproduction_P Parameter: Timepoint (day) Value: 10
  misc_feature: MA Experiment 20001908 PARAMETER Experiment Name: At_Drought_Reproduction_P Parameter: Tissue Value: Siliques
  misc_feature: MA Experiment 20001908 PARAMETER Experiment Name: At_Drought_Reproduction_P Parameter: Treatment Value: Drought vs. No Drought
tactcatcaccaatacgggcaagttaaacccataactcccaaaatccatatcctctttaaaacatttttgtccaaataaaatgccttcttgttcggtaactgaaatttcaaaatgtatcgtctatccggagaagaagtccaccgtctccgatctccgtctctccgtctccgacctccctatgctctcatgtcattacattcaaaaaggcgtcctcctcaccagccctcctccttccttctccttcgacgaccttgtctcctctctccgccgttctctctcctccactctttccctcttccctgctttagccggccgtttctccaccactcccgccggtcacatttccattgtctgcaacgacgccggagttgatttcgtcgccgcttccgctaaacacgtcaaactctctgatgttctcttaccaggtgaagacgttcctctgcttttccgtgagtttttcgtcttcgagcgtctcgttagttacaacggtcatcataagcctctcgccgccgttcaagtgacggagctccacgacggtgtcttcatcggatgtaccgtgaatcattccgttactgacggaacttccttctggcacttcttcaacacctttgctgacgtcactagcggtgcttgtaagatcaaacaccttccagatttctcccgccacaccgtcttcgattctccggtcgttcttccagtccctcccggtggtccacgtgtcactttcgacgccgaccaacctctacgggagagaatttttcatttcagcagagaggcgattaccaaactgaaacagaggacgaataacagagttaacggaattgagactgccgttaacgatggaaggaaatgtaacggagagattaacggaaaaataacaaccgttttggatagttttttgaataataagaagagttatgatcggacggctgagatttcatcgttccaatctctcagcgctcagctatggcgatccgttacacgagcgaggaatctcgatccgagcaagacgacgacgtttcgaatggcggttaattgccggcaccggcttgagccgaagatggatccgtactacttcggaaacgcgatacagagcataccgacgttggcgtctgcgggagatctgctaagcaaagatctcaggtggtccgccgaacagttacacaggaacgtggtggcgcacgacgacgcgacggtccgccgtggaatcgccgcttgggaaagcgatccgaggctgtttcctctcggaaatccagatggagcttcgatcacgatggggagctcgccgagattcccaatgtacgacaatgatttcggatggggaaaaccgttagctgtgagaagcggcggagcgaataaattcgacgggaagatctcggcgtttcccggtagagaaggaaacggaagcgtggatctggaagtagttctggcgccggagactatgactgggattgagaacgatgctgagtttatgcaatacgtatcagaagtcacttacgattgttgaaaacgacgtagtttctgatacagaggaaaaaaaagcaaatatctaaagtgatagaggaacttaatggcatggcactttggacggttgagatttatctataaagtttttagatatttcgatctgagagttgtgaagcgaacgacgtcttatgagtcaatctactggtcttaatgtgacagtgtattattaatgtacaaaatcccgtctttttcaagtttttctttct

SEQ ID NO: 45879 - protein, 475 aa, Arabidopsis thaliana
  peptide (1)..(475): Ceres Seq. ID no. 12561022
  misc_feature (4)..(465): Pfam Name: Transferase family Pfam Description: Transferase family
  misc_feature (283)..(469): Homolog of NCBI NO: 15239072 NR Description: N-hydroxycinnamoyl benzoyltransferase-like protein
  misc_feature (3)..(242): Homolog of NCBI NO: 15239072 NR Description: N-hydroxycinnamoyl benzoyltransferase-like protein
  misc_feature (284)..(469): Homolog of NCBI NO: 34899602 NR Description: N-hydroxycinnamoyl benzoyltransferase-like
  misc_feature (1)..(240): Homolog of NCBI NO: 34899602 NR Description: N-hydroxycinnamoyl benzoyltransferase-like
  misc_feature (284)..(469): Homolog of NCBI NO: 24413968 NR Description: N-hydroxycinnamoyl/benzoyltransferase-like
  misc_feature (6)..(245): Homolog of NCBI NO: 24413968 NR Description: N-hydroxycinnamoyl/benzoyltransferase-like
  misc_feature (2)..(470): Homolog of NCBI NO: 34908396 NR Description: P0529E05.24 [Oryza sativa (japonica
  misc_feature (1)..(469): Homolog of NCBI NO: 15225603 NR Description: putative anthocyanin 5-aromatic acyltransferase
  misc_feature (1)..(469): Homolog of NCBI NO: 21666314 NR Description: AER [Nicotiana tabacum]
  misc_feature (1)..(475): Homolog of NCBI NO: 15240918 NR Description: anthranilate N-benzoyltransferase - like protein
MPSCSVTEISKCIVYPEKKSTVSDLRLSVSDLPMLSCHYIQKGVLLTSPPPSFSFDDLVSSLRRSLSSTLSLFPALAGRFSTTPAGHISIVCNDAGVDFVAASAKHVKLSDVLLPGEDVPLLFREFFVFERLVSYNGHHKPLAAVQVTELHDGVFIGCTVNHSVTDGTSFWHFFNTFADVTSGACKIKHLPDFSRHTVFDSPVVLPVPPGGPRVTFDADQPLRERIFHFSREAITKLKQRTNNRVNGIETAVNDGRKCNGEINGKITTVLDSFLNNKKSYDRTAEISSFQSLSAQLWRSVTRARNLDPSKTTTFRMAVNCRHRLEPKMDPYYFGNAIQSIPTLASAGDLLSKDLRWSAEQLHRNVVAHDDATVRRGIAAWESDPRLFPLGNPDGASITMGSSPRFPMYDNDFGWGKPLAVRSGGANKFDGKISAFPGREGNGSVDLEVVLAPETMTGIENDAEFMQYVSEVTYDC

SEQ ID NO: 45880 - protein, 442 aa, Arabidopsis thaliana
  peptide (1)..(442): Ceres Seq. ID no. 12561023
  misc_feature (1)..(432): Pfam Name: Transferase family Pfam Description: Transferase family
  misc_feature (250)..(436): Homolog of NCBI NO: 15239072 NR Description: N-hydroxycinnamoyl benzoyltransferase-like protein
  misc_feature (1)..(209): Homolog of NCBI NO: 15239072 NR Description: N-hydroxycinnamoyl benzoyltransferase-like protein
  misc_feature (251)..(436): Homolog of NCBI NO: 34899602 NR Description: N-hydroxycinnamoyl benzoyltransferase-like
  misc_feature (1)..(207): Homolog of NCBI NO: 34899602 NR Description: N-hydroxycinnamoyl benzoyltransferase-like
  misc_feature (251)..(436): Homolog of NCBI NO: 24413968 NR Description: N-hydroxycinnamoyl/benzoyltransferase-like
  misc_feature (1)..(212): Homolog of NCBI NO: 24413968 NR Description: N-hydroxycinnamoyl/benzoyltransferase-like
  misc_feature (1)..(437): Homolog of NCBI NO: 34908396 NR Description: P0529E05.24 [Oryza sativa (japonica
  misc_feature (1)..(436): Homolog of NCBI NO: 15225603 NR Description: putative anthocyanin 5-aromatic acyltransferase
  misc_feature (1)..(436): Homolog of NCBI NO: 21666314 NR Description: AER [Nicotiana tabacum]
  misc_feature (1)..(442): Homolog of NCBI NO: 15240918 NR Description: anthranilate N-benzoyltransferase - like protein
MLSCHYIQKGVLLTSPPPSFSFDDLVSSLRRSLSSTLSLFPALAGRFSTTPAGHISIVCNDAGVDFVAASAKHVKLSDVLLPGEDVPLLFREFFVFERLVSYNGHHKPLAAVQVTELHDGVFIGCTVNHSVTDGTSFWHFFNTFADVTSGACKIKHLPDFSRHTVFDSPVVLPVPPGGPRVTFDADQPLRERIFHFSREAITKLKQRTNNRVNGIETAVNDGRKCNGEINGKITTVLDSFLNNKKSYDRTAEISSFQSLSAQLWRSVTRARNLDPSKTTTFRMAVNCRHRLEPKMDPYYFGNAIQSIPTLASAGDLLSKDLRWSAEQLHRNVVAHDDATVRRGIAAWESDPRLFPLGNPDGASITMGSSPRFPMYDNDFGWGKPLAVRSGGANKFDGKISAFPGREGNGSVDLEVVLAPETMTGIENDAEFMQYVSEVTYDC

SEQ ID NO: 45881 - DNA, 2452 bp, Arabidopsis thaliana
  misc_feature (1)..(2452): Ceres Seq. ID no. 12561028
  misc_feature: MA Experiment ID: 20000182 Result: Up-regulated in Transcription
  misc_feature: MA Experiment 20000182 PARAMETER Experiment Name: At_2mM_SA_P Parameter: Age (day) Value: 14
  misc_feature: MA Experiment 20000182 PARAMETER Experiment Name: At_2mM_SA_P Parameter: Organism Value: A. thaliana
  misc_feature: MA Experiment 20000182 PARAMETER Experiment Name: At_2mM_SA_P Parameter: Plant Line Value: WS
  misc_feature: MA Experiment 20000182 PARAMETER Experiment Name: At_2mM_SA_P Parameter: Timepoint (hr) Value: 6
  misc_feature: MA Experiment 20000182 PARAMETER Experiment Name: At_2mM_SA_P Parameter: Tissue Value: Aerial
  misc_feature: MA Experiment 20000182 PARAMETER Experiment Name: At_2mM_SA_P Parameter: Treatment Value: 2mM SA vs. No Treatment
  misc_feature: MA Experiment ID: 20000184 Result: Down-regulated in Transcription
  misc_feature: MA Experiment 20000184 PARAMETER Experiment Name: At_Shoots__P Parameter: Age (day) Value: 7
  misc_feature: MA Experiment 20000184 PARAMETER Experiment Name: At_Shoots__P Parameter: Tissue Value: Shoots vs. Whole Plant
aattcattttctcatcaataacacaatctccctggaaaaattctctacgacttcctctcgtcgtcgagcttgttattgatcggagagagagatcagtgttctttggatcttccaatttcttccacgtttgtgcttgaattgcagaagaagttttgtataggactctgttttgcttgttgatagaatttgggaatctagggtttatcgaatcgtttattttggttttcgtttagtttctcttcttcgagctggtgtttctcaactagttagagagtttctcgattggtcagagctgcttttattgaattttctttggatttcgtgcttatagatctttgaaaagtctgagaatcctgttttggagttactgcttcaagttattggaagaaattagggtttcgatccaattttagaattgactcaaggaattccgatattggggttttgttgtagttctgattctcagtgaataagatagaagataatcatggaaatcgatggtggaaacgatgttcagattttggatcctgagctcttgcagcttcccggtttgtctcctgtatcacttaaagaaaatcctcatattgctgaagaactcttctcccagtggctttcacttcctgaaactggccgattggtcaagtctttaattgatgatactaaatctagtaccccagtcagtgtatccaaaaattgtactagtctcaatgttgcttgcgggagtgcattgccatctgtttttctgaacagcggcactcccccactatccccacgaggctcacctgggtctccccgtttctcgaggcaaaagacaagcccttctctacagtctcctctgaaatcagtcagggaaccaaagcgccaactcattccacagttttacttccaacatggacgtccacctgcgaaggaactaagggagcaatgtatatccatggttgatcaattttttagtaactatatagacggacttcatatggatgaattcaaatccattactaaagaagtctgcaagctgccttcttttctttcctctgtactatttagaaagatagacacgagtggcaccggtatcgttacaagggatgcatttatcaagtattgggttgatggacatatgttggcaatggacgtagcctcacagatatataatattttaaggcagccaggttgcaagtaccttagacaggctgacttcaaaccagttcttgatgagcttctgacaactcatcccggcttggaattcctgaggaatacacctgagtttcaagaaagatatgctgagaccgtcatctacagaatattttactacataaacagatcaggtactggttgcattactcttagagagctgaagcgtgggaatcttattactgccatgcaacaagttgatgaagaagacgacatcaataaagttattaggtacttctcctatgagcatttctacgtgatatactgcagattttgggaactcgatggcgaccatgatttccttattgataaggaaaatctcatcaaatatggtaatcatgcccttacctacaggattgtcgacagaatattttcacaggttcctaggaaatttacaagcaaagttgaggggaagatgagttatgaagattttgcatactttattctcgctgaggaggataagtcatctgagcctagtcttgagtattggttcaagtgcatagacctagatggagatggggtgatcactcccaacgagatgcagtttttctacgaagagcagctgcatcgcatggaatgtataacccaggaacctgtactctttgaagatatcctatgtcaaatattcgacatgattaaaccagagaaggagaactgcatcacactccaggatctgaaagcatccaaactttctggaaatattttcaatatactctttaacctgaacaaattcatggcgtttgaaacccgtgacccttttctcattcgtcaggaacgtgagaatccaacattgacggaatgggaccgatttgctcagagagagtatgtgaggttgtcaatggaggaagatgtggaggaagtctcgaatgggagtgcagatgtttgggatgaaccactcgaatctccattttagtgactcgtaagagtttcttgggaagaagagggagaagtcagatcttcttgggtggtaagagcctcggaaacaattttcagacagacaaccacgaaagccagtccattccacggttccacctagagattggcgaccaagagacttatccgatgcgtaagcttgtgttagtttcatgaaatatttgtcttgcttaggtttctcaggttggaccctctttcaatcttatgtatattattatatacgccgctttatagtgttttgtggaaccaacaacaacggttttatttaaaatcgaaagaactatgtacaaagacacttttttttgtgggaagaaatttacaaaccttg

SEQ ID NO: 45882 - protein, 538 aa, Arabidopsis thaliana
  peptide (1)..(538): Ceres Seq. ID no. 12561029
  misc_feature (394)..(422): Pfam Name: EF hand Pfam Description: EF hand
  misc_feature (1)..(232): Homolog of NCBI NO: 16905168 NR Description: putative phosphatase subunit, 3'-partial [Oryza
  misc_feature (199)..(492): Homolog of NCBI NO: 16905168 NR Description: putative phosphatase subunit, 3'-partial [Oryza
  misc_feature (8)..(538): Homolog of NCBI NO: 18421273 NR Description: protein phosphatase 2A regulatory subunit B-like
  misc_feature (8)..(538): Homolog of NCBI NO: 15241978 NR Description: protein phosphatase 2A regulatory subunit B-like
  misc_feature (12)..(538): Homolog of NCBI NO: 15221817 NR Description: protein phosphatase 2A 72 kDa regulatory subunit,
  misc_feature (1)..(232): Homolog of NCBI NO: 37535364 NR Description: putative protein phosphatase 2A regulatory
  misc_feature (199)..(538): Homolog of NCBI NO: 37535364 NR Description: putative protein phosphatase 2A regulatory
  misc_feature (1)..(538): Homolog of NCBI NO: 15219596 NR Description: putative protein phosphatase 2A; protein id:
  misc_feature (1)..(538): Homolog of NCBI NO: 28393301 NR Description: putative protein phosphatase 2A [Arabidopsis
  misc_feature (1)..(538): Homolog of NCBI NO: 15240089 NR Description: protein phosphatase 2A 62 kDa B regulatory
MEIDGGNDVQILDPELLQLPGLSPVSLKENPHIAEELFSQWLSLPETGRLVKSLIDDTKSSTPVSVSKNCTSLNVACGSALPSVFLNSGTPPLSPRGSPGSPRFSRQKTSPSLQSPLKSVREPKRQLIPQFYFQHGRPPAKELREQCISMVDQFFSNYIDGLHMDEFKSITKEVCKLPSFLSSVLFRKIDTSGTGIVTRDAFIKYWVDGHMLAMDVASQIYNILRQPGCKYLRQADFKPVLDELLTTHPGLEFLRNTPEFQERYAETVIYRIFYYINRSGTGCITLRELKRGNLITAMQQVDEEDDINKVIRYFSYEHFYVIYCRFWELDGDHDFLIDKENLIKYGNHALTYRIVDRIFSQVPRKFTSKVEGKMSYEDFAYFILAEEDKSSEPSLEYWFKCIDLDGDGVITPNEMQFFYEEQLHRMECITQEPVLFEDILCQIFDMIKPEKENCITLQDLKASKLSGNIFNILFNLNKFMAFETRDPFLIRQERENPTLTEWDRFAQREYVRLSMEEDVEEVSNGSADVWDEPLESPF

SEQ ID NO: 45883 - protein, 389 aa, Arabidopsis thaliana
  peptide (1)..(389): Ceres Seq. ID no. 12561030
  misc_feature (245)..(273): Pfam Name: EF hand Pfam Description: EF hand
  misc_feature (1)..(83): Homolog of NCBI NO: 16905168 NR Description: putative phosphatase subunit, 3'-partial [Oryza
  misc_feature (50)..(343): Homolog of NCBI NO: 16905168 NR Description: putative phosphatase subunit, 3'-partial [Oryza
  misc_feature (1)..(389): Homolog of NCBI NO: 18421273 NR Description: protein phosphatase 2A regulatory subunit B-like
  misc_feature (1)..(389): Homolog of NCBI NO: 15241978 NR Description: protein phosphatase 2A regulatory subunit B-like
  misc_feature (1)..(389): Homolog of NCBI NO: 15221817 NR Description: protein phosphatase 2A 72 kDa regulatory subunit,
  misc_feature (1)..(83): Homolog of NCBI NO: 37535364 NR Description: putative protein phosphatase 2A regulatory
  misc_feature (50)..(389): Homolog of NCBI NO: 37535364 NR Description: putative protein phosphatase 2A regulatory
  misc_feature (1)..(389): Homolog of NCBI NO: 15219596 NR Description: putative protein phosphatase 2A; protein id:
  misc_feature (1)..(389): Homolog of NCBI NO: 28393301 NR Description: putative protein phosphatase 2A [Arabidopsis
  misc_feature (1)..(389): Homolog of NCBI NO: 15240089 NR Description: protein phosphatase 2A 62 kDa B regulatory
MVDQFFSNYIDGLHMDEFKSITKEVCKLPSFLSSVLFRKIDTSGTGIVTRDAFIKYWVDGHMLAMDVASQIYNILRQPGCKYLRQADFKPVLDELLTTHPGLEFLRNTPEFQERYAETVIYRIFYYINRSGTGCITLRELKRGNLITAMQQVDEEDDINKVIRYFSYEHFYVIYCRFWELDGDHDFLIDKENLIKYGNHALTYRIVDRIFSQVPRKFTSKVEGKMSYEDFAYFILAEEDKSSEPSLEYWFKCIDLDGDGVITPNEMQFFYEEQLHRMECITQEPVLFEDILCQIFDMIKPEKENCITLQDLKASKLSGNIFNILFNLNKFMAFETRDPFLIRQERENPTLTEWDRFAQREYVRLSMEEDVEEVSNGSADVWDEPLESPF

SEQ ID NO: 45884 - protein, 375 aa, Arabidopsis thaliana
  peptide (1)..(375): Ceres Seq. ID no. 12561031
  misc_feature (231)..(259): Pfam Name: EF hand Pfam Description: EF hand
  misc_feature (1)..(69): Homolog of NCBI NO: 16905168 NR Description: putative phosphatase subunit, 3'-partial [Oryza
  misc_feature (36)..(329): Homolog of NCBI NO: 16905168 NR Description: putative phosphatase subunit, 3'-partial [Oryza
  misc_feature (1)..(375): Homolog of NCBI NO: 18421273 NR Description: protein phosphatase 2A regulatory subunit B-like
  misc_feature (1)..(375): Homolog of NCBI NO: 15241978 NR Description: protein phosphatase 2A regulatory subunit B-like
  misc_feature (1)..(375): Homolog of NCBI NO: 15221817 NR Description: protein phosphatase 2A 72 kDa regulatory subunit,
  misc_feature (1)..(69): Homolog of NCBI NO: 37535364 NR Description: putative protein phosphatase 2A regulatory
  misc_feature (36)..(375): Homolog of NCBI NO: 37535364 NR Description: putative protein phosphatase 2A regulatory
  misc_feature (1)..(375): Homolog of NCBI NO: 15219596 NR Description: putative protein phosphatase 2A; protein id:
  misc_feature (1)..(375): Homolog of NCBI NO: 28393301 NR Description: putative protein phosphatase 2A [Arabidopsis
  misc_feature (1)..(375): Homolog of NCBI NO: 15240089 NR Description: protein phosphatase 2A 62 kDa B regulatory
MDEFKSITKEVCKLPSFLSSVLFRKIDTSGTGIVTRDAFIKYWVDGHMLAMDVASQIYNILRQPGCKYLRQADFKPVLDELLTTHPGLEFLRNTPEFQERYAETVIYRIFYYINRSGTGCITLRELKRGNLITAMQQVDEEDDINKVIRYFSYEHFYVIYCRFWELDGDHDFLIDKENLIKYGNHALTYRIVDRIFSQVPRKFTSKVEGKMSYEDFAYFILAEEDKSSEPSLEYWFKCIDLDGDGVITPNEMQFFYEEQLHRMECITQEPVLFEDILCQIFDMIKPEKENCITLQDLKASKLSGNIFNILFNLNKFMAFETRDPFLIRQERENPTLTEWDRFAQREYVRLSMEEDVEEVSNGSADVWDEPLESPF

SEQ ID NO: 45885 - DNA, 1887 bp, Arabidopsis thaliana
  misc_feature (1)..(1887): Ceres Seq. ID no. 12560969
  misc_feature: MA Experiment ID: 20000171 Result: Down-regulated in Transcription
  misc_feature: MA Experiment 20000171 PARAMETER Experiment Name: At_42deg_Heat_P Parameter: Age (day) Value: 14
  misc_feature: MA Experiment 20000171 PARAMETER Experiment Name: At_42deg_Heat_P Parameter: Organism Value: A. thaliana
  misc_feature: MA Experiment 20000171 PARAMETER Experiment Name: At_42deg_Heat_P Parameter: Plant Line Value: WS
  misc_feature: MA Experiment 20000171 PARAMETER Experiment Name: At_42deg_Heat_P Parameter: Temperature (deg C) Value: 42 vs. 22
  misc_feature: MA Experiment 20000171 PARAMETER Experiment Name: At_42deg_Heat_P Parameter: Timepoint (hr) Value: 1
  misc_feature: MA Experiment 20000171 PARAMETER Experiment Name: At_42deg_Heat_P Parameter: Tissue Value: Aerial
  misc_feature: MA Experiment ID: 20000173 Result: Down-regulated in Transcription
  misc_feature: MA Experiment 20000173 PARAMETER Experiment Name: At_42deg_Heat_P Parameter: Age (day) Value: 14
  misc_feature: MA Experiment 20000173 PARAMETER Experiment Name: At_42deg_Heat_P Parameter: Organism Value: A. thaliana
  misc_feature: MA Experiment 20000173 PARAMETER Experiment Name: At_42deg_Heat_P Parameter: Plant Line Value: WS
  misc_feature: MA Experiment 20000173 PARAMETER Experiment Name: At_42deg_Heat_P Parameter: Temperature (deg C) Value: 42 vs. 22
  misc_feature: MA Experiment 20000173 PARAMETER Experiment Name: At_42deg_Heat_P Parameter: Timepoint (hr) Value: 6
  misc_feature: MA Experiment 20000173 PARAMETER Experiment Name: At_42deg_Heat_P Parameter: Tissue Value: Aerial
  misc_feature: MA Experiment ID: 20000437 Result: Down-regulated in Transcription
  misc_feature: MA Experiment 20000437 PARAMETER Experiment Name: At_Drought_P Parameter: Age (day) Value: 8
  misc_feature: MA Experiment 20000437 PARAMETER Experiment Name: At_Drought_P Parameter: Organism Value: A. thaliana
  misc_feature: MA Experiment 20000437 PARAMETER Experiment Name: At_Drought_P Parameter: Plant Line Value: WS
  misc_feature: MA Experiment 20000437 PARAMETER Experiment Name: At_Drought_P Parameter: Timepoint (hr) Value: 24
  misc_feature: MA Experiment 20000437 PARAMETER Experiment Name: At_Drought_P Parameter: Tissue Value: Whole Plant
  misc_feature: MA Experiment 20000437 PARAMETER Experiment Name: At_Drought_P Parameter: Treatment Value: Drought vs. No Drought
  misc_feature: MA Experiment ID: 20000438 Result: Up-regulated in Transcription
  misc_feature: MA Experiment 20000438 PARAMETER Experiment Name: At_Shoots__P Parameter: Age (day) Value: 14
  misc_feature: MA Experiment 20000438 PARAMETER Experiment Name: At_Shoots__P Parameter: Tissue Value: Shoots vs. Whole Plant
  misc_feature: MA Experiment ID: 20000794 Result: Down-regulated in Transcription
  misc_feature: MA Experiment 20000794 PARAMETER Experiment Name: At_Petals_P Parameter: Age (day) Value: 23-25 days
  misc_feature: MA Experiment 20000794 PARAMETER Experiment Name: At_Petals_P Parameter: Plant Line Value: WS
  misc_feature: MA Experiment 20000794 PARAMETER Experiment Name: At_Petals_P Parameter: Tissue Value: Petals vs. Whole plant
gacgcctttgttgctttgctttggtctctttgtcttctttctcttctcagcataaatccacacctctctctctactgtttctcacctctttcaccacatttcttttctcctttgggggaagaatcaagaaagaaagagagctagaatctagttctatccaagagtgttttttagtttctttctcttttttgggctatggaagcttgttgctctgatcttgaagtagacatcaatggagaacaaactatctttctcaataagcaaatcatatgtgcttattctggaacgttaagaaagcttttggggaaatcaactagttccagtggaaatctcaaggtgatcttcaatgatttccccggtggagctgagagtttcgagtttgtatcgaggttttgctacaatgacggtcgagtagctgtgatgccttcgaatgtagttttcttgcattgtgctgctaagtttatggaagtcactaaagtcttggaacaaacagagaagtgtatggaagagattaggtattgggcttggccagaggttcttctttgtctaaaacagtgtcaagaagttgaaacatcgcccgaagttgattctttagccgcgaaactgatggatgcgttggtggagaaactgtgtttaaccattgaaatgagtccttctagtgctggttctgcttgttcaccagatagcagcttgtttcggttttcttgtgatagtaaaagcacagagagtttcaagaattgctctgttcggttaacttggtggttcgatgaagttcttgttctgagttctggtttggttgaaatgttcttgaagcttatggtattgcggaaatttgataatctcatcataagtaggttcttgttctattatcagaaggtcaagttttgctctgcgtcttctcatgagaaaagaaagattcttgaaaccatcattgatactctttgcgtcttagatcgaagttgtgtcccttgcaagagcctttttgcggttttgaggcttgctcttggattgaacataaacaaaagctgtatgaacaagctggaggttatgataggtcaccaactggatcaagcaacactagacaatcttcttgttccatctccatcgaaatcgagtcacttgtactatgtgaatcttgttcttagattcacaaaagctttcctagatggggcaagaagtggattgcaattgaagaaagtctcaagtttgattgatcaatacatagctgaagtagcacctgatccttgcttgaaaccttcaaagtttctttctctcatcacacttgttccagattcagccagagaatcccacgaagatatataccgtgctattgatatgtatctcgaggctcacacaggaacaactgatggcgaaaaactcaacttgatacgaactttaagttacgagaagctttcaggagaatcaagagctcacatttcgcgtaaccaaaagtttcaggctattgagacactagatgaacaacaacaacaacaacaacaacaacaacaacagaagcagctcatactcagaatggagaaggttgagacttcaggagaaaacgagaagctgaaggaacatatcgaagggattcaatggagggtaatggaattggagagagcttgtttgaaaatgcagaatcaaatggaagttatcaagaagagatccaagagctcgagcaaaggaagtaatagatcacttcctaagctctgttcttgattagtgaagctgtaagcttacgatcatatttgtacatagagtgatagagagcataaggagtcaattatagttaccatttggttcttatgtttcagagtatttatcttttcttgtgttgttttctttgtcacaaagttgtgcgtaatgaaaagtaaagataaattcgttttt

SEQ ID NO: 45886 - protein, 506 aa, Arabidopsis thaliana
  peptide (1)..(506): Ceres Seq. ID no. 12560970
  misc_feature (186)..(411): Pfam Name: NPH3 family Pfam Description: NPH3 family
  misc_feature (152)..(434): Homolog of NCBI NO: 38344919 NR Description: OSJNBa0018M05.10 [Oryza sativa (japonica
  misc_feature (6)..(234): Homolog of NCBI NO: 22330150 NR Description: hypothetical protein
  misc_feature (215)..(463): Homolog of NCBI NO: 22330150 NR Description: hypothetical protein
  misc_feature (8)..(326): Homolog of NCBI NO: 34898504 NR Description: OJ1612_A04.8 [Oryza sativa (japonica
  misc_feature (441)..(506): Homolog of NCBI NO: 33146528 NR Description: putative phototropic response protein family
  misc_feature (86)..(429): Homolog of NCBI NO: 33146528 NR Description: putative phototropic response protein family
  misc_feature (441)..(506): Homolog of NCBI NO: 34898504 NR Description: OJ1612_A04.8 [Oryza sativa (japonica
  misc_feature (71)..(429): Homolog of NCBI NO: 34898504 NR Description: OJ1612_A04.8 [Oryza sativa (japonica
  misc_feature (279)..(506): Homolog of NCBI NO: 30686508 NR Description: expressed protein [Arabidopsis thaliana]
  misc_feature (1)..(506): Homolog of NCBI NO: 13430596 NR Description: unknown protein [Arabidopsis thaliana]
MEACCSDLEVDINGEQTIFLNKQIICAYSGTLRKLLGKSTSSSGNLKVIFNDFPGGAESFEFVSRFCYNDGRVAVMPSNVVFLHCAAKFMEVTKVLEQTEKCMEEIRYWAWPEVLLCLKQCQEVETSPEVDSLAAKLMDALVEKLCLTIEMSPSSAGSACSPDSSLFRFSCDSKSTESFKNCSVRLTWWFDEVLVLSSGLVEMFLKLMVLRKFDNLIISRFLFYYQKVKFCSASSHEKRKILETIIDTLCVLDRSCVPCKSLFAVLRLALGLNINKSCMNKLEVMIGHQLDQATLDNLLVPSPSKSSHLYYVNLVLRFTKAFLDGARSGLQLKKVSSLIDQYIAEVAPDPCLKPSKFLSLITLVPDSARESHEDIYRAIDMYLEAHTGTTDGEKLNLIRTLSYEKLSGESRAHISRNQKFQAIETLDEQQQQQQQQQQQKQLILRMEKVETSGENEKLKEHIEGIQWRVMELERACLKMQNQMEVIKKRSKSSSKGSNRSLPKLCS

SEQ ID NO: 45887 - protein, 431 aa, Arabidopsis thaliana
  peptide (1)..(431): Ceres Seq. ID no. 12560971
  misc_feature (111)..(336): Pfam Name: NPH3 family Pfam Description: NPH3 family
  misc_feature (77)..(359): Homolog of NCBI NO: 38344919 NR Description: OSJNBa0018M05.10 [Oryza sativa (japonica
  misc_feature (1)..(159): Homolog of NCBI NO: 22330150 NR Description: hypothetical protein
  misc_feature (140)..(388): Homolog of NCBI NO: 22330150 NR Description: hypothetical protein
  misc_feature (1)..(251): Homolog of NCBI NO: 34898504 NR Description: OJ1612_A04.8 [Oryza sativa (japonica
  misc_feature (366)..(431): Homolog of NCBI NO: 33146528 NR Description: putative phototropic response protein family
  misc_feature (11)..(354): Homolog of NCBI NO: 33146528 NR Description: putative phototropic response protein family
  misc_feature (366)..(431): Homolog of NCBI NO: 34898504 NR Description: OJ1612_A04.8 [Oryza sativa (japonica
  misc_feature (1)..(354): Homolog of NCBI NO: 34898504 NR Description: OJ1612_A04.8 [Oryza sativa (japonica
  misc_feature (204)..(431): Homolog of NCBI NO: 30686508 NR Description: expressed protein [Arabidopsis thaliana]
  misc_feature (1)..(431): Homolog of NCBI NO: 13430596 NR Description: unknown protein [Arabidopsis thaliana]
MPSNVVFLHCAAKFMEVTKVLEQTEKCMEEIRYWAWPEVLLCLKQCQEVETSPEVDSLAAKLMDALVEKLCLTIEMSPSSAGSACSPDSSLFRFSCDSKSTESFKNCSVRLTWWFDEVLVLSSGLVEMFLKLMVLRKFDNLIISRFLFYYQKVKFCSASSHEKRKILETIIDTLCVLDRSCVPCKSLFAVLRLALGLNINKSCMNKLEVMIGHQLDQATLDNLLVPSPSKSSHLYYVNLVLRFTKAFLDGARSGLQLKKVSSLIDQYIAEVAPDPCLKPSKFLSLITLVPDSARESHEDIYRAIDMYLEAHTGTTDGEKLNLIRTLSYEKLSGESRAHISRNQKFQAIETLDEQQQQQQQQQQQKQLILRMEKVETSGENEKLKEHIEGIQWRVMELERACLKMQNQMEVIKKRSKSSSKGSNRSLPKLCS

SEQ ID NO: 45888 - protein, 417 aa, Arabidopsis thaliana
  peptide (1)..(417): Ceres Seq. ID no. 12560972
  misc_feature (97)..(322): Pfam Name: NPH3 family Pfam Description: NPH3 family
  misc_feature (63)..(345): Homolog of NCBI NO: 38344919 NR Description: OSJNBa0018M05.10 [Oryza sativa (japonica
  misc_feature (1)..(145): Homolog of NCBI NO: 22330150 NR Description: hypothetical protein
  misc_feature (126)..(374): Homolog of NCBI NO: 22330150 NR Description: hypothetical protein
  misc_feature (1)..(237): Homolog of NCBI NO: 34898504 NR Description: OJ1612_A04.8 [Oryza sativa (japonica
  misc_feature (352)..(417): Homolog of NCBI NO: 33146528 NR Description: putative phototropic response protein family
  misc_feature (1)..(340): Homolog of NCBI NO: 33146528 NR Description: putative phototropic response protein family
  misc_feature (352)..(417): Homolog of NCBI NO: 34898504 NR Description: OJ1612_A04.8 [Oryza sativa (japonica
  misc_feature (1)..(340): Homolog of NCBI NO: 34898504 NR Description: OJ1612_A04.8 [Oryza sativa (japonica
  misc_feature (190)..(417): Homolog of NCBI NO: 30686508 NR Description: expressed protein [Arabidopsis thaliana]
  misc_feature (1)..(417): Homolog of NCBI NO: 13430596 NR Description: unknown protein [Arabidopsis thaliana]
MEVTKVLEQTEKCMEEIRYWAWPEVLLCLKQCQEVETSPEVDSLAAKLMDALVEKLCLTIEMSPSSAGSACSPDSSLFRFSCDSKSTESFKNCSVRLTWWFDEVLVLSSGLVEMFLKLMVLRKFDNLIISRFLFYYQKVKFCSASSHEKRKILETIIDTLCVLDRSCVPCKSLFAVLRLALGLNINKSCMNKLEVMIGHQLDQATLDNLLVPSPSKSSHLYYVNLVLRFTKAFLDGARSGLQLKKVSSLIDQYIAEVAPDPCLKPSKFLSLITLVPDSARESHEDIYRAIDMYLEAHTGTTDGEKLNLIRTLSYEKLSGESRAHISRNQKFQAIETLDEQQQQQQQQQQQKQLILRMEKVETSGENEKLKEHIEGIQWRVMELERACLKMQNQMEVIKKRSKSSSKGSNRSLPKLCS

SEQ ID NO: 45889 - DNA, 1599 bp, Arabidopsis thaliana
  misc_feature (1)..(1599): Ceres Seq. ID no. 15175865
  misc_feature: MA Experiment ID: 20000171 Result: Down-regulated in Transcription
  misc_feature: MA Experiment 20000171 PARAMETER Experiment Name: At_42deg_Heat_P Parameter: Age (day) Value: 14
  misc_feature: MA Experiment 20000171 PARAMETER Experiment Name: At_42deg_Heat_P Parameter: Organism Value: A. thaliana
  misc_feature: MA Experiment 20000171 PARAMETER Experiment Name: At_42deg_Heat_P Parameter: Plant Line Value: WS
  misc_feature: MA Experiment 20000171 PARAMETER Experiment Name: At_42deg_Heat_P Parameter: Temperature (deg C) Value: 42 vs. 22
  misc_feature: MA Experiment 20000171 PARAMETER Experiment Name: At_42deg_Heat_P Parameter: Timepoint (hr) Value: 1
  misc_feature: MA Experiment 20000171 PARAMETER Experiment Name: At_42deg_Heat_P Parameter: Tissue Value: Aerial
  misc_feature: MA Experiment ID: 20000173 Result: Down-regulated in Transcription
  misc_feature: MA Experiment 20000173 PARAMETER Experiment Name: At_42deg_Heat_P Parameter: Age (day) Value: 14
  misc_feature: MA Experiment 20000173 PARAMETER Experiment Name: At_42deg_Heat_P Parameter: Organism Value: A. thaliana
  misc_feature: MA Experiment 20000173 PARAMETER Experiment Name: At_42deg_Heat_P Parameter: Plant Line Value: WS
  misc_feature: MA Experiment 20000173 PARAMETER Experiment Name: At_42deg_Heat_P Parameter: Temperature (deg C) Value: 42 vs. 22
  misc_feature: MA Experiment 20000173 PARAMETER Experiment Name: At_42deg_Heat_P Parameter: Timepoint (hr) Value: 6
  misc_feature: MA Experiment 20000173 PARAMETER Experiment Name: At_42deg_Heat_P Parameter: Tissue Value: Aerial
  misc_feature: MA Experiment ID: 20000180 Result: Up-regulated in Transcription
  misc_feature: MA Experiment 20000180 PARAMETER Experiment Name: At_Germinating_Seeds_P Parameter: Age (hr) Value: 24 vs. 0
  misc_feature: MA Experiment 20000180 PARAMETER Experiment Name: At_Germinating_Seeds_P Parameter: Tissue Value: Germinating Seeds
  misc_feature: MA Experiment ID: 20000182 Result: Up-regulated in Transcription
  misc_feature: MA Experiment 20000182 PARAMETER Experiment Name: At_2mM_SA_P Parameter: Age (day) Value: 14
  misc_feature: MA Experiment 20000182 PARAMETER Experiment Name: At_2mM_SA_P Parameter: Organism Value: A. thaliana
  misc_feature: MA Experiment 20000182 PARAMETER Experiment Name: At_2mM_SA_P Parameter: Plant Line Value: WS
  misc_feature: MA Experiment 20000182 PARAMETER Experiment Name: At_2mM_SA_P Parameter: Timepoint (hr) Value: 6
  misc_feature: MA Experiment 20000182 PARAMETER Experiment Name: At_2mM_SA_P Parameter: Tissue Value: Aerial
  misc_feature: MA Experiment 20000182 PARAMETER Experiment Name: At_2mM_SA_P Parameter: Treatment Value: 2mM SA vs. No Treatment
  misc_feature: MA Experiment ID: 20000227 Result: Down-regulated in Transcription
  misc_feature: MA Experiment 20000227 PARAMETER Experiment Name: At_Root-Tips-vs-Tops_P Parameter: Tissue Value: Root Tips vs. Root Tops
  misc_feature: MA Experiment ID: 20000264 Result: Down-regulated in Transcription
  misc_feature: MA Experiment 20000264 PARAMETER Experiment Name: At_Open_Flower_P Parameter: Age (day) Value: 21
  misc_feature: MA Experiment 20000264 PARAMETER Experiment Name: At_Open_Flower_P Parameter: Plant Line Value: WS
  misc_feature: MA Experiment 20000264 PARAMETER Experiment Name: At_Open_Flower_P Parameter: Tissue Value: Open Flower vs. Whole Plant
  misc_feature: MA Experiment ID: 20000286 Result: Down-regulated in Transcription
  misc_feature: MA Experiment 20000286 PARAMETER Experiment Name: At_Open_Flower_P Parameter: Age (day) Value: 21
  misc_feature: MA Experiment 20000286 PARAMETER Experiment Name: At_Open_Flower_P Parameter: Plant Line Value: WS
  misc_feature: MA Experiment 20000286 PARAMETER Experiment Name: At_Open_Flower_P Parameter: Tissue Value: Half Open vs. Whole Plant
  misc_feature: MA Experiment ID: 20000437 Result: Down-regulated in Transcription
  misc_feature: MA Experiment 20000437 PARAMETER Experiment Name: At_Drought_P Parameter: Age (day) Value: 8
  misc_feature: MA Experiment 20000437 PARAMETER Experiment Name: At_Drought_P Parameter: Organism Value: A. thaliana
  misc_feature: MA Experiment 20000437 PARAMETER Experiment Name: At_Drought_P Parameter: Plant Line Value: WS
  misc_feature: MA Experiment 20000437 PARAMETER Experiment Name: At_Drought_P Parameter: Timepoint (hr) Value: 24
  misc_feature: MA Experiment 20000437 PARAMETER Experiment Name: At_Drought_P Parameter: Tissue Value: Whole Plant
  misc_feature: MA Experiment 20000437 PARAMETER Experiment Name: At_Drought_P Parameter: Treatment Value: Drought vs. No Drought
  misc_feature: MA Experiment ID: 20000794 Result: Down-regulated in Transcription
  misc_feature: MA Experiment 20000794 PARAMETER Experiment Name: At_Petals_P Parameter: Age (day) Value: 23-25 days
  misc_feature: MA Experiment 20000794 PARAMETER Experiment Name: At_Petals_P Parameter: Plant Line Value: WS
  misc_feature: MA Experiment 20000794 PARAMETER Experiment Name: At_Petals_P Parameter: Tissue Value: Petals vs. Whole plant
  misc_feature: MA Experiment ID: 20001904 Result: Down-regulated in Transcription
  misc_feature: MA Experiment 20001904 PARAMETER Experiment Name: At_Drought_Reproduction_P Parameter: Age (day) Value: 37
  misc_feature: MA Experiment 20001904 PARAMETER Experiment Name: At_Drought_Reproduction_P Parameter: Organism Value: A. thaliana
  misc_feature: MA Experiment 20001904 PARAMETER Experiment Name: At_Drought_Reproduction_P Parameter: Plant Line Value: WS
  misc_feature: MA Experiment 20001904 PARAMETER Experiment Name: At_Drought_Reproduction_P Parameter: Timepoint (day) Value: 7
  misc_feature: MA Experiment 20001904 PARAMETER Experiment Name: At_Drought_Reproduction_P Parameter: Tissue Value: Rosettes
  misc_feature: MA Experiment 20001904 PARAMETER Experiment Name: At_Drought_Reproduction_P Parameter: Treatment Value: Drought vs. No Drought
gcactagtccccccccccccccagtgtgtatataagaccatctctcttctcctttatctctcagcttgagcttctctctcaacgaaagaactcaagctttccaacactataaatctataatacagcttttattctcaatttttgtttgtcttaccatcattaccaaaccatgcaagccgcaacgtcgtgtgatctcaagttccgatcaacagatccgacgtctaggaacaaatgtttctcccacgcgattccaaagcgcgtggctgttacgtgcggttataggtcggagtcgtttagcttccctaacggtgtctccgtgagtcgatctgattggcaaagctcatgtgccattttatctagtaaagttgcttctgttgaaaatcccggtggtttagccgacaaaatcgccgccgttaatggtcacacaaacggatccgtcaatcttggtctcgtcgccgttgagtcaactaacggaaagttagctcctgctcagccgttgactattactgatctatctccggcaccgttgcatggttctagtctacgtgtagcttaccaaggagttcccggtgcgtactcggaagcagctgccggaaaagcttatcccaattgcgacgccattccttgtgaccagttcgacgttgcttttcaagcggtggagcttaggatcgctgatcgagctgtgcttccggtagagaactcactcggtggttcgattcatcggaactatgatctcctcctccgtcaccgtcttcatatcgttggagaagttcagattccggtccaccattgcctcctcgcacttccgggagttcgaactgactgtgtttcgcgggtgatctctcacccgcaagccctagcgcagacggaacactcccttgacgtccttacaccacatgcagcgcgtgaggcattccatgacactgctgctgctgcggagtacatctcagctaacgacctacatgacacggcagctgtagcgagcgcacgcgccgctgagctttacaacctccagatattagcggatgggattcaagacgacccggggaacgtcactcgcttcctaatgttggcgcgtgaaccgataatcccacgcacggaccggccgttcaagactagcatcgtctttgctgcgcaagaacacaaaggaaccagcgttctctttaaagtcctctccgctttcgcttttagagacattagcctgaccaagatcgagtcccggcctcaccataaccgcccgcttaggattgttggtgacgggagctttgggacgtcgaagaacttcgagtacatgttttacgttgattttgaggcatcgatggctgagccgcgtgcacagaacgcgcttgcggaggttcaagagtacacgtcgttcctaagggtactgggaagttaccccatggatatgacaccatggtccatgacatccacagaagacgcatgaccccatcgccaaaaacaaactcaccaataaatttattaaattattctgttctttctttttttgtgaaaattgtagtatacatcgaaattaaaccgtaaatgtagagcacattattcacgtggtgattaggagaaaacaaaattttatttgtctgt

SEQ ID NO: 45890 - protein, 424 aa, Arabidopsis thaliana
  peptide (1)..(424): Ceres Seq. ID no. 15175866
  misc_feature (127)..(306): Pfam Name: Prephenate dehydratase Pfam Description: Prephenate dehydratase
  misc_feature (109)..(315): Homolog of NCBI NO: 34394709 NR Description: chorismate mutase/prephenate dehydratase-like
  misc_feature (108)..(413): Homolog of NCBI NO: 14596233 NR Description: Unknown protein [Arabidopsis thaliana]
  misc_feature (108)..(413): Homolog of NCBI NO: 15221096 NR Description: prephenate dehydratase family [Arabidopsis
  misc_feature (108)..(414): Homolog of NCBI NO: 34394031 NR Description: putative prephenate dehydratase
  misc_feature (43)..(421): Homolog of NCBI NO: 38347597 NR Description: OSJNBa0042I15.10 [Oryza sativa (japonica
  misc_feature (52)..(421): Homolog of NCBI NO: 18390869 NR Description: prephenate dehydratase family [Arabidopsis
  misc_feature (12)..(424): Homolog of NCBI NO: 21593283 NR Description: putative chorismate mutase/prephenate dehydratase
  misc_feature (12)..(424): Homolog of NCBI NO: 15226259 NR Description: prephenate dehydratase family [Arabidopsis
  misc_feature (1)..(423): Homolog of NCBI NO: 15242928 NR Description: prephenate dehydratase family [Arabidopsis
  misc_feature (1)..(424): Homolog of NCBI NO: 15230489 NR Description: prephenate dehydratase family [Arabidopsis
MQAATSCDLKFRSTDPTSRNKCFSHAIPKRVAVTCGYRSESFSFPNGVSVSRSDWQSSCAILSSKVASVENPGGLADKIAAVNGHTNGSVNLGLVAVESTNGKLAPAQPLTITDLSPAPLHGSSLRVAYQGVPGAYSEAAAGKAYPNCDAIPCDQFDVAFQAVELRIADRAVLPVENSLGGSIHRNYDLLLRHRLHIVGEVQIPVHHCLLALPGVRTDCVSRVISHPQALAQTEHSLDVLTPHAAREAFHDTAAAAEYISANDLHDTAAVASARAAELYNLQILADGIQDDPGNVTRFLMLAREPIIPRTDRPFKTSIVFAAQEHKGTSVLFKVLSAFAFRDISLTKIESRPHHNRPLRIVGDGSFGTSKNFEYMFYVDFEASMAEPRAQNALAEVQEYTSFLRVLGSYPMDMTPWSMTSTEDA

SEQ ID NO: 45891 - DNA, 1472 bp, Arabidopsis thaliana
  misc_feature (1)..(1472): Ceres Seq. ID no. 15168939
  misc_feature: MA Experiment ID: 20000315 Result: Down-regulated in Transcription
  misc_feature: MA Experiment 20000315 PARAMETER Experiment Name: At_14day_Shoots-Roots_Sub_P Parameter: Age (day) Value: 14
  misc_feature: MA Experiment 20000315 PARAMETER Experiment Name: At_14day_Shoots-Roots_Sub_P Parameter: Organism Value: A. thaliana
  misc_feature: MA Experiment 20000315 PARAMETER Experiment Name: At_14day_Shoots-Roots_Sub_P Parameter: Plant Line Value: WS
  misc_feature: MA Experiment 20000315 PARAMETER Experiment Name: At_14day_Shoots-Roots_Sub_P Parameter: Tissue Value: Shoots vs. Whole Plant
  misc_feature: MA Experiment ID: 20000355 Result: Down-regulated in Transcription
  misc_feature: MA Experiment 20000355 PARAMETER Experiment Name: At_Siliques_Sub_P Parameter: Age (day) Value: 21
  misc_feature: MA Experiment 20000355 PARAMETER Experiment Name: At_Siliques_Sub_P Parameter: Organism Value: A. thaliana
  misc_feature: MA Experiment 20000355 PARAMETER Experiment Name: At_Siliques_Sub_P Parameter: Plant Line Value: WS
  misc_feature: MA Experiment 20000355 PARAMETER Experiment Name: At_Siliques_Sub_P Parameter: Tissue Value: Less Than 5mm Siliques vs. Whole Plant
  misc_feature: MA Experiment ID: 20000440 Result: Up-regulated in Transcription
  misc_feature: MA Experiment 20000440 PARAMETER Experiment Name: At_Closed-Flower__Sub_P Parameter: Tissue Value: Closed Flower vs. Whole Plant
gataagaaagaaagtcgtgaagatgagaggcgtaacaccaaactattaccattcttacactttcttcttcttcttcttcgttgtcttattagctctgtttcttcatgttttctcgataaacactttgtcatctacagaaactctaacaatctcaagcaaccgaaccattgtgtctcccggtaacatcttcgagctaggtttcttcaaaactacaacaagctctcgaaatggtgatcattggtatcttgggatttggtacaagtcaatctctgagagaacttatgtatgggttgccaacagagataaccctctttccaagtctattggaacattaaagatctcttacgctaacctcgtccttcttgatcattctggtactcttgtttggtcaacgaatctaacgagaacggtgaaatctccagtggtggcagagctgctcgataacggcaacttcgtgcttagagactccaaaggcaactatcaaaaccgattcttgtggcaaagctttgattatccggtggacacattactcccggagatgaaaattggtcgggatctcaaaacaggacacgagactttcctcagttcttggagaagcccttatgatccctcaagcggagacttctcgttcaaactcggaactcaagggctacctgatttttatcttttcaagaaagagtttctattgtaccgatccggtccgtggaatggagtcgggtttagtggcataccgacgatgcaaaactggagctactttgacgttgttaacaacttcatagagaacagagaggaagttgcttatagtttcaaagtcaccgaccatagcatgcactacgtgagatttacactgactaccgaaagattattacagatatccagatgggatacgacatcatcggaatggaacttgtttggcgttttaccgaccgagaaatgcgatttgtaccaaatatgtggtcgtgacagttattgtgacacgaaaacatcaccgacgtgtaactgtatcaaaggctttgttccaaagaatgtgacggcttgggctttgggagatacatttgagggatgtgtgaggaagtcacgactgaactgccacagagatgggttttttcttttgatgaagaggatgaagctgcctggtacaagcacagcaattgtggacaagacaattgggttgaatgaatgtaaggagaggtgttctaaggattgtaattgtaccgggtttgcgaataaggatatccaaaatggtgggtcgggttgtgtgatttggaccggagagctcatggatatgaggaattacgtcgtcggaggtcaagatctatatgtcaaaataggcctctataattagacatgaaaattggatatcttgatatattttagaatattggaaattcatatgatccgtgctttatagatatctatatccactaaaaaatatttaagaataataatacaaaattaaaaattatattttg

SEQ ID NO: 45892 - protein, 447 aa, Arabidopsis thaliana
  peptide (1)..(447): Ceres Seq. ID no. 15168940
  misc_feature (91)..(204): Pfam Name: D-mannose binding lectin Pfam Description: D-mannose binding lectin
  misc_feature (9)..(443): Homolog of NCBI NO: 7580462 NR Description: S-locus-specific glycoprotein homolog [Brassica
  misc_feature (130)..(430): Homolog of NCBI NO: 27545459 NR Description: S-related kinase 9 [Arabidopsis lyrata]
  misc_feature (8)..(443): Homolog of NCBI NO: 481282 NR Description: S-locus-specific glycoprotein SLR1 precursor -
  misc_feature (8)..(443): Homolog of NCBI NO: 81705 NR Description: SLR1 glycoprotein precursor - kale
  misc_feature (8)..(443): Homolog of NCBI NO: 456317 NR Description: SLR1 glycoprotein [Brassica napus]
  misc_feature (8)..(443): Homolog of NCBI NO: 134529 NR Description: S-locus-specific glycoprotein precursor
  misc_feature (15)..(433): Homolog of NCBI NO: 21321240 NR Description: S-locus-related I [Lunaria annua]
  misc_feature (15)..(433): Homolog of NCBI NO: 3327858 NR Description: SLR1 [Erysimum cheiri]
  misc_feature (8)..(424): Homolog of NCBI NO: 99660 NR Description: S-locus-specific glycoprotein SLR1 precursor -
  misc_feature (8)..(424): Homolog of NCBI NO: 15229924 NR Description: S-locus related protein SLR1 homolog (S1)
IRKKVVKMRGVTPNYYHSYTFFFFFFVVLLALFLHVFSINTLSSTETLTISSNRTIVSPGNIFELGFFKTTTSSRNGDHWYLGIWYKSISERTYVWVANRDNPLSKSIGTLKISYANLVLLDHSGTLVWSTNLTRTVKSPVVAELLDNGNFVLRDSKGNYQNRFLWQSFDYPVDTLLPEMKIGRDLKTGHETFLSSWRSPYDPSSGDFSFKLGTQGLPDFYLFKKEFLLYRSGPWNGVGFSGIPTMQNWSYFDVVNNFIENREEVAYSFKVTDHSMHYVRFTLTTERLLQISRWDTTSSEWNLFGVLPTEKCDLYQICGRDSYCDTKTSPTCNCIKGFVPKNVTAWALGDTFEGCVRKSRLNCHRDGFFLLMKRMKLPGTSTAIVDKTIGLNECKERCSKDCNCTGFANKDIQNGGSGCVIWTGELMDMRNYVVGGQDLYVKIGLYN

SEQ ID NO: 45893 - protein, 440 aa, Arabidopsis thaliana
  peptide (1)..(440): Ceres Seq. ID no. 15168941
  misc_feature (84)..(197): Pfam Name: D-mannose binding lectin Pfam Description: D-mannose binding lectin
  misc_feature (2)..(436): Homolog of NCBI NO: 7580462 NR Description: S-locus-specific glycoprotein homolog [Brassica
  misc_feature (123)..(423): Homolog of NCBI NO: 27545459 NR Description: S-related kinase 9 [Arabidopsis lyrata]
  misc_feature (1)..(436): Homolog of NCBI NO: 481282 NR Description: S-locus-specific glycoprotein SLR1 precursor -
  misc_feature (1)..(436): Homolog of NCBI NO: 81705 NR Description: SLR1 glycoprotein precursor - kale
  misc_feature (1)..(436): Homolog of NCBI NO: 456317 NR Description: SLR1 glycoprotein [Brassica napus]
  misc_feature (1)..(436): Homolog of NCBI NO: 134529 NR Description: S-locus-specific glycoprotein precursor
  misc_feature (8)..(426): Homolog of NCBI NO: 21321240 NR Description: S-locus-related I [Lunaria annua]
  misc_feature (8)..(426): Homolog of NCBI NO: 3327858 NR Description: SLR1 [Erysimum cheiri]
  misc_feature (1)..(417): Homolog of NCBI NO: 99660 NR Description: S-locus-specific glycoprotein SLR1 precursor -
  misc_feature (1)..(417): Homolog of NCBI NO: 15229924 NR Description: S-locus related protein SLR1 homolog (S1)
MRGVTPNYYHSYTFFFFFFVVLLALFLHVFSINTLSSTETLTISSNRTIVSPGNIFELGFFKTTTSSRNGDHWYLGIWYKSISERTYVWVANRDNPLSKSIGTLKISYANLVLLDHSGTLVWSTNLTRTVKSPVVAELLDNGNFVLRDSKGNYQNRFLWQSFDYPVDTLLPEMKIGRDLKTGHETFLSSWRSPYDPSSGDFSFKLGTQGLPDFYLFKKEFLLYRSGPWNGVGFSGIPTMQNWSYFDVVNNFIENREEVAYSFKVTDHSMHYVRFTLTTERLLQISRWDTTSSEWNLFGVLPTEKCDLYQICGRDSYCDTKTSPTCNCIKGFVPKNVTAWALGDTFEGCVRKSRLNCHRDGFFLLMKRMKLPGTSTAIVDKTIGLNECKERCSKDCNCTGFANKDIQNGGSGCVIWTGELMDMRNYVVGGQDLYVKIGLYN

SEQ ID NO: 45894 - protein, 268 aa, Arabidopsis thaliana
  peptide (1)..(268): Ceres Seq. ID no. 15168942
  misc_feature (1)..(264): Homolog of NCBI NO: 7580462 NR Description: S-locus-specific glycoprotein homolog [Brassica
  misc_feature (1)..(251): Homolog of NCBI NO: 27545459 NR Description: S-related kinase 9 [Arabidopsis lyrata]
  misc_feature (1)..(264): Homolog of NCBI NO: 481282 NR Description: S-locus-specific glycoprotein SLR1 precursor -
  misc_feature (1)..(264): Homolog of NCBI NO: 81705 NR Description: SLR1 glycoprotein precursor - kale
  misc_feature (1)..(264): Homolog of NCBI NO: 456317 NR Description: SLR1 glycoprotein [Brassica napus]
  misc_feature (1)..(264): Homolog of NCBI NO: 134529 NR Description: S-locus-specific glycoprotein precursor
  misc_feature (1)..(254): Homolog of NCBI NO: 21321240 NR Description: S-locus-related I [Lunaria annua]
  misc_feature (1)..(254): Homolog of NCBI NO: 3327858 NR Description: SLR1 [Erysimum cheiri]
  misc_feature (1)..(245): Homolog of NCBI NO: 99660 NR Description: S-locus-specific glycoprotein SLR1 precursor -
  misc_feature (1)..(245): Homolog of NCBI NO: 15229924 NR Description: S-locus related protein SLR1 homolog (S1)
MKIGRDLKTGHETFLSSWRSPYDPSSGDFSFKLGTQGLPDFYLFKKEFLLYRSGPWNGVGFSGIPTMQNWSYFDVVNNFIENREEVAYSFKVTDHSMHYVRFTLTTERLLQISRWDTTSSEWNLFGVLPTEKCDLYQICGRDSYCDTKTSPTCNCIKGFVPKNVTAWALGDTFEGCVRKSRLNCHRDGFFLLMKRMKLPGTSTAIVDKTIGLNECKERCSKDCNCTGFANKDIQNGGSGCVIWTGELMDMRNYVVGGQDLYVKIGLYN

SEQ ID NO: 45895 - DNA, 1198 bp, Arabidopsis thaliana
  misc_feature (1)..(1198): Ceres Seq. ID no. 13576133
  misc_feature: MA Experiment ID: 20000179 Result: Up-regulated in Transcription
  misc_feature: MA Experiment 20000179 PARAMETER Experiment Name: At_Germinating_Seeds_P Parameter: Age (hr) Value: 6 vs. 0
  misc_feature: MA Experiment 20000179 PARAMETER Experiment Name: At_Germinating_Seeds_P Parameter: Tissue Value: Germinating Seeds
  misc_feature: MA Experiment ID: 20000180 Result: Up-regulated in Transcription
  misc_feature: MA Experiment 20000180 PARAMETER Experiment Name: At_Germinating_Seeds_P Parameter: Age (hr) Value: 24 vs. 0
  misc_feature: MA Experiment 20000180 PARAMETER Experiment Name: At_Germinating_Seeds_P Parameter: Tissue Value: Germinating Seeds
  misc_feature: MA Experiment ID: 20001451 Result: Down-regulated in Transcription
  misc_feature: MA Experiment 20001451 PARAMETER Experiment Name: At_Far-red-induction_P Parameter: Age (day) Value: 7
  misc_feature: MA Experiment 20001451 PARAMETER Experiment Name: At_Far-red-induction_P Parameter: Light Value: Far-red vs. White
  misc_feature: MA Experiment 20001451 PARAMETER Experiment Name: At_Far-red-induction_P Parameter: Organism Value: A. thaliana
  misc_feature: MA Experiment 20001451 PARAMETER Experiment Name: At_Far-red-induction_P Parameter: Plant Line Value: Columbia
  misc_feature: MA Experiment 20001451 PARAMETER Experiment Name: At_Far-red-induction_P Parameter: Timepoint (hr) Value: 24
  misc_feature: MA Experiment 20001451 PARAMETER Experiment Name: At_Far-red-induction_P Parameter: Tissue Value: Whole Plant
gaatttctacaaagataatgtggattcaccaaaaattcagaggaaggacacgacaatggtgaattcgtacgttcctcttcgtttcaccattttcatctccttctccatcgcagcagcttcatccttcaaactccactccgcttctcattctccgtcgtcatttccgaaagccaccggcgacgatctactctccgttctcggacctccctccgccgcgtcgtgcctcaacccaatcgtctctcgagagatcaaatcgtgtcttaaattcctcgtcccattcaaatcggataaacctaaacccgaatttggacgatgctcgcctcgtactggactctgttccggaaaaattgacgccgttgagagacggagcaagtttgaagaggagaattctctaatctggtggccaccggaatcggttctagagcttgctcgtctcgctgttgactccggtggtgatcccggttcaattcagcgaactctcaatccgaaaatgatcccggttcctgatgttgaacgatcaagaaaagataaatgtcaacttactagaactccttatggtcgtcattttatagcagaggaagtgaactcatatttcgagttcttgtttcatctaattgaatctaggggacctagtgttggattgaatgtttcattgagtagatatgatttgttccatggccatttattccttgcctcagaatctggacgccttggaatattagaactctctagggtttgttcttgtgttcttgaatgtaaccaacagttatcaataaaggaagaatggtttctgattcttaacacaattgttgcagtgtttttagaaaggttgaactatctgattggtgatggtaggtttcatgctaaagagtatccagcctatgacaagaaagtgtttccttacaacatgggatattgccagagaggatctgacgtgaaatacaatgattcaatgaacttgaggaatatcctttggcttgcaccattacctagcaactcttctccagattgggttgctccaggtgtacttgtggttcttgatgcgcatccggatggaatcatataccgagatctcatccctgactatgttaagtttgtaagaacaatatacgaagatgatttgggaacaaccgcagttgatgtcaattacttgaatgtcggagctcacgaacctgactatcagcttttcatgtgctga

SEQ ID NO: 45896 - protein, 398 aa, Arabidopsis thaliana
  peptide (1)..(398): Ceres Seq. ID no. 13576134
  misc_feature (282)..(398): Homolog of NCBI NO: 33146851 NR Description: unknown protein [Oryza sativa (japonica
  misc_feature (83)..(240): Homolog of NCBI NO: 33146851 NR Description: unknown protein [Oryza sativa (japonica
  misc_feature (286)..(398): Homolog of NCBI NO: 40823291 NR Description: At5g27710 [Arabidopsis thaliana]
  misc_feature (19)..(240): Homolog of NCBI NO: 40823291 NR Description: At5g27710 [Arabidopsis thaliana]
  misc_feature (19)..(398): Homolog of NCBI NO: 15241027 NR Description: expressed protein [Arabidopsis thaliana]
NFYKDNVDSPKIQRKDTTMVNSYVPLRFTIFISFSIAAASSFKLHSASHSPSSFPKATGDDLLSVLGPPSAASCLNPIVSREIKSCLKFLVPFKSDKPKPEFGRCSPRTGLCSGKIDAVERRSKFEEENSLIWWPPESVLELARLAVDSGGDPGSIQRTLNPKMIPVPDVERSRKDKCQLTRTPYGRHFIAEEVNSYFEFLFHLIESRGPSVGLNVSLSRYDLFHGHLFLASESGRLGILELSRVCSCVLECNQQLSIKEEWFLILNTIVAVFLERLNYLIGDGRFHAKEYPAYDKKVFPYNMGYCQRGSDVKYNDSMNLRNILWLAPLPSNSSPDWVAPGVLVVLDAHPDGIIYRDLIPDYVKFVRTIYEDDLGTTAVDVNYLNVGAHEPDYQLFMC

SEQ ID NO: 45897 - protein, 380 aa, Arabidopsis thaliana
  peptide (1)..(380): Ceres Seq. ID no. 13576135
  misc_feature (264)..(380): Homolog of NCBI NO: 33146851 NR Description: unknown protein [Oryza sativa (japonica
  misc_feature (65)..(222): Homolog of NCBI NO: 33146851 NR Description: unknown protein [Oryza sativa (japonica
  misc_feature (268)..(380): Homolog of NCBI NO: 40823291 NR Description: At5g27710 [Arabidopsis thaliana]
  misc_feature (1)..(222): Homolog of NCBI NO: 40823291 NR Description: At5g27710 [Arabidopsis thaliana]
  misc_feature (1)..(380): Homolog of NCBI NO: 15241027 NR Description: expressed protein [Arabidopsis thaliana]
MVNSYVPLRFTIFISFSIAAASSFKLHSASHSPSSFPKATGDDLLSVLGPPSAASCLNPIVSREIKSCLKFLVPFKSDKPKPEFGRCSPRTGLCSGKIDAVERRSKFEEENSLIWWPPESVLELARLAVDSGGDPGSIQRTLNPKMIPVPDVERSRKDKCQLTRTPYGRHFIAEEVNSYFEFLFHLIESRGPSVGLNVSLSRYDLFHGHLFLASESGRLGILELSRVCSCVLECNQQLSIKEEWFLILNTIVAVFLERLNYLIGDGRFHAKEYPAYDKKVFPYNMGYCQRGSDVKYNDSMNLRNILWLAPLPSNSSPDWVAPGVLVVLDAHPDGIIYRDLIPDYVKFVRTIYEDDLGTTAVDVNYLNVGAHEPDYQLFMC

SEQ ID NO: 45898 - protein, 235 aa, Arabidopsis thaliana
  peptide (1)..(235): Ceres Seq. ID no. 13576136
  misc_feature (119)..(235): Homolog of NCBI NO: 33146851 NR Description: unknown protein [Oryza sativa (japonica
  misc_feature (1)..(77): Homolog of NCBI NO: 33146851 NR Description: unknown protein [Oryza sativa (japonica
  misc_feature (123)..(235): Homolog of NCBI NO: 40823291 NR Description: At5g27710 [Arabidopsis thaliana]
  misc_feature (1)..(77): Homolog of NCBI NO: 40823291 NR Description: At5g27710 [Arabidopsis thaliana]
  misc_feature (1)..(235): Homolog of NCBI NO: 15241027 NR Description: expressed protein [Arabidopsis thaliana]
MIPVPDVERSRKDKCQLTRTPYGRHFIAEEVNSYFEFLFHLIESRGPSVGLNVSLSRYDLFHGHLFLASESGRLGILELSRVCSCVLECNQQLSIKEEWFLILNTIVAVFLERLNYLIGDGRFHAKEYPAYDKKVFPYNMGYCQRGSDVKYNDSMNLRNILWLAPLPSNSSPDWVAPGVLVVLDAHPDGIIYRDLIPDYVKFVRTIYEDDLGTTAVDVNYLNVGAHEPDYQLFMC

SEQ ID NO: 45899 - DNA, 2205 bp, Arabidopsis thaliana
  misc_feature (1)..(2205): Ceres Seq. ID no. 14309915
  misc_feature: MA Experiment ID: 20000496 Result: Down-regulated in Transcription
  misc_feature: MA Experiment 20000496 PARAMETER Experiment Name: At_Guard_Cells_P Parameter: Harvest Date Value: 7/19/2002
  misc_feature: MA Experiment 20000496 PARAMETER Experiment Name: At_Guard_Cells_P Parameter: Organism Value: Canola
  misc_feature: MA Experiment 20000496 PARAMETER Experiment Name: At_Guard_Cells_P Parameter: Tissue Value: Guard Cells vs. Leaves
gatagattgaagcgtatactctaatttgaccaatctagggtttctagtcacttgaagcttctcttaaaaaacctgtctcactcctcgtcaacctcttcctctcccgctgtcgccaagattgaatcttttttcagttgtggcttcaccggataataaggaattcagtaagagataagttcatcctgacaacatggagaccaagaatgagaattctgatgtttcacgggcagaggagtttaaaagtcaggccaacgaagcttttaaaggtcacaaatactccagtgctattgatctatatacaaaagctattgaactcaacagcaacaacgctgtgtattgggcaaatcgtgcatttgctcacacaaaactggaggaatatggcagtgcaatacaggatgcatcgaaggccattgaagttgattcaagatactataagggctattacaggcgtggtgctgcgtatcttgccatgggaaaatttaaggatgccttgaaggacttccaacaggtaaaaaggctttctcctaatgaccctgatgccacaagaaagctaaaggaatgtgagaaagcagtgatgaaactcaaatttgaagaagcaatctctgtgccagtatctgaaaggcgttcagtagctgagtccattgacttccatacaatagggaacaaacccagatcatcatccatgcccaccaaaacggctttagcagcagttgttgcagcagtaatggtggtggcggtccggggatttgccacaactgagatactcatggtgatggtttcggtggtattagggacattttggtggggtagcttcagtgaggttgagccacaatattctggtgctagaattgagggagaggaagttaccttagattttgtgaaaacgatgatggaggattttaagaaccaaaaaacattgcataaacggtatgcctatcaaatcgtcttacagactaggcaaatcttgctagcactgccttctcttgttgatataagtgttccacatggcaaacatatcactgtttgcggtgacgttcatggtcagttctacgatcttctcaatatctttgagcttaatggcctcccttcggaggagaacccatacctatttaatggcgactttgtggacagaggctcattctccgttgagatcatcctcactttgtttgctttcaagtgcatgtgcccatcatccatatatctagccagaggaaaccatgaaagcaagagcatgaacaaaatttatggttttgagggtgaggttcggtccaagttgagtgaaaaattcgtggatctctttgctgaagttttctgttacctcccgttggctcatgttataaatgggaaggtcttcgtggtacatggaggtcttttcagtgttgacggcgtgaaactctcagacatcagagccattgacagattctgtgagccaccagaggaaggactaatgtgtgaactattgtggagtgatcctcaacctctccctggaagaggcccaagcaagcgaggagttggtctatcatttggtggagatgtgacaaagaggtttttgcaagataacaatttagatttgttggtccggtcacatgaagtaaaagatgaaggttatgaggttgaacatgacggtaaactcataactgtcttctctgcgccaaattactgtgatcagatgggtaataagggagccttcattcgttttgaagctcctgatatgaagccaaacattgttacattctcagcagtgcctcatccggatgtgaagcctatggcatatgcaaacaactttctcaggatgttcaactaaccagcaaaaagcttcttctactcaaaatgctattctaaagactcaagaccagaagtggttcagaaacataatgatataagtttttttttccctttatcttctgcagttttttcatgttgttccagaaaagggaggccatgataattaaaggtacagtatccggatttgatcgttttttttcttcttccttcttttctgataaagattttcactcttcctttaagcttatccagcaacttttgtcccttttgtcttatgttgtaagagggggtaatgtatcattcttattttagatgaaaatcttgtgattactcaacaaaagagtgaccaaatgaccccccaaaactttgtacttaaaatggtttcttgaatcaaaaatcaaaaggtgtttctttaaagcc

SEQ ID NO: 45900 - protein, 537 aa, Arabidopsis thaliana
  peptide (1)..(537): Ceres Seq. ID no. 14309916
  misc_feature (274)..(470): Pfam Name: Calcineurin-like phosphoesterase Pfam Description: Calcineurin-like phosphoesterase
  misc_feature (1)..(144): Homolog of NCBI NO: 17933746 NR Description: Protein phosphatase D3 CG8402-PA [Drosophila
  misc_feature (211)..(533): Homolog of NCBI NO: 17933746 NR Description: Protein phosphatase D3 CG8402-PA [Drosophila
  misc_feature (1)..(537): Homolog of NCBI NO: 28141004 NR Description: type 5 protein serine/threonine phosphatase 62
  misc_feature (213)..(537): Homolog of NCBI NO: 19347799 NR Description: putative phosphoprotein phosphatase [Arabidopsis
  misc_feature (6)..(161): Homolog of NCBI NO: 24954813 NR Description: type 5 serine/threonine phosphatase 55 kDa
  misc_feature (210)..(537): Homolog of NCBI NO: 24954813 NR Description: type 5 serine/threonine phosphatase 55 kDa
  misc_feature (1)..(163): Homolog of NCBI NO: 18406066 NR Description: phospho protein phosphatase -related [Arabidopsis
  misc_feature (210)..(537): Homolog of NCBI NO: 18406066 NR Description: phospho protein phosphatase -related [Arabidopsis
  misc_feature (1)..(537): Homolog of NCBI NO: 25289020 NR Description: phosphoprotein phosphatase (EC 3.1.3.16)
  misc_feature (1)..(537): Homolog of NCBI NO: 28141302 NR Description: type 5 protein serine/threonine phosphatase 60
METKNENSDVSRAEEFKSQANEAFKGHKYSSAIDLYTKAIELNSNNAVYWANRAFAHTKLEEYGSAIQDASKAIEVDSRYYKGYYRRGAAYLAMGKFKDALKDFQQVKRLSPNDPDATRKLKECEKAVMKLKFEEAISVPVSERRSVAESIDFHTIGNKPRSSSMPTKTALAAVVAAVMVVAVRGFATTEILMVMVSVVLGTFWWGSFSEVEPQYSGARIEGEEVTLDFVKTMMEDFKNQKTLHKRYAYQIVLQTRQILLALPSLVDISVPHGKHITVCGDVHGQFYDLLNIFELNGLPSEENPYLFNGDFVDRGSFSVEIILTLFAFKCMCPSSIYLARGNHESKSMNKIYGFEGEVRSKLSEKFVDLFAEVFCYLPLAHVINGKVFVVHGGLFSVDGVKLSDIRAIDRFCEPPEEGLMCELLWSDPQPLPGRGPSKRGVGLSFGGDVTKRFLQDNNLDLLVRSHEVKDEGYEVEHDGKLITVFSAPNYCDQMGNKGAFIRFEAPDMKPNIVTFSAVPHPDVKPMAYANNFLRMFN

SEQ ID NO: 45901 - protein, 444 aa, Arabidopsis thaliana
  peptide (1)..(444): Ceres Seq. ID no. 14309917
  misc_feature (181)..(377): Pfam Name: Calcineurin-like phosphoesterase Pfam Description: Calcineurin-like phosphoesterase
  misc_feature (1)..(51): Homolog of NCBI NO: 17933746 NR Description: Protein phosphatase D3 CG8402-PA [Drosophila
  misc_feature (118)..(440): Homolog of NCBI NO: 17933746 NR Description: Protein phosphatase D3 CG8402-PA [Drosophila
  misc_feature (1)..(444): Homolog of NCBI NO: 28141004 NR Description: type 5 protein serine/threonine phosphatase 62
  misc_feature (120)..(444): Homolog of NCBI NO: 19347799 NR Description: putative phosphoprotein phosphatase [Arabidopsis
  misc_feature (1)..(68): Homolog of NCBI NO: 24954813 NR Description: type 5 serine/threonine phosphatase 55 kDa
  misc_feature (117)..(444): Homolog of NCBI NO: 24954813 NR Description: type 5 serine/threonine phosphatase 55 kDa
  misc_feature (1)..(70): Homolog of NCBI NO: 18406066 NR Description: phospho protein phosphatase -related [Arabidopsis
  misc_feature (117)..(444): Homolog of NCBI NO: 18406066 NR Description: phospho protein phosphatase -related [Arabidopsis
  misc_feature (1)..(444): Homolog of NCBI NO: 25289020 NR Description: phosphoprotein phosphatase (EC 3.1.3.16)
  misc_feature (1)..(444): Homolog of NCBI NO: 28141302 NR Description: type 5 protein serine/threonine phosphatase 60
MGKFKDALKDFQQVKRLSPNDPDATRKLKECEKAVMKLKFEEAISVPVSERRSVAESIDFHTIGNKPRSSSMPTKTALAAVVAAVMVVAVRGFATTEILMVMVSVVLGTFWWGSFSEVEPQYSGARIEGEEVTLDFVKTMMEDFKNQKTLHKRYAYQIVLQTRQILLALPSLVDISVPHGKHITVCGDVHGQFYDLLNIFELNGLPSEENPYLFNGDFVDRGSFSVEIILTLFAFKCMCPSSIYLARGNHESKSMNKIYGFEGEVRSKLSEKFVDLFAEVFCYLPLAHVINGKVFVVHGGLFSVDGVKLSDIRAIDRFCEPPEEGLMCELLWSDPQPLPGRGPSKRGVGLSFGGDVTKRFLQDNNLDLLVRSHEVKDEGYEVEHDGKLITVFSAPNYCDQMGNKGAFIRFEAPDMKPNIVTFSAVPHPDVKPMAYANNFLRMFN

SEQ ID NO: 45902 - protein, 409 aa, Arabidopsis thaliana
  peptide (1)..(409): Ceres Seq. ID no. 14309918
  misc_feature (146)..(342): Pfam Name: Calcineurin-like phosphoesterase Pfam Description: Calcineurin-like phosphoesterase
  misc_feature (1)..(16): Homolog of NCBI NO: 17933746 NR Description: Protein phosphatase D3 CG8402-PA [Drosophila
  misc_feature (83)..(405): Homolog of NCBI NO: 17933746 NR Description: Protein phosphatase D3 CG8402-PA [Drosophila
  misc_feature (1)..(409): Homolog of NCBI NO: 28141004 NR Description: type 5 protein serine/threonine phosphatase 62
  misc_feature (85)..(409): Homolog of NCBI NO: 19347799 NR Description: putative phosphoprotein phosphatase [Arabidopsis
  misc_feature (1)..(33): Homolog of NCBI NO: 24954813 NR Description: type 5 serine/threonine phosphatase 55 kDa
  misc_feature (82)..(409): Homolog of NCBI NO: 24954813 NR Description: type 5 serine/threonine phosphatase 55 kDa
  misc_feature (1)..(35): Homolog of NCBI NO: 18406066 NR Description: phospho protein phosphatase -related [Arabidopsis
  misc_feature (82)..(409): Homolog of NCBI NO: 18406066 NR Description: phospho protein phosphatase -related [Arabidopsis
  misc_feature (1)..(409): Homolog of NCBI NO: 25289020 NR Description: phosphoprotein phosphatase (EC 3.1.3.16)
  misc_feature (1)..(409): Homolog of NCBI NO: 28141302 NR Description: type 5 protein serine/threonine phosphatase 60
MKLKFEEAISVPVSERRSVAESIDFHTIGNKPRSSSMPTKTALAAVVAAVMVVAVRGFATTEILMVMVSVVLGTFWWGSFSEVEPQYSGARIEGEEVTLDFVKTMMEDFKNQKTLHKRYAYQIVLQTRQILLALPSLVDISVPHGKHITVCGDVHGQFYDLLNIFELNGLPSEENPYLFNGDFVDRGSFSVEIILTLFAFKCMCPSSIYLARGNHESKSMNKIYGFEGEVRSKLSEKFVDLFAEVFCYLPLAHVINGKVFVVHGGLFSVDGVKLSDIRAIDRFCEPPEEGLMCELLWSDPQPLPGRGPSKRGVGLSFGGDVTKRFLQDNNLDLLVRSHEVKDEGYEVEHDGKLITVFSAPNYCDQMGNKGAFIRFEAPDMKPNIVTFSAVPHPDVKPMAYANNFLRMFN

SEQ ID NO: 45903 - DNA, 2055 bp, Arabidopsis thaliana
  misc_feature (1)..(2055): Ceres Seq. ID no. 13576107
  misc_feature: MA Experiment ID: 20000234 Result: Down-regulated in Transcription
  misc_feature: MA Experiment 20000234 PARAMETER Experiment Name: At_Siliques_P Parameter: Age (day) Value: 21
  misc_feature: MA Experiment 20000234 PARAMETER Experiment Name: At_Siliques_P Parameter: Organism Value: A. thaliana
  misc_feature: MA Experiment 20000234 PARAMETER Experiment Name: At_Siliques_P Parameter: Plant Line Value: WS
  misc_feature: MA Experiment 20000234 PARAMETER Experiment Name: At_Siliques_P Parameter: Tissue Value: Less Than 5mm Siliques vs. Whole Plant
  misc_feature: MA Experiment ID: 20000235 Result: Down-regulated in Transcription
  misc_feature: MA Experiment 20000235 PARAMETER Experiment Name: At_Siliques_P Parameter: Age (day) Value: 21
  misc_feature: MA Experiment 20000235 PARAMETER Experiment Name: At_Siliques_P Parameter: Organism Value: A. thaliana
  misc_feature: MA Experiment 20000235 PARAMETER Experiment Name: At_Siliques_P Parameter: Plant Line Value: WS
  misc_feature: MA Experiment 20000235 PARAMETER Experiment Name: At_Siliques_P Parameter: Tissue Value: 5-10mm Siliques vs. Whole Plant
  misc_feature: MA Experiment ID: 20000265 Result: Down-regulated in Transcription
  misc_feature: MA Experiment 20000265 PARAMETER Experiment Name: At_Open_Flower_P Parameter: Age (day) Value: 21
  misc_feature: MA Experiment 20000265 PARAMETER Experiment Name: At_Open_Flower_P Parameter: Plant Line Value: WS
  misc_feature: MA Experiment 20000265 PARAMETER Experiment Name: At_Open_Flower_P Parameter: Tissue Value: Closed Flower vs. Whole Plant
  misc_feature: MA Experiment ID: 20000437 Result: Up-regulated in Transcription
  misc_feature: MA Experiment 20000437 PARAMETER Experiment Name: At_Drought_P Parameter: Age (day) Value: 8
  misc_feature: MA Experiment 20000437 PARAMETER Experiment Name: At_Drought_P Parameter: Organism Value: A. thaliana
  misc_feature: MA Experiment 20000437 PARAMETER Experiment Name: At_Drought_P Parameter: Plant Line Value: WS
  misc_feature: MA Experiment 20000437 PARAMETER Experiment Name: At_Drought_P Parameter: Timepoint (hr) Value: 24
  misc_feature: MA Experiment 20000437 PARAMETER Experiment Name: At_Drought_P Parameter: Tissue Value: Whole Plant
  misc_feature: MA Experiment 20000437 PARAMETER Experiment Name: At_Drought_P Parameter: Treatment Value: Drought vs. No Drought
atgaggttaagcgtttttattattcccctggtggaaagtaggcaagcaagtggtatcatcaacaaacaaagcacttctcttttgattcgattctctctttaccttgaagcttcaatatcaaccaaatcttttttctcaaaatctcaaagaatctctcaaactcagtctcctatctgtctctctgcaaactattaccaaccagataatttagatatggaagctactcagaaacatatgattcaagaaggatcttcaatgttttaccatcaaccatcttcagtcaaacaaatggacctttctgttcagacatttgattcttactgcacacttgaatcctcttcaggcaccaagtctcatccttgtcttaacaacaaaaacaactcttcttcaaccacaagcttttcctctaatgaaagtcccatttctcaagccaacaacaacaacttatcaaggtttaacaatcattcccctgaagaaaacaataactctcccttgagcggttcttcagcgacaaacaccaacgagacagagcttagtctcatgcttaaagatttggagactgcaatgatggagcctgatgtagacaacagctataacaatcaaggcgggtttggacagcagcatggagttgtttcttcagctatgtatagatctatggagatgatctctaggggagatttaaaaggagtgctctatgaatgcgcaaaagctgttgaaaactatgatttggaaatgactgattggttgatctctcagttacagcaaatggtttctgtttctggtgagcctgttcagcgcttaggagcttatatgcttgaaggtctcgttgctaggttagcttcttcgggtagctccatctataaagcattgagatgcaaagacccaacgggtcctgagcttcttacttatatgcatatcttgtatgaagcctgcccttatttcaaattcggttatgaatctgctaatggagctatagctgaagctgtgaagaacgaaagttttgtgcacattatcgatttccagatttctcaaggtggtcaatgggtgagtttgatccgtgctcttggtgctagacctggtggacctccgaacgttaggataacgggaattgatgatccgagatcatcgtttgctcgtcaaggaggacttgagttagttggacaaagacttgggaagctagctgaaatgtgcggtgttccgtttgagttccatggagctgctttatgctgcacggaagtcgaaatcgagaagctaggagttagaaatggagaagcgctcgcggttaacttcccgcttgttcttcaccacatgcctgatgagagtgtaactgtggagaatcacagagatagattgttgagattggtcaaacacttgtcaccaaacgttgtgactctggttgagcaagaagcgaatacaaacactgcgccgtttcttccccggtttgtcgagacaatgaaccattacttggcagttttcgaatcaatagatgtgaaactcgctagagatcacaaggaaaggatcaatgttgagcagcattgtttggctagagaggttgtgaatcttatagcttgtgaaggtgttgaaagagaagagaggcacgagccactagggaaatggaggtctcggtttcacatggcgggatttaaaccgtatcctttgagctcgtatgtgaacgcaacaatcaaaggattgcttgagagttattcagagaagtatacacttgaagaaagagatggagcattgtatttaggatggaagaatcaacctcttatcacttcttgtgcttggaggtaactaataaaaaccttgttcggtttcagaagagattagaaacttcttttaaagtttgcagaatctgtttgtaaaagtaaaactcatgcatgatccgaaggaacaagttgtcaaatgttgtagtagtaagtgatatgttgatgaccccatatatgtttaaggtttatgtttttttttttcttttctcacaacaaactatgatttgacatcaaacttataactctctgtttatgatgtgataaattaatgatatatggttttttc

SEQ ID NO: 45904 - protein, 597 aa, Arabidopsis thaliana
  peptide (1)..(597): Ceres Seq. ID no. 13576108
  misc_feature (201)..(507): Pfam Name: GRAS family transcription factor Pfam Description: GRAS family transcription factor
  misc_feature (189)..(597): Homolog of NCBI NO: 15218990 NR Description: scarecrow-like transcription factor 1 (SCL1)
  misc_feature (219)..(597): Homolog of NCBI NO: 15224425 NR Description: scarecrow-like transcription factor 21 (SCL21)
  misc_feature (189)..(597): Homolog of NCBI NO: 26450054 NR Description: putative SCARECROW gene regulator [Arabidopsis
  misc_feature (100)..(596): Homolog of NCBI NO: 25989334 NR Description: chitin-inducible gibberellin-responsive protein
  misc_feature (167)..(597): Homolog of NCBI NO: 15238903 NR Description: phytochrome A signal transduction 1 (PAT1)
  misc_feature (100)..(596): Homolog of NCBI NO: 37533564 NR Description: putative SCARECROW gene regulator-like
  misc_feature (295)..(597): Homolog of NCBI NO: 11358827 NR Description: scarecrow-like protein 5
  misc_feature (72)..(597): Homolog of NCBI NO: 14517552 NR Description: F17J6.12/F17J6.12 [Arabidopsis thaliana]
  misc_feature (72)..(597): Homolog of NCBI NO: 25405382 NR Description: scarecrow-like protein [imported] - Arabidopsis
  misc_feature (11)..(597): Homolog of NCBI NO: 23397333 NR Description: putative scarecrow protein [Arabidopsis thaliana]
MRLSVFIIPLVESRQASGIINKQSTSLLIRFSLYLEASISTKSFFSKSQRISQTQSPICLSANYYQPDNLDMEATQKHMIQEGSSMFYHQPSSVKQMDLSVQTFDSYCTLESSSGTKSHPCLNNKNNSSSTTSFSSNESPISQANNNNLSRFNNHSPEENNNSPLSGSSATNTNETELSLMLKDLETAMMEPDVDNSYNNQGGFGQQHGVVSSAMYRSMEMISRGDLKGVLYECAKAVENYDLEMTDWLISQLQQMVSVSGEPVQRLGAYMLEGLVARLASSGSSIYKALRCKDPTGPELLTYMHILYEACPYFKFGYESANGAIAEAVKNESFVHIIDFQISQGGQWVSLIRALGARPGGPPNVRITGIDDPRSSFARQGGLELVGQRLGKLAEMCGVPFEFHGAALCCTEVEIEKLGVRNGEALAVNFPLVLHHMPDESVTVENHRDRLLRLVKHLSPNVVTLVEQEANTNTAPFLPRFVETMNHYLAVFESIDVKLARDHKERINVEQHCLAREVVNLIACEGVEREERHEPLGKWRSRFHMAGFKPYPLSSYVNATIKGLLESYSEKYTLEERDGALYLGWKNQPLITSCAWR

SEQ ID NO: 45905 - protein, 526 aa, Arabidopsis thaliana
  peptide (1)..(526): Ceres Seq. ID no. 13576109
  misc_feature (130)..(436): Pfam Name: GRAS family transcription factor Pfam Description: GRAS family transcription factor
  misc_feature (118)..(526): Homolog of NCBI NO: 15218990 NR Description: scarecrow-like transcription factor 1 (SCL1)
  misc_feature (148)..(526): Homolog of NCBI NO: 15224425 NR Description: scarecrow-like transcription factor 21 (SCL21)
  misc_feature (118)..(526): Homolog of NCBI NO: 26450054 NR Description: putative SCARECROW gene regulator [Arabidopsis
  misc_feature (29)..(525): Homolog of NCBI NO: 25989334 NR Description: chitin-inducible gibberellin-responsive protein
  misc_feature (96)..(526): Homolog of NCBI NO: 15238903 NR Description: phytochrome A signal transduction 1 (PAT1)
  misc_feature (29)..(525): Homolog of NCBI NO: 37533564 NR Description: putative SCARECROW gene regulator-like
  misc_feature (224)..(526): Homolog of NCBI NO: 11358827 NR Description: scarecrow-like protein 5
  misc_feature (1)..(526): Homolog of NCBI NO: 14517552 NR Description: F17J6.12/F17J6.12 [Arabidopsis thaliana]
  misc_feature (1)..(526): Homolog of NCBI NO: 25405382 NR Description: scarecrow-like protein [imported] - Arabidopsis
  misc_feature (1)..(526): Homolog of NCBI NO: 23397333 NR Description: putative scarecrow protein [Arabidopsis thaliana]
MEATQKHMIQEGSSMFYHQPSSVKQMDLSVQTFDSYCTLESSSGTKSHPCLNNKNNSSSTTSFSSNESPISQANNNNLSRFNNHSPEENNNSPLSGSSATNTNETELSLMLKDLETAMMEPDVDNSYNNQGGFGQQHGVVSSAMYRSMEMISRGDLKGVLYECAKAVENYDLEMTDWLISQLQQMVSVSGEPVQRLGAYMLEGLVARLASSGSSIYKALRCKDPTGPELLTYMHILYEACPYFKFGYESANGAIAEAVKNESFVHIIDFQISQGGQWVSLIRALGARPGGPPNVRITGIDDPRSSFARQGGLELVGQRLGKLAEMCGVPFEFHGAALCCTEVEIEKLGVRNGEALAVNFPLVLHHMPDESVTVENHRDRLLRLVKHLSPNVVTLVEQEANTNTAPFLPRFVETMNHYLAVFESIDVKLARDHKERINVEQHCLAREVVNLIACEGVEREERHEPLGKWRSRFHMAGFKPYPLSSYVNATIKGLLESYSEKYTLEERDGALYLGWKNQPLITSCAWR

SEQ ID NO: 45906 - protein, 519 aa, Arabidopsis thaliana
  peptide (1)..(519): Ceres Seq. ID no. 13576110
  misc_feature (123)..(429): Pfam Name: GRAS family transcription factor Pfam Description: GRAS family transcription factor
  misc_feature (111)..(519): Homolog of NCBI NO: 15218990 NR Description: scarecrow-like transcription factor 1 (SCL1)
  misc_feature (141)..(519): Homolog of NCBI NO: 15224425 NR Description: scarecrow-like transcription factor 21 (SCL21)
  misc_feature (111)..(519): Homolog of NCBI NO: 26450054 NR Description: putative SCARECROW gene regulator [Arabidopsis
  misc_feature (22)..(518): Homolog of NCBI NO: 25989334 NR Description: chitin-inducible gibberellin-responsive protein
  misc_feature (89)..(519): Homolog of NCBI NO: 15238903 NR Description: phytochrome A signal transduction 1 (PAT1)
  misc_feature (22)..(518): Homolog of NCBI NO: 37533564 NR Description: putative SCARECROW gene regulator-like
  misc_feature (217)..(519): Homolog of NCBI NO: 11358827 NR Description: scarecrow-like protein 5
  misc_feature (1)..(519): Homolog of NCBI NO: 14517552 NR Description: F17J6.12/F17J6.12 [Arabidopsis thaliana]
  misc_feature (1)..(519): Homolog of NCBI NO: 25405382 NR Description: scarecrow-like protein [imported] - Arabidopsis
  misc_feature (1)..(519): Homolog of NCBI NO: 23397333 NR Description: putative scarecrow protein [Arabidopsis thaliana]
MIQEGSSMFYHQPSSVKQMDLSVQTFDSYCTLESSSGTKSHPCLNNKNNSSSTTSFSSNESPISQANNNNLSRFNNHSPEENNNSPLSGSSATNTNETELSLMLKDLETAMMEPDVDNSYNNQGGFGQQHGVVSSAMYRSMEMISRGDLKGVLYECAKAVENYDLEMTDWLISQLQQMVSVSGEPVQRLGAYMLEGLVARLASSGSSIYKALRCKDPTGPELLTYMHILYEACPYFKFGYESANGAIAEAVKNESFVHIIDFQISQGGQWVSLIRALGARPGGPPNVRITGIDDPRSSFARQGGLELVGQRLGKLAEMCGVPFEFHGAALCCTEVEIEKLGVRNGEALAVNFPLVLHHMPDESVTVENHRDRLLRLVKHLSPNVVTLVEQEANTNTAPFLPRFVETMNHYLAVFESIDVKLARDHKERINVEQHCLAREVVNLIACEGVEREERHEPLGKWRSRFHMAGFKPYPLSSYVNATIKGLLESYSEKYTLEERDGALYLGWKNQPLITSCAWR

SEQ ID NO: 45907 - DNA, 2059 bp, Arabidopsis thaliana
  misc_feature (1)..(2059): Ceres Seq. ID no. 13591609
  misc_feature: MA Experiment ID: 20000169 Result: Down-regulated in Transcription
  misc_feature: MA Experiment 20000169 PARAMETER Experiment Name: At_100uM_ABA_P Parameter: Age (day) Value: 14
  misc_feature: MA Experiment 20000169 PARAMETER Experiment Name: At_100uM_ABA_P Parameter: Organism Value: A. thaliana
  misc_feature: MA Experiment 20000169 PARAMETER Experiment Name: At_100uM_ABA_P Parameter: Plant Line Value: WS
  misc_feature: MA Experiment 20000169 PARAMETER Experiment Name: At_100uM_ABA_P Parameter: Timepoint (hr) Value: 6
  misc_feature: MA Experiment 20000169 PARAMETER Experiment Name: At_100uM_ABA_P Parameter: Tissue Value: Aerial
  misc_feature: MA Experiment 20000169 PARAMETER Experiment Name: At_100uM_ABA_P Parameter: Treatment Value: 100uM ABA vs. No Treatment
  misc_feature: MA Experiment ID: 20000171 Result: Down-regulated in Transcription
  misc_feature: MA Experiment 20000171 PARAMETER Experiment Name: At_42deg_Heat_P Parameter: Age (day) Value: 14
  misc_feature: MA Experiment 20000171 PARAMETER Experiment Name: At_42deg_Heat_P Parameter: Organism Value: A. thaliana
  misc_feature: MA Experiment 20000171 PARAMETER Experiment Name: At_42deg_Heat_P Parameter: Plant Line Value: WS
  misc_feature: MA Experiment 20000171 PARAMETER Experiment Name: At_42deg_Heat_P Parameter: Temperature (deg C) Value: 42 vs. 22
  misc_feature: MA Experiment 20000171 PARAMETER Experiment Name: At_42deg_Heat_P Parameter: Timepoint (hr) Value: 1
  misc_feature: MA Experiment 20000171 PARAMETER Experiment Name: At_42deg_Heat_P Parameter: Tissue Value: Aerial
  misc_feature: MA Experiment ID: 20000173 Result: Down-regulated in Transcription
  misc_feature: MA Experiment 20000173 PARAMETER Experiment Name: At_42deg_Heat_P Parameter: Age (day) Value: 14
  misc_feature: MA Experiment 20000173 PARAMETER Experiment Name: At_42deg_Heat_P Parameter: Organism Value: A. thaliana
  misc_feature: MA Experiment 20000173 PARAMETER Experiment Name: At_42deg_Heat_P Parameter: Plant Line Value: WS
  misc_feature: MA Experiment 20000173 PARAMETER Experiment Name: At_42deg_Heat_P Parameter: Temperature (deg C) Value: 42 vs. 22
  misc_feature: MA Experiment 20000173 PARAMETER Experiment Name: At_42deg_Heat_P Parameter: Timepoint (hr) Value: 6
  misc_feature: MA Experiment 20000173 PARAMETER Experiment Name: At_42deg_Heat_P Parameter: Tissue Value: Aerial
  misc_feature: MA Experiment ID: 20000180 Result: Up-regulated in Transcription
  misc_feature: MA Experiment 20000180 PARAMETER Experiment Name: At_Germinating_Seeds_P Parameter: Age (hr) Value: 24 vs. 0
  misc_feature: MA Experiment 20000180 PARAMETER Experiment Name: At_Germinating_Seeds_P Parameter: Tissue Value: Germinating Seeds
  misc_feature: MA Experiment ID: 20000227 Result: Up-regulated in Transcription
  misc_feature: MA Experiment 20000227 PARAMETER Experiment Name: At_Root-Tips-vs-Tops_P Parameter: Tissue Value: Root Tips vs. Root Tops
  misc_feature: MA Experiment ID: 20000234 Result: Up-regulated in Transcription
  misc_feature: MA Experiment 20000234 PARAMETER Experiment Name: At_Siliques_P Parameter: Age (day) Value: 21
  misc_feature: MA Experiment 20000234 PARAMETER Experiment Name: At_Siliques_P Parameter: Organism Value: A. thaliana
  misc_feature: MA Experiment 20000234 PARAMETER Experiment Name: At_Siliques_P Parameter: Plant Line Value: WS
  misc_feature: MA Experiment 20000234 PARAMETER Experiment Name: At_Siliques_P Parameter: Tissue Value: Less Than 5mm Siliques vs. Whole Plant
  misc_feature: MA Experiment ID: 20000235 Result: Up-regulated in Transcription
  misc_feature: MA Experiment 20000235 PARAMETER Experiment Name: At_Siliques_P Parameter: Age (day) Value: 21
  misc_feature: MA Experiment 20000235 PARAMETER Experiment Name: At_Siliques_P Parameter: Organism Value: A. thaliana
  misc_feature: MA Experiment 20000235 PARAMETER Experiment Name: At_Siliques_P Parameter: Plant Line Value: WS
  misc_feature: MA Experiment 20000235 PARAMETER Experiment Name: At_Siliques_P Parameter: Tissue Value: 5-10mm Siliques vs. Whole Plant
  misc_feature: MA Experiment ID: 20000264 Result: Up-regulated in Transcription
  misc_feature: MA Experiment 20000264 PARAMETER Experiment Name: At_Open_Flower_P Parameter: Age (day) Value: 21
  misc_feature: MA Experiment 20000264 PARAMETER Experiment Name: At_Open_Flower_P Parameter: Plant Line Value: WS
  misc_feature: MA Experiment 20000264 PARAMETER Experiment Name: At_Open_Flower_P Parameter: Tissue Value: Open Flower vs. Whole Plant
  misc_feature: MA Experiment ID: 20000265 Result: Up-regulated in Transcription
  misc_feature: MA Experiment 20000265 PARAMETER Experiment Name: At_Open_Flower_P Parameter: Age (day) Value: 21
  misc_feature: MA Experiment 20000265 PARAMETER Experiment Name: At_Open_Flower_P Parameter: Plant Line Value: WS
  misc_feature: MA Experiment 20000265 PARAMETER Experiment Name: At_Open_Flower_P Parameter: Tissue Value: Closed Flower vs. Whole Plant
  misc_feature: MA Experiment ID: 20000286 Result: Up-regulated in Transcription
  misc_feature: MA Experiment 20000286 PARAMETER Experiment Name: At_Open_Flower_P Parameter: Age (day) Value: 21
  misc_feature: MA Experiment 20000286 PARAMETER Experiment Name: At_Open_Flower_P Parameter: Plant Line Value: WS
  misc_feature: MA Experiment 20000286 PARAMETER Experiment Name: At_Open_Flower_P Parameter: Tissue Value: Half Open vs. Whole Plant
  misc_feature: MA Experiment ID: 20000794 Result: Up-regulated in Transcription
  misc_feature: MA Experiment 20000794 PARAMETER Experiment Name: At_Petals_P Parameter: Age (day) Value: 23-25 days
  misc_feature: MA Experiment 20000794 PARAMETER Experiment Name: At_Petals_P Parameter: Plant Line Value: WS
  misc_feature: MA Experiment 20000794 PARAMETER Experiment Name: At_Petals_P Parameter: Tissue Value: Petals vs. Whole plant
  misc_feature: MA Experiment ID: 20001247 Result: Up-regulated in Transcription
  misc_feature: MA Experiment 20001247 PARAMETER Experiment Name: At_Far-red-induction_P Parameter: Age (day) Value: 7
  misc_feature: MA Experiment 20001247 PARAMETER Experiment Name: At_Far-red-induction_P Parameter: Light Value: Far-red vs. White
  misc_feature: MA Experiment 20001247 PARAMETER Experiment Name: At_Far-red-induction_P Parameter: Organism Value: A. thaliana
  misc_feature: MA Experiment 20001247 PARAMETER Experiment Name: At_Far-red-induction_P Parameter: Plant Line Value: Columbia
  misc_feature: MA Experiment 20001247 PARAMETER Experiment Name: At_Far-red-induction_P Parameter: Timepoint (hr) Value: 1
  misc_feature: MA Experiment 20001247 PARAMETER Experiment Name: At_Far-red-induction_P Parameter: Tissue Value: Whole Plant
  misc_feature: MA Experiment ID: 20001248 Result: Up-regulated in Transcription
  misc_feature: MA Experiment 20001248 PARAMETER Experiment Name: At_Far-red-induction_P Parameter: Age (day) Value: 7
  misc_feature: MA Experiment 20001248 PARAMETER Experiment Name: At_Far-red-induction_P Parameter: Light Value: Far-red vs. White
  misc_feature: MA Experiment 20001248 PARAMETER Experiment Name: At_Far-red-induction_P Parameter: Organism Value: A. thaliana
  misc_feature: MA Experiment 20001248 PARAMETER Experiment Name: At_Far-red-induction_P Parameter: Plant Line Value: Columbia
  misc_feature: MA Experiment 20001248 PARAMETER Experiment Name: At_Far-red-induction_P Parameter: Timepoint (hr) Value: 4
  misc_feature: MA Experiment 20001248 PARAMETER Experiment Name: At_Far-red-induction_P Parameter: Tissue Value: Whole Plant
  misc_feature: MA Experiment ID: 20001450 Result: Up-regulated in Transcription
  misc_feature: MA Experiment 20001450 PARAMETER Experiment Name: At_Far-red-induction_P Parameter: Age (day) Value: 7
  misc_feature: MA Experiment 20001450 PARAMETER Experiment Name: At_Far-red-induction_P Parameter: Light Value: Far-red vs. White
  misc_feature: MA Experiment 20001450 PARAMETER Experiment Name: At_Far-red-induction_P Parameter: Organism Value: A. thaliana
  misc_feature: MA Experiment 20001450 PARAMETER Experiment Name: At_Far-red-induction_P Parameter: Plant Line Value: Columbia
  misc_feature: MA Experiment 20001450 PARAMETER Experiment Name: At_Far-red-induction_P Parameter: Timepoint (hr) Value: 8
  misc_feature: MA Experiment 20001450 PARAMETER Experiment Name: At_Far-red-induction_P Parameter: Tissue Value: Whole Plant
  misc_feature: MA Experiment ID: 20001557 Result: Up-regulated in Transcription
  misc_feature: MA Experiment 20001557 PARAMETER Experiment Name: At_Drought_Soil_Dry_P Parameter: Age (day) Value: 27
  misc_feature: MA Experiment 20001557 PARAMETER Experiment Name: At_Drought_Soil_Dry_P Parameter: Organism Value: A. thaliana
  misc_feature: MA Experiment 20001557 PARAMETER Experiment Name: At_Drought_Soil_Dry_P Parameter: Plant Line Value: WS
  misc_feature: MA Experiment 20001557 PARAMETER Experiment Name: At_Drought_Soil_Dry_P Parameter: Post Timepoint (hr) Value: 3
  misc_feature: MA Experiment 20001557 PARAMETER Experiment Name: At_Drought_Soil_Dry_P Parameter: Post-Treatment Value: Re-Water vs. No Drought
  misc_feature: MA Experiment 20001557 PARAMETER Experiment Name: At_Drought_Soil_Dry_P Parameter: Timepoint (day) Value: 13
  misc_feature: MA Experiment 20001557 PARAMETER Experiment Name: At_Drought_Soil_Dry_P Parameter: Treatment Value: Drought vs. No Drought
  misc_feature: MA Experiment ID: 20001906 Result: Down-regulated in Transcription
  misc_feature: MA Experiment 20001906 PARAMETER Experiment Name: At_Drought_Reproduction_P Parameter: Age (day) Value: 35
  misc_feature: MA Experiment 20001906 PARAMETER Experiment Name: At_Drought_Reproduction_P Parameter: Organism Value: A. thaliana
  misc_feature: MA Experiment 20001906 PARAMETER Experiment Name: At_Drought_Reproduction_P Parameter: Plant Line Value: WS
  misc_feature: MA Experiment 20001906 PARAMETER Experiment Name: At_Drought_Reproduction_P Parameter: Timepoint (day) Value: 5
  misc_feature: MA Experiment 20001906 PARAMETER Experiment Name: At_Drought_Reproduction_P Parameter: Tissue Value: Siliques
  misc_feature: MA Experiment 20001906 PARAMETER Experiment Name: At_Drought_Reproduction_P Parameter: Treatment Value: Drought vs. No Drought
agatcacactcatatcgaatcaaaatctcaaacctttttcttcatttcttcccccctctctctctctcactctgtttctgatgggtctccgattcccacctaaggtgttggaacatatcctctccttcattgattccaacgaggaccggaactctgtttctctggtctgcaagtcatggtttgagacagaacggaagactaggaagcgagtctttgtcggaaactgttacgcggtcagtcctgctgcggttacacgacggttcccggagatgagatctttgactttgaaggggaagccacacttcgctgactataatctcgttcctgatggttggggtggttatgcttggccgtggattgaagctatggcggcgaaaagttcgtctcttgaagagatcagaatgaagaggatggtggtgactgatgagtgcttagagaaaattgctgcttcgtttaaggattttaaagtccttgtgttgacttcttgtgaaggtttctctactgatggtatcgctgctattgcagctacttgcaggaacttgagagtgttggaactacgagagtgtattgttgaagatttaggaggagattggcttagctattttccagagagttcaacttctttggtctctcttgacttctcttgtttagattctgaggttaaaatctcggatttagagcgtcttgtgagcagatctccaaacttgaagtctttgaagttgaatccagctgtgactctagatggactcgttagcttacttcgttgtgctccacaactgactgagctcggcacaggttctttcgcagctcaattgaaacctgaagcgttttcaaagttatcagaagctttttcaaactgtaagcaacttcagagcttatctggtctctgggatgtcctccctgaatatcttccagctctttattctgtctgtcctggtcttacctcgttgaacttgagctacgctactgtccgaatgcctgatcttgttgagcttcttaggcgatgctcgaaactgcagaagctatgggtgatggacttgattgaggacaaaggtcttgaagctgttgcctcatattgcaaggaactgcgagaactgagggtgtttccatctgagccagatcttgatgcaaccaacatacctctgacggaacaaggcctggtctttgtgtctaaaggctgtcgaaagcttgagtctgttctctacttctgtgtccagttcacaaacgcagctttgtttaccatagcaagaaaacgtccgaatctcaagtgcttccgtctctgtgtgatagagccatttgctcctgattacaaaacaaatgagccacttgataaaggattcaaagccatagctgagggatgcagggatcttcgacggctctccgtctctggtcttctctctgacaaggccttcaaatacattgggaaacatgccaagaaggttaggatgctatcaatagcatttgctggggacagtgatttgatgcttcatcacttgttgtcgggctgtgagagtttaaagaagcttgagatacgagactgcccttttggagacactgcactactggagcacgctgccaagctagagaccatgcgatccctttggatgtcatcttgctttgtaagttttggtgcttgcaagcttctaagtcagaaaatgccaaggctcaatgtcgaagtcattgatgaacatcctccagagtcaagacctgagagctctccagttgagaggatatacatatacagaacagtcgcaggaccgagaatggatacgcctgaatttgtgtggacgatacacaagaatcctgagaatggagtttcacatctagccataaagtaaacttgctgcttcagtcatattttcctttccatcttcagtttttgcagacattgttgtgggagagattcaccttccatttgttccctttcatattgtttttactaagatattagaatatcagtgatagaagcatttcatagcttgtactctgttaaacaaacaaaaccttgtgtttggaataaaattatcattttataagatttatagtaaaagaagtttgt

SEQ ID NO: 45908 - protein, 611 aa, Arabidopsis thaliana
  peptide (1)..(611): Ceres Seq. ID no. 13591610
  misc_feature (28)..(74): Pfam Name: F-box domain Pfam Description: F-box domain
  misc_feature (28)..(74): Pfam Name: F-box domain Pfam Description: F-box domain
  misc_feature (35)..(594): Homolog of NCBI NO: 13249030 NR Description: F-box containing protein TIR1
  misc_feature (11)..(594): Homolog of NCBI NO: 18423092 NR Description: transport inhibitor response 1 (TIR1), putative
  misc_feature (31)..(594): Homolog of NCBI NO: 18391439 NR Description: transport inhibitor response 1 (TIR1), putative
  misc_feature (31)..(594): Homolog of NCBI NO: 21740736 NR Description: OSJNBa0072K14.1 [Oryza sativa (japonica
  misc_feature (31)..(597): Homolog of NCBI NO: 18405102 NR Description: transport inhibitor response 1 (TIR1), putative
  misc_feature (35)..(594): Homolog of NCBI NO: 13249030 NR Description: F-box containing protein TIR1
  misc_feature (31)..(594): Homolog of NCBI NO: 18391439 NR Description: transport inhibitor response 1 (TIR1), putative
  misc_feature (31)..(597): Homolog of NCBI NO: 18405102 NR Description: transport inhibitor response 1 (TIR1), putative
  misc_feature (27)..(611): Homolog of NCBI NO: 18412177 NR Description: F-box protein GRR1-like protein 1, AtFBL18
  misc_feature (27)..(611): Homolog of NCBI NO: 12658970 NR Description: GRR1-like protein 1 [Arabidopsis thaliana]
  misc_feature (27)..(611): Homolog of NCBI NO: 15027885 NR Description: putative F-box protein GRR1 protein 1, AtFBL18
  misc_feature (27)..(600): Homolog of NCBI NO: 18412567 NR Description: transport inhibitor response 1 (TIR1), AtFBL1
  misc_feature (32)..(594): Homolog of NCBI NO: 12083523 NR Description: similar to Arabidopsis thaliana transport
  misc_feature (31)..(594): Homolog of NCBI NO: 21740736 NR Description: OSJNBa0072K14.1 [Oryza sativa (japonica
  misc_feature (11)..(594): Homolog of NCBI NO: 18423092 NR Description: transport inhibitor response 1 (TIR1), putative
  misc_feature (32)..(594): Homolog of NCBI NO: 12083523 NR Description: similar to Arabidopsis thaliana transport
  misc_feature (27)..(600): Homolog of NCBI NO: 18412567 NR Description: transport inhibitor response 1 (TIR1), AtFBL1
  misc_feature (27)..(611): Homolog of NCBI NO: 15027885 NR Description: putative F-box protein GRR1 protein 1, AtFBL18
  misc_feature (27)..(611): Homolog of NCBI NO: 12658970 NR Description: GRR1-like protein 1 [Arabidopsis thaliana]
  misc_feature (27)..(611): Homolog of NCBI NO: 18412177 NR Description: F-box protein GRR1-like protein 1, AtFBL18
ITLISNQNLKPFSSFLPPSLSLTLFLMGLRFPPKVLEHILSFIDSNEDRNSVSLVCKSWFETERKTRKRVFVGNCYAVSPAAVTRRFPEMRSLTLKGKPHFADYNLVPDGWGGYAWPWIEAMAAKSSSLEEIRMKRMVVTDECLEKIAASFKDFKVLVLTSCEGFSTDGIAAIAATCRNLRVLELRECIVEDLGGDWLSYFPESSTSLVSLDFSCLDSEVKISDLERLVSRSPNLKSLKLNPAVTLDGLVSLLRCAPQLTELGTGSFAAQLKPEAFSKLSEAFSNCKQLQSLSGLWDVLPEYLPALYSVCPGLTSLNLSYATVRMPDLVELLRRCSKLQKLWVMDLIEDKGLEAVASYCKELRELRVFPSEPDLDATNIPLTEQGLVFVSKGCRKLESVLYFCVQFTNAALFTIARKRPNLKCFRLCVIEPFAPDYKTNEPLDKGFKAIAEGCRDLRRLSVSGLLSDKAFKYIGKHAKKVRMLSIAFAGDSDLMLHHLLSGCESLKKLEIRDCPFGDTALLEHAAKLETMRSLWMSSCFVSFGACKLLSQKMPRLNVEVIDEHPPESRPESSPVERIYIYRTVAGPRMDTPEFVWTIHKNPENGVSHLAIK

SEQ ID NO: 45909 - protein, 585 aa, Arabidopsis thaliana
  peptide (1)..(585): Ceres Seq. ID no. 13591611
  misc_feature (2)..(48): Pfam Name: F-box domain Pfam Description: F-box domain
  misc_feature (2)..(48): Pfam Name: F-box domain Pfam Description: F-box domain
  misc_feature (9)..(568): Homolog of NCBI NO: 13249030 NR Description: F-box containing protein TIR1
  misc_feature (1)..(568): Homolog of NCBI NO: 18423092 NR Description: transport inhibitor response 1 (TIR1), putative
  misc_feature (5)..(568): Homolog of NCBI NO: 18391439 NR Description: transport inhibitor response 1 (TIR1), putative
  misc_feature (5)..(568): Homolog of NCBI NO: 21740736 NR Description: OSJNBa0072K14.1 [Oryza sativa (japonica
  misc_feature (5)..(571): Homolog of NCBI NO: 18405102 NR Description: transport inhibitor response 1 (TIR1), putative
  misc_feature (9)..(568): Homolog of NCBI NO: 13249030 NR Description: F-box containing protein TIR1
  misc_feature (5)..(568): Homolog of NCBI NO: 18391439 NR Description: transport inhibitor response 1 (TIR1), putative
  misc_feature (5)..(571): Homolog of NCBI NO: 18405102 NR Description: transport inhibitor response 1 (TIR1), putative
  misc_feature (1)..(585): Homolog of NCBI NO: 18412177 NR Description: F-box protein GRR1-like protein 1, AtFBL18
  misc_feature (1)..(585): Homolog of NCBI NO: 12658970 NR Description: GRR1-like protein 1 [Arabidopsis thaliana]
  misc_feature (1)..(585): Homolog of NCBI NO: 15027885 NR Description: putative F-box protein GRR1 protein 1, AtFBL18
  misc_feature (1)..(574): Homolog of NCBI NO: 18412567 NR Description: transport inhibitor response 1 (TIR1), AtFBL1
  misc_feature (6)..(568): Homolog of NCBI NO: 12083523 NR Description: similar to Arabidopsis thaliana transport
  misc_feature (5)..(568): Homolog of NCBI NO: 21740736 NR Description: OSJNBa0072K14.1 [Oryza sativa (japonica
  misc_feature (1)..(568): Homolog of NCBI NO: 18423092 NR Description: transport inhibitor response 1 (TIR1), putative
  misc_feature (6)..(568): Homolog of NCBI NO: 12083523 NR Description: similar to Arabidopsis thaliana transport
  misc_feature (1)..(574): Homolog of NCBI NO: 18412567 NR Description: transport inhibitor response 1 (TIR1), AtFBL1
  misc_feature (1)..(585): Homolog of NCBI NO: 15027885 NR Description: putative F-box protein GRR1 protein 1, AtFBL18
  misc_feature (1)..(585): Homolog of NCBI NO: 12658970 NR Description: GRR1-like protein 1 [Arabidopsis thaliana]
  misc_feature (1)..(585): Homolog of NCBI NO: 18412177 NR Description: F-box protein GRR1-like protein 1, AtFBL18
MGLRFPPKVLEHILSFIDSNEDRNSVSLVCKSWFETERKTRKRVFVGNCYAVSPAAVTRRFPEMRSLTLKGKPHFADYNLVPDGWGGYAWPWIEAMAAKSSSLEEIRMKRMVVTDECLEKIAASFKDFKVLVLTSCEGFSTDGIAAIAATCRNLRVLELRECIVEDLGGDWLSYFPESSTSLVSLDFSCLDSEVKISDLERLVSRSPNLKSLKLNPAVTLDGLVSLLRCAPQLTELGTGSFAAQLKPEAFSKLSEAFSNCKQLQSLSGLWDVLPEYLPALYSVCPGLTSLNLSYATVRMPDLVELLRRCSKLQKLWVMDLIEDKGLEAVASYCKELRELRVFPSEPDLDATNIPLTEQGLVFVSKGCRKLESVLYFCVQFTNAALFTIARKRPNLKCFRLCVIEPFAPDYKTNEPLDKGFKAIAEGCRDLRRLSVSGLLSDKAFKYIGKHAKKVRMLSIAFAGDSDLMLHHLLSGCESLKKLEIRDCPFGDTALLEHAAKLETMRSLWMSSCFVSFGACKLLSQKMPRLNVEVIDEHPPESRPESSPVERIYIYRTVAGPRMDTPEFVWTIHKNPENGVSHLAIK

SEQ ID NO: 45910 - protein, 522 aa, Arabidopsis thaliana
  peptide (1)..(522): Ceres Seq. ID no. 13591612
  misc_feature (1)..(505): Homolog of NCBI NO: 13249030 NR Description: F-box containing protein TIR1
  misc_feature (1)..(505): Homolog of NCBI NO: 18423092 NR Description: transport inhibitor response 1 (TIR1), putative
  misc_feature (1)..(505): Homolog of NCBI NO: 18391439 NR Description: transport inhibitor response 1 (TIR1), putative
  misc_feature (1)..(505): Homolog of NCBI NO: 21740736 NR Description: OSJNBa0072K14.1 [Oryza sativa (japonica
  misc_feature (1)..(508): Homolog of NCBI NO: 18405102 NR Description: transport inhibitor response 1 (TIR1), putative
  misc_feature (1)..(505): Homolog of NCBI NO: 12083523 NR Description: similar to Arabidopsis thaliana transport
  misc_feature (1)..(511): Homolog of NCBI NO: 18412567 NR Description: transport inhibitor response 1 (TIR1), AtFBL1
  misc_feature (1)..(522): Homolog of NCBI NO: 15027885 NR Description: putative F-box protein GRR1 protein 1, AtFBL18
  misc_feature (1)..(522): Homolog of NCBI NO: 12658970 NR Description: GRR1-like protein 1 [Arabidopsis thaliana]
  misc_feature (1)..(522): Homolog of NCBI NO: 18412177 NR Description: F-box protein GRR1-like protein 1, AtFBL18
  misc_feature (1)..(505): Homolog of NCBI NO: 13249030 NR Description: F-box containing protein TIR1
  misc_feature (1)..(505): Homolog of NCBI NO: 18423092 NR Description: transport inhibitor response 1 (TIR1), putative
  misc_feature (1)..(505): Homolog of NCBI NO: 18391439 NR Description: transport inhibitor response 1 (TIR1), putative
  misc_feature (1)..(505): Homolog of NCBI NO: 21740736 NR Description: OSJNBa0072K14.1 [Oryza sativa (japonica
  misc_feature (1)..(508): Homolog of NCBI NO: 18405102 NR Description: transport inhibitor response 1 (TIR1), putative
  misc_feature (1)..(505): Homolog of NCBI NO: 12083523 NR Description: similar to Arabidopsis thaliana transport
  misc_feature (1)..(511): Homolog of NCBI NO: 18412567 NR Description: transport inhibitor response 1 (TIR1), AtFBL1
  misc_feature (1)..(522): Homolog of NCBI NO: 15027885 NR Description: putative F-box protein GRR1 protein 1, AtFBL18
  misc_feature (1)..(522): Homolog of NCBI NO: 12658970 NR Description: GRR1-like protein 1 [Arabidopsis thaliana]
  misc_feature (1)..(522): Homolog of NCBI NO: 18412177 NR Description: F-box protein GRR1-like protein 1, AtFBL18
MRSLTLKGKPHFADYNLVPDGWGGYAWPWIEAMAAKSSSLEEIRMKRMVVTDECLEKIAASFKDFKVLVLTSCEGFSTDGIAAIAATCRNLRVLELRECIVEDLGGDWLSYFPESSTSLVSLDFSCLDSEVKISDLERLVSRSPNLKSLKLNPAVTLDGLVSLLRCAPQLTELGTGSFAAQLKPEAFSKLSEAFSNCKQLQSLSGLWDVLPEYLPALYSVCPGLTSLNLSYATVRMPDLVELLRRCSKLQKLWVMDLIEDKGLEAVASYCKELRELRVFPSEPDLDATNIPLTEQGLVFVSKGCRKLESVLYFCVQFTNAALFTIARKRPNLKCFRLCVIEPFAPDYKTNEPLDKGFKAIAEGCRDLRRLSVSGLLSDKAFKYIGKHAKKVRMLSIAFAGDSDLMLHHLLSGCESLKKLEIRDCPFGDTALLEHAAKLETMRSLWMSSCFVSFGACKLLSQKMPRLNVEVIDEHPPESRPESSPVERIYIYRTVAGPRMDTPEFVWTIHKNPENGVSHLAIK

SEQ ID NO: 45911 - DNA, 1536 bp, Arabidopsis thaliana
  misc_feature (1)..(1536): Ceres Seq. ID no. 12560946
  misc_feature: MA Experiment ID: 20000327 Result: Up-regulated in Transcription
  misc_feature: MA Experiment 20000327 PARAMETER Experiment Name: At_42deg_Heat_Sub_P Parameter: Age (day) Value: 14
  misc_feature: MA Experiment 20000327 PARAMETER Experiment Name: At_42deg_Heat_Sub_P Parameter: Organism Value: A. thaliana
  misc_feature: MA Experiment 20000327 PARAMETER Experiment Name: At_42deg_Heat_Sub_P Parameter: Plant Line Value: WS
  misc_feature: MA Experiment 20000327 PARAMETER Experiment Name: At_42deg_Heat_Sub_P Parameter: Temperature (deg C) Value: 42 vs. 22
  misc_feature: MA Experiment 20000327 PARAMETER Experiment Name: At_42deg_Heat_Sub_P Parameter: Timepoint (hr) Value: 1
  misc_feature: MA Experiment 20000327 PARAMETER Experiment Name: At_42deg_Heat_Sub_P Parameter: Tissue Value: Aerial
  misc_feature: MA Experiment ID: 20000355 Result: Up-regulated in Transcription
  misc_feature: MA Experiment 20000355 PARAMETER Experiment Name: At_Siliques_Sub_P Parameter: Age (day) Value: 21
  misc_feature: MA Experiment 20000355 PARAMETER Experiment Name: At_Siliques_Sub_P Parameter: Organism Value: A. thaliana
  misc_feature: MA Experiment 20000355 PARAMETER Experiment Name: At_Siliques_Sub_P Parameter: Plant Line Value: WS
  misc_feature: MA Experiment 20000355 PARAMETER Experiment Name: At_Siliques_Sub_P Parameter: Tissue Value: Less Than 5mm Siliques vs. Whole Plant
  misc_feature: MA Experiment ID: 20000440 Result: Up-regulated in Transcription
  misc_feature: MA Experiment 20000440 PARAMETER Experiment Name: At_Closed-Flower__Sub_P Parameter: Tissue Value: Closed Flower vs. Whole Plant
tcttccgttgccttttcgctttctccgtacacttggccttccttctcgcgatcaaaccctaggtcccgccattgttggtcccagacttcaatcgaagctccaatttcactaatttcaggtgttgtttattctctggaggttggtgatacaatggattctactgctgcaaccaaacgtgttgttgacccacttactgttgggagtgcgtttgtcaatcagtactactacattttctgtaacatgcctgagcatctgccccggttttatcaagagatcagtagagttggccgtgttggacaggacggagtcatgcgtgatttctccacttttcaaggtataagtgaggagcttaagagactgacttatggagattgcaactcggctgagataaccagttatgatactcaagagtctcacaatgggggtttccttctcttcgttactggatacttcactctaaacgagagatcgagaaggaaattcacccaaacttttttccttgccccgcaagaaaagggtttctttgttctgaatgacatcctcagatttgttaatgatgatgctaaggataatgttccagagaccatagatggggaagttgtttctgggataaactctacaacacccactattatcaatgctcctacaggcatgaagggttcggagcaagctgcatgtgtttcagtgaatcctgtttgtaaggaagtgtccaaacccttggataatgagaatgctaaggataatgttctggtacctgagattgctaatgaagttgcaaggactgagataacttgcaaagaagttgcagatgattcacagaaaaattatgaccctgatgatggacttgcagatgctcccaagaaatcctatgcctctgtgttgaaggttacgaaagataaatttggagttccagctgtctctttaccttctccaaagaagatacctaaagaccaagaacatcaagcgccttcagatccttctacaggccagatactcaaagaccaaggtcaacaagcatcttcagatccttctcaagtgatagaatctgatacagtttctgagtctgttgatgcttctgaaaatgggcacaatcaggaagcggtagctgagggtacatctatttatgtgagacatcttccttttaatgccaacattgacatgcttgaggctgaatttaagcaatttggagctattaccaatggtgggattcaagtcataaatcaaaggggccttggttatccttatggttttgttgagtttgaggaggcagatgctgcccacagagcaatagaggcttcacctgtgaagattggtggactgagagcttttgtggaggagaagctatcgacatcaagaggtaaaagaggaaatggaaacgtgggatacggaaataggaatgtgggagtgggaatgagaggaagaggaagttatggatatggctatgattacaggaggggaggtcgaggtcctggaggaggaggaaggtcttttaaccgtagaggcaatgaatacgtcgccagcatcaactcgtactag

SEQ ID NO: 45912 - protein, 511 aa, Arabidopsis thaliana
  peptide (1)..(511): Ceres Seq. ID no. 12560947
  misc_feature (66)..(183): Pfam Name: Nuclear transport factor 2 (NTF2) domain Pfam Description: Nuclear transport factor 2 (NTF2) domain
  misc_feature (361)..(473): Homolog of NCBI NO: 6642640 NR Description: putative RNA-binding protein [Arabidopsis
  misc_feature (64)..(198): Homolog of NCBI NO: 6642640 NR Description: putative RNA-binding protein [Arabidopsis
  misc_feature (66)..(504): Homolog of NCBI NO: 15240057 NR Description: NTF2-containing RNA-binding protein, putative
  misc_feature (340)..(448): Homolog of NCBI NO: 6642641 NR Description: putative RNA-binding protein [Arabidopsis
  misc_feature (66)..(214): Homolog of NCBI NO: 6642641 NR Description: putative RNA-binding protein [Arabidopsis
  misc_feature (61)..(504): Homolog of NCBI NO: 34394922 NR Description: putative Ras-GTPase activating protein SH3
  misc_feature (64)..(501): Homolog of NCBI NO: 9294171 NR Description: RNA-binding protein-like [Arabidopsis thaliana]
  misc_feature (63)..(501): Homolog of NCBI NO: 30687772 NR Description: NTF2-containing RNA-binding protein, putative
  misc_feature (51)..(511): Homolog of NCBI NO: 30695510 NR Description: NTF2-containing RNA-binding protein, putative
  misc_feature (51)..(511): Homolog of NCBI NO: 10177355 NR Description: RNA-binding protein-like [Arabidopsis thaliana]
SSVAFSLSPYTWPSFSRSNPRSRHCWSQTSIEAPISLISGVVYSLEVGDTMDSTAATKRVVDPLTVGSAFVNQYYYIFCNMPEHLPRFYQEISRVGRVGQDGVMRDFSTFQGISEELKRLTYGDCNSAEITSYDTQESHNGGFLLFVTGYFTLNERSRRKFTQTFFLAPQEKGFFVLNDILRFVNDDAKDNVPETIDGEVVSGINSTTPTIINAPTGMKGSEQAACVSVNPVCKEVSKPLDNENAKDNVLVPEIANEVARTEITCKEVADDSQKNYDPDDGLADAPKKSYASVLKVTKDKFGVPAVSLPSPKKIPKDQEHQAPSDPSTGQILKDQGQQASSDPSQVIESDTVSESVDASENGHNQEAVAEGTSIYVRHLPFNANIDMLEAEFKQFGAITNGGIQVINQRGLGYPYGFVEFEEADAAHRAIEASPVKIGGLRAFVEEKLSTSRGKRGNGNVGYGNRNVGVGMRGRGSYGYGYDYRRGGRGPGGGGRSFNRRGNEYVASINSY

SEQ ID NO: 45913 - protein, 461 aa, Arabidopsis thaliana
  peptide (1)..(461): Ceres Seq. ID no. 12560948
  misc_feature (16)..(133): Pfam Name: Nuclear transport factor 2 (NTF2) domain Pfam Description: Nuclear transport factor 2 (NTF2) domain
  misc_feature (311)..(423): Homolog of NCBI NO: 6642640 NR Description: putative RNA-binding protein [Arabidopsis
  misc_feature (14)..(148): Homolog of NCBI NO: 6642640 NR Description: putative RNA-binding protein [Arabidopsis
  misc_feature (16)..(454): Homolog of NCBI NO: 15240057 NR Description: NTF2-containing RNA-binding protein, putative
  misc_feature (290)..(398): Homolog of NCBI NO: 6642641 NR Description: putative RNA-binding protein [Arabidopsis
  misc_feature (16)..(164): Homolog of NCBI NO: 6642641 NR Description: putative RNA-binding protein [Arabidopsis
  misc_feature (11)..(454): Homolog of NCBI NO: 34394922 NR Description: putative Ras-GTPase activating protein SH3
  misc_feature (14)..(451): Homolog of NCBI NO: 9294171 NR Description: RNA-binding protein-like [Arabidopsis thaliana]
  misc_feature (13)..(451): Homolog of NCBI NO: 30687772 NR Description: NTF2-containing RNA-binding protein, putative
  misc_feature (1)..(461): Homolog of NCBI NO: 30695510 NR Description: NTF2-containing RNA-binding protein, putative
  misc_feature (1)..(461): Homolog of NCBI NO: 10177355 NR Description: RNA-binding protein-like [Arabidopsis thaliana]
MDSTAATKRVVDPLTVGSAFVNQYYYIFCNMPEHLPRFYQEISRVGRVGQDGVMRDFSTFQGISEELKRLTYGDCNSAEITSYDTQESHNGGFLLFVTGYFTLNERSRRKFTQTFFLAPQEKGFFVLNDILRFVNDDAKDNVPETIDGEVVSGINSTTPTIINAPTGMKGSEQAACVSVNPVCKEVSKPLDNENAKDNVLVPEIANEVARTEITCKEVADDSQKNYDPDDGLADAPKKSYASVLKVTKDKFGVPAVSLPSPKKIPKDQEHQAPSDPSTGQILKDQGQQASSDPSQVIESDTVSESVDASENGHNQEAVAEGTSIYVRHLPFNANIDMLEAEFKQFGAITNGGIQVINQRGLGYPYGFVEFEEADAAHRAIEASPVKIGGLRAFVEEKLSTSRGKRGNGNVGYGNRNVGVGMRGRGSYGYGYDYRRGGRGPGGGGRSFNRRGNEYVASINSY

SEQ ID NO: 45914 - protein, 431 aa, Arabidopsis thaliana
  peptide (1)..(431): Ceres Seq. ID no. 12560949
  misc_feature (1)..(103): Pfam Name: Nuclear transport factor 2 (NTF2) domain Pfam Description: Nuclear transport factor 2 (NTF2) domain
  misc_feature (281)..(393): Homolog of NCBI NO: 6642640 NR Description: putative RNA-binding protein [Arabidopsis
  misc_feature (1)..(118): Homolog of NCBI NO: 6642640 NR Description: putative RNA-binding protein [Arabidopsis
  misc_feature (1)..(424): Homolog of NCBI NO: 15240057 NR Description: NTF2-containing RNA-binding protein, putative
  misc_feature (260)..(368): Homolog of NCBI NO: 6642641 NR Description: putative RNA-binding protein [Arabidopsis
  misc_feature (1)..(134): Homolog of NCBI NO: 6642641 NR Description: putative RNA-binding protein [Arabidopsis
  misc_feature (1)..(424): Homolog of NCBI NO: 34394922 NR Description: putative Ras-GTPase activating protein SH3
  misc_feature (1)..(421): Homolog of NCBI NO: 9294171 NR Description: RNA-binding protein-like [Arabidopsis thaliana]
  misc_feature (1)..(421): Homolog of NCBI NO: 30687772 NR Description: NTF2-containing RNA-binding protein, putative
  misc_feature (1)..(431): Homolog of NCBI NO: 30695510 NR Description: NTF2-containing RNA-binding protein, putative
  misc_feature (1)..(431): Homolog of NCBI NO: 10177355 NR Description: RNA-binding protein-like [Arabidopsis thaliana]
MPEHLPRFYQEISRVGRVGQDGVMRDFSTFQGISEELKRLTYGDCNSAEITSYDTQESHNGGFLLFVTGYFTLNERSRRKFTQTFFLAPQEKGFFVLNDILRFVNDDAKDNVPETIDGEVVSGINSTTPTIINAPTGMKGSEQAACVSVNPVCKEVSKPLDNENAKDNVLVPEIANEVARTEITCKEVADDSQKNYDPDDGLADAPKKSYASVLKVTKDKFGVPAVSLPSPKKIPKDQEHQAPSDPSTGQILKDQGQQASSDPSQVIESDTVSESVDASENGHNQEAVAEGTSIYVRHLPFNANIDMLEAEFKQFGAITNGGIQVINQRGLGYPYGFVEFEEADAAHRAIEASPVKIGGLRAFVEEKLSTSRGKRGNGNVGYGNRNVGVGMRGRGSYGYGYDYRRGGRGPGGGGRSFNRRGNEYVASINSY

SEQ ID NO: 45915 - DNA, 1881 bp, Arabidopsis thaliana
  misc_feature (1)..(1881): Ceres Seq. ID no. 15168973
  misc_feature: MA Experiment ID: 20000171 Result: Down-regulated in Transcription
  misc_feature: MA Experiment 20000171 PARAMETER Experiment Name: At_42deg_Heat_P Parameter: Age (day) Value: 14
  misc_feature: MA Experiment 20000171 PARAMETER Experiment Name: At_42deg_Heat_P Parameter: Organism Value: A. thaliana
  misc_feature: MA Experiment 20000171 PARAMETER Experiment Name: At_42deg_Heat_P Parameter: Plant Line Value: WS
  misc_feature: MA Experiment 20000171 PARAMETER Experiment Name: At_42deg_Heat_P Parameter: Temperature (deg C) Value: 42 vs. 22
  misc_feature: MA Experiment 20000171 PARAMETER Experiment Name: At_42deg_Heat_P Parameter: Timepoint (hr) Value: 1
  misc_feature: MA Experiment 20000171 PARAMETER Experiment Name: At_42deg_Heat_P Parameter: Tissue Value: Aerial
  misc_feature: MA Experiment ID: 20000173 Result: Down-regulated in Transcription
  misc_feature: MA Experiment 20000173 PARAMETER Experiment Name: At_42deg_Heat_P Parameter: Age (day) Value: 14
  misc_feature: MA Experiment 20000173 PARAMETER Experiment Name: At_42deg_Heat_P Parameter: Organism Value: A. thaliana
  misc_feature: MA Experiment 20000173 PARAMETER Experiment Name: At_42deg_Heat_P Parameter: Plant Line Value: WS
  misc_feature: MA Experiment 20000173 PARAMETER Experiment Name: At_42deg_Heat_P Parameter: Temperature (deg C) Value: 42 vs. 22
  misc_feature: MA Experiment 20000173 PARAMETER Experiment Name: At_42deg_Heat_P Parameter: Timepoint (hr) Value: 6
  misc_feature: MA Experiment 20000173 PARAMETER Experiment Name: At_42deg_Heat_P Parameter: Tissue Value: Aerial
  misc_feature: MA Experiment ID: 20000234 Result: Up-regulated in Transcription
  misc_feature: MA Experiment 20000234 PARAMETER Experiment Name: At_Siliques_P Parameter: Age (day) Value: 21
  misc_feature: MA Experiment 20000234 PARAMETER Experiment Name: At_Siliques_P Parameter: Organism Value: A. thaliana
  misc_feature: MA Experiment 20000234 PARAMETER Experiment Name: At_Siliques_P Parameter: Plant Line Value: WS
  misc_feature: MA Experiment 20000234 PARAMETER Experiment Name: At_Siliques_P Parameter: Tissue Value: Less Than 5mm Siliques vs. Whole Plant
  misc_feature: MA Experiment ID: 20000264 Result: Up-regulated in Transcription
  misc_feature: MA Experiment 20000264 PARAMETER Experiment Name: At_Open_Flower_P Parameter: Age (day) Value: 21
  misc_feature: MA Experiment 20000264 PARAMETER Experiment Name: At_Open_Flower_P Parameter: Plant Line Value: WS
  misc_feature: MA Experiment 20000264 PARAMETER Experiment Name: At_Open_Flower_P Parameter: Tissue Value: Open Flower vs. Whole Plant
  misc_feature: MA Experiment ID: 20000265 Result: Up-regulated in Transcription
  misc_feature: MA Experiment 20000265 PARAMETER Experiment Name: At_Open_Flower_P Parameter: Age (day) Value: 21
  misc_feature: MA Experiment 20000265 PARAMETER Experiment Name: At_Open_Flower_P Parameter: Plant Line Value: WS
  misc_feature: MA Experiment 20000265 PARAMETER Experiment Name: At_Open_Flower_P Parameter: Tissue Value: Closed Flower vs. Whole Plant
  misc_feature: MA Experiment ID: 20000436 Result: Down-regulated in Transcription
  misc_feature: MA Experiment 20000436 PARAMETER Experiment Name: At_Drought_P Parameter: Age (day) Value: 7
  misc_feature: MA Experiment 20000436 PARAMETER Experiment Name: At_Drought_P Parameter: Organism Value: A. thaliana
  misc_feature: MA Experiment 20000436 PARAMETER Experiment Name: At_Drought_P Parameter: Plant Line Value: WS
  misc_feature: MA Experiment 20000436 PARAMETER Experiment Name: At_Drought_P Parameter: Timepoint (hr) Value: 12
  misc_feature: MA Experiment 20000436 PARAMETER Experiment Name: At_Drought_P Parameter: Tissue Value: Whole Plant
  misc_feature: MA Experiment 20000436 PARAMETER Experiment Name: At_Drought_P Parameter: Treatment Value: Drought vs. No Drought
  misc_feature: MA Experiment ID: 20000437 Result: Down-regulated in Transcription
  misc_feature: MA Experiment 20000437 PARAMETER Experiment Name: At_Drought_P Parameter: Age (day) Value: 8
  misc_feature: MA Experiment 20000437 PARAMETER Experiment Name: At_Drought_P Parameter: Organism Value: A. thaliana
  misc_feature: MA Experiment 20000437 PARAMETER Experiment Name: At_Drought_P Parameter: Plant Line Value: WS
  misc_feature: MA Experiment 20000437 PARAMETER Experiment Name: At_Drought_P Parameter: Timepoint (hr) Value: 24
  misc_feature: MA Experiment 20000437 PARAMETER Experiment Name: At_Drought_P Parameter: Tissue Value: Whole Plant
  misc_feature: MA Experiment 20000437 PARAMETER Experiment Name: At_Drought_P Parameter: Treatment Value: Drought vs. No Drought
  misc_feature: MA Experiment ID: 20001247 Result: Down-regulated in Transcription
  misc_feature: MA Experiment 20001247 PARAMETER Experiment Name: At_Far-red-induction_P Parameter: Age (day) Value: 7
  misc_feature: MA Experiment 20001247 PARAMETER Experiment Name: At_Far-red-induction_P Parameter: Light Value: Far-red vs. White
  misc_feature: MA Experiment 20001247 PARAMETER Experiment Name: At_Far-red-induction_P Parameter: Organism Value: A. thaliana
  misc_feature: MA Experiment 20001247 PARAMETER Experiment Name: At_Far-red-induction_P Parameter: Plant Line Value: Columbia
  misc_feature: MA Experiment 20001247 PARAMETER Experiment Name: At_Far-red-induction_P Parameter: Timepoint (hr) Value: 1
  misc_feature: MA Experiment 20001247 PARAMETER Experiment Name: At_Far-red-induction_P Parameter: Tissue Value: Whole Plant
  misc_feature: MA Experiment ID: 20001451 Result: Down-regulated in Transcription
  misc_feature: MA Experiment 20001451 PARAMETER Experiment Name: At_Far-red-induction_P Parameter: Age (day) Value: 7
  misc_feature: MA Experiment 20001451 PARAMETER Experiment Name: At_Far-red-induction_P Parameter: Light Value: Far-red vs. White
  misc_feature: MA Experiment 20001451 PARAMETER Experiment Name: At_Far-red-induction_P Parameter: Organism Value: A. thaliana
  misc_feature: MA Experiment 20001451 PARAMETER Experiment Name: At_Far-red-induction_P Parameter: Plant Line Value: Columbia
  misc_feature: MA Experiment 20001451 PARAMETER Experiment Name: At_Far-red-induction_P Parameter: Timepoint (hr) Value: 24
  misc_feature: MA Experiment 20001451 PARAMETER Experiment Name: At_Far-red-induction_P Parameter: Tissue Value: Whole Plant
gagaaccctaaaaagaagaagataagaaatcggaaatgggcatcaaggaccttctcagattcatgaaaccttatatccttcccattcacatccagaaatacgccgggaaacgagtgggaatcgatgcttattcatggctacacaaaggagcatactcatgtagtatggagttgtgtttagacactgatgggaagaagaagctgaggtacattgattactttatgcatagagtcaaccttcttcaacactatgagatcattcctgtcgttgttctcgatggtggtaatatgccctgcaaggctgccactggtgatgaacgtcataggaagcgaaaggctaactttgacgctgcaatggtgaagctgaaggaagggaatgtcgcagcagctactgagctttttcagagagcagttagtgtaacatcatccatggctcatcaattgattcaggttctgaaatcagaaaacgtcgaatttattgtagctccctatgaggctgatgctcagctagcatacctatccagcctcgaactggaacaaggcgggattgctgctgttataaccgaagacagcgatttacttgcatatggctgcaaagctgttatctttaagatggaccgctatggtaaaggagaggaactagttctagataatgtttttcaagctgttgatcaaaagccttccttccagaattttgatcaagagctattcactacaatgtgcgtattggcgggctgtgattttctcccctcggttcctggtgttggtatttcaagagctcatgcattcatctccaagtaccagagtgtagaactcgttttgtcatttctcaagacaaaaaaaggcaaactagttcctgatgattattccagctctttcacggaagcagtttcagtttttcagcacgcacgtgtatatgactttgacgctaagaagctcaagcacttgaaacccctctcccacaacctcctgaatttaccagttgaacaacttgagttcctgggaccagatctgtcgccatctgttgctgttgcaattgctgaaggtaatgttgatcccataaccatgaaagcttttaaccacttctcggtttctaggaaaccgttgaagacgcctgttcgatcattcaaggaacaggaaaagggaagctcctttttggtatgttctttgtctaaaagtgaggaaataatagagctcaaaaggactgcagatgaagctatgattgatccagaagctattgtgaagaagaagatgtactctaaacaagattcagatctatacaaactgcttgcgcagcctaacagggatcaagtggttacccgacccagcaatccctcacttattccggacaacaacccgttcaagattagaaaaaccgatgaaatcaatctggaaatcgcagaatacggtgtgcaagaactcgctgattcgtttgtgaccaaaagcaaagcagtggacgtggcttcttcttcaccaaactctcacgaacacgaggatcaaaaagagtgtgttacaatcgatctgtccaaacttgatgccgctgaatcaaacaggacagtgagaagaacagagtgaaagaaacatttgaaacaacagaagtagatctagctgaagttcaagatcatgtgaacatgacgacaaagagagtgcgtggaacaaaacctagaaccgagaatttcaaagtgaaaacaagctgtaaaagttcagagaacaacaagactataatcaagaagaaacacagtatattagatttcttccagcgattgtaatctctttaattttggtatgtaatcttttcttagcttctttataactcttaatttatgattatttggagaatatagagacgaacaccatatattattacaaacaactccatatc

SEQ ID NO: 45916 - protein, 512 aa, Arabidopsis thaliana
  peptide (1)..(512): Ceres Seq. ID no. 15168974
  misc_feature (1)..(102): Pfam Name: XPG N-terminal domain Pfam Description: XPG N-terminal domain
  misc_feature (1)..(345): Homolog of NCBI NO: 40744430 NR Description: hypothetical protein AN3035.2 [Aspergillus
  misc_feature (1)..(351): Homolog of NCBI NO: 4884906 NR Description: exonuclease ExoI [Xenopus laevis]
  misc_feature (1)..(332): Homolog of NCBI NO: 34910036 NR Description: putative exonuclease [Oryza sativa (japonica
  misc_feature (1)..(324): Homolog of NCBI NO: 15220506 NR Description: exonuclease -related [Arabidopsis thaliana]
  misc_feature (1)..(57): Homolog of NCBI NO: 25402838 NR Description: protein T10O22.7 [imported] - Arabidopsis
  misc_feature (87)..(188): Homolog of NCBI NO: 25402838 NR Description: protein T10O22.7 [imported] - Arabidopsis
  misc_feature (219)..(502): Homolog of NCBI NO: 25402838 NR Description: protein T10O22.7 [imported] - Arabidopsis
  misc_feature (1)..(502): Homolog of NCBI NO: 9719724 NR Description: Contains similarity to exonuclease ExoI from laevis gb|AF134570 and contains XPG N-terminal PF|00752 and
  misc_feature (1)..(502): Homolog of NCBI NO: 30685678 NR Description: expressed protein [Arabidopsis thaliana]
  misc_feature (1)..(502): Homolog of NCBI NO: 18394573 NR Description: expressed protein [Arabidopsis thaliana]
MGIKDLLRFMKPYILPIHIQKYAGKRVGIDAYSWLHKGAYSCSMELCLDTDGKKKLRYIDYFMHRVNLLQHYEIIPVVVLDGGNMPCKAATGDERHRKRKANFDAAMVKLKEGNVAAATELFQRAVSVTSSMAHQLIQVLKSENVEFIVAPYEADAQLAYLSSLELEQGGIAAVITEDSDLLAYGCKAVIFKMDRYGKGEELVLDNVFQAVDQKPSFQNFDQELFTTMCVLAGCDFLPSVPGVGISRAHAFISKYQSVELVLSFLKTKKGKLVPDDYSSSFTEAVSVFQHARVYDFDAKKLKHLKPLSHNLLNLPVEQLEFLGPDLSPSVAVAIAEGNVDPITMKAFNHFSVSRKPLKTPVRSFKEQEKGSSFLVCSLSKSEEIIELKRTADEAMIDPEAIVKKKMYSKQDSDLYKLLAQPNRDQVVTRPSNPSLIPDNNPFKIRKTDEINLEIAEYGVQELADSFVTKSKAVDVASSSPNSHEHEDQKECVTIDLSKLDAAESNRTVRRTE

SEQ ID NO: 45917 - protein, 503 aa, Arabidopsis thaliana
  peptide (1)..(503): Ceres Seq. ID no. 15168975
  misc_feature (1)..(93): Pfam Name: XPG N-terminal domain Pfam Description: XPG N-terminal domain
  misc_feature (1)..(336): Homolog of NCBI NO: 40744430 NR Description: hypothetical protein AN3035.2 [Aspergillus
  misc_feature (1)..(342): Homolog of NCBI NO: 4884906 NR Description: exonuclease ExoI [Xenopus laevis]
  misc_feature (1)..(323): Homolog of NCBI NO: 34910036 NR Description: putative exonuclease [Oryza sativa (japonica
  misc_feature (1)..(315): Homolog of NCBI NO: 15220506 NR Description: exonuclease -related [Arabidopsis thaliana]
  misc_feature (1)..(48): Homolog of NCBI NO: 25402838 NR Description: protein T10O22.7 [imported] - Arabidopsis
  misc_feature (78)..(179): Homolog of NCBI NO: 25402838 NR Description: protein T10O22.7 [imported] - Arabidopsis
  misc_feature (210)..(493): Homolog of NCBI NO: 25402838 NR Description: protein T10O22.7 [imported] - Arabidopsis
  misc_feature (1)..(493): Homolog of NCBI NO: 9719724 NR Description: Contains similarity to exonuclease ExoI from laevis gb|AF134570 and contains XPG N-terminal PF|00752 and
  misc_feature (1)..(493): Homolog of NCBI NO: 30685678 NR Description: expressed protein [Arabidopsis thaliana]
  misc_feature (1)..(493): Homolog of NCBI NO: 18394573 NR Description: expressed protein [Arabidopsis thaliana]
MKPYILPIHIQKYAGKRVGIDAYSWLHKGAYSCSMELCLDTDGKKKLRYIDYFMHRVNLLQHYEIIPVVVLDGGNMPCKAATGDERHRKRKANFDAAMVKLKEGNVAAATELFQRAVSVTSSMAHQLIQVLKSENVEFIVAPYEADAQLAYLSSLELEQGGIAAVITEDSDLLAYGCKAVIFKMDRYGKGEELVLDNVFQAVDQKPSFQNFDQELFTTMCVLAGCDFLPSVPGVGISRAHAFISKYQSVELVLSFLKTKKGKLVPDDYSSSFTEAVSVFQHARVYDFDAKKLKHLKPLSHNLLNLPVEQLEFLGPDLSPSVAVAIAEGNVDPITMKAFNHFSVSRKPLKTPVRSFKEQEKGSSFLVCSLSKSEEIIELKRTADEAMIDPEAIVKKKMYSKQDSDLYKLLAQPNRDQVVTRPSNPSLIPDNNPFKIRKTDEINLEIAEYGVQELADSFVTKSKAVDVASSSPNSHEHEDQKECVTIDLSKLDAAESNRTVRRTE

SEQ ID NO: 45918 - protein, 469 aa, Arabidopsis thaliana
  peptide (1)..(469): Ceres Seq. ID no. 15168976
  misc_feature (1)..(59): Pfam Name: XPG N-terminal domain Pfam Description: XPG N-terminal domain
  misc_feature (1)..(302): Homolog of NCBI NO: 40744430 NR Description: hypothetical protein AN3035.2 [Aspergillus
  misc_feature (1)..(308): Homolog of NCBI NO: 4884906 NR Description: exonuclease ExoI [Xenopus laevis]
  misc_feature (1)..(289): Homolog of NCBI NO: 34910036 NR Description: putative exonuclease [Oryza sativa (japonica
  misc_feature (1)..(281): Homolog of NCBI NO: 15220506 NR Description: exonuclease -related [Arabidopsis thaliana]
  misc_feature (1)..(14): Homolog of NCBI NO: 25402838 NR Description: protein T10O22.7 [imported] - Arabidopsis
  misc_feature (44)..(145): Homolog of NCBI NO: 25402838 NR Description: protein T10O22.7 [imported] - Arabidopsis
  misc_feature (176)..(459): Homolog of NCBI NO: 25402838 NR Description: protein T10O22.7 [imported] - Arabidopsis
  misc_feature (1)..(459): Homolog of NCBI NO: 9719724 NR Description: Contains similarity to exonuclease ExoI from laevis gb|AF134570 and contains XPG N-terminal PF|00752 and
  misc_feature (1)..(459): Homolog of NCBI NO: 30685678 NR Description: expressed protein [Arabidopsis thaliana]
  misc_feature (1)..(459): Homolog of NCBI NO: 18394573 NR Description: expressed protein [Arabidopsis thaliana]
MELCLDTDGKKKLRYIDYFMHRVNLLQHYEIIPVVVLDGGNMPCKAATGDERHRKRKANFDAAMVKLKEGNVAAATELFQRAVSVTSSMAHQLIQVLKSENVEFIVAPYEADAQLAYLSSLELEQGGIAAVITEDSDLLAYGCKAVIFKMDRYGKGEELVLDNVFQAVDQKPSFQNFDQELFTTMCVLAGCDFLPSVPGVGISRAHAFISKYQSVELVLSFLKTKKGKLVPDDYSSSFTEAVSVFQHARVYDFDAKKLKHLKPLSHNLLNLPVEQLEFLGPDLSPSVAVAIAEGNVDPITMKAFNHFSVSRKPLKTPVRSFKEQEKGSSFLVCSLSKSEEIIELKRTADEAMIDPEAIVKKKMYSKQDSDLYKLLAQPNRDQVVTRPSNPSLIPDNNPFKIRKTDEINLEIAEYGVQELADSFVTKSKAVDVASSSPNSHEHEDQKECVTIDLSKLDAAESNRTVRRTE

SEQ ID NO: 45919 - DNA, 1869 bp, Arabidopsis thaliana
  misc_feature (1)..(1869): Ceres Seq. ID no. 13591695
  misc_feature: MA Experiment ID: 20000184 Result: Down-regulated in Transcription
  misc_feature: MA Experiment 20000184 PARAMETER Experiment Name: At_Shoots__P Parameter: Age (day) Value: 7
  misc_feature: MA Experiment 20000184 PARAMETER Experiment Name: At_Shoots__P Parameter: Tissue Value: Shoots vs. Whole Plant
  misc_feature: MA Experiment ID: 20000437 Result: Up-regulated in Transcription
  misc_feature: MA Experiment 20000437 PARAMETER Experiment Name: At_Drought_P Parameter: Age (day) Value: 8
  misc_feature: MA Experiment 20000437 PARAMETER Experiment Name: At_Drought_P Parameter: Organism Value: A. thaliana
  misc_feature: MA Experiment 20000437 PARAMETER Experiment Name: At_Drought_P Parameter: Plant Line Value: WS
  misc_feature: MA Experiment 20000437 PARAMETER Experiment Name: At_Drought_P Parameter: Timepoint (hr) Value: 24
  misc_feature: MA Experiment 20000437 PARAMETER Experiment Name: At_Drought_P Parameter: Tissue Value: Whole Plant
  misc_feature: MA Experiment 20000437 PARAMETER Experiment Name: At_Drought_P Parameter: Treatment Value: Drought vs. No Drought
  misc_feature: MA Experiment ID: 20000438 Result: Down-regulated in Transcription
  misc_feature: MA Experiment 20000438 PARAMETER Experiment Name: At_Shoots__P Parameter: Age (day) Value: 14
  misc_feature: MA Experiment 20000438 PARAMETER Experiment Name: At_Shoots__P Parameter: Tissue Value: Shoots vs. Whole Plant
  misc_feature: MA Experiment ID: 20001905 Result: Up-regulated in Transcription
  misc_feature: MA Experiment 20001905 PARAMETER Experiment Name: At_Drought_Reproduction_P Parameter: Age (day) Value: 40
  misc_feature: MA Experiment 20001905 PARAMETER Experiment Name: At_Drought_Reproduction_P Parameter: Organism Value: A. thaliana
  misc_feature: MA Experiment 20001905 PARAMETER Experiment Name: At_Drought_Reproduction_P Parameter: Plant Line Value: WS
  misc_feature: MA Experiment 20001905 PARAMETER Experiment Name: At_Drought_Reproduction_P Parameter: Timepoint (day) Value: 10
  misc_feature: MA Experiment 20001905 PARAMETER Experiment Name: At_Drought_Reproduction_P Parameter: Tissue Value: Rosettes
  misc_feature: MA Experiment 20001905 PARAMETER Experiment Name: At_Drought_Reproduction_P Parameter: Treatment Value: Drought vs. No Drought
tctttcatcgtcctcaccggaacgcgcctactctctttccacatcgtacgtttcctctctctaaattcttcaactttaaaggtgataaaaattgaatctttcccacaacccacaagaaaattcgaatcctttctctctttctatctcttagtcacgctttcgatcagcaatctcctcgaattctggttggttccgtctctgttttctgtacacaaagccctgctgctgttgatacacgtgagccgccattaatgcccctttgttttcttcttccagctgatttaggaagttggtgatcaaattacatctagtgtttgtttccgccagctgaagtgaatcaaaatgtttagttttggccgagcaagaagccaagggaggcaaaacagatctatgtctcttggaggactggattatgcagaccccaagaagaaaaacaattacttgggaaagattcttttgacagcttctcttacagccttgtgcattttcatgctcaagcaatctccaacattcaatactcctagcgtgttttctcgacatgagccaggggttacacatgttttggtcactggtggtgctgggtatattggttcacatgcagctctaaggcttctaaaggaatcatatcgagtaaccattgtggacaatctatcacggggcaatctcgctgcagtcaggattttgcaagaactatttccggaacctggaaggcttcaatttatttatgctgatcttggagatgccaaagctgtcaacaagatattcacagagaatgcctttgacgctgtgatgcatttcgctgctgttgcatatgttggggaaagcacacaattccctcttaagtattatcacaatattacatcgaacactttggtagtattagagacaatggctgctcatggagtaaagactttgatatattcaagcacttgtgcaacgtatggggagcctgatattatgccaattacagaggaaactcctcaggtgccaatcaacccatatggtaaggccaagaagatggcagaagatatcattttggatttctcgaaaaactcagatatggcagttatgatcctaagatatttcaatgtgattgggtccgatccagagggcagattgggtgaagccccaagacctgagctgcgagagcatggacgcatctccggtgcttgttttgatgcagcacgtggcatcatgcctggcctacagatcaaaggaacagactacaaaaccgctgatggaacttgcgtacgggattacattgatgtcactgatttggttgatgctcatgttaaagctcttcaaaaggcaaaaccacgcaaagttggaatctacaatgttggcaccgggaaaggtagctcggtgaaagagtttgttgaggcgtgcaagaaagcaactggtgttgagatcaagatcgactatttgcctagacgtgcaggtgattacgctgaggtttacagtgatccaagcaagattaggaaggaacttaactggacagctaagcacactaatctcaaagagagtcttgagactgcatggagatggcagaagctgcaccgtaatggctatggcttaacaacctcatcggtctcggtttactgactttgttcattcctttggtgatggacggagattttgattccagatggtattgaggagagaagcgtaggagatgatgatggtttatatataaatataacacaagatatattatccatattatgaaaaaatgatatcacatgacgagatttttgattgatattcattttgtaatggctttaggttcttttaggaagcagccattcattagtatatgtacctctcacaatatttattgattagtcttaataatatatagcattcctggct

SEQ ID NO: 45920 - protein, 419 aa, Arabidopsis thaliana
  peptide (1)..(419): Ceres Seq. ID no. 13591696
  misc_feature (73)..(406): Pfam Name: NAD dependent epimerase/dehydratase family Pfam Description: NAD dependent epimerase/dehydratase family
  misc_feature (73)..(406): Pfam Name: NAD dependent epimerase/dehydratase family Pfam Description: NAD dependent epimerase/dehydratase family
  misc_feature (245)..(408): Homolog of NCBI NO: 5852089 NR Description: zwh12.1 [Oryza sativa (indica cultivar-group)]
  misc_feature (22)..(410): Homolog of NCBI NO: 26106016 NR Description: UDP-galactose 4-epimerase-like protein
  misc_feature (16)..(410): Homolog of NCBI NO: 27529690 NR Description: UDP-galactose 4-epimerase-like protein
  misc_feature (22)..(409): Homolog of NCBI NO: 15241503 NR Description: NAD-dependent epimerase/dehydratase family
  misc_feature (22)..(410): Homolog of NCBI NO: 27260937 NR Description: OJ1417_E01.21 [Oryza sativa (japonica
  misc_feature (245)..(408): Homolog of NCBI NO: 5852089 NR Description: zwh12.1 [Oryza sativa (indica cultivar-group)]
  misc_feature (16)..(410): Homolog of NCBI NO: 27529690 NR Description: UDP-galactose 4-epimerase-like protein
  misc_feature (22)..(410): Homolog of NCBI NO: 27260937 NR Description: OJ1417_E01.21 [Oryza sativa (japonica
  misc_feature (1)..(419): Homolog of NCBI NO: 22329866 NR Description: NAD-dependent epimerase/dehydratase family
  misc_feature (1)..(419): Homolog of NCBI NO: 24417398 NR Description: unknown [Arabidopsis thaliana]
  misc_feature (34)..(419): Homolog of NCBI NO: 7437275 NR Description: probable UDPglucose 4-epimerase (EC 5.1.3.2)
  misc_feature (34)..(409): Homolog of NCBI NO: 15237098 NR Description: NAD-dependent epimerase/dehydratase family
  misc_feature (1)..(410): Homolog of NCBI NO: 25553524 NR Description: UDP-galactose 4-epimerase-like protein
  misc_feature (22)..(409): Homolog of NCBI NO: 15241503 NR Description: NAD-dependent epimerase/dehydratase family
  misc_feature (22)..(410): Homolog of NCBI NO: 26106016 NR Description: UDP-galactose 4-epimerase-like protein
  misc_feature (1)..(410): Homolog of NCBI NO: 25553524 NR Description: UDP-galactose 4-epimerase-like protein
  misc_feature (34)..(409): Homolog of NCBI NO: 15237098 NR Description: NAD-dependent epimerase/dehydratase family
  misc_feature (34)..(419): Homolog of NCBI NO: 7437275 NR Description: probable UDPglucose 4-epimerase (EC 5.1.3.2)
  misc_feature (1)..(419): Homolog of NCBI NO: 24417398 NR Description: unknown [Arabidopsis thaliana]
  misc_feature (1)..(419): Homolog of NCBI NO: 22329866 NR Description: NAD-dependent epimerase/dehydratase family
MFSFGRARSQGRQNRSMSLGGLDYADPKKKNNYLGKILLTASLTALCIFMLKQSPTFNTPSVFSRHEPGVTHVLVTGGAGYIGSHAALRLLKESYRVTIVDNLSRGNLAAVRILQELFPEPGRLQFIYADLGDAKAVNKIFTENAFDAVMHFAAVAYVGESTQFPLKYYHNITSNTLVVLETMAAHGVKTLIYSSTCATYGEPDIMPITEETPQVPINPYGKAKKMAEDIILDFSKNSDMAVMILRYFNVIGSDPEGRLGEAPRPELREHGRISGACFDAARGIMPGLQIKGTDYKTADGTCVRDYIDVTDLVDAHVKALQKAKPRKVGIYNVGTGKGSSVKEFVEACKKATGVEIKIDYLPRRAGDYAEVYSDPSKIRKELNWTAKHTNLKESLETAWRWQKLHRNGYGLTTSSVSVY

SEQ ID NO: 45921 - protein, 403 aa, Arabidopsis thaliana
  peptide (1)..(403): Ceres Seq. ID no. 13591697
  misc_feature (57)..(390): Pfam Name: NAD dependent epimerase/dehydratase family Pfam Description: NAD dependent epimerase/dehydratase family
  misc_feature (57)..(390): Pfam Name: NAD dependent epimerase/dehydratase family Pfam Description: NAD dependent epimerase/dehydratase family
  misc_feature (229)..(392): Homolog of NCBI NO: 5852089 NR Description: zwh12.1 [Oryza sativa (indica cultivar-group)]
  misc_feature (6)..(394): Homolog of NCBI NO: 26106016 NR Description: UDP-galactose 4-epimerase-like protein
  misc_feature (1)..(394): Homolog of NCBI NO: 27529690 NR Description: UDP-galactose 4-epimerase-like protein
  misc_feature (6)..(393): Homolog of NCBI NO: 15241503 NR Description: NAD-dependent epimerase/dehydratase family
  misc_feature (6)..(394): Homolog of NCBI NO: 27260937 NR Description: OJ1417_E01.21 [Oryza sativa (japonica
  misc_feature (229)..(392): Homolog of NCBI NO: 5852089 NR Description: zwh12.1 [Oryza sativa (indica cultivar-group)]
  misc_feature (1)..(394): Homolog of NCBI NO: 27529690 NR Description: UDP-galactose 4-epimerase-like protein
  misc_feature (6)..(394): Homolog of NCBI NO: 27260937 NR Description: OJ1417_E01.21 [Oryza sativa (japonica
  misc_feature (1)..(403): Homolog of NCBI NO: 22329866 NR Description: NAD-dependent epimerase/dehydratase family
  misc_feature (1)..(403): Homolog of NCBI NO: 24417398 NR Description: unknown [Arabidopsis thaliana]
  misc_feature (18)..(403): Homolog of NCBI NO: 7437275 NR Description: probable UDPglucose 4-epimerase (EC 5.1.3.2)
  misc_feature (18)..(393): Homolog of NCBI NO: 15237098 NR Description: NAD-dependent epimerase/dehydratase family
  misc_feature (1)..(394): Homolog of NCBI NO: 25553524 NR Description: UDP-galactose 4-epimerase-like protein
  misc_feature (6)..(393): Homolog of NCBI NO: 15241503 NR Description: NAD-dependent epimerase/dehydratase family
  misc_feature (6)..(394): Homolog of NCBI NO: 26106016 NR Description: UDP-galactose 4-epimerase-like protein
  misc_feature (1)..(394): Homolog of NCBI NO: 25553524 NR Description: UDP-galactose 4-epimerase-like protein
  misc_feature (18)..(393): Homolog of NCBI NO: 15237098 NR Description: NAD-dependent epimerase/dehydratase family
  misc_feature (18)..(403): Homolog of NCBI NO: 7437275 NR Description: probable UDPglucose 4-epimerase (EC 5.1.3.2)
  misc_feature (1)..(403): Homolog of NCBI NO: 24417398 NR Description: unknown [Arabidopsis thaliana]
  misc_feature (1)..(403): Homolog of NCBI NO: 22329866 NR Description: NAD-dependent epimerase/dehydratase family
MSLGGLDYADPKKKNNYLGKILLTASLTALCIFMLKQSPTFNTPSVFSRHEPGVTHVLVTGGAGYIGSHAALRLLKESYRVTIVDNLSRGNLAAVRILQELFPEPGRLQFIYADLGDAKAVNKIFTENAFDAVMHFAAVAYVGESTQFPLKYYHNITSNTLVVLETMAAHGVKTLIYSSTCATYGEPDIMPITEETPQVPINPYGKAKKMAEDIILDFSKNSDMAVMILRYFNVIGSDPEGRLGEAPRPELREHGRISGACFDAARGIMPGLQIKGTDYKTADGTCVRDYIDVTDLVDAHVKALQKAKPRKVGIYNVGTGKGSSVKEFVEACKKATGVEIKIDYLPRRAGDYAEVYSDPSKIRKELNWTAKHTNLKESLETAWRWQKLHRNGYGLTTSSVSVY

SEQ ID NO: 45922 - protein, 370 aa, Arabidopsis thaliana
  peptide (1)..(370): Ceres Seq. ID no. 13591698
  misc_feature (24)..(357): Pfam Name: NAD dependent epimerase/dehydratase family Pfam Description: NAD dependent epimerase/dehydratase family
  misc_feature (24)..(357): Pfam Name: NAD dependent epimerase/dehydratase family Pfam Description: NAD dependent epimerase/dehydratase family
  misc_feature (196)..(359): Homolog of NCBI NO: 5852089 NR Description: zwh12.1 [Oryza sativa (indica cultivar-group)]
  misc_feature (1)..(361): Homolog of NCBI NO: 26106016 NR Description: UDP-galactose 4-epimerase-like protein
  misc_feature (1)..(361): Homolog of NCBI NO: 27529690 NR Description: UDP-galactose 4-epimerase-like protein
  misc_feature (1)..(360): Homolog of NCBI NO: 15241503 NR Description: NAD-dependent epimerase/dehydratase family
  misc_feature (1)..(361): Homolog of NCBI NO: 27260937 NR Description: OJ1417_E01.21 [Oryza sativa (japonica
  misc_feature (196)..(359): Homolog of NCBI NO: 5852089 NR Description: zwh12.1 [Oryza sativa (indica cultivar-group)]
  misc_feature (1)..(361): Homolog of NCBI NO: 27529690 NR Description: UDP-galactose 4-epimerase-like protein
  misc_feature (1)..(361): Homolog of NCBI NO: 27260937 NR Description: OJ1417_E01.21 [Oryza sativa (japonica
  misc_feature (1)..(370): Homolog of NCBI NO: 22329866 NR Description: NAD-dependent epimerase/dehydratase family
  misc_feature (1)..(370): Homolog of NCBI NO: 24417398 NR Description: unknown [Arabidopsis thaliana]
  misc_feature (1)..(370): Homolog of NCBI NO: 7437275 NR Description: probable UDPglucose 4-epimerase (EC 5.1.3.2)
  misc_feature (1)..(360): Homolog of NCBI NO: 15237098 NR Description: NAD-dependent epimerase/dehydratase family
  misc_feature (1)..(361): Homolog of NCBI NO: 25553524 NR Description: UDP-galactose 4-epimerase-like protein
  misc_feature (1)..(360): Homolog of NCBI NO: 15241503 NR Description: NAD-dependent epimerase/dehydratase family
  misc_feature (1)..(361): Homolog of NCBI NO: 26106016 NR Description: UDP-galactose 4-epimerase-like protein
  misc_feature (1)..(361): Homolog of NCBI NO: 25553524 NR Description: UDP-galactose 4-epimerase-like protein
  misc_feature (1)..(360): Homolog of NCBI NO: 15237098 NR Description: NAD-dependent epimerase/dehydratase family
  misc_feature (1)..(370): Homolog of NCBI NO: 7437275 NR Description: probable UDPglucose 4-epimerase (EC 5.1.3.2)
  misc_feature (1)..(370): Homolog of NCBI NO: 24417398 NR Description: unknown [Arabidopsis thaliana]
  misc_feature (1)..(370): Homolog of NCBI NO: 22329866 NR Description: NAD-dependent epimerase/dehydratase family
MLKQSPTFNTPSVFSRHEPGVTHVLVTGGAGYIGSHAALRLLKESYRVTIVDNLSRGNLAAVRILQELFPEPGRLQFIYADLGDAKAVNKIFTENAFDAVMHFAAVAYVGESTQFPLKYYHNITSNTLVVLETMAAHGVKTLIYSSTCATYGEPDIMPITEETPQVPINPYGKAKKMAEDIILDFSKNSDMAVMILRYFNVIGSDPEGRLGEAPRPELREHGRISGACFDAARGIMPGLQIKGTDYKTADGTCVRDYIDVTDLVDAHVKALQKAKPRKVGIYNVGTGKGSSVKEFVEACKKATGVEIKIDYLPRRAGDYAEVYSDPSKIRKELNWTAKHTNLKESLETAWRWQKLHRNGYGLTTSSVSVY

SEQ ID NO: 45923 - DNA, 1211 bp, Arabidopsis thaliana
  misc_feature (1)..(1211): Ceres Seq. ID no. 13646549
  misc_feature: MA Experiment ID: 20000180 Result: Up-regulated in Transcription
  misc_feature: MA Experiment 20000180 PARAMETER Experiment Name: At_Germinating_Seeds_P Parameter: Age (hr) Value: 24 vs. 0
  misc_feature: MA Experiment 20000180 PARAMETER Experiment Name: At_Germinating_Seeds_P Parameter: Tissue Value: Germinating Seeds
  misc_feature: MA Experiment ID: 20000185 Result: Up-regulated in Transcription
  misc_feature: MA Experiment 20000185 PARAMETER Experiment Name: At_Roots__P Parameter: Age (day) Value: 7 vs. 21
  misc_feature: MA Experiment 20000185 PARAMETER Experiment Name: At_Roots__P Parameter: Organism Value: A. thaliana
  misc_feature: MA Experiment 20000185 PARAMETER Experiment Name: At_Roots__P Parameter: Tissue Value: Roots vs. Whole Plant
  misc_feature: MA Experiment ID: 20000234 Result: Up-regulated in Transcription
  misc_feature: MA Experiment 20000234 PARAMETER Experiment Name: At_Siliques_P Parameter: Age (day) Value: 21
  misc_feature: MA Experiment 20000234 PARAMETER Experiment Name: At_Siliques_P Parameter: Organism Value: A. thaliana
  misc_feature: MA Experiment 20000234 PARAMETER Experiment Name: At_Siliques_P Parameter: Plant Line Value: WS
  misc_feature: MA Experiment 20000234 PARAMETER Experiment Name: At_Siliques_P Parameter: Tissue Value: Less Than 5mm Siliques vs. Whole Plant
  misc_feature: MA Experiment ID: 20000235 Result: Up-regulated in Transcription
  misc_feature: MA Experiment 20000235 PARAMETER Experiment Name: At_Siliques_P Parameter: Age (day) Value: 21
  misc_feature: MA Experiment 20000235 PARAMETER Experiment Name: At_Siliques_P Parameter: Organism Value: A. thaliana
  misc_feature: MA Experiment 20000235 PARAMETER Experiment Name: At_Siliques_P Parameter: Plant Line Value: WS
  misc_feature: MA Experiment 20000235 PARAMETER Experiment Name: At_Siliques_P Parameter: Tissue Value: 5-10mm Siliques vs. Whole Plant
  misc_feature: MA Experiment ID: 20000437 Result: Up-regulated in Transcription
  misc_feature: MA Experiment 20000437 PARAMETER Experiment Name: At_Drought_P Parameter: Age (day) Value: 8
  misc_feature: MA Experiment 20000437 PARAMETER Experiment Name: At_Drought_P Parameter: Organism Value: A. thaliana
  misc_feature: MA Experiment 20000437 PARAMETER Experiment Name: At_Drought_P Parameter: Plant Line Value: WS
  misc_feature: MA Experiment 20000437 PARAMETER Experiment Name: At_Drought_P Parameter: Timepoint (hr) Value: 24
  misc_feature: MA Experiment 20000437 PARAMETER Experiment Name: At_Drought_P Parameter: Tissue Value: Whole Plant
  misc_feature: MA Experiment 20000437 PARAMETER Experiment Name: At_Drought_P Parameter: Treatment Value: Drought vs. No Drought
  misc_feature: MA Experiment ID: 20000439 Result: Up-regulated in Transcription
  misc_feature: MA Experiment 20000439 PARAMETER Experiment Name: At_Roots__P Parameter: Age (day) Value: 14 vs. 21
  misc_feature: MA Experiment 20000439 PARAMETER Experiment Name: At_Roots__P Parameter: Organism Value: A. thaliana
  misc_feature: MA Experiment 20000439 PARAMETER Experiment Name: At_Roots__P Parameter: Tissue Value: Roots vs. Whole Plant
  misc_feature: MA Experiment ID: 20000573 Result: Up-regulated in Transcription
  misc_feature: MA Experiment 20000573 PARAMETER Experiment Name: At_100uM_ABA_Mutants__P Parameter: Organism Value: A. thaliana
  misc_feature: MA Experiment 20000573 PARAMETER Experiment Name: At_100uM_ABA_Mutants__P Parameter: Plant Line Value: CS22 vs. Ler wt
  misc_feature: MA Experiment 20000573 PARAMETER Experiment Name: At_100uM_ABA_Mutants__P Parameter: Timepoint (hr) Value: N/A
  misc_feature: MA Experiment 20000573 PARAMETER Experiment Name: At_100uM_ABA_Mutants__P Parameter: Tissue Value: Whole Plant
  misc_feature: MA Experiment 20000573 PARAMETER Experiment Name: At_100uM_ABA_Mutants__P Parameter: Treatment Value: None
  misc_feature: MA Experiment ID: 20001248 Result: Up-regulated in Transcription
  misc_feature: MA Experiment 20001248 PARAMETER Experiment Name: At_Far-red-induction_P Parameter: Age (day) Value: 7
  misc_feature: MA Experiment 20001248 PARAMETER Experiment Name: At_Far-red-induction_P Parameter: Light Value: Far-red vs. White
  misc_feature: MA Experiment 20001248 PARAMETER Experiment Name: At_Far-red-induction_P Parameter: Organism Value: A. thaliana
  misc_feature: MA Experiment 20001248 PARAMETER Experiment Name: At_Far-red-induction_P Parameter: Plant Line Value: Columbia
  misc_feature: MA Experiment 20001248 PARAMETER Experiment Name: At_Far-red-induction_P Parameter: Timepoint (hr) Value: 4
  misc_feature: MA Experiment 20001248 PARAMETER Experiment Name: At_Far-red-induction_P Parameter: Tissue Value: Whole Plant
  misc_feature: MA Experiment ID: 20001450 Result: Up-regulated in Transcription
  misc_feature: MA Experiment 20001450 PARAMETER Experiment Name: At_Far-red-induction_P Parameter: Age (day) Value: 7
  misc_feature: MA Experiment 20001450 PARAMETER Experiment Name: At_Far-red-induction_P Parameter: Light Value: Far-red vs. White
  misc_feature: MA Experiment 20001450 PARAMETER Experiment Name: At_Far-red-induction_P Parameter: Organism Value: A. thaliana
  misc_feature: MA Experiment 20001450 PARAMETER Experiment Name: At_Far-red-induction_P Parameter: Plant Line Value: Columbia
  misc_feature: MA Experiment 20001450 PARAMETER Experiment Name: At_Far-red-induction_P Parameter: Timepoint (hr) Value: 8
  misc_feature: MA Experiment 20001450 PARAMETER Experiment Name: At_Far-red-induction_P Parameter: Tissue Value: Whole Plant
gatattatggaaaatttatcattttttggaacgtaatcctttgtaactaaatgcacctatagatacacatcaaacacttcatttgttttaagtaatttaatagactttttaaaggataaaatcgaaagagatctcaagagaaatagggagagatgagcatcagtgagtcatatccaccggctttccggcgtgtaaccaacgacgaaaatcctccagcaacaccggttattgtccagggcaaggatatcaatatcccggttatcgatttggaacgtttggacaaggagatactgagagaggcatgcaaggagtggggaatattccgtctagagaatcacggagtaccgttggcgttaacgtcacggcttcaagaaatctcggagtcattactgagtcttccgtttgagaaaaaacgggaattgttcgctgccgttaaatctccgttatcgtatttttggggaacaccagctctaaatcgttcaggagatgcactaaagagaggagctcaagcttcgaacttaaccatgctcgaaggtttcaacgttcctctctcgtctctctcgtcgctctcgaagcttccaacttctacttgttgtgatgatgatgctcaagaagagcctaaacttgagtctttcagagtgttgatggaggaatatggaaagcacataactagaattgctgtgtcattgttcgaagctatagcacaaacactgaacctagaactatccggtaaccggagatcagaatacttatcggaatcgacagggctaataagggtttaccggtatccacaaagctccgaggaagcagccagagaagctctaggaatggaagttcacacagacagttcggttatctcaatattaagagaagatgaaagtggtgggcttgagatcatgaaaggtgaagaatggttctgtgtaaagcctgttgctaatactcttatcgtcaatcttggagatatgatgcaggccataagcgatgatgagtacaagagtgtgacacatagagtgaagaagaggaataggaagacagagagacactcagtgtgttattttgtgtttccaaagagagattgcgtgataaagtcatcaaactataagctattcacttactcagattttgaagctcaagttcaagctgatgttcagtctcttggaaccaagattggccttcctagattcaacccaaattctccattgtttctctga

SEQ ID NO: 45924 - protein, 352 aa, Arabidopsis thaliana
  peptide (1)..(352): Ceres Seq. ID no. 13646550
  misc_feature (203)..(305): Pfam Name: 2OG-Fe(II) oxygenase superfamily Pfam Description: 2OG-Fe(II) oxygenase superfamily
  misc_feature (27)..(93): Homolog of NCBI NO: 15235126 NR Description: oxidoreductase, 2OG-Fe(II) oxygenase family
  misc_feature (149)..(311): Homolog of NCBI NO: 15235126 NR Description: oxidoreductase, 2OG-Fe(II) oxygenase family
  misc_feature (34)..(312): Homolog of NCBI NO: 21593702 NR Description: unknown [Arabidopsis thaliana]
  misc_feature (34)..(312): Homolog of NCBI NO: 18402081 NR Description: flavonol synthase family [Arabidopsis thaliana]
  misc_feature (20)..(348): Homolog of NCBI NO: 32492254 NR Description: OSJNBa0019D11.23 [Oryza sativa (japonica
  misc_feature (31)..(105): Homolog of NCBI NO: 34915474 NR Description: gibberellin 20-oxidase-like protein
  misc_feature (162)..(344): Homolog of NCBI NO: 34915474 NR Description: gibberellin 20-oxidase-like protein
  misc_feature (74)..(344): Homolog of NCBI NO: 38347595 NR Description: OSJNBa0042I15.8 [Oryza sativa (japonica
  misc_feature (1)..(346): Homolog of NCBI NO: 15232747 NR Description: 1-aminocyclopropane-1-carboxylic acid oxidase
  misc_feature (1)..(352): Homolog of NCBI NO: 15237726 NR Description: oxidoreductase, 2OG-Fe(II) oxygenase family
MSISESYPPAFRRVTNDENPPATPVIVQGKDINIPVIDLERLDKEILREACKEWGIFRLENHGVPLALTSRLQEISESLLSLPFEKKRELFAAVKSPLSYFWGTPALNRSGDALKRGAQASNLTMLEGFNVPLSSLSSLSKLPTSTCCDDDAQEEPKLESFRVLMEEYGKHITRIAVSLFEAIAQTLNLELSGNRRSEYLSESTGLIRVYRYPQSSEEAAREALGMEVHTDSSVISILREDESGGLEIMKGEEWFCVKPVANTLIVNLGDMMQAISDDEYKSVTHRVKKRNRKTERHSVCYFVFPKRDCVIKSSNYKLFTYSDFEAQVQADVQSLGTKIGLPRFNPNSPLFL

SEQ ID NO: 45925 - protein, 228 aa, Arabidopsis thaliana
  peptide (1)..(228): Ceres Seq. ID no. 13646551
  misc_feature (79)..(181): Pfam Name: 2OG-Fe(II) oxygenase superfamily Pfam Description: 2OG-Fe(II) oxygenase superfamily
  misc_feature (27)..(220): Homolog of NCBI NO: 15233553 NR Description: gibberellin 20-oxidase family [Arabidopsis
  misc_feature (1)..(188): Homolog of NCBI NO: 18402079 NR Description: oxidoreductase, 2OG-Fe(II) oxygenase family
  misc_feature (25)..(187): Homolog of NCBI NO: 15235126 NR Description: oxidoreductase, 2OG-Fe(II) oxygenase family
  misc_feature (1)..(188): Homolog of NCBI NO: 21593702 NR Description: unknown [Arabidopsis thaliana]
  misc_feature (1)..(188): Homolog of NCBI NO: 18402081 NR Description: flavonol synthase family [Arabidopsis thaliana]
  misc_feature (1)..(224): Homolog of NCBI NO: 32492254 NR Description: OSJNBa0019D11.23 [Oryza sativa (japonica
  misc_feature (38)..(220): Homolog of NCBI NO: 34915474 NR Description: gibberellin 20-oxidase-like protein
  misc_feature (1)..(220): Homolog of NCBI NO: 38347595 NR Description: OSJNBa0042I15.8 [Oryza sativa (japonica
  misc_feature (1)..(222): Homolog of NCBI NO: 15232747 NR Description: 1-aminocyclopropane-1-carboxylic acid oxidase
  misc_feature (1)..(228): Homolog of NCBI NO: 15237726 NR Description: oxidoreductase, 2OG-Fe(II) oxygenase family
MLEGFNVPLSSLSSLSKLPTSTCCDDDAQEEPKLESFRVLMEEYGKHITRIAVSLFEAIAQTLNLELSGNRRSEYLSESTGLIRVYRYPQSSEEAAREALGMEVHTDSSVISILREDESGGLEIMKGEEWFCVKPVANTLIVNLGDMMQAISDDEYKSVTHRVKKRNRKTERHSVCYFVFPKRDCVIKSSNYKLFTYSDFEAQVQADVQSLGTKIGLPRFNPNSPLFL

SEQ ID NO: 45926 - protein, 188 aa, Arabidopsis thaliana
  peptide (1)..(188): Ceres Seq. ID no. 13646552
  misc_feature (39)..(141): Pfam Name: 2OG-Fe(II) oxygenase superfamily Pfam Description: 2OG-Fe(II) oxygenase superfamily
  misc_feature (1)..(180): Homolog of NCBI NO: 15233553 NR Description: gibberellin 20-oxidase family [Arabidopsis
  misc_feature (1)..(148): Homolog of NCBI NO: 18402079 NR Description: oxidoreductase, 2OG-Fe(II) oxygenase family
  misc_feature (1)..(147): Homolog of NCBI NO: 15235126 NR Description: oxidoreductase, 2OG-Fe(II) oxygenase family
  misc_feature (1)..(148): Homolog of NCBI NO: 21593702 NR Description: unknown [Arabidopsis thaliana]
  misc_feature (1)..(148): Homolog of NCBI NO: 18402081 NR Description: flavonol synthase family [Arabidopsis thaliana]
  misc_feature (1)..(184): Homolog of NCBI NO: 32492254 NR Description: OSJNBa0019D11.23 [Oryza sativa (japonica
  misc_feature (1)..(180): Homolog of NCBI NO: 34915474 NR Description: gibberellin 20-oxidase-like protein
  misc_feature (1)..(180): Homolog of NCBI NO: 38347595 NR Description: OSJNBa0042I15.8 [Oryza sativa (japonica
  misc_feature (1)..(182): Homolog of NCBI NO: 15232747 NR Description: 1-aminocyclopropane-1-carboxylic acid oxidase
  misc_feature (1)..(188): Homolog of NCBI NO: 15237726 NR Description: oxidoreductase, 2OG-Fe(II) oxygenase family
MEEYGKHITRIAVSLFEAIAQTLNLELSGNRRSEYLSESTGLIRVYRYPQSSEEAAREALGMEVHTDSSVISILREDESGGLEIMKGEEWFCVKPVANTLIVNLGDMMQAISDDEYKSVTHRVKKRNRKTERHSVCYFVFPKRDCVIKSSNYKLFTYSDFEAQVQADVQSLGTKIGLPRFNPNSPLFL

SEQ ID NO: 45927 - DNA, 1480 bp, Arabidopsis thaliana
  misc_feature (1)..(1480): Ceres Seq. ID no. 13591502
  misc_feature: MA Experiment ID: 20000180 Result: Up-regulated in Transcription
  misc_feature: MA Experiment 20000180 PARAMETER Experiment Name: At_Germinating_Seeds_P Parameter: Age (hr) Value: 24 vs. 0
  misc_feature: MA Experiment 20000180 PARAMETER Experiment Name: At_Germinating_Seeds_P Parameter: Tissue Value: Germinating Seeds
  misc_feature: MA Experiment ID: 20000185 Result: Down-regulated in Transcription
  misc_feature: MA Experiment 20000185 PARAMETER Experiment Name: At_Roots__P Parameter: Age (day) Value: 7 vs. 21
  misc_feature: MA Experiment 20000185 PARAMETER Experiment Name: At_Roots__P Parameter: Organism Value: A. thaliana
  misc_feature: MA Experiment 20000185 PARAMETER Experiment Name: At_Roots__P Parameter: Tissue Value: Roots vs. Whole Plant
  misc_feature: MA Experiment ID: 20000227 Result: Down-regulated in Transcription
  misc_feature: MA Experiment 20000227 PARAMETER Experiment Name: At_Root-Tips-vs-Tops_P Parameter: Tissue Value: Root Tips vs. Root Tops
  misc_feature: MA Experiment ID: 20000437 Result: Down-regulated in Transcription
  misc_feature: MA Experiment 20000437 PARAMETER Experiment Name: At_Drought_P Parameter: Age (day) Value: 8
  misc_feature: MA Experiment 20000437 PARAMETER Experiment Name: At_Drought_P Parameter: Organism Value: A. thaliana
  misc_feature: MA Experiment 20000437 PARAMETER Experiment Name: At_Drought_P Parameter: Plant Line Value: WS
  misc_feature: MA Experiment 20000437 PARAMETER Experiment Name: At_Drought_P Parameter: Timepoint (hr) Value: 24
  misc_feature: MA Experiment 20000437 PARAMETER Experiment Name: At_Drought_P Parameter: Tissue Value: Whole Plant
  misc_feature: MA Experiment 20000437 PARAMETER Experiment Name: At_Drought_P Parameter: Treatment Value: Drought vs. No Drought
  misc_feature: MA Experiment ID: 20000439 Result: Down-regulated in Transcription
  misc_feature: MA Experiment 20000439 PARAMETER Experiment Name: At_Roots__P Parameter: Age (day) Value: 14 vs. 21
  misc_feature: MA Experiment 20000439 PARAMETER Experiment Name: At_Roots__P Parameter: Organism Value: A. thaliana
  misc_feature: MA Experiment 20000439 PARAMETER Experiment Name: At_Roots__P Parameter: Tissue Value: Roots vs. Whole Plant
  misc_feature: MA Experiment ID: 20000794 Result: Down-regulated in Transcription
  misc_feature: MA Experiment 20000794 PARAMETER Experiment Name: At_Petals_P Parameter: Age (day) Value: 23-25 days
  misc_feature: MA Experiment 20000794 PARAMETER Experiment Name: At_Petals_P Parameter: Plant Line Value: WS
  misc_feature: MA Experiment 20000794 PARAMETER Experiment Name: At_Petals_P Parameter: Tissue Value: Petals vs. Whole plant
  misc_feature: MA Experiment ID: 20001451 Result: Down-regulated in Transcription
  misc_feature: MA Experiment 20001451 PARAMETER Experiment Name: At_Far-red-induction_P Parameter: Age (day) Value: 7
  misc_feature: MA Experiment 20001451 PARAMETER Experiment Name: At_Far-red-induction_P Parameter: Light Value: Far-red vs. White
  misc_feature: MA Experiment 20001451 PARAMETER Experiment Name: At_Far-red-induction_P Parameter: Organism Value: A. thaliana
  misc_feature: MA Experiment 20001451 PARAMETER Experiment Name: At_Far-red-induction_P Parameter: Plant Line Value: Columbia
  misc_feature: MA Experiment 20001451 PARAMETER Experiment Name: At_Far-red-induction_P Parameter: Timepoint (hr) Value: 24
  misc_feature: MA Experiment 20001451 PARAMETER Experiment Name: At_Far-red-induction_P Parameter: Tissue Value: Whole Plant
  misc_feature: MA Experiment ID: 20001557 Result: Down-regulated in Transcription
  misc_feature: MA Experiment 20001557 PARAMETER Experiment Name: At_Drought_Soil_Dry_P Parameter: Age (day) Value: 27
  misc_feature: MA Experiment 20001557 PARAMETER Experiment Name: At_Drought_Soil_Dry_P Parameter: Organism Value: A. thaliana
  misc_feature: MA Experiment 20001557 PARAMETER Experiment Name: At_Drought_Soil_Dry_P Parameter: Plant Line Value: WS
  misc_feature: MA Experiment 20001557 PARAMETER Experiment Name: At_Drought_Soil_Dry_P Parameter: Post Timepoint (hr) Value: 3
  misc_feature: MA Experiment 20001557 PARAMETER Experiment Name: At_Drought_Soil_Dry_P Parameter: Post-Treatment Value: Re-Water vs. No Drought
  misc_feature: MA Experiment 20001557 PARAMETER Experiment Name: At_Drought_Soil_Dry_P Parameter: Timepoint (day) Value: 13
  misc_feature: MA Experiment 20001557 PARAMETER Experiment Name: At_Drought_Soil_Dry_P Parameter: Treatment Value: Drought vs. No Drought
  misc_feature: MA Experiment ID: 20001757 Result: Up-regulated in Transcription
  misc_feature: MA Experiment 20001757 PARAMETER Experiment Name: At_50mM_NH4NO3_L-to-H_P Parameter: Timepoint (hr) Value: 6
  misc_feature: MA Experiment 20001757 PARAMETER Experiment Name: At_50mM_NH4NO3_L-to-H_P Parameter: Tissue Value: Leaf
  misc_feature: MA Experiment 20001757 PARAMETER Experiment Name: At_50mM_NH4NO3_L-to-H_P Parameter: Treatment Value: 50mM NH4NO3 vs 100mM Mannitol
  misc_feature: MA Experiment ID: 20001904 Result: Down-regulated in Transcription
  misc_feature: MA Experiment 20001904 PARAMETER Experiment Name: At_Drought_Reproduction_P Parameter: Age (day) Value: 37
  misc_feature: MA Experiment 20001904 PARAMETER Experiment Name: At_Drought_Reproduction_P Parameter: Organism Value: A. thaliana
  misc_feature: MA Experiment 20001904 PARAMETER Experiment Name: At_Drought_Reproduction_P Parameter: Plant Line Value: WS
  misc_feature: MA Experiment 20001904 PARAMETER Experiment Name: At_Drought_Reproduction_P Parameter: Timepoint (day) Value: 7
  misc_feature: MA Experiment 20001904 PARAMETER Experiment Name: At_Drought_Reproduction_P Parameter: Tissue Value: Rosettes
  misc_feature: MA Experiment 20001904 PARAMETER Experiment Name: At_Drought_Reproduction_P Parameter: Treatment Value: Drought vs. No Drought
  misc_feature: MA Experiment ID: 20001906 Result: Down-regulated in Transcription
  misc_feature: MA Experiment 20001906 PARAMETER Experiment Name: At_Drought_Reproduction_P Parameter: Age (day) Value: 35
  misc_feature: MA Experiment 20001906 PARAMETER Experiment Name: At_Drought_Reproduction_P Parameter: Organism Value: A. thaliana
  misc_feature: MA Experiment 20001906 PARAMETER Experiment Name: At_Drought_Reproduction_P Parameter: Plant Line Value: WS
  misc_feature: MA Experiment 20001906 PARAMETER Experiment Name: At_Drought_Reproduction_P Parameter: Timepoint (day) Value: 5
  misc_feature: MA Experiment 20001906 PARAMETER Experiment Name: At_Drought_Reproduction_P Parameter: Tissue Value: Siliques
  misc_feature: MA Experiment 20001906 PARAMETER Experiment Name: At_Drought_Reproduction_P Parameter: Treatment Value: Drought vs. No Drought
aatcttatttgcctccaagtcatcaattctttatcctatattactagtctctgcttcaccaatcctttttgctctcctgtctgctacaaaccttaacttggattctttctggtcaccatggcttcggttactttctctgtccccaagggtttcactgaattctcaggattgcgaagctcctctgcttctcttcccttcggcaagaaactttcttccgatgagttcgtttccatcgtctccttccagacttctgcaatgggaagcagtggtggatacaggaaaggtgtgactgaggccaagcttaaggtggccattaatggattcggtaggatcgggaggaacttcctgagatgttggcatggtcgcaaggactctcctcttgatatcattgccattaatgacactggtggcgtcaagcaggcttcgcatttacttaaatacgactctactctcggaatctttgatgctgatgtcaaaccttctggagagactgcaatctctgttgatggaaagatcatccaagttgtctctaaccgaaacccgtctcttctcccttggaaggagctaggaattgacattgtcatcgaaggaaccggagtgtttgtggatagagaaggtgcagggaaacacattgaagctggtgccaagaaggttatcattactgctccaggcaaaggagatattccaacttatgtcgttggtgtcaatgcagatgcttacagtcatgatgaacctatcatcagcaatgcatcttgcactaccaactgtcttgctccctttgtcaaagttcttgaccagaaattcggtatcataaagggtacaatgacgactactcactcttacaccggtgaccagaggttgctagacgcgagtcaccgtgatctaaggagagcaagagcagctgctttgaacattgttcctacttctacaggagcagctaaagctgtggctcttgtgctccctaacctcaaaggaaaactcaacgggatcgctctccgtgtaccaacaccaaacgtatcagtggttgatctcgttgtgcaggtctcaaagaagacatttgctgaggaagtcaacgctgctttcagagattctgcagagaaagagcttaaaggtatactcgatgtctgcgatgagccactagtgtccgttgatttcagatgctcagatttttcaacgaccattgattcatcactcactatggttatgggagatgatatggttaaggtgattgcttggtatgataatgaatggggttactcacagagagttgttgacttggctgacattgttgccaacaactggaagtgatttcatcaaactttgtttcatgtttttccatttttttctctttctcttttttacattatggttctcaaaatatcggtgaagactgtataattgtagtatggatttgtaataaataatcataaactattcaaacttgtttacattttgtgttttgtgatacacttttcagtat

SEQ ID NO: 45928 - protein, 396 aa, Arabidopsis thaliana
  peptide (1)..(396): Ceres Seq. ID no. 13591503
  misc_feature (214)..(374): Pfam Name: Glyceraldehyde 3-phosphate dehydrogenase, Pfam Description: Glyceraldehyde 3-phosphate dehydrogenase,
  misc_feature (214)..(374): Pfam Name: Glyceraldehyde 3-phosphate dehydrogenase, Pfam Description: Glyceraldehyde 3-phosphate dehydrogenase,
  misc_feature (214)..(374): Pfam Name: Glyceraldehyde 3-phosphate dehydrogenase, Pfam Description: Glyceraldehyde 3-phosphate dehydrogenase,
  misc_feature (1)..(396): Homolog of NCBI NO: 20455487 NR Description: Glyceraldehyde 3-phosphate dehydrogenase A, precursor (NADP-dependent glyceraldehydephosphate dehydrogenase
  misc_feature (10)..(396): Homolog of NCBI NO: 120661 NR Description: Glyceraldehyde 3-phosphate dehydrogenase A, precursor (NADP-dependent glyceraldehydephosphate dehydrogenase
  misc_feature (14)..(396): Homolog of NCBI NO: 22240 NR Description: GADPH (383 AA) [Zea mays]
  misc_feature (1)..(396): Homolog of NCBI NO: 120657 NR Description: Glyceraldehyde 3-phosphate dehydrogenase A, precursor (NADP-dependent glyceraldehydephosphate dehydrogenase
  misc_feature (1)..(396): Homolog of NCBI NO: 20729 NR Description: precursor (AA -68 to 337) [Pisum sativum]
  misc_feature (1)..(396): Homolog of NCBI NO: 20455487 NR Description: Glyceraldehyde 3-phosphate dehydrogenase A, precursor (NADP-dependent glyceraldehydephosphate dehydrogenase
  misc_feature (14)..(396): Homolog of NCBI NO: 22240 NR Description: GADPH (383 AA) [Zea mays]
  misc_feature (1)..(396): Homolog of NCBI NO: 20729 NR Description: precursor (AA -68 to 337) [Pisum sativum]
  misc_feature (1)..(396): Homolog of NCBI NO: 120657 NR Description: Glyceraldehyde 3-phosphate dehydrogenase A, precursor (NADP-dependent glyceraldehydephosphate dehydrogenase
  misc_feature (14)..(396): Homolog of NCBI NO: 22240 NR Description: GADPH (383 AA) [Zea mays]
  misc_feature (10)..(396): Homolog of NCBI NO: 120661 NR Description: Glyceraldehyde 3-phosphate dehydrogenase A, precursor (NADP-dependent glyceraldehydephosphate dehydrogenase
  misc_feature (1)..(396): Homolog of NCBI NO: 20455487 NR Description: Glyceraldehyde 3-phosphate dehydrogenase A, precursor (NADP-dependent glyceraldehydephosphate dehydrogenase
  misc_feature (1)..(396): Homolog of NCBI NO: 30688425 NR Description: glyceraldehyde 3-phosphate dehydrogenase A
  misc_feature (1)..(396): Homolog of NCBI NO: 2117520 NR Description: glyceraldehyde-3-phosphate dehydrogenase (NADP)
  misc_feature (1)..(396): Homolog of NCBI NO: 15222111 NR Description: calcium-binding protein, calreticulin -related
  misc_feature (47)..(396): Homolog of NCBI NO: 166702 NR Description: glyceraldehyde 3-phosphate dehydrogenase A
  misc_feature (1)..(396): Homolog of NCBI NO: 120658 NR Description: Glyceraldehyde 3-phosphate dehydrogenase A, precursor (NADP-dependent glyceraldehydephosphate dehydrogenase
  misc_feature (1)..(396): Homolog of NCBI NO: 30688425 NR Description: glyceraldehyde 3-phosphate dehydrogenase A
  misc_feature (1)..(396): Homolog of NCBI NO: 2117520 NR Description: glyceraldehyde-3-phosphate dehydrogenase (NADP)
  misc_feature (1)..(396): Homolog of NCBI NO: 15222111 NR Description: calcium-binding protein, calreticulin -related
  misc_feature (47)..(396): Homolog of NCBI NO: 166702 NR Description: glyceraldehyde 3-phosphate dehydrogenase A
  misc_feature (1)..(396): Homolog of NCBI NO: 120658 NR Description: Glyceraldehyde 3-phosphate dehydrogenase A, precursor (NADP-dependent glyceraldehydephosphate dehydrogenase
  misc_feature (1)..(396): Homolog of NCBI NO: 20729 NR Description: precursor (AA -68 to 337) [Pisum sativum]
  misc_feature (1)..(396): Homolog of NCBI NO: 120657 NR Description: Glyceraldehyde 3-phosphate dehydrogenase A, precursor (NADP-dependent glyceraldehydephosphate dehydrogenase
  misc_feature (10)..(396): Homolog of NCBI NO: 120661 NR Description: Glyceraldehyde 3-phosphate dehydrogenase A, precursor (NADP-dependent glyceraldehydephosphate dehydrogenase
  misc_feature (1)..(396): Homolog of NCBI NO: 120658 NR Description: Glyceraldehyde 3-phosphate dehydrogenase A, precursor (NADP-dependent glyceraldehydephosphate dehydrogenase
  misc_feature (47)..(396): Homolog of NCBI NO: 166702 NR Description: glyceraldehyde 3-phosphate dehydrogenase A
  misc_feature (1)..(396): Homolog of NCBI NO: 15222111 NR Description: calcium-binding protein, calreticulin -related
  misc_feature (1)..(396): Homolog of NCBI NO: 2117520 NR Description: glyceraldehyde-3-phosphate dehydrogenase (NADP)
  misc_feature (1)..(396): Homolog of NCBI NO: 30688425 NR Description: glyceraldehyde 3-phosphate dehydrogenase A
MASVTFSVPKGFTEFSGLRSSSASLPFGKKLSSDEFVSIVSFQTSAMGSSGGYRKGVTEAKLKVAINGFGRIGRNFLRCWHGRKDSPLDIIAINDTGGVKQASHLLKYDSTLGIFDADVKPSGETAISVDGKIIQVVSNRNPSLLPWKELGIDIVIEGTGVFVDREGAGKHIEAGAKKVIITAPGKGDIPTYVVGVNADAYSHDEPIISNASCTTNCLAPFVKVLDQKFGIIKGTMTTTHSYTGDQRLLDASHRDLRRARAAALNIVPTSTGAAKAVALVLPNLKGKLNGIALRVPTPNVSVVDLVVQVSKKTFAEEVNAAFRDSAEKELKGILDVCDEPLVSVDFRCSDFSTTIDSSLTMVMGDDMVKVIAWYDNEWGYSQRVVDLADIVANNWK

SEQ ID NO: 45929 - protein, 350 aa, Arabidopsis thaliana
  peptide (1)..(350): Ceres Seq. ID no. 13591504
  misc_feature (168)..(328): Pfam Name: Glyceraldehyde 3-phosphate dehydrogenase, Pfam Description: Glyceraldehyde 3-phosphate dehydrogenase,
  misc_feature (168)..(328): Pfam Name: Glyceraldehyde 3-phosphate dehydrogenase, Pfam Description: Glyceraldehyde 3-phosphate dehydrogenase,
  misc_feature (168)..(328): Pfam Name: Glyceraldehyde 3-phosphate dehydrogenase, Pfam Description: Glyceraldehyde 3-phosphate dehydrogenase,
  misc_feature (1)..(350): Homolog of NCBI NO: 20455487 NR Description: Glyceraldehyde 3-phosphate dehydrogenase A, precursor (NADP-dependent glyceraldehydephosphate dehydrogenase
  misc_feature (1)..(350): Homolog of NCBI NO: 120661 NR Description: Glyceraldehyde 3-phosphate dehydrogenase A, precursor (NADP-dependent glyceraldehydephosphate dehydrogenase
  misc_feature (1)..(350): Homolog of NCBI NO: 22240 NR Description: GADPH (383 AA) [Zea mays]
  misc_feature (1)..(350): Homolog of NCBI NO: 120657 NR Description: Glyceraldehyde 3-phosphate dehydrogenase A, precursor (NADP-dependent glyceraldehydephosphate dehydrogenase
  misc_feature (1)..(350): Homolog of NCBI NO: 20729 NR Description: precursor (AA -68 to 337) [Pisum sativum]
  misc_feature (1)..(350): Homolog of NCBI NO: 20455487 NR Description: Glyceraldehyde 3-phosphate dehydrogenase A, precursor (NADP-dependent glyceraldehydephosphate dehydrogenase
  misc_feature (1)..(350): Homolog of NCBI NO: 22240 NR Description: GADPH (383 AA) [Zea mays]
  misc_feature (1)..(350): Homolog of NCBI NO: 20729 NR Description: precursor (AA -68 to 337) [Pisum sativum]
  misc_feature (1)..(350): Homolog of NCBI NO: 120657 NR Description: Glyceraldehyde 3-phosphate dehydrogenase A, precursor (NADP-dependent glyceraldehydephosphate dehydrogenase
  misc_feature (1)..(350): Homolog of NCBI NO: 22240 NR Description: GADPH (383 AA) [Zea mays]
  misc_feature (1)..(350): Homolog of NCBI NO: 120661 NR Description: Glyceraldehyde 3-phosphate dehydrogenase A, precursor (NADP-dependent glyceraldehydephosphate dehydrogenase
  misc_feature (1)..(350): Homolog of NCBI NO: 20455487 NR Description: Glyceraldehyde 3-phosphate dehydrogenase A, precursor (NADP-dependent glyceraldehydephosphate dehydrogenase
  misc_feature (1)..(350): Homolog of NCBI NO: 30688425 NR Description: glyceraldehyde 3-phosphate dehydrogenase A
  misc_feature (1)..(350): Homolog of NCBI NO: 2117520 NR Description: glyceraldehyde-3-phosphate dehydrogenase (NADP)
  misc_feature (1)..(350): Homolog of NCBI NO: 15222111 NR Description: calcium-binding protein, calreticulin -related
  misc_feature (1)..(350): Homolog of NCBI NO: 166702 NR Description: glyceraldehyde 3-phosphate dehydrogenase A
  misc_feature (1)..(350): Homolog of NCBI NO: 120658 NR Description: Glyceraldehyde 3-phosphate dehydrogenase A, precursor (NADP-dependent glyceraldehydephosphate dehydrogenase
  misc_feature (1)..(350): Homolog of NCBI NO: 30688425 NR Description: glyceraldehyde 3-phosphate dehydrogenase A
  misc_feature (1)..(350): Homolog of NCBI NO: 2117520 NR Description: glyceraldehyde-3-phosphate dehydrogenase (NADP)
  misc_feature (1)..(350): Homolog of NCBI NO: 15222111 NR Description: calcium-binding protein, calreticulin -related
  misc_feature (1)..(350): Homolog of NCBI NO: 166702 NR Description: glyceraldehyde 3-phosphate dehydrogenase A
  misc_feature (1)..(350): Homolog of NCBI NO: 120658 NR Description: Glyceraldehyde 3-phosphate dehydrogenase A, precursor (NADP-dependent glyceraldehydephosphate dehydrogenase
  misc_feature (1)..(350): Homolog of NCBI NO: 20729 NR Description: precursor (AA -68 to 337) [Pisum sativum]
  misc_feature (1)..(350): Homolog of NCBI NO: 120657 NR Description: Glyceraldehyde 3-phosphate dehydrogenase A, precursor (NADP-dependent glyceraldehydephosphate dehydrogenase
  misc_feature (1)..(350): Homolog of NCBI NO: 120661 NR Description: Glyceraldehyde 3-phosphate dehydrogenase A, precursor (NADP-dependent glyceraldehydephosphate dehydrogenase
  misc_feature (1)..(350): Homolog of NCBI NO: 120658 NR Description: Glyceraldehyde 3-phosphate dehydrogenase A, precursor (NADP-dependent glyceraldehydephosphate dehydrogenase
  misc_feature (1)..(350): Homolog of NCBI NO: 166702 NR Description: glyceraldehyde 3-phosphate dehydrogenase A
  misc_feature (1)..(350): Homolog of NCBI NO: 15222111 NR Description: calcium-binding protein, calreticulin -related
  misc_feature (1)..(350): Homolog of NCBI NO: 2117520 NR Description: glyceraldehyde-3-phosphate dehydrogenase (NADP)
  misc_feature (1)..(350): Homolog of NCBI NO: 30688425 NR Description: glyceraldehyde 3-phosphate dehydrogenase A
MGSSGGYRKGVTEAKLKVAINGFGRIGRNFLRCWHGRKDSPLDIIAINDTGGVKQASHLLKYDSTLGIFDADVKPSGETAISVDGKIIQVVSNRNPSLLPWKELGIDIVIEGTGVFVDREGAGKHIEAGAKKVIITAPGKGDIPTYVVGVNADAYSHDEPIISNASCTTNCLAPFVKVLDQKFGIIKGTMTTTHSYTGDQRLLDASHRDLRRARAAALNIVPTSTGAAKAVALVLPNLKGKLNGIALRVPTPNVSVVDLVVQVSKKTFAEEVNAAFRDSAEKELKGILDVCDEPLVSVDFRCSDFSTTIDSSLTMVMGDDMVKVIAWYDNEWGYSQRVVDLADIVANNWK

SEQ ID NO: 45930 - DNA, 1522 bp, Arabidopsis thaliana
  misc_feature (1)..(1522): Ceres Seq. ID no. 14310004
  misc_feature: MA Experiment ID: 20000495 Result: Down-regulated in Transcription
  misc_feature: MA Experiment 20000495 PARAMETER Experiment Name: At_Guard_Cells_P Parameter: Harvest Date Value: 8/2/2002
  misc_feature: MA Experiment 20000495 PARAMETER Experiment Name: At_Guard_Cells_P Parameter: Organism Value: A. thaliana
  misc_feature: MA Experiment 20000495 PARAMETER Experiment Name: At_Guard_Cells_P Parameter: Tissue Value: Guard Cells vs. Leaves
ttggacgtgtaacgccgttaaaacgattctttcccattgtatccgcttttaacaactctcgtcgtcatctccaccgtccgttttctctcagctatattttaatggcgacaattcagaagcttgaagaagttgcaggcaaagatcaaactctaagagccgttgatctaaccatcatcaacggcgtcagaaacgtcgaaacttcaagacctttccaagtaaatcccacagtgagtctcgagcccaaggcggagccggtgatgccgtcgttttcaatgtctttagctccaccgtcttcgacaggaccaccattgaagagagcttcgactaaagaccgtcacacgaaggttgaaggaagagggagaaggatacggatgcctgccacgtgtgcggctaggatttttcaattaactcgagagttaggtcacaaatccgacggcgaaacgattcggtggttgttggagaacgctgagccggcgattatagccgccacgggtacgggaacggttcccgccatcgccatgtcggttaacggaaccttaaaaatcccgacgacgacgaacgctgattctgatatgggtgaaaatctgatgaagaagaaacgtaaacgaccttctaacagtgagtatatagacataagcgacgccgtttcagcttcctccggtttagctccaattgccacgacgacaacgatccaacctccgcaagctctggcatcatccactgtggctcagcaacttctgccgcaaggaatgtatccgatgtgggctattccatcaaacgcaatgattccgacggtcggagctttcttcttgattccacaaatcgctggtccgtcgaatcagcctcagttattagcttttcccgccgccgctgcttcgccgtcgtcttacgtcgccgctgttcaacaggcttccacgatggctagaccacctcctttacaagttgttccaagcagcggctttgtatccgtttcagacgttagcggttcgaatttatcaagagcgacgtcggttatggctccgagctcaagctcaggcgtaacaaccggtagttcatcgtcaattgcaacaacaacgacgcacacgctgagagacttctccctagagatatacgagaaacaagagcttcaccagttcatgagcaccacaacagcacggtcatcgaaccactgaagaaaagaaaggaaacggcggcgtattagtgatcggaaaaaaagcacgtgtgcacatgaagaagtgcacgtgttaagaagtgggcctcgattttaggcagaagtgggtcaacacgcaccaaaaagagagtggagggaggaggagaggggccacacggctcccaccttacgcatagcttccgaggcagccaggttgggtgtggtccccaaatggttagagctacgtggtccgtatgagtaggaccagcttaagcttaagcataattcgaaacgtttcgtttttttggtgggggctcaccactttgtcttgacttttttggtctttgtaattttacaaaataagatttattg

SEQ ID NO: 45931 - protein, 389 aa, Arabidopsis thaliana
  peptide (1)..(389): Ceres Seq. ID no. 14310005
  misc_feature (92)..(313): Pfam Name: TCP family transcription factor Pfam Description: TCP family transcription factor
  misc_feature (100)..(174): Homolog of NCBI NO: 15232059 NR Description: TCP family transcription factor, putative
  misc_feature (72)..(185): Homolog of NCBI NO: 15217857 NR Description: TCP family transcription factor, putative
  misc_feature (101)..(180): Homolog of NCBI NO: 22331641 NR Description: TCP family transcription factor, putative
  misc_feature (101)..(180): Homolog of NCBI NO: 11357581 NR Description: hypothetical protein F1P2.170 - Arabidopsis
  misc_feature (101)..(180): Homolog of NCBI NO: 18409345 NR Description: TCP family transcription factor, putative
  misc_feature (66)..(180): Homolog of NCBI NO: 5731257 NR Description: auxin-induced basic helix-loop-helix
  misc_feature (78)..(345): Homolog of NCBI NO: 7489534 NR Description: probable DNA binding protein PCF2 - rice
  misc_feature (96)..(299): Homolog of NCBI NO: 21592496 NR Description: unknown [Arabidopsis thaliana]
  misc_feature (80)..(299): Homolog of NCBI NO: 15242216 NR Description: TCP family transcription factor, putative
  misc_feature (34)..(389): Homolog of NCBI NO: 15225538 NR Description: TCP family transcription factor, putative
GRVTPLKRFFPIVSAFNNSRRHLHRPFSLSYILMATIQKLEEVAGKDQTLRAVDLTIINGVRNVETSRPFQVNPTVSLEPKAEPVMPSFSMSLAPPSSTGPPLKRASTKDRHTKVEGRGRRIRMPATCAARIFQLTRELGHKSDGETIRWLLENAEPAIIAATGTGTVPAIAMSVNGTLKIPTTTNADSDMGENLMKKKRKRPSNSEYIDISDAVSASSGLAPIATTTTIQPPQALASSTVAQQLLPQGMYPMWAIPSNAMIPTVGAFFLIPQIAGPSNQPQLLAFPAAAASPSSYVAAVQQASTMARPPPLQVVPSSGFVSVSDVSGSNLSRATSVMAPSSSSGVTTGSSSSIATTTTHTLRDFSLEIYEKQELHQFMSTTTARSSNH

SEQ ID NO: 45932 - protein, 356 aa, Arabidopsis thaliana
  peptide (1)..(356): Ceres Seq. ID no. 14310006
  misc_feature (59)..(280): Pfam Name: TCP family transcription factor Pfam Description: TCP family transcription factor
  misc_feature (67)..(141): Homolog of NCBI NO: 15232059 NR Description: TCP family transcription factor, putative
  misc_feature (39)..(152): Homolog of NCBI NO: 15217857 NR Description: TCP family transcription factor, putative
  misc_feature (68)..(147): Homolog of NCBI NO: 22331641 NR Description: TCP family transcription factor, putative
  misc_feature (68)..(147): Homolog of NCBI NO: 11357581 NR Description: hypothetical protein F1P2.170 - Arabidopsis
  misc_feature (68)..(147): Homolog of NCBI NO: 18409345 NR Description: TCP family transcription factor, putative
  misc_feature (33)..(147): Homolog of NCBI NO: 5731257 NR Description: auxin-induced basic helix-loop-helix
  misc_feature (45)..(312): Homolog of NCBI NO: 7489534 NR Description: probable DNA binding protein PCF2 - rice
  misc_feature (63)..(266): Homolog of NCBI NO: 21592496 NR Description: unknown [Arabidopsis thaliana]
  misc_feature (47)..(266): Homolog of NCBI NO: 15242216 NR Description: TCP family transcription factor, putative
  misc_feature (1)..(356): Homolog of NCBI NO: 15225538 NR Description: TCP family transcription factor, putative
MATIQKLEEVAGKDQTLRAVDLTIINGVRNVETSRPFQVNPTVSLEPKAEPVMPSFSMSLAPPSSTGPPLKRASTKDRHTKVEGRGRRIRMPATCAARIFQLTRELGHKSDGETIRWLLENAEPAIIAATGTGTVPAIAMSVNGTLKIPTTTNADSDMGENLMKKKRKRPSNSEYIDISDAVSASSGLAPIATTTTIQPPQALASSTVAQQLLPQGMYPMWAIPSNAMIPTVGAFFLIPQIAGPSNQPQLLAFPAAAASPSSYVAAVQQASTMARPPPLQVVPSSGFVSVSDVSGSNLSRATSVMAPSSSSGVTTGSSSSIATTTTHTLRDFSLEIYEKQELHQFMSTTTARSSNH

SEQ ID NO: 45933 - protein, 304 aa, Arabidopsis thaliana
  peptide (1)..(304): Ceres Seq. ID no. 14310007
  misc_feature (7)..(228): Pfam Name: TCP family transcription factor Pfam Description: TCP family transcription factor
  misc_feature (15)..(89): Homolog of NCBI NO: 15232059 NR Description: TCP family transcription factor, putative
  misc_feature (1)..(100): Homolog of NCBI NO: 15217857 NR Description: TCP family transcription factor, putative
  misc_feature (16)..(95): Homolog of NCBI NO: 22331641 NR Description: TCP family transcription factor, putative
  misc_feature (16)..(95): Homolog of NCBI NO: 11357581 NR Description: hypothetical protein F1P2.170 - Arabidopsis
  misc_feature (16)..(95): Homolog of NCBI NO: 18409345 NR Description: TCP family transcription factor, putative
  misc_feature (1)..(95): Homolog of NCBI NO: 5731257 NR Description: auxin-induced basic helix-loop-helix
  misc_feature (1)..(260): Homolog of NCBI NO: 7489534 NR Description: probable DNA binding protein PCF2 - rice
  misc_feature (11)..(214): Homolog of NCBI NO: 21592496 NR Description: unknown [Arabidopsis thaliana]
  misc_feature (1)..(214): Homolog of NCBI NO: 15242216 NR Description: TCP family transcription factor, putative
  misc_feature (1)..(304): Homolog of NCBI NO: 15225538 NR Description: TCP family transcription factor, putative
MPSFSMSLAPPSSTGPPLKRASTKDRHTKVEGRGRRIRMPATCAARIFQLTRELGHKSDGETIRWLLENAEPAIIAATGTGTVPAIAMSVNGTLKIPTTTNADSDMGENLMKKKRKRPSNSEYIDISDAVSASSGLAPIATTTTIQPPQALASSTVAQQLLPQGMYPMWAIPSNAMIPTVGAFFLIPQIAGPSNQPQLLAFPAAAASPSSYVAAVQQASTMARPPPLQVVPSSGFVSVSDVSGSNLSRATSVMAPSSSSGVTTGSSSSIATTTTHTLRDFSLEIYEKQELHQFMSTTTARSSNH

SEQ ID NO: 45934 - DNA, 1121 bp, Arabidopsis thaliana
  misc_feature (1)..(1121): Ceres Seq. ID no. 15177866
  misc_feature: MA Experiment ID: 20000169 Result: Up-regulated in Transcription
  misc_feature: MA Experiment 20000169 PARAMETER Experiment Name: At_100uM_ABA_P Parameter: Age (day) Value: 14
  misc_feature: MA Experiment 20000169 PARAMETER Experiment Name: At_100uM_ABA_P Parameter: Organism Value: A. thaliana
  misc_feature: MA Experiment 20000169 PARAMETER Experiment Name: At_100uM_ABA_P Parameter: Plant Line Value: WS
  misc_feature: MA Experiment 20000169 PARAMETER Experiment Name: At_100uM_ABA_P Parameter: Timepoint (hr) Value: 6
  misc_feature: MA Experiment 20000169 PARAMETER Experiment Name: At_100uM_ABA_P Parameter: Tissue Value: Aerial
  misc_feature: MA Experiment 20000169 PARAMETER Experiment Name: At_100uM_ABA_P Parameter: Treatment Value: 100uM ABA vs. No Treatment
  misc_feature: MA Experiment ID: 20000180 Result: Up-regulated in Transcription
  misc_feature: MA Experiment 20000180 PARAMETER Experiment Name: At_Germinating_Seeds_P Parameter: Age (hr) Value: 24 vs. 0
  misc_feature: MA Experiment 20000180 PARAMETER Experiment Name: At_Germinating_Seeds_P Parameter: Tissue Value: Germinating Seeds
  misc_feature: MA Experiment ID: 20000211 Result: Up-regulated in Transcription
  misc_feature: MA Experiment 20000211 PARAMETER Experiment Name: At_0.001percent_MeJA__P Parameter: Age (day) Value: 14
  misc_feature: MA Experiment 20000211 PARAMETER Experiment Name: At_0.001percent_MeJA__P Parameter: Organism Value: A. thaliana
  misc_feature: MA Experiment 20000211 PARAMETER Experiment Name: At_0.001percent_MeJA__P Parameter: Plant Line Value: WS
  misc_feature: MA Experiment 20000211 PARAMETER Experiment Name: At_0.001percent_MeJA__P Parameter: Timepoint (hr) Value: 1
  misc_feature: MA Experiment 20000211 PARAMETER Experiment Name: At_0.001percent_MeJA__P Parameter: Tissue Value: Aerial
  misc_feature: MA Experiment 20000211 PARAMETER Experiment Name: At_0.001percent_MeJA__P Parameter: Treatment Value: 0.001percent MeJA vs. No Treatment
  misc_feature: MA Experiment ID: 20000227 Result: Down-regulated in Transcription
  misc_feature: MA Experiment 20000227 PARAMETER Experiment Name: At_Root-Tips-vs-Tops_P Parameter: Tissue Value: Root Tips vs. Root Tops
  misc_feature: MA Experiment ID: 20000265 Result: Up-regulated in Transcription
  misc_feature: MA Experiment 20000265 PARAMETER Experiment Name: At_Open_Flower_P Parameter: Age (day) Value: 21
  misc_feature: MA Experiment 20000265 PARAMETER Experiment Name: At_Open_Flower_P Parameter: Plant Line Value: WS
  misc_feature: MA Experiment 20000265 PARAMETER Experiment Name: At_Open_Flower_P Parameter: Tissue Value: Closed Flower vs. Whole Plant
  misc_feature: MA Experiment ID: 20000436 Result: Up-regulated in Transcription
  misc_feature: MA Experiment 20000436 PARAMETER Experiment Name: At_Drought_P Parameter: Age (day) Value: 7
  misc_feature: MA Experiment 20000436 PARAMETER Experiment Name: At_Drought_P Parameter: Organism Value: A. thaliana
  misc_feature: MA Experiment 20000436 PARAMETER Experiment Name: At_Drought_P Parameter: Plant Line Value: WS
  misc_feature: MA Experiment 20000436 PARAMETER Experiment Name: At_Drought_P Parameter: Timepoint (hr) Value: 12
  misc_feature: MA Experiment 20000436 PARAMETER Experiment Name: At_Drought_P Parameter: Tissue Value: Whole Plant
  misc_feature: MA Experiment 20000436 PARAMETER Experiment Name: At_Drought_P Parameter: Treatment Value: Drought vs. No Drought
  misc_feature: MA Experiment ID: 20000451 Result: Down-regulated in Transcription
  misc_feature: MA Experiment 20000451 PARAMETER Experiment Name: At_CS6879_Shoots-Roots_P Parameter: Age (day) Value: 14
  misc_feature: MA Experiment 20000451 PARAMETER Experiment Name: At_CS6879_Shoots-Roots_P Parameter: Organism Value: A. thaliana
  misc_feature: MA Experiment 20000451 PARAMETER Experiment Name: At_CS6879_Shoots-Roots_P Parameter: Plant Line Value: CS6879 vs. WS
  misc_feature: MA Experiment 20000451 PARAMETER Experiment Name: At_CS6879_Shoots-Roots_P Parameter: Tissue Value: Roots
  misc_feature: MA Experiment ID: 20000453 Result: Up-regulated in Transcription
  misc_feature: MA Experiment 20000453 PARAMETER Experiment Name: At_100uM_ABA_P Parameter: Age (day) Value: 15
  misc_feature: MA Experiment 20000453 PARAMETER Experiment Name: At_100uM_ABA_P Parameter: Organism Value: A. thaliana
  misc_feature: MA Experiment 20000453 PARAMETER Experiment Name: At_100uM_ABA_P Parameter: Plant Line Value: WS
  misc_feature: MA Experiment 20000453 PARAMETER Experiment Name: At_100uM_ABA_P Parameter: Timepoint (hr) Value: 24
  misc_feature: MA Experiment 20000453 PARAMETER Experiment Name: At_100uM_ABA_P Parameter: Tissue Value: Aerial
  misc_feature: MA Experiment 20000453 PARAMETER Experiment Name: At_100uM_ABA_P Parameter: Treatment Value: 100uM ABA vs. No Treatment
  misc_feature: MA Experiment ID: 20001451 Result: Down-regulated in Transcription
  misc_feature: MA Experiment 20001451 PARAMETER Experiment Name: At_Far-red-induction_P Parameter: Age (day) Value: 7
  misc_feature: MA Experiment 20001451 PARAMETER Experiment Name: At_Far-red-induction_P Parameter: Light Value: Far-red vs. White
  misc_feature: MA Experiment 20001451 PARAMETER Experiment Name: At_Far-red-induction_P Parameter: Organism Value: A. thaliana
  misc_feature: MA Experiment 20001451 PARAMETER Experiment Name: At_Far-red-induction_P Parameter: Plant Line Value: Columbia
  misc_feature: MA Experiment 20001451 PARAMETER Experiment Name: At_Far-red-induction_P Parameter: Timepoint (hr) Value: 24
  misc_feature: MA Experiment 20001451 PARAMETER Experiment Name: At_Far-red-induction_P Parameter: Tissue Value: Whole Plant
  misc_feature: MA Experiment ID: 20001554 Result: Up-regulated in Transcription
  misc_feature: MA Experiment 20001554 PARAMETER Experiment Name: At_Drought_Soil_Dry_P Parameter: Age (day) Value: 21
  misc_feature: MA Experiment 20001554 PARAMETER Experiment Name: At_Drought_Soil_Dry_P Parameter: Organism Value: A. thaliana
  misc_feature: MA Experiment 20001554 PARAMETER Experiment Name: At_Drought_Soil_Dry_P Parameter: Plant Line Value: WS
  misc_feature: MA Experiment 20001554 PARAMETER Experiment Name: At_Drought_Soil_Dry_P Parameter: Post Timepoint (hr) Value: None
  misc_feature: MA Experiment 20001554 PARAMETER Experiment Name: At_Drought_Soil_Dry_P Parameter: Post-Treatment Value: None
  misc_feature: MA Experiment 20001554 PARAMETER Experiment Name: At_Drought_Soil_Dry_P Parameter: Timepoint (day) Value: 7
  misc_feature: MA Experiment 20001554 PARAMETER Experiment Name: At_Drought_Soil_Dry_P Parameter: Treatment Value: Drought vs. No Drought
  misc_feature: MA Experiment ID: 20001555 Result: Up-regulated in Transcription
  misc_feature: MA Experiment 20001555 PARAMETER Experiment Name: At_Drought_Soil_Dry_P Parameter: Age (day) Value: 24
  misc_feature: MA Experiment 20001555 PARAMETER Experiment Name: At_Drought_Soil_Dry_P Parameter: Organism Value: A. thaliana
  misc_feature: MA Experiment 20001555 PARAMETER Experiment Name: At_Drought_Soil_Dry_P Parameter: Plant Line Value: WS
  misc_feature: MA Experiment 20001555 PARAMETER Experiment Name: At_Drought_Soil_Dry_P Parameter: Post Timepoint (hr) Value: None
  misc_feature: MA Experiment 20001555 PARAMETER Experiment Name: At_Drought_Soil_Dry_P Parameter: Post-Treatment Value: None
  misc_feature: MA Experiment 20001555 PARAMETER Experiment Name: At_Drought_Soil_Dry_P Parameter: Timepoint (day) Value: 10
  misc_feature: MA Experiment 20001555 PARAMETER Experiment Name: At_Drought_Soil_Dry_P Parameter: Treatment Value: Drought vs. No Drought
  misc_feature: MA Experiment ID: 20001558 Result: Down-regulated in Transcription
  misc_feature: MA Experiment 20001558 PARAMETER Experiment Name: At_Drought_Soil_Dry_P Parameter: Age (day) Value: 27
  misc_feature: MA Experiment 20001558 PARAMETER Experiment Name: At_Drought_Soil_Dry_P Parameter: Organism Value: A. thaliana
  misc_feature: MA Experiment 20001558 PARAMETER Experiment Name: At_Drought_Soil_Dry_P Parameter: Plant Line Value: WS
  misc_feature: MA Experiment 20001558 PARAMETER Experiment Name: At_Drought_Soil_Dry_P Parameter: Post Timepoint (hr) Value: 6
  misc_feature: MA Experiment 20001558 PARAMETER Experiment Name: At_Drought_Soil_Dry_P Parameter: Post-Treatment Value: Re-Water vs. No Drought
  misc_feature: MA Experiment 20001558 PARAMETER Experiment Name: At_Drought_Soil_Dry_P Parameter: Timepoint (day) Value: 13
  misc_feature: MA Experiment 20001558 PARAMETER Experiment Name: At_Drought_Soil_Dry_P Parameter: Treatment Value: Drought vs. No Drought
  misc_feature: MA Experiment ID: 20001559 Result: Up-regulated in Transcription
  misc_feature: MA Experiment 20001559 PARAMETER Experiment Name: At_Drought_Soil_Dry_P Parameter: Age (day) Value: 28
  misc_feature: MA Experiment 20001559 PARAMETER Experiment Name: At_Drought_Soil_Dry_P Parameter: Organism Value: A. thaliana
  misc_feature: MA Experiment 20001559 PARAMETER Experiment Name: At_Drought_Soil_Dry_P Parameter: Plant Line Value: WS
  misc_feature: MA Experiment 20001559 PARAMETER Experiment Name: At_Drought_Soil_Dry_P Parameter: Post Timepoint (hr) Value: 29
  misc_feature: MA Experiment 20001559 PARAMETER Experiment Name: At_Drought_Soil_Dry_P Parameter: Post-Treatment Value: Re-Water vs. No Drought
  misc_feature: MA Experiment 20001559 PARAMETER Experiment Name: At_Drought_Soil_Dry_P Parameter: Timepoint (day) Value: 14
  misc_feature: MA Experiment 20001559 PARAMETER Experiment Name: At_Drought_Soil_Dry_P Parameter: Treatment Value: Drought vs. No Drought
attcatccgtctctgcaaacaaaggaagaagaatcaagatggctctggaaatctgtgtgaaagctgctgttggtgctcctgatcatctcggcgactgtaaccatcttctctttctctctctgtttttgttttgcattaagcttttgattttgcaattcttagtttctgagctttgatcgttggtaaaattactaatttaagtgtttgtttgtcgttttaggtccgttcagccaacgggctcttctcacactcgaggagaagagtcttacctacaaaatccatctgattaacctctctgacaaaccccagtggtcagtttctctcacgcctaaacccttaagatcggtctagtttgaacttgtttagccataatctctgaaattttacttgtaactggtacgagctttgtgttaaccggaaattggattggcttcatgtgcgagcattgtgttaaccggaacttgaaattggtggctttggttttatatatgatgcaggttcttggacattagtcctcaagggaaagtaccagtgctcaagatcgacgacaagtgggtgactgattccgacgtcatcgttggtatcctcgaggagaagtatcctgatccacctctcaagactcctgctgaatttgcctctgttggatccaacatttttggtacttttgggacattcttgaagagcaaagactccaatgacggatctgaacatgccttgcttgttgagctagaagccttggagaaccatctcaagagtcacgatggtccttttatcgccggggaaagagtttccgcggtggatctaagcttagcaccaaagctttaccaccttcaagttgctcttggccatttcaaaagctggtctgtccctgagagctttccccatgtccataactacatgaagactctgttctcgctcgactcttttgagaaaactaagaccgaggaaaagtatgtgatctctggatgggctcccaaggttaacccttgaaactatgcaccgttatgcgatcgttggtgtggtaatgttgttcaaggtctctctcttatatcagtcaaataatgtacttggaccttttttatgtaatgtactgtatcaatcaaataagaaagcctattttg

SEQ ID NO: 45935 - protein, 57 aa, Arabidopsis thaliana
  peptide (1)..(57): Ceres Seq. ID no. 15177867
  misc_feature (13)..(32): Homolog of NCBI NO: 6939839 NR Description: GSH-dependent dehydroascorbate reductase 1
  misc_feature (16)..(32): Homolog of NCBI NO: 28192421 NR Description: dehydroascorbate reductase [Triticum aestivum]
  misc_feature (13)..(32): Homolog of NCBI NO: 28192425 NR Description: dehydroascorbate reductase [Oryza sativa]
  misc_feature (13)..(32): Homolog of NCBI NO: 15239354 NR Description: dehydroascorbate reductase, putative [Arabidopsis
  misc_feature (13)..(32): Homolog of NCBI NO: 28192427 NR Description: dehydroascorbate reductase [Nicotiana tabacum]
  misc_feature (13)..(32): Homolog of NCBI NO: 15222163 NR Description: dehydroascorbate reductase, putative [Arabidopsis
  misc_feature (13)..(32): Homolog of NCBI NO: 21593056 NR Description: GSH-dependent dehydroascorbate reductase 1,
  misc_feature (13)..(32): Homolog of NCBI NO: 25402899 NR Description: protein F18O14.33 [imported] - Arabidopsis
  misc_feature (13)..(32): Homolog of NCBI NO: 15223576 NR Description: dehydroascorbate reductase, putative [Arabidopsis
SSVSANKGRRIKMALEICVKAAVGAPDHLGDCNHLLFLSLFLFCIKLLILQFLVSEL

SEQ ID NO: 45936 - protein, 45 aa, Arabidopsis thaliana
  peptide (1)..(45): Ceres Seq. ID no. 15177868
  misc_feature (1)..(20): Homolog of NCBI NO: 6939839 NR Description: GSH-dependent dehydroascorbate reductase 1
  misc_feature (4)..(20): Homolog of NCBI NO: 28192421 NR Description: dehydroascorbate reductase [Triticum aestivum]
  misc_feature (1)..(20): Homolog of NCBI NO: 28192425 NR Description: dehydroascorbate reductase [Oryza sativa]
  misc_feature (1)..(20): Homolog of NCBI NO: 15239354 NR Description: dehydroascorbate reductase, putative [Arabidopsis
  misc_feature (1)..(20): Homolog of NCBI NO: 28192427 NR Description: dehydroascorbate reductase [Nicotiana tabacum]
  misc_feature (1)..(20): Homolog of NCBI NO: 15222163 NR Description: dehydroascorbate reductase, putative [Arabidopsis
  misc_feature (1)..(20): Homolog of NCBI NO: 21593056 NR Description: GSH-dependent dehydroascorbate reductase 1,
  misc_feature (1)..(20): Homolog of NCBI NO: 25402899 NR Description: protein F18O14.33 [imported] - Arabidopsis
  misc_feature (1)..(20): Homolog of NCBI NO: 15223576 NR Description: dehydroascorbate reductase, putative [Arabidopsis
MALEICVKAAVGAPDHLGDCNHLLFLSLFLFCIKLLILQFLVSEL

SEQ ID NO: 45937 - protein, 42 aa, Arabidopsis thaliana
  peptide (1)..(42): Ceres Seq. ID no. 15177869
MHRYAIVGVVMLFKVSLLYQSNNVLGPFLCNVLYQSNKKAYF

SEQ ID NO: 45938 - DNA, 1907 bp, Arabidopsis thaliana
  misc_feature (1)..(1907): Ceres Seq. ID no. 12600580
  misc_feature: MA Experiment ID: 20000184 Result: Down-regulated in Transcription
  misc_feature: MA Experiment 20000184 PARAMETER Experiment Name: At_Shoots__P Parameter: Age (day) Value: 7
  misc_feature: MA Experiment 20000184 PARAMETER Experiment Name: At_Shoots__P Parameter: Tissue Value: Shoots vs. Whole Plant
ggattggttcggctggttcgtgctcgaaattgagattttgaaagaaaaaaagagctctgaatcattgaaatcagcttaattccaatctgaatctgcaaaaaagtcttacgtcacactcccatgtagtagccgtcacttctcgtcttcctcctagagattacccaactctctcgcttcttctttttcctcttagggtttcttcatcctttagggtttccacaaaaattcaaaacctacttggaaatatttgggcttgaagaaggaagaattagatggaaggaagaaggattacggcaagccctagaccttgtagtggaagaagaattgtggctaagaaaaggtctcgacccgatggattcgtcaacagtgttaaaaagcttcaacgaagagaaatctcttctcgtaaagatcgagctttctctattagcaccgcccaagagagatttcgtaacatgcgtctcgtggagcaatatgatactcacgatcctaaagggcactgtttagttgcattaccgtttttgatgaagagaactaaagttattgagattgttgctgcaagggacattgtttttgcgcttgcacattctggtgtttgcgcagcttttagtagagagtcgaacaaaagaatatgctttttaaatgttagtccagatgaagtcatcaggagcttgttctacaacaagaacaatgattctctcatcacagtttctgtttatgcttcagacaatttcagctctttgaaatgcagatccactagaattgagtatattctgagaggtcagccggatgcagggtttgctctttttgagtctgaatcattaaagtggcctggttttgttgagtttgatgatgtcaatggaaaggtgctgacttattctgcgcaggacagtgtatacaaggtgtttgatctgaaaaactacaccatgctatattcgatatcagataaaaatgtccaggaaattaaaatcagtccagggataatgttattgatcttcaagagagctgccagtcatgttcctctgaagattctgtcgatagaagatggcactgttctcaagtccttcaatcatttgcttcaccgaaacaagaaagttgacttcattgaacaattcaatgagaaacttcttgttaagcaagagaatgagaatcttcaaattcttgacgtcagaaatgctgagctaatggaagttagtagagctgagttcatgacaccgtctgcattcatatttctgtatgagaaccagttgtttctgacattcaggaaccggaacgtttctgtgtggaactttcgcggagagctcgttacttcctttgaggaccatcttctatggcatccagactgtaacactaataatatctacattacaagtgatcaagatctgatcatctcgtactgcaaagcagataccgaagatcagtggatagaaggaaatgcgggatcaatcaatatcagcaatatattgactgggaaatgcttagctaaaataacaccaagcagtgggcctccaaaagatgatgagagcagcagcagtaattgtatgggaaagaactcaaagcaaagaagaaacgctgtagctgaagctttggaagacataaccgctcttttctacgacgaagaacgcaatgagatatacacaggaaacagacacggccttgttcatgtgtggtccaattgatttcacatacatcgtcatcgttagctgctactactactactacgaatgtatcatttggtttccttcaattgtgtgtagcgataaatctttttaacttagtgtctttgagcagccatctgtgttgtaaaccatttgtgggcaagtgtgcgcgtcagaatgccagttgtgtacactaataccattgtacgtaacatttgggttttgacaattctatgaaagaccctttattcc

SEQ ID NO: 45939 - protein, 467 aa, Arabidopsis thaliana
  peptide (1)..(467): Ceres Seq. ID no. 12600581
  misc_feature (178)..(207): Homolog of NCBI NO: 37535068 NR Description: hypothetical protein [Oryza sativa (japonica
  misc_feature (21)..(62): Homolog of NCBI NO: 37535068 NR Description: hypothetical protein [Oryza sativa (japonica
  misc_feature (1)..(467): Homolog of NCBI NO: 34909262 NR Description: B1148D12.19 [Oryza sativa (japonica
  misc_feature (1)..(467): Homolog of NCBI NO: 15128395 NR Description: P0454H12.13 [Oryza sativa (japonica
  misc_feature (1)..(467): Homolog of NCBI NO: 30687585 NR Description: expressed protein [Arabidopsis thaliana]
  misc_feature (1)..(467): Homolog of NCBI NO: 25344227 NR Description: hypothetical protein At2g38630 [imported] -
  misc_feature (1)..(467): Homolog of NCBI NO: 11281174 NR Description: hypothetical protein F24B22.150 - Arabidopsis
  misc_feature (1)..(467): Homolog of NCBI NO: 18410015 NR Description: putative protein
MEGRRITASPRPCSGRRIVAKKRSRPDGFVNSVKKLQRREISSRKDRAFSISTAQERFRNMRLVEQYDTHDPKGHCLVALPFLMKRTKVIEIVAARDIVFALAHSGVCAAFSRESNKRICFLNVSPDEVIRSLFYNKNNDSLITVSVYASDNFSSLKCRSTRIEYILRGQPDAGFALFESESLKWPGFVEFDDVNGKVLTYSAQDSVYKVFDLKNYTMLYSISDKNVQEIKISPGIMLLIFKRAASHVPLKILSIEDGTVLKSFNHLLHRNKKVDFIEQFNEKLLVKQENENLQILDVRNAELMEVSRAEFMTPSAFIFLYENQLFLTFRNRNVSVWNFRGELVTSFEDHLLWHPDCNTNNIYITSDQDLIISYCKADTEDQWIEGNAGSINISNILTGKCLAKITPSSGPPKDDESSSSNCMGKNSKQRRNAVAEALEDITALFYDEERNEIYTGNRHGLVHVWSN

SEQ ID NO: 45940 - protein, 407 aa, Arabidopsis thaliana
  peptide (1)..(407): Ceres Seq. ID no. 12600582
  misc_feature (118)..(147): Homolog of NCBI NO: 37535068 NR Description: hypothetical protein [Oryza sativa (japonica
  misc_feature (1)..(407): Homolog of NCBI NO: 34909262 NR Description: B1148D12.19 [Oryza sativa (japonica
  misc_feature (1)..(407): Homolog of NCBI NO: 15128395 NR Description: P0454H12.13 [Oryza sativa (japonica
  misc_feature (1)..(407): Homolog of NCBI NO: 30687585 NR Description: expressed protein [Arabidopsis thaliana]
  misc_feature (1)..(407): Homolog of NCBI NO: 25344227 NR Description: hypothetical protein At2g38630 [imported] -
  misc_feature (1)..(407): Homolog of NCBI NO: 11281174 NR Description: hypothetical protein F24B22.150 - Arabidopsis
  misc_feature (1)..(407): Homolog of NCBI NO: 18410015 NR Description: putative protein
MRLVEQYDTHDPKGHCLVALPFLMKRTKVIEIVAARDIVFALAHSGVCAAFSRESNKRICFLNVSPDEVIRSLFYNKNNDSLITVSVYASDNFSSLKCRSTRIEYILRGQPDAGFALFESESLKWPGFVEFDDVNGKVLTYSAQDSVYKVFDLKNYTMLYSISDKNVQEIKISPGIMLLIFKRAASHVPLKILSIEDGTVLKSFNHLLHRNKKVDFIEQFNEKLLVKQENENLQILDVRNAELMEVSRAEFMTPSAFIFLYENQLFLTFRNRNVSVWNFRGELVTSFEDHLLWHPDCNTNNIYITSDQDLIISYCKADTEDQWIEGNAGSINISNILTGKCLAKITPSSGPPKDDESSSSNCMGKNSKQRRNAVAEALEDITALFYDEERNEIYTGNRHGLVHVWSN

SEQ ID NO: 45941 - protein, 384 aa, Arabidopsis thaliana
  peptide (1)..(384): Ceres Seq. ID no. 12600583
  misc_feature (95)..(124): Homolog of NCBI NO: 37535068 NR Description: hypothetical protein [Oryza sativa (japonica
  misc_feature (1)..(384): Homolog of NCBI NO: 34909262 NR Description: B1148D12.19 [Oryza sativa (japonica
  misc_feature (1)..(384): Homolog of NCBI NO: 15128395 NR Description: P0454H12.13 [Oryza sativa (japonica
  misc_feature (1)..(384): Homolog of NCBI NO: 30687585 NR Description: expressed protein [Arabidopsis thaliana]
  misc_feature (1)..(384): Homolog of NCBI NO: 25344227 NR Description: hypothetical protein At2g38630 [imported] -
  misc_feature (1)..(384): Homolog of NCBI NO: 11281174 NR Description: hypothetical protein F24B22.150 - Arabidopsis
  misc_feature (1)..(384): Homolog of NCBI NO: 18410015 NR Description: putative protein
MKRTKVIEIVAARDIVFALAHSGVCAAFSRESNKRICFLNVSPDEVIRSLFYNKNNDSLITVSVYASDNFSSLKCRSTRIEYILRGQPDAGFALFESESLKWPGFVEFDDVNGKVLTYSAQDSVYKVFDLKNYTMLYSISDKNVQEIKISPGIMLLIFKRAASHVPLKILSIEDGTVLKSFNHLLHRNKKVDFIEQFNEKLLVKQENENLQILDVRNAELMEVSRAEFMTPSAFIFLYENQLFLTFRNRNVSVWNFRGELVTSFEDHLLWHPDCNTNNIYITSDQDLIISYCKADTEDQWIEGNAGSINISNILTGKCLAKITPSSGPPKDDESSSSNCMGKNSKQRRNAVAEALEDITALFYDEERNEIYTGNRHGLVHVWSN

SEQ ID NO: 45942 - DNA, 1177 bp, Arabidopsis thaliana
  misc_feature (1)..(1177): Ceres Seq. ID no. 14310000
  misc_feature: MA Experiment ID: 20000185 Result: Down-regulated in Transcription
  misc_feature: MA Experiment 20000185 PARAMETER Experiment Name: At_Roots__P Parameter: Age (day) Value: 7 vs. 21
  misc_feature: MA Experiment 20000185 PARAMETER Experiment Name: At_Roots__P Parameter: Organism Value: A. thaliana
  misc_feature: MA Experiment 20000185 PARAMETER Experiment Name: At_Roots__P Parameter: Tissue Value: Roots vs. Whole Plant
  misc_feature: MA Experiment ID: 20000213 Result: Up-regulated in Transcription
  misc_feature: MA Experiment 20000213 PARAMETER Experiment Name: At_4deg_Cold_P Parameter: Timepoint (hr) Value: 2
  misc_feature: MA Experiment ID: 20000234 Result: Down-regulated in Transcription
  misc_feature: MA Experiment 20000234 PARAMETER Experiment Name: At_Siliques_P Parameter: Age (day) Value: 21
  misc_feature: MA Experiment 20000234 PARAMETER Experiment Name: At_Siliques_P Parameter: Organism Value: A. thaliana
  misc_feature: MA Experiment 20000234 PARAMETER Experiment Name: At_Siliques_P Parameter: Plant Line Value: WS
  misc_feature: MA Experiment 20000234 PARAMETER Experiment Name: At_Siliques_P Parameter: Tissue Value: Less Than 5mm Siliques vs. Whole Plant
  misc_feature: MA Experiment ID: 20000438 Result: Up-regulated in Transcription
  misc_feature: MA Experiment 20000438 PARAMETER Experiment Name: At_Shoots__P Parameter: Age (day) Value: 14
  misc_feature: MA Experiment 20000438 PARAMETER Experiment Name: At_Shoots__P Parameter: Tissue Value: Shoots vs. Whole Plant
  misc_feature: MA Experiment ID: 20000439 Result: Down-regulated in Transcription
  misc_feature: MA Experiment 20000439 PARAMETER Experiment Name: At_Roots__P Parameter: Age (day) Value: 14 vs. 21
  misc_feature: MA Experiment 20000439 PARAMETER Experiment Name: At_Roots__P Parameter: Organism Value: A. thaliana
  misc_feature: MA Experiment 20000439 PARAMETER Experiment Name: At_Roots__P Parameter: Tissue Value: Roots vs. Whole Plant
  misc_feature: MA Experiment ID: 20000441 Result: Up-regulated in Transcription
  misc_feature: MA Experiment 20000441 PARAMETER Experiment Name: At_1uM_BR-BRZ__P Parameter: Tissue Value: Shoot Apices
  misc_feature: MA Experiment 20000441 PARAMETER Experiment Name: At_1uM_BR-BRZ__P Parameter: Treatment Value: 1uM BR vs. No Treatment
  misc_feature: MA Experiment ID: 20000443 Result: Up-regulated in Transcription
  misc_feature: MA Experiment 20000443 PARAMETER Experiment Name: At_1uM_BR-BRZ__P Parameter: Tissue Value: Shoot Apices
  misc_feature: MA Experiment 20000443 PARAMETER Experiment Name: At_1uM_BR-BRZ__P Parameter: Treatment Value: 1uM BRZ vs. No Treatment
  misc_feature: MA Experiment ID: 20000445 Result: Down-regulated in Transcription
  misc_feature: MA Experiment 20000445 PARAMETER Experiment Name: At_100uM_NAA__P Parameter: Age (day) Value: 14
  misc_feature: MA Experiment 20000445 PARAMETER Experiment Name: At_100uM_NAA__P Parameter: Organism Value: A. thaliana
  misc_feature: MA Experiment 20000445 PARAMETER Experiment Name: At_100uM_NAA__P Parameter: Plant Line Value: WS
  misc_feature: MA Experiment 20000445 PARAMETER Experiment Name: At_100uM_NAA__P Parameter: Timepoint (hr) Value: 6
  misc_feature: MA Experiment 20000445 PARAMETER Experiment Name: At_100uM_NAA__P Parameter: Tissue Value: Aerial
  misc_feature: MA Experiment 20000445 PARAMETER Experiment Name: At_100uM_NAA__P Parameter: Treatment Value: 100uM NAA vs. No Treatment
  misc_feature: MA Experiment ID: 20000527 Result: Up-regulated in Transcription
  misc_feature: MA Experiment 20000527 PARAMETER Experiment Name: At_10percent_PEG_P Parameter: Age (day) Value: 20
  misc_feature: MA Experiment 20000527 PARAMETER Experiment Name: At_10percent_PEG_P Parameter: Organism Value: A. thaliana
  misc_feature: MA Experiment 20000527 PARAMETER Experiment Name: At_10percent_PEG_P Parameter: Plant Line Value: WS
  misc_feature: MA Experiment 20000527 PARAMETER Experiment Name: At_10percent_PEG_P Parameter: Timepoint (day) Value: 20
  misc_feature: MA Experiment 20000527 PARAMETER Experiment Name: At_10percent_PEG_P Parameter: Tissue Value: Whole Plant
  misc_feature: MA Experiment 20000527 PARAMETER Experiment Name: At_10percent_PEG_P Parameter: Treatment Value: 10percent PEG vs. No Treatment
  misc_feature: MA Experiment ID: 20000794 Result: Up-regulated in Transcription
  misc_feature: MA Experiment 20000794 PARAMETER Experiment Name: At_Petals_P Parameter: Age (day) Value: 23-25 days
  misc_feature: MA Experiment 20000794 PARAMETER Experiment Name: At_Petals_P Parameter: Plant Line Value: WS
  misc_feature: MA Experiment 20000794 PARAMETER Experiment Name: At_Petals_P Parameter: Tissue Value: Petals vs. Whole plant
  misc_feature: MA Experiment ID: 20001247 Result: Down-regulated in Transcription
  misc_feature: MA Experiment 20001247 PARAMETER Experiment Name: At_Far-red-induction_P Parameter: Age (day) Value: 7
  misc_feature: MA Experiment 20001247 PARAMETER Experiment Name: At_Far-red-induction_P Parameter: Light Value: Far-red vs. White
  misc_feature: MA Experiment 20001247 PARAMETER Experiment Name: At_Far-red-induction_P Parameter: Organism Value: A. thaliana
  misc_feature: MA Experiment 20001247 PARAMETER Experiment Name: At_Far-red-induction_P Parameter: Plant Line Value: Columbia
  misc_feature: MA Experiment 20001247 PARAMETER Experiment Name: At_Far-red-induction_P Parameter: Timepoint (hr) Value: 1
  misc_feature: MA Experiment 20001247 PARAMETER Experiment Name: At_Far-red-induction_P Parameter: Tissue Value: Whole Plant
  misc_feature: MA Experiment ID: 20001248 Result: Down-regulated in Transcription
  misc_feature: MA Experiment 20001248 PARAMETER Experiment Name: At_Far-red-induction_P Parameter: Age (day) Value: 7
  misc_feature: MA Experiment 20001248 PARAMETER Experiment Name: At_Far-red-induction_P Parameter: Light Value: Far-red vs. White
  misc_feature: MA Experiment 20001248 PARAMETER Experiment Name: At_Far-red-induction_P Parameter: Organism Value: A. thaliana
  misc_feature: MA Experiment 20001248 PARAMETER Experiment Name: At_Far-red-induction_P Parameter: Plant Line Value: Columbia
  misc_feature: MA Experiment 20001248 PARAMETER Experiment Name: At_Far-red-induction_P Parameter: Timepoint (hr) Value: 4
  misc_feature: MA Experiment 20001248 PARAMETER Experiment Name: At_Far-red-induction_P Parameter: Tissue Value: Whole Plant
  misc_feature: MA Experiment ID: 20001450 Result: Down-regulated in Transcription
  misc_feature: MA Experiment 20001450 PARAMETER Experiment Name: At_Far-red-induction_P Parameter: Age (day) Value: 7
  misc_feature: MA Experiment 20001450 PARAMETER Experiment Name: At_Far-red-induction_P Parameter: Light Value: Far-red vs. White
  misc_feature: MA Experiment 20001450 PARAMETER Experiment Name: At_Far-red-induction_P Parameter: Organism Value: A. thaliana
  misc_feature: MA Experiment 20001450 PARAMETER Experiment Name: At_Far-red-induction_P Parameter: Plant Line Value: Columbia
  misc_feature: MA Experiment 20001450 PARAMETER Experiment Name: At_Far-red-induction_P Parameter: Timepoint (hr) Value: 8
  misc_feature: MA Experiment 20001450 PARAMETER Experiment Name: At_Far-red-induction_P Parameter: Tissue Value: Whole Plant
  misc_feature: MA Experiment ID: 20001451 Result: Down-regulated in Transcription
  misc_feature: MA Experiment 20001451 PARAMETER Experiment Name: At_Far-red-induction_P Parameter: Age (day) Value: 7
  misc_feature: MA Experiment 20001451 PARAMETER Experiment Name: At_Far-red-induction_P Parameter: Light Value: Far-red vs. White
  misc_feature: MA Experiment 20001451 PARAMETER Experiment Name: At_Far-red-induction_P Parameter: Organism Value: A. thaliana
  misc_feature: MA Experiment 20001451 PARAMETER Experiment Name: At_Far-red-induction_P Parameter: Plant Line Value: Columbia
  misc_feature: MA Experiment 20001451 PARAMETER Experiment Name: At_Far-red-induction_P Parameter: Timepoint (hr) Value: 24
  misc_feature: MA Experiment 20001451 PARAMETER Experiment Name: At_Far-red-induction_P Parameter: Tissue Value: Whole Plant
  misc_feature: MA Experiment ID: 20001557 Result: Down-regulated in Transcription
  misc_feature: MA Experiment 20001557 PARAMETER Experiment Name: At_Drought_Soil_Dry_P Parameter: Age (day) Value: 27
  misc_feature: MA Experiment 20001557 PARAMETER Experiment Name: At_Drought_Soil_Dry_P Parameter: Organism Value: A. thaliana
  misc_feature: MA Experiment 20001557 PARAMETER Experiment Name: At_Drought_Soil_Dry_P Parameter: Plant Line Value: WS
  misc_feature: MA Experiment 20001557 PARAMETER Experiment Name: At_Drought_Soil_Dry_P Parameter: Post Timepoint (hr) Value: 3
  misc_feature: MA Experiment 20001557 PARAMETER Experiment Name: At_Drought_Soil_Dry_P Parameter: Post-Treatment Value: Re-Water vs. No Drought
  misc_feature: MA Experiment 20001557 PARAMETER Experiment Name: At_Drought_Soil_Dry_P Parameter: Timepoint (day) Value: 13
  misc_feature: MA Experiment 20001557 PARAMETER Experiment Name: At_Drought_Soil_Dry_P Parameter: Treatment Value: Drought vs. No Drought
  misc_feature: MA Experiment ID: 20001558 Result: Down-regulated in Transcription
  misc_feature: MA Experiment 20001558 PARAMETER Experiment Name: At_Drought_Soil_Dry_P Parameter: Age (day) Value: 27
  misc_feature: MA Experiment 20001558 PARAMETER Experiment Name: At_Drought_Soil_Dry_P Parameter: Organism Value: A. thaliana
  misc_feature: MA Experiment 20001558 PARAMETER Experiment Name: At_Drought_Soil_Dry_P Parameter: Plant Line Value: WS
  misc_feature: MA Experiment 20001558 PARAMETER Experiment Name: At_Drought_Soil_Dry_P Parameter: Post Timepoint (hr) Value: 6
  misc_feature: MA Experiment 20001558 PARAMETER Experiment Name: At_Drought_Soil_Dry_P Parameter: Post-Treatment Value: Re-Water vs. No Drought
  misc_feature: MA Experiment 20001558 PARAMETER Experiment Name: At_Drought_Soil_Dry_P Parameter: Timepoint (day) Value: 13
  misc_feature: MA Experiment 20001558 PARAMETER Experiment Name: At_Drought_Soil_Dry_P Parameter: Treatment Value: Drought vs. No Drought
gctcactagtccccccccccccccccccccgctctgctccacttacctttaatcttcaatcaacggtactctcaggaacaggaatcagatcgagcaatgctcaggttaatcgttaattaccctctgattcccaagatatcccaccgggtttgtagtaacagtagtagtaagctcgggagttactatgattcttcgtcgatcataaaatatggcggaatcagcgatgttgttggtaagaagcaggagctttttctaagtgtttcggtgaaagcagtggaagacaaaggtaacaatggaggtggaagcatgagtttctcgggtcaaagctgggatcctagttccgagattgaagttccttcagaccaaagacccgtgaatgagtattcgtctctaaaggaaggaatgttgtattcatggggagaattgggtccaagcgaattctttattcgtctaggtggtctttggttggtcactttcactgttcttggagttcctgttgcagctgctagctttaatccttccagagagcctttgagatttattctagctgcagggactggaactttatttctcgtttctttgattgtcttgagaatttatctggggtggagctatgttggagatagactactttctgcagttataccttacgaagagagtggatggtatgatggacaaatgtgggtcaaaccacctgaggtgttggctcgcgacaggttgttgggttcttacaaggtgaagccagtgatcaagatgctcaaacaaacattaatcggaacaggagctttactcgtttcagcattcgtgctattcgttttcgcaacaccagtcgaggatttctttaaaaccactctaggatctacagaaaacaaccagaagtttccatttcaagaaccagcaacaagttcaatataagataagaacaattgcttcgactacccgtagatgttgtgactgacgatgatctggcagcagccgcggctgaggctgcggatggaagacctgtctattgcagagaccggtactaccgtgcattagcaggtggtcaatactgcaaatgtgaagatcttgttaaatagttgtcacactaatagaataccaacacacatactacagtatgtaatttttgcttaaaatggctttaaaagcctcatgaattatccactcattcatcact

SEQ ID NO: 45943 - protein, 272 aa, Arabidopsis thaliana
  peptide (1)..(272): Ceres Seq. ID no. 14310001
  misc_feature (82)..(239): Homolog of NCBI NO: 23123845 NR Description: hypothetical protein [Nostoc punctiforme]
  misc_feature (86)..(241): Homolog of NCBI NO: 16331827 NR Description: hypothetical protein [Synechocystis sp. PCC 6803]
  misc_feature (86)..(226): Homolog of NCBI NO: 22298607 NR Description: ORF_ID:tll1063~hypothetical protein
  misc_feature (80)..(251): Homolog of NCBI NO: 15239796 NR Description: expressed protein [Arabidopsis thaliana]
  misc_feature (81)..(224): Homolog of NCBI NO: 23040962 NR Description: hypothetical protein [Trichodesmium erythraeum
  misc_feature (84)..(225): Homolog of NCBI NO: 37520418 NR Description: hypothetical protein [Gloeobacter violaceus]
  misc_feature (86)..(241): Homolog of NCBI NO: 17231662 NR Description: hypothetical protein [Nostoc sp. PCC 7120]
  misc_feature (80)..(229): Homolog of NCBI NO: 3184557 NR Description: unknown [Synechococcus sp. PCC 7002]
  misc_feature (69)..(248): Homolog of NCBI NO: 40736997 NR Description: expressed protein [Oryza sativa (japonica
  misc_feature (1)..(258): Homolog of NCBI NO: 15240715 NR Description: expressed protein [Arabidopsis thaliana]
MLRLIVNYPLIPKISHRVCSNSSSKLGSYYDSSSIIKYGGISDVVGKKQELFLSVSVKAVEDKGNNGGGSMSFSGQSWDPSSEIEVPSDQRPVNEYSSLKEGMLYSWGELGPSEFFIRLGGLWLVTFTVLGVPVAAASFNPSREPLRFILAAGTGTLFLVSLIVLRIYLGWSYVGDRLLSAVIPYEESGWYDGQMWVKPPEVLARDRLLGSYKVKPVIKMLKQTLIGTGALLVSAFVLFVFATPVEDFFKTTLGSTENNQKFPFQEPATSSI

SEQ ID NO: 45944 - protein, 202 aa, Arabidopsis thaliana
  peptide (1)..(202): Ceres Seq. ID no. 14310002
  misc_feature (12)..(169): Homolog of NCBI NO: 23123845 NR Description: hypothetical protein [Nostoc punctiforme]
  misc_feature (16)..(171): Homolog of NCBI NO: 16331827 NR Description: hypothetical protein [Synechocystis sp. PCC 6803]
  misc_feature (16)..(156): Homolog of NCBI NO: 22298607 NR Description: ORF_ID:tll1063~hypothetical protein
  misc_feature (10)..(181): Homolog of NCBI NO: 15239796 NR Description: expressed protein [Arabidopsis thaliana]
  misc_feature (11)..(154): Homolog of NCBI NO: 23040962 NR Description: hypothetical protein [Trichodesmium erythraeum
  misc_feature (14)..(155): Homolog of NCBI NO: 37520418 NR Description: hypothetical protein [Gloeobacter violaceus]
  misc_feature (16)..(171): Homolog of NCBI NO: 17231662 NR Description: hypothetical protein [Nostoc sp. PCC 7120]
  misc_feature (10)..(159): Homolog of NCBI NO: 3184557 NR Description: unknown [Synechococcus sp. PCC 7002]
  misc_feature (1)..(178): Homolog of NCBI NO: 40736997 NR Description: expressed protein [Oryza sativa (japonica
  misc_feature (1)..(188): Homolog of NCBI NO: 15240715 NR Description: expressed protein [Arabidopsis thaliana]
MSFSGQSWDPSSEIEVPSDQRPVNEYSSLKEGMLYSWGELGPSEFFIRLGGLWLVTFTVLGVPVAAASFNPSREPLRFILAAGTGTLFLVSLIVLRIYLGWSYVGDRLLSAVIPYEESGWYDGQMWVKPPEVLARDRLLGSYKVKPVIKMLKQTLIGTGALLVSAFVLFVFATPVEDFFKTTLGSTENNQKFPFQEPATSSI

SEQ ID NO: 45945 - protein, 170 aa, Arabidopsis thaliana
  peptide (1)..(170): Ceres Seq. ID no. 14310003
  misc_feature (1)..(137): Homolog of NCBI NO: 23123845 NR Description: hypothetical protein [Nostoc punctiforme]
  misc_feature (1)..(139): Homolog of NCBI NO: 16331827 NR Description: hypothetical protein [Synechocystis sp. PCC 6803]
  misc_feature (1)..(124): Homolog of NCBI NO: 22298607 NR Description: ORF_ID:tll1063~hypothetical protein
  misc_feature (1)..(149): Homolog of NCBI NO: 15239796 NR Description: expressed protein [Arabidopsis thaliana]
  misc_feature (1)..(122): Homolog of NCBI NO: 23040962 NR Description: hypothetical protein [Trichodesmium erythraeum
  misc_feature (1)..(123): Homolog of NCBI NO: 37520418 NR Description: hypothetical protein [Gloeobacter violaceus]
  misc_feature (1)..(139): Homolog of NCBI NO: 17231662 NR Description: hypothetical protein [Nostoc sp. PCC 7120]
  misc_feature (1)..(127): Homolog of NCBI NO: 3184557 NR Description: unknown [Synechococcus sp. PCC 7002]
  misc_feature (1)..(146): Homolog of NCBI NO: 40736997 NR Description: expressed protein [Oryza sativa (japonica
  misc_feature (1)..(156): Homolog of NCBI NO: 15240715 NR Description: expressed protein [Arabidopsis thaliana]
MLYSWGELGPSEFFIRLGGLWLVTFTVLGVPVAAASFNPSREPLRFILAAGTGTLFLVSLIVLRIYLGWSYVGDRLLSAVIPYEESGWYDGQMWVKPPEVLARDRLLGSYKVKPVIKMLKQTLIGTGALLVSAFVLFVFATPVEDFFKTTLGSTENNQKFPFQEPATSSI

SEQ ID NO: 45946 - DNA, 1755 bp, Arabidopsis thaliana
  misc_feature (1)..(1755): Ceres Seq. ID no. 12601607
  misc_feature: MA Experiment ID: 20000495 Result: Down-regulated in Transcription
  misc_feature: MA Experiment 20000495 PARAMETER Experiment Name: At_Guard_Cells_P Parameter: Harvest Date Value: 8/2/2002
  misc_feature: MA Experiment 20000495 PARAMETER Experiment Name: At_Guard_Cells_P Parameter: Organism Value: A. thaliana
  misc_feature: MA Experiment 20000495 PARAMETER Experiment Name: At_Guard_Cells_P Parameter: Tissue Value: Guard Cells vs. Leaves
  misc_feature: MA Experiment ID: 20001451 Result: Down-regulated in Transcription
  misc_feature: MA Experiment 20001451 PARAMETER Experiment Name: At_Far-red-induction_P Parameter: Age (day) Value: 7
  misc_feature: MA Experiment 20001451 PARAMETER Experiment Name: At_Far-red-induction_P Parameter: Light Value: Far-red vs. White
  misc_feature: MA Experiment 20001451 PARAMETER Experiment Name: At_Far-red-induction_P Parameter: Organism Value: A. thaliana
  misc_feature: MA Experiment 20001451 PARAMETER Experiment Name: At_Far-red-induction_P Parameter: Plant Line Value: Columbia
  misc_feature: MA Experiment 20001451 PARAMETER Experiment Name: At_Far-red-induction_P Parameter: Timepoint (hr) Value: 24
  misc_feature: MA Experiment 20001451 PARAMETER Experiment Name: At_Far-red-induction_P Parameter: Tissue Value: Whole Plant
gtgactttgaagactcactcttgttcattcgtcttctccaccatggaaggtgtggctatgaaactcccgtcgttccctaacgccatctccatcggccaccggagcttctcccgcgttcgttgctcctcttcgctatccgtttgttccgccgccgccgcttcctccgccaccatctccactgattccgaatccgtctctctcggccatcgcgttcgaaaagatttccgaattctccaccaggaagtgaatgggtcaaagcttgtgtacttagacagtgctgcaacttctcagaagccagcagctgtattggacgctttgcagaattactatgagttctataattccaacgttcatcgaggaatacactatttaagtgctaaagctacagatgaatttgagttagctaggaaaaaagttgctcgtttcatcaatgcttctgatagtagagagattgtttttacaaggaatgccactgaagccatcaatcttgtagcttattcatggggtctttctaatcttaaaccaggagacgaggttatacttacagttgctgaacatcatagttgcattgttccttggcaaattgtatctcaaaaaactggagcagttctaaagtttgtgactttgaatgaggatgaagtccctgacataaacaagttgagagaattgatttctccaaagacaaagctcgtcgctgttcatcatgtttctaatgttcttgcatcttctcttcctattgaagagattgtggtatgggcacacgatgttggagcgaaagttctagtggatgcttgtcaaagtgttcctcacatggtggttgatgtccagaagcttaatgctgattttctagttgcgtcttctcacaagatgtgtggacctacaggcattgggttcttatatggtaagagtgatcttctacattccatgcctccattcttaggtggcggagaaatgatctcagatgtatttcttgaccattcaacttatgcggaacctccatccagatttgaagctggaacacctgcaataggagaagcaattgcccttggagcagcagttgattacttgtcaggaattggcatgccgaaaatccatgaatatgaggtagagattggtaagtatttgtacgagaaactgtcttccctgcctgatgtgcggatatacggtcccagaccttctgaaagtgttcacaggggtgctctttgttccttcaatgtggagggcttgcacccaactgatttggcaacctttcttgatcagcagcacggagttgcaataaggtcaggacaccactgcgcacagccactccaccggtatcttggagtgaatgcaagtgcacgcgccagcctctacttttacaacacaaaggatgacgttgacgccttcatcgttgcgctggcagacactgtgagcttcttcaactctttcaaataagtggaacaccttcctgctggatctctcggctggtttgtatggtatattgcttcagaggctacttatttaaatctgctttatatgatcaatgggagtggattttgtttcttcaagtccgaagggcaatttgtgttgtagttagcaatttgtatgaaaaaatagaccgacagtagtcatgaacaatttcaggcctctacttgatcatatttgtacgaatacacacgaaagcaaatgcttcgttgttaatttgtaagtttcataaaaaacaaactcaacatgaagaaaagttactaatatgaatcatcaaaggaaaggtttcga

SEQ ID NO: 45947 - protein, 477 aa, Arabidopsis thaliana
  peptide (1)..(477): Ceres Seq. ID no. 12601608
  misc_feature (98)..(371): Pfam Name: Aminotransferase class-V Pfam Description: Aminotransferase class-V
  misc_feature (235)..(421): Homolog of NCBI NO: 6664318 NR Description: T27G7.17 [Arabidopsis thaliana]
  misc_feature (60)..(474): Homolog of NCBI NO: 22299611 NR Description: cysteine desulfurase [Thermosynechococcus
  misc_feature (66)..(474): Homolog of NCBI NO: 16331747 NR Description: NifS protein [Synechocystis sp. PCC 6803]
  misc_feature (67)..(475): Homolog of NCBI NO: 34765746 NR Description: SufS [Synechococcus sp. PCC 7002]
  misc_feature (60)..(473): Homolog of NCBI NO: 17229987 NR Description: probable aminotransferase [Nostoc sp. PCC 7120]
  misc_feature (66)..(473): Homolog of NCBI NO: 23040580 NR Description: hypothetical protein [Trichodesmium erythraeum
  misc_feature (60)..(476): Homolog of NCBI NO: 23129616 NR Description: hypothetical protein [Nostoc punctiforme]
  misc_feature (421)..(477): Homolog of NCBI NO: 6664318 NR Description: T27G7.17 [Arabidopsis thaliana]
  misc_feature (15)..(371): Homolog of NCBI NO: 6664318 NR Description: T27G7.17 [Arabidopsis thaliana]
  misc_feature (15)..(477): Homolog of NCBI NO: 22329419 NR Description: nitrogen fixation protein (nifS), putative
VTLKTHSCSFVFSTMEGVAMKLPSFPNAISIGHRSFSRVRCSSSLSVCSAAAASSATISTDSESVSLGHRVRKDFRILHQEVNGSKLVYLDSAATSQKPAAVLDALQNYYEFYNSNVHRGIHYLSAKATDEFELARKKVARFINASDSREIVFTRNATEAINLVAYSWGLSNLKPGDEVILTVAEHHSCIVPWQIVSQKTGAVLKFVTLNEDEVPDINKLRELISPKTKLVAVHHVSNVLASSLPIEEIVVWAHDVGAKVLVDACQSVPHMVVDVQKLNADFLVASSHKMCGPTGIGFLYGKSDLLHSMPPFLGGGEMISDVFLDHSTYAEPPSRFEAGTPAIGEAIALGAAVDYLSGIGMPKIHEYEVEIGKYLYEKLSSLPDVRIYGPRPSESVHRGALCSFNVEGLHPTDLATFLDQQHGVAIRSGHHCAQPLHRYLGVNASARASLYFYNTKDDVDAFIVALADTVSFFNSFK

SEQ ID NO: 45948 - protein, 463 aa, Arabidopsis thaliana
  peptide (1)..(463): Ceres Seq. ID no. 12601609
  misc_feature (84)..(357): Pfam Name: Aminotransferase class-V Pfam Description: Aminotransferase class-V
  misc_feature (221)..(407): Homolog of NCBI NO: 6664318 NR Description: T27G7.17 [Arabidopsis thaliana]
  misc_feature (46)..(460): Homolog of NCBI NO: 22299611 NR Description: cysteine desulfurase [Thermosynechococcus
  misc_feature (52)..(460): Homolog of NCBI NO: 16331747 NR Description: NifS protein [Synechocystis sp. PCC 6803]
  misc_feature (53)..(461): Homolog of NCBI NO: 34765746 NR Description: SufS [Synechococcus sp. PCC 7002]
  misc_feature (46)..(459): Homolog of NCBI NO: 17229987 NR Description: probable aminotransferase [Nostoc sp. PCC 7120]
  misc_feature (52)..(459): Homolog of NCBI NO: 23040580 NR Description: hypothetical protein [Trichodesmium erythraeum
  misc_feature (46)..(462): Homolog of NCBI NO: 23129616 NR Description: hypothetical protein [Nostoc punctiforme]
  misc_feature (407)..(463): Homolog of NCBI NO: 6664318 NR Description: T27G7.17 [Arabidopsis thaliana]
  misc_feature (1)..(357): Homolog of NCBI NO: 6664318 NR Description: T27G7.17 [Arabidopsis thaliana]
  misc_feature (1)..(463): Homolog of NCBI NO: 22329419 NR Description: nitrogen fixation protein (nifS), putative
MEGVAMKLPSFPNAISIGHRSFSRVRCSSSLSVCSAAAASSATISTDSESVSLGHRVRKDFRILHQEVNGSKLVYLDSAATSQKPAAVLDALQNYYEFYNSNVHRGIHYLSAKATDEFELARKKVARFINASDSREIVFTRNATEAINLVAYSWGLSNLKPGDEVILTVAEHHSCIVPWQIVSQKTGAVLKFVTLNEDEVPDINKLRELISPKTKLVAVHHVSNVLASSLPIEEIVVWAHDVGAKVLVDACQSVPHMVVDVQKLNADFLVASSHKMCGPTGIGFLYGKSDLLHSMPPFLGGGEMISDVFLDHSTYAEPPSRFEAGTPAIGEAIALGAAVDYLSGIGMPKIHEYEVEIGKYLYEKLSSLPDVRIYGPRPSESVHRGALCSFNVEGLHPTDLATFLDQQHGVAIRSGHHCAQPLHRYLGVNASARASLYFYNTKDDVDAFIVALADTVSFFNSFK

SEQ ID NO: 45949 - protein, 458 aa, Arabidopsis thaliana
  peptide (1)..(458): Ceres Seq. ID no. 12601610
  misc_feature (79)..(352): Pfam Name: Aminotransferase class-V Pfam Description: Aminotransferase class-V
  misc_feature (216)..(402): Homolog of NCBI NO: 6664318 NR Description: T27G7.17 [Arabidopsis thaliana]
  misc_feature (41)..(455): Homolog of NCBI NO: 22299611 NR Description: cysteine desulfurase [Thermosynechococcus
  misc_feature (47)..(455): Homolog of NCBI NO: 16331747 NR Description: NifS protein [Synechocystis sp. PCC 6803]
  misc_feature (48)..(456): Homolog of NCBI NO: 34765746 NR Description: SufS [Synechococcus sp. PCC 7002]
  misc_feature (41)..(454): Homolog of NCBI NO: 17229987 NR Description: probable aminotransferase [Nostoc sp. PCC 7120]
  misc_feature (47)..(454): Homolog of NCBI NO: 23040580 NR Description: hypothetical protein [Trichodesmium erythraeum
  misc_feature (41)..(457): Homolog of NCBI NO: 23129616 NR Description: hypothetical protein [Nostoc punctiforme]
  misc_feature (402)..(458): Homolog of NCBI NO: 6664318 NR Description: T27G7.17 [Arabidopsis thaliana]
  misc_feature (1)..(352): Homolog of NCBI NO: 6664318 NR Description: T27G7.17 [Arabidopsis thaliana]
  misc_feature (1)..(458): Homolog of NCBI NO: 22329419 NR Description: nitrogen fixation protein (nifS), putative
MKLPSFPNAISIGHRSFSRVRCSSSLSVCSAAAASSATISTDSESVSLGHRVRKDFRILHQEVNGSKLVYLDSAATSQKPAAVLDALQNYYEFYNSNVHRGIHYLSAKATDEFELARKKVARFINASDSREIVFTRNATEAINLVAYSWGLSNLKPGDEVILTVAEHHSCIVPWQIVSQKTGAVLKFVTLNEDEVPDINKLRELISPKTKLVAVHHVSNVLASSLPIEEIVVWAHDVGAKVLVDACQSVPHMVVDVQKLNADFLVASSHKMCGPTGIGFLYGKSDLLHSMPPFLGGGEMISDVFLDHSTYAEPPSRFEAGTPAIGEAIALGAAVDYLSGIGMPKIHEYEVEIGKYLYEKLSSLPDVRIYGPRPSESVHRGALCSFNVEGLHPTDLATFLDQQHGVAIRSGHHCAQPLHRYLGVNASARASLYFYNTKDDVDAFIVALADTVSFFNSFK

SEQ ID NO: 45950 - DNA, 2362 bp, Arabidopsis thaliana
  misc_feature (1)..(2362): Ceres Seq. ID no. 12560857
  misc_feature: MA Experiment ID: 108577 Result: Down-regulated in Transcription
  misc_feature: MA Experiment 108577 PARAMETER Experiment Name: At_42deg_Heat_cDNA_P Parameter: Temperature (deg C) Value: 42 vs. 22
  misc_feature: MA Experiment 108577 PARAMETER Experiment Name: At_42deg_Heat_cDNA_P Parameter: Timepoint (hr) Value: 6
  misc_feature: MA Experiment 108577 PARAMETER Experiment Name: At_42deg_Heat_cDNA_P Parameter: Tissue Value: Aerial
  misc_feature: MA Experiment ID: 108579 Result: Down-regulated in Transcription
  misc_feature: MA Experiment 108579 PARAMETER Experiment Name: At_4deg_Cold_cDNA_P Parameter: Temperature (deg C) Value: 4 vs. 22
  misc_feature: MA Experiment 108579 PARAMETER Experiment Name: At_4deg_Cold_cDNA_P Parameter: Timepoint (hr) Value: 6
  misc_feature: MA Experiment 108579 PARAMETER Experiment Name: At_4deg_Cold_cDNA_P Parameter: Tissue Value: Aerial
  misc_feature: MA Experiment ID: 20000224 Result: Down-regulated in Transcription
  misc_feature: MA Experiment ID: 20001247 Result: Up-regulated in Transcription
  misc_feature: MA Experiment 20001247 PARAMETER Experiment Name: At_Far-red-induction_P Parameter: Age (day) Value: 7
  misc_feature: MA Experiment 20001247 PARAMETER Experiment Name: At_Far-red-induction_P Parameter: Light Value: Far-red vs. White
  misc_feature: MA Experiment 20001247 PARAMETER Experiment Name: At_Far-red-induction_P Parameter: Organism Value: A. thaliana
  misc_feature: MA Experiment 20001247 PARAMETER Experiment Name: At_Far-red-induction_P Parameter: Plant Line Value: Columbia
  misc_feature: MA Experiment 20001247 PARAMETER Experiment Name: At_Far-red-induction_P Parameter: Timepoint (hr) Value: 1
  misc_feature: MA Experiment 20001247 PARAMETER Experiment Name: At_Far-red-induction_P Parameter: Tissue Value: Whole Plant
  misc_feature: MA Experiment ID: 20001450 Result: Up-regulated in Transcription
  misc_feature: MA Experiment 20001450 PARAMETER Experiment Name: At_Far-red-induction_P Parameter: Age (day) Value: 7
  misc_feature: MA Experiment 20001450 PARAMETER Experiment Name: At_Far-red-induction_P Parameter: Light Value: Far-red vs. White
  misc_feature: MA Experiment 20001450 PARAMETER Experiment Name: At_Far-red-induction_P Parameter: Organism Value: A. thaliana
  misc_feature: MA Experiment 20001450 PARAMETER Experiment Name: At_Far-red-induction_P Parameter: Plant Line Value: Columbia
  misc_feature: MA Experiment 20001450 PARAMETER Experiment Name: At_Far-red-induction_P Parameter: Timepoint (hr) Value: 8
  misc_feature: MA Experiment 20001450 PARAMETER Experiment Name: At_Far-red-induction_P Parameter: Tissue Value: Whole Plant
  misc_feature: MA Experiment ID: 20001451 Result: Down-regulated in Transcription
  misc_feature: MA Experiment 20001451 PARAMETER Experiment Name: At_Far-red-induction_P Parameter: Age (day) Value: 7
  misc_feature: MA Experiment 20001451 PARAMETER Experiment Name: At_Far-red-induction_P Parameter: Light Value: Far-red vs. White
  misc_feature: MA Experiment 20001451 PARAMETER Experiment Name: At_Far-red-induction_P Parameter: Organism Value: A. thaliana
  misc_feature: MA Experiment 20001451 PARAMETER Experiment Name: At_Far-red-induction_P Parameter: Plant Line Value: Columbia
  misc_feature: MA Experiment 20001451 PARAMETER Experiment Name: At_Far-red-induction_P Parameter: Timepoint (hr) Value: 24
  misc_feature: MA Experiment 20001451 PARAMETER Experiment Name: At_Far-red-induction_P Parameter: Tissue Value: Whole Plant
agaagaagaagaagagaaaattttgacagagataatacacagatagagagaagagacagagacagagagtgatggaaacagctgtatttattatgagacgaaacaagaacctctgggtttctacttaaactcttctctctttcctctctcactttaaaaatccacactttagagcacacaatacaaaaaataagggtttctttatcttttcgtttcttccaaattttgtaatggatttgatgcaaatggataagcgtttggattcaacggagcaagtggttgaagaaatcatgagaattcacagatctctacccgcaagaccaggaattgacgaagttgaagctgccaagggtttgattgacaacgttgagaaagaagatcaagcttgtttagaagccattgctagacagaggaaaagctctgaagttcctggtgagcttttcatggtgttgcaagaaatgaagaagggttatgttcagtttcgtagcaaagaacagataagagaagctttgaagcttctcgatctggaatctgttcactctttgttcgatgatttcattcaaagagcttctaattgcattgcttctccttcctctaacggctctgtttcgtctcgtcctccgctgcctccggcgactacgacggctgctcgttctgattctcagtcaagtttgaatttttctgagagagctcccgttcgccccaaggatatggtttcgcgagacgatagcttcgtcacaaagtctaagccttcttctctctacagtgatggttttgcagctcctcctcgaagaccacagattctcgattcaacacttaccaccggcaatgatggagagaagctgagtttgataaaacttgctagtttgattgaggtatcagctaagaaagctacacaagagataaatctacagaacaagttaacggaacaactcgagtggcttccagattctcttggcaagttatcgagtttaacttcgcttgatttgtctgagaatcacattgtggtgttgccaaacactataggaggactttcttccttgacaaaactcgatttgcattccaacagaatcggtcagcttcctgagtctataggagaattgttgaacttggtttacctcaatcttggtagcaaccagttatcatctctgccttcagcgtttagtagattggttcgactcgaggagcttgatttgagctgtaacaacctcccgattctccctgaatccataggttcgcttgtgagtctaaagaagctcgacgttgagacaaatgatatcgaagagatcccatattctattggtggatgttcttctctgatagaactccgtgcagattataacaaactaaaggctcttccagaagctattgggaagattactacattagagatcttgtctgtgcgttacaataacatcaggcagttacctacgacgatgtcttctttagctagcctcaaagagctggatgtgagtttcaacgagctcgagtcagtgccagagagtttgtgttttgccactacacttgtgaaactgaatattggaaacaatttcgctgacatggtatcgctcccgagatcaataggcaaccttgagatgcttgaagagcttgatataagcaataatcagatccgtgttctacctgactccttcaaaatgcttacaaagttgcgtgtgtttcgtgctcaggagaatccactacacattcctcctcgtgatatagctgaaaagggccctcaggccgttgttcaatacatgaatgatcttgtggagacgagaaacgcgaaatctctaatggttaagccaaagaagagctgggtccagatgtgcttcttctcgaaatccaacaagagaaaacagagcagcatggagattgtctaacacagctgataatgtctctgaccctaaatcaggtaattctgttaaagctgttgacagcacaagtgacaaacatatccagctatcttcttcacacgacaatgcattgatttgcattgcaactccaagtactgtagatgtttcactattcattctttgtttgtttctttcttcactattcacatgtatcaatgtgcacaacattgtttcattcatgtctctccacatatcatagagcccatcccaaaacagaatcgaaccatgtcccttgtagattgaggttttcattaagctcttaccatgtttgtctatcgtctctggttttgtttctttggtttgaaacttaagacactcacatctgtgtatatggatagagatgtgatgtaaatgtgatggctttgaagtttagaggagagatgtgacatgagttggctttgaacgtggttttgtctagagagtaacttggttaattaatactcccttgt

SEQ ID NO: 45951 - protein, 549 aa, Arabidopsis thaliana
  peptide (1)..(549): Ceres Seq. ID no. 12560858
  misc_feature (339)..(361): Pfam Name: Leucine Rich Repeat Pfam Description: Leucine Rich Repeat
  misc_feature (339)..(361): Pfam Name: Leucine Rich Repeat Pfam Description: Leucine Rich Repeat
  misc_feature (209)..(497): Homolog of NCBI NO: 24216020 NR Description: Leucine-rich repeat containing protein
  misc_feature (216)..(510): Homolog of NCBI NO: 7489337 NR Description: leucine-rich protein - common sunflower
  misc_feature (206)..(509): Homolog of NCBI NO: 15239256 NR Description: putative protein; protein id: At5g05850.1
  misc_feature (233)..(527): Homolog of NCBI NO: 18391461 NR Description: expressed protein
  misc_feature (111)..(509): Homolog of NCBI NO: 30688342 NR Description: leucine rich repeat protein family [Arabidopsis
  misc_feature (209)..(497): Homolog of NCBI NO: 24216020 NR Description: Leucine-rich repeat containing protein
  misc_feature (206)..(509): Homolog of NCBI NO: 15239256 NR Description: putative protein; protein id: At5g05850.1
  misc_feature (111)..(509): Homolog of NCBI NO: 30688342 NR Description: leucine rich repeat protein family [Arabidopsis
  misc_feature (1)..(549): Homolog of NCBI NO: 15237011 NR Description: putative protein
  misc_feature (4)..(537): Homolog of NCBI NO: 20148766 NR Description: PSR9 [Brassica nigra]
  misc_feature (10)..(539): Homolog of NCBI NO: 15227838 NR Description: unknown protein; protein id: At2g17440.1
  misc_feature (12)..(548): Homolog of NCBI NO: 37537048 NR Description: putative leucine-rich repeat protein
  misc_feature (162)..(509): Homolog of NCBI NO: 22330985 NR Description: hypothetical protein
  misc_feature (233)..(527): Homolog of NCBI NO: 18391461 NR Description: expressed protein
  misc_feature (216)..(510): Homolog of NCBI NO: 7489337 NR Description: leucine-rich protein - common sunflower
  misc_feature (162)..(509): Homolog of NCBI NO: 22330985 NR Description: hypothetical protein
  misc_feature (12)..(548): Homolog of NCBI NO: 37537048 NR Description: putative leucine-rich repeat protein
  misc_feature (10)..(539): Homolog of NCBI NO: 15227838 NR Description: unknown protein; protein id: At2g17440.1
  misc_feature (4)..(537): Homolog of NCBI NO: 20148766 NR Description: PSR9 [Brassica nigra]
  misc_feature (1)..(549): Homolog of NCBI NO: 15237011 NR Description: putative protein
MDLMQMDKRLDSTEQVVEEIMRIHRSLPARPGIDEVEAAKGLIDNVEKEDQACLEAIARQRKSSEVPGELFMVLQEMKKGYVQFRSKEQIREALKLLDLESVHSLFDDFIQRASNCIASPSSNGSVSSRPPLPPATTTAARSDSQSSLNFSERAPVRPKDMVSRDDSFVTKSKPSSLYSDGFAAPPRRPQILDSTLTTGNDGEKLSLIKLASLIEVSAKKATQEINLQNKLTEQLEWLPDSLGKLSSLTSLDLSENHIVVLPNTIGGLSSLTKLDLHSNRIGQLPESIGELLNLVYLNLGSNQLSSLPSAFSRLVRLEELDLSCNNLPILPESIGSLVSLKKLDVETNDIEEIPYSIGGCSSLIELRADYNKLKALPEAIGKITTLEILSVRYNNIRQLPTTMSSLASLKELDVSFNELESVPESLCFATTLVKLNIGNNFADMVSLPRSIGNLEMLEELDISNNQIRVLPDSFKMLTKLRVFRAQENPLHIPPRDIAEKGPQAVVQYMNDLVETRNAKSLMVKPKKSWVQMCFFSKSNKRKQSSMEIV

SEQ ID NO: 45952 - protein, 546 aa, Arabidopsis thaliana
  peptide (1)..(546): Ceres Seq. ID no. 12560859
  misc_feature (336)..(358): Pfam Name: Leucine Rich Repeat Pfam Description: Leucine Rich Repeat
  misc_feature (336)..(358): Pfam Name: Leucine Rich Repeat Pfam Description: Leucine Rich Repeat
  misc_feature (206)..(494): Homolog of NCBI NO: 24216020 NR Description: Leucine-rich repeat containing protein
  misc_feature (213)..(507): Homolog of NCBI NO: 7489337 NR Description: leucine-rich protein - common sunflower
  misc_feature (203)..(506): Homolog of NCBI NO: 15239256 NR Description: putative protein; protein id: At5g05850.1
  misc_feature (230)..(524): Homolog of NCBI NO: 18391461 NR Description: expressed protein
  misc_feature (108)..(506): Homolog of NCBI NO: 30688342 NR Description: leucine rich repeat protein family [Arabidopsis
  misc_feature (206)..(494): Homolog of NCBI NO: 24216020 NR Description: Leucine-rich repeat containing protein
  misc_feature (203)..(506): Homolog of NCBI NO: 15239256 NR Description: putative protein; protein id: At5g05850.1
  misc_feature (108)..(506): Homolog of NCBI NO: 30688342 NR Description: leucine rich repeat protein family [Arabidopsis
  misc_feature (1)..(546): Homolog of NCBI NO: 15237011 NR Description: putative protein
  misc_feature (1)..(534): Homolog of NCBI NO: 20148766 NR Description: PSR9 [Brassica nigra]
  misc_feature (7)..(536): Homolog of NCBI NO: 15227838 NR Description: unknown protein; protein id: At2g17440.1
  misc_feature (9)..(545): Homolog of NCBI NO: 37537048 NR Description: putative leucine-rich repeat protein
  misc_feature (159)..(506): Homolog of NCBI NO: 22330985 NR Description: hypothetical protein
  misc_feature (230)..(524): Homolog of NCBI NO: 18391461 NR Description: expressed protein
  misc_feature (213)..(507): Homolog of NCBI NO: 7489337 NR Description: leucine-rich protein - common sunflower
  misc_feature (159)..(506): Homolog of NCBI NO: 22330985 NR Description: hypothetical protein
  misc_feature (9)..(545): Homolog of NCBI NO: 37537048 NR Description: putative leucine-rich repeat protein
  misc_feature (7)..(536): Homolog of NCBI NO: 15227838 NR Description: unknown protein; protein id: At2g17440.1
  misc_feature (1)..(534): Homolog of NCBI NO: 20148766 NR Description: PSR9 [Brassica nigra]
  misc_feature (1)..(546): Homolog of NCBI NO: 15237011 NR Description: putative protein
MQMDKRLDSTEQVVEEIMRIHRSLPARPGIDEVEAAKGLIDNVEKEDQACLEAIARQRKSSEVPGELFMVLQEMKKGYVQFRSKEQIREALKLLDLESVHSLFDDFIQRASNCIASPSSNGSVSSRPPLPPATTTAARSDSQSSLNFSERAPVRPKDMVSRDDSFVTKSKPSSLYSDGFAAPPRRPQILDSTLTTGNDGEKLSLIKLASLIEVSAKKATQEINLQNKLTEQLEWLPDSLGKLSSLTSLDLSENHIVVLPNTIGGLSSLTKLDLHSNRIGQLPESIGELLNLVYLNLGSNQLSSLPSAFSRLVRLEELDLSCNNLPILPESIGSLVSLKKLDVETNDIEEIPYSIGGCSSLIELRADYNKLKALPEAIGKITTLEILSVRYNNIRQLPTTMSSLASLKELDVSFNELESVPESLCFATTLVKLNIGNNFADMVSLPRSIGNLEMLEELDISNNQIRVLPDSFKMLTKLRVFRAQENPLHIPPRDIAEKGPQAVVQYMNDLVETRNAKSLMVKPKKSWVQMCFFSKSNKRKQSSMEIV

SEQ ID NO: 45953 - protein, 544 aa, Arabidopsis thaliana
  peptide (1)..(544): Ceres Seq. ID no. 12560860
  misc_feature (334)..(356): Pfam Name: Leucine Rich Repeat Pfam Description: Leucine Rich Repeat
  misc_feature (334)..(356): Pfam Name: Leucine Rich Repeat Pfam Description: Leucine Rich Repeat
  misc_feature (204)..(492): Homolog of NCBI NO: 24216020 NR Description: Leucine-rich repeat containing protein
  misc_feature (211)..(505): Homolog of NCBI NO: 7489337 NR Description: leucine-rich protein - common sunflower
  misc_feature (201)..(504): Homolog of NCBI NO: 15239256 NR Description: putative protein; protein id: At5g05850.1
  misc_feature (228)..(522): Homolog of NCBI NO: 18391461 NR Description: expressed protein
  misc_feature (106)..(504): Homolog of NCBI NO: 30688342 NR Description: leucine rich repeat protein family [Arabidopsis
  misc_feature (204)..(492): Homolog of NCBI NO: 24216020 NR Description: Leucine-rich repeat containing protein
  misc_feature (201)..(504): Homolog of NCBI NO: 15239256 NR Description: putative protein; protein id: At5g05850.1
  misc_feature (106)..(504): Homolog of NCBI NO: 30688342 NR Description: leucine rich repeat protein family [Arabidopsis
  misc_feature (1)..(544): Homolog of NCBI NO: 15237011 NR Description: putative protein
  misc_feature (1)..(532): Homolog of NCBI NO: 20148766 NR Description: PSR9 [Brassica nigra]
  misc_feature (5)..(534): Homolog of NCBI NO: 15227838 NR Description: unknown protein; protein id: At2g17440.1
  misc_feature (7)..(543): Homolog of NCBI NO: 37537048 NR Description: putative leucine-rich repeat protein
  misc_feature (157)..(504): Homolog of NCBI NO: 22330985 NR Description: hypothetical protein
  misc_feature (228)..(522): Homolog of NCBI NO: 18391461 NR Description: expressed protein
  misc_feature (211)..(505): Homolog of NCBI NO: 7489337 NR Description: leucine-rich protein - common sunflower
  misc_feature (157)..(504): Homolog of NCBI NO: 22330985 NR Description: hypothetical protein
  misc_feature (7)..(543): Homolog of NCBI NO: 37537048 NR Description: putative leucine-rich repeat protein
  misc_feature (5)..(534): Homolog of NCBI NO: 15227838 NR Description: unknown protein; protein id: At2g17440.1
  misc_feature (1)..(532): Homolog of NCBI NO: 20148766 NR Description: PSR9 [Brassica nigra]
  misc_feature (1)..(544): Homolog of NCBI NO: 15237011 NR Description: putative protein
MDKRLDSTEQVVEEIMRIHRSLPARPGIDEVEAAKGLIDNVEKEDQACLEAIARQRKSSEVPGELFMVLQEMKKGYVQFRSKEQIREALKLLDLESVHSLFDDFIQRASNCIASPSSNGSVSSRPPLPPATTTAARSDSQSSLNFSERAPVRPKDMVSRDDSFVTKSKPSSLYSDGFAAPPRRPQILDSTLTTGNDGEKLSLIKLASLIEVSAKKATQEINLQNKLTEQLEWLPDSLGKLSSLTSLDLSENHIVVLPNTIGGLSSLTKLDLHSNRIGQLPESIGELLNLVYLNLGSNQLSSLPSAFSRLVRLEELDLSCNNLPILPESIGSLVSLKKLDVETNDIEEIPYSIGGCSSLIELRADYNKLKALPEAIGKITTLEILSVRYNNIRQLPTTMSSLASLKELDVSFNELESVPESLCFATTLVKLNIGNNFADMVSLPRSIGNLEMLEELDISNNQIRVLPDSFKMLTKLRVFRAQENPLHIPPRDIAEKGPQAVVQYMNDLVETRNAKSLMVKPKKSWVQMCFFSKSNKRKQSSMEIV

SEQ ID NO: 45954 - DNA, 3438 bp, Arabidopsis thaliana
  misc_feature (1)..(3438): Ceres Seq. ID no. 13576079
  misc_feature: MA Experiment ID: 20000307 Result: Up-regulated in Transcription
  misc_feature: MA Experiment 20000307 PARAMETER Experiment Name: At_Germinating_Seeds_Sub_P Parameter: Age (hr) Value: 24 vs. 0
  misc_feature: MA Experiment 20000307 PARAMETER Experiment Name: At_Germinating_Seeds_Sub_P Parameter: Organism Value: A. thaliana
  misc_feature: MA Experiment 20000307 PARAMETER Experiment Name: At_Germinating_Seeds_Sub_P Parameter: Plant Line Value: WS
  misc_feature: MA Experiment 20000307 PARAMETER Experiment Name: At_Germinating_Seeds_Sub_P Parameter: Tissue Value: Germinating Seeds
  misc_feature: MA Experiment ID: 20000349 Result: Up-regulated in Transcription
  misc_feature: MA Experiment 20000349 PARAMETER Experiment Name: At_100uM_ABA_Sub_P Parameter: Age (day) Value: 14
  misc_feature: MA Experiment 20000349 PARAMETER Experiment Name: At_100uM_ABA_Sub_P Parameter: Organism Value: A. thaliana
  misc_feature: MA Experiment 20000349 PARAMETER Experiment Name: At_100uM_ABA_Sub_P Parameter: Plant Line Value: WS
  misc_feature: MA Experiment 20000349 PARAMETER Experiment Name: At_100uM_ABA_Sub_P Parameter: Timepoint (hr) Value: 6
  misc_feature: MA Experiment 20000349 PARAMETER Experiment Name: At_100uM_ABA_Sub_P Parameter: Tissue Value: Aerial
  misc_feature: MA Experiment 20000349 PARAMETER Experiment Name: At_100uM_ABA_Sub_P Parameter: Treatment Value: 100uM ABA vs. No Treatment
atggcatctaataagcattttgataaaagtcgatcaaatctatcaaacaactctgatattcaggagcctggaaggccacctgctggtcactctgtcaaatttgctcaaagaacttcctcgggtcgctatatcaattactcgagggacgatcttgatagcgagttgggcggtcaagatttcatgagctatacagttcacattcctcccactccagataaccagccaatggacccttccatttctcagaaagttgaggagcaatatgtcgctaactccatgttcactggcggtttcaagagcaacaccagggctcaccttatgcacaaagttattgagacagagcctaaccatccacaaatggctggctctaaaggatcgtcttgcgcgatccctggctgtgatgctaaggttatgagcgatgagagaggtcaagaccttcttccttgtgaatgtgactttaaaatttgtagggattgcttcatagatgctgtcaaaaccggaggtgggatttgccccgggtgtaaagaaccgtacaagaacacgcatttgaccgatcaggttgatgaaaacggtcagcaaaggcctatgctgcctgggggtggcgggtcaaagatggagagaagattgtcgatggtgaagtcaactaataaatcagctttgatgaggagtcagactggagattttgatcacaacaggtggttatttgagacgactggaacttatggttatgggaatgctttttggacaaaggacggggatttcgggagcggtaaggatggagatggagatggtgacggtatgggtatggaggcccaagatttgatgagcagaccgtggagaccgcttactcggaagctgaaaattcctgctggtgttattagtccatacaggcttttgatatttatccgtatagttgttcttgcattgttcttgacttggagggttaaacatcaaaacccagacgctgtatggttatggggaatgtctgtggtttgtgagctatggtttgccttgtcttggcttcttgatcagctccctaagctatgcccgattaatcgtgccaccgatcttcaagtcttgaaggaaaagtttgaaacaccgacagccagcaacccgaccggcaaatccgaccttcctggattcgatgtctttgtctctactgcggatccggagaaagaacctcctctggtcactgctaataccattttatctattcttgctgcggaatatcctgttgagaagctttcttgctatgtatctgatgatggaggggcgcttcttacgtttgaagcaatggctgaagctgctagctttgccaacatttgggttcctttttgtcgtaaacatgcgatcgagccgaggaatcctgattcctactttagcttaaagagagatccttacaagaacaaagtgaagtctgatttcgtgaaggatcgtagacgggttaagcgtgagtttgatgagtttaaagtcagggttaacagcttgcctgattctatcaggcgacgttctgatgcttatcatgccagagaagaaatcaaagccatgaagatgcagaggcagaacagggacgatgagcctatggagcccgtgaagattcctaaagctacatggatggctgatggtactcactggcctggaacttggttgacttctgccagtgatcatgccaagggagaccacgcgggtatcattcaggtgatgttgaagccacctagtgatgaaccactacacggagtatccgaagggtttcttgatctaaccgacgtggacattcgactcccgctccttgtgtatgtttctcgtgagaagcgacctggttatgatcataacaagaaggctggagccatgaacgccttagtcagagcttctgcgattatgtcaaatggaccgttcatactcaatcttgactgtgatcattacatatacaactctgaggctctgagagaaggcatgtgtttcatgatggatagaggcggggatcgtctttgctacgttcagtttccgcagcggtttgaaggtattgacccatctgatagatatgctaatcacaacactgtcttctttgacgtcaacatgagagctcttgatgggcttatgggtccggtttatgtcggaaccggttgtctcttccgaagaatcgcgctttatggattcaatccgcctcgaagcaaggacttttccccaagttgctggagttgttgtttccctcgtagcaagaagaagaatattcctgaagaaaaccgagctctgcgtatgagtgattatgatgacgaagagatgaatctctctctagtcccgaagaagttcggtaactcaacattcctcattgattcaattcccgttgctgagttccaaggccggcctctcgcggaccaccctgcggttaaaaacgggcgtccaccgggtgcactcaccattcctcgagaacttcttgatgcatcgactgtagcagaagccattgctgttatctcttgctggtacgaggataaaactgagtggggatcacgtatcggatggatttacggttcagtcactgaagatgttgtcacaggttatagaatgcataaccgaggctggaaatcggtttactgtgtgacgaaacgggatgctttccgtggcacagctcctattaacttgacggataggcttcaccaggttctccgttgggctactggctcggtggagatctttttctcccgtaacaacgctcttctcgcaagctcgaaaatgaaaatactccagagaattgcctacttaaacgtcggtatctacccgttcacatcgatcttcctcatcgtatactgtttcctaccagcgctctccctcttctctggtcagttcatcgtccagacgctcaacgtcactttcctagtctaccttctcatcatctccatcactctctgcttactggccctcctcgagatcaaatggtcaggaatctcactcgaggaatggtggagaaacgaacagttttggctcattggaggaacaagtgctcatctcgcagctgtgcttcaaggtttgctcaaagttgtagcaggagtcgaaatctccttcacgctcacgagtaaatccggaggagatgatatagacgacgagtttgcggatttgtacatggtgaaatggacttcacttatgatccctccgattaccatcattatggtgaatctgatagcgattgcggttggattcagcaggacgatttacagtgtggttcctcagtggagtaaactgattggaggagtgttcttcagtttttgggttttggcacatctttatccatttgctaaaggtctaatgggaagaagaggaagaacaccaacgattgtgtatgtttggtctggtcttgtggccattaccatttctcttctttgggtcgccattaatccaccggctggtaatactgagatcggaggaaacttcagttttccatga

SEQ ID NO: 45955 - protein, 1145 aa, Arabidopsis thaliana
  peptide (1)..(1145): Ceres Seq. ID no. 13576080
  misc_feature (532)..(1143): Homolog of NCBI NO: 15236786 NR Description: cellulose synthase, catalytic subunit, putative
  misc_feature (532)..(1144): Homolog of NCBI NO: 15224746 NR Description: cellulose synthase, catalytic subunit, putative
  misc_feature (973)..(1137): Homolog of NCBI NO: 7484860 NR Description: cellulose synthase (EC 2.4.1.-) catalytic chain
  misc_feature (286)..(496): Homolog of NCBI NO: 7484860 NR Description: cellulose synthase (EC 2.4.1.-) catalytic chain
  misc_feature (560)..(1032): Homolog of NCBI NO: 7484860 NR Description: cellulose synthase (EC 2.4.1.-) catalytic chain
  misc_feature (121)..(179): Homolog of NCBI NO: 34394962 NR Description: putative cellulose synthase-8
  misc_feature (167)..(496): Homolog of NCBI NO: 34394962 NR Description: putative cellulose synthase-8
  misc_feature (532)..(1131): Homolog of NCBI NO: 34394962 NR Description: putative cellulose synthase-8
  misc_feature (50)..(722): Homolog of NCBI NO: 28973666 NR Description: unknown protein [Arabidopsis thaliana]
  misc_feature (28)..(722): Homolog of NCBI NO: 15233733 NR Description: cellulose synthase family [Arabidopsis thaliana]
MASNKHFDKSRSNLSNNSDIQEPGRPPAGHSVKFAQRTSSGRYINYSRDDLDSELGGQDFMSYTVHIPPTPDNQPMDPSISQKVEEQYVANSMFTGGFKSNTRAHLMHKVIETEPNHPQMAGSKGSSCAIPGCDAKVMSDERGQDLLPCECDFKICRDCFIDAVKTGGGICPGCKEPYKNTHLTDQVDENGQQRPMLPGGGGSKMERRLSMVKSTNKSALMRSQTGDFDHNRWLFETTGTYGYGNAFWTKDGDFGSGKDGDGDGDGMGMEAQDLMSRPWRPLTRKLKIPAGVISPYRLLIFIRIVVLALFLTWRVKHQNPDAVWLWGMSVVCELWFALSWLLDQLPKLCPINRATDLQVLKEKFETPTASNPTGKSDLPGFDVFVSTADPEKEPPLVTANTILSILAAEYPVEKLSCYVSDDGGALLTFEAMAEAASFANIWVPFCRKHAIEPRNPDSYFSLKRDPYKNKVKSDFVKDRRRVKREFDEFKVRVNSLPDSIRRRSDAYHAREEIKAMKMQRQNRDDEPMEPVKIPKATWMADGTHWPGTWLTSASDHAKGDHAGIIQVMLKPPSDEPLHGVSEGFLDLTDVDIRLPLLVYVSREKRPGYDHNKKAGAMNALVRASAIMSNGPFILNLDCDHYIYNSEALREGMCFMMDRGGDRLCYVQFPQRFEGIDPSDRYANHNTVFFDVNMRALDGLMGPVYVGTGCLFRRIALYGFNPPRSKDFSPSCWSCCFPRSKKKNIPEENRALRMSDYDDEEMNLSLVPKKFGNSTFLIDSIPVAEFQGRPLADHPAVKNGRPPGALTIPRELLDASTVAEAIAVISCWYEDKTEWGSRIGWIYGSVTEDVVTGYRMHNRGWKSVYCVTKRDAFRGTAPINLTDRLHQVLRWATGSVEIFFSRNNALLASSKMKILQRIAYLNVGIYPFTSIFLIVYCFLPALSLFSGQFIVQTLNVTFLVYLLIISITLCLLALLEIKWSGISLEEWWRNEQFWLIGGTSAHLAAVLQGLLKVVAGVEISFTLTSKSGGDDIDDEFADLYMVKWTSLMIPPITIIMVNLIAIAVGFSRTIYSVVPQWSKLIGGVFFSFWVLAHLYPFAKGLMGRRGRTPTIVYVWSGLVAITISLLWVAINPPAGNTEIGGNFSFP

SEQ ID NO: 45956 - protein, 1085 aa, Arabidopsis thaliana
  peptide (1)..(1085): Ceres Seq. ID no. 13576081
  misc_feature (472)..(1083): Homolog of NCBI NO: 15236786 NR Description: cellulose synthase, catalytic subunit, putative
  misc_feature (472)..(1084): Homolog of NCBI NO: 15224746 NR Description: cellulose synthase, catalytic subunit, putative
  misc_feature (913)..(1077): Homolog of NCBI NO: 7484860 NR Description: cellulose synthase (EC 2.4.1.-) catalytic chain
  misc_feature (226)..(436): Homolog of NCBI NO: 7484860 NR Description: cellulose synthase (EC 2.4.1.-) catalytic chain
  misc_feature (500)..(972): Homolog of NCBI NO: 7484860 NR Description: cellulose synthase (EC 2.4.1.-) catalytic chain
  misc_feature (61)..(119): Homolog of NCBI NO: 34394962 NR Description: putative cellulose synthase-8
  misc_feature (107)..(436): Homolog of NCBI NO: 34394962 NR Description: putative cellulose synthase-8
  misc_feature (472)..(1071): Homolog of NCBI NO: 34394962 NR Description: putative cellulose synthase-8
  misc_feature (1)..(662): Homolog of NCBI NO: 28973666 NR Description: unknown protein [Arabidopsis thaliana]
  misc_feature (1)..(662): Homolog of NCBI NO: 15233733 NR Description: cellulose synthase family [Arabidopsis thaliana]
MSYTVHIPPTPDNQPMDPSISQKVEEQYVANSMFTGGFKSNTRAHLMHKVIETEPNHPQMAGSKGSSCAIPGCDAKVMSDERGQDLLPCECDFKICRDCFIDAVKTGGGICPGCKEPYKNTHLTDQVDENGQQRPMLPGGGGSKMERRLSMVKSTNKSALMRSQTGDFDHNRWLFETTGTYGYGNAFWTKDGDFGSGKDGDGDGDGMGMEAQDLMSRPWRPLTRKLKIPAGVISPYRLLIFIRIVVLALFLTWRVKHQNPDAVWLWGMSVVCELWFALSWLLDQLPKLCPINRATDLQVLKEKFETPTASNPTGKSDLPGFDVFVSTADPEKEPPLVTANTILSILAAEYPVEKLSCYVSDDGGALLTFEAMAEAASFANIWVPFCRKHAIEPRNPDSYFSLKRDPYKNKVKSDFVKDRRRVKREFDEFKVRVNSLPDSIRRRSDAYHAREEIKAMKMQRQNRDDEPMEPVKIPKATWMADGTHWPGTWLTSASDHAKGDHAGIIQVMLKPPSDEPLHGVSEGFLDLTDVDIRLPLLVYVSREKRPGYDHNKKAGAMNALVRASAIMSNGPFILNLDCDHYIYNSEALREGMCFMMDRGGDRLCYVQFPQRFEGIDPSDRYANHNTVFFDVNMRALDGLMGPVYVGTGCLFRRIALYGFNPPRSKDFSPSCWSCCFPRSKKKNIPEENRALRMSDYDDEEMNLSLVPKKFGNSTFLIDSIPVAEFQGRPLADHPAVKNGRPPGALTIPRELLDASTVAEAIAVISCWYEDKTEWGSRIGWIYGSVTEDVVTGYRMHNRGWKSVYCVTKRDAFRGTAPINLTDRLHQVLRWATGSVEIFFSRNNALLASSKMKILQRIAYLNVGIYPFTSIFLIVYCFLPALSLFSGQFIVQTLNVTFLVYLLIISITLCLLALLEIKWSGISLEEWWRNEQFWLIGGTSAHLAAVLQGLLKVVAGVEISFTLTSKSGGDDIDDEFADLYMVKWTSLMIPPITIIMVNLIAIAVGFSRTIYSVVPQWSKLIGGVFFSFWVLAHLYPFAKGLMGRRGRTPTIVYVWSGLVAITISLLWVAINPPAGNTEIGGNFSFP

SEQ ID NO: 45957 - protein, 1070 aa, Arabidopsis thaliana
  peptide (1)..(1070): Ceres Seq. ID no. 13576082
  misc_feature (457)..(1068): Homolog of NCBI NO: 15236786 NR Description: cellulose synthase, catalytic subunit, putative
  misc_feature (457)..(1069): Homolog of NCBI NO: 15224746 NR Description: cellulose synthase, catalytic subunit, putative
  misc_feature (898)..(1062): Homolog of NCBI NO: 7484860 NR Description: cellulose synthase (EC 2.4.1.-) catalytic chain
  misc_feature (211)..(421): Homolog of NCBI NO: 7484860 NR Description: cellulose synthase (EC 2.4.1.-) catalytic chain
  misc_feature (485)..(957): Homolog of NCBI NO: 7484860 NR Description: cellulose synthase (EC 2.4.1.-) catalytic chain
  misc_feature (46)..(104): Homolog of NCBI NO: 34394962 NR Description: putative cellulose synthase-8
  misc_feature (92)..(421): Homolog of NCBI NO: 34394962 NR Description: putative cellulose synthase-8
  misc_feature (457)..(1056): Homolog of NCBI NO: 34394962 NR Description: putative cellulose synthase-8
  misc_feature (1)..(647): Homolog of NCBI NO: 28973666 NR Description: unknown protein [Arabidopsis thaliana]
  misc_feature (1)..(647): Homolog of NCBI NO: 15233733 NR Description: cellulose synthase family [Arabidopsis thaliana]
MDPSISQKVEEQYVANSMFTGGFKSNTRAHLMHKVIETEPNHPQMAGSKGSSCAIPGCDAKVMSDERGQDLLPCECDFKICRDCFIDAVKTGGGICPGCKEPYKNTHLTDQVDENGQQRPMLPGGGGSKMERRLSMVKSTNKSALMRSQTGDFDHNRWLFETTGTYGYGNAFWTKDGDFGSGKDGDGDGDGMGMEAQDLMSRPWRPLTRKLKIPAGVISPYRLLIFIRIVVLALFLTWRVKHQNPDAVWLWGMSVVCELWFALSWLLDQLPKLCPINRATDLQVLKEKFETPTASNPTGKSDLPGFDVFVSTADPEKEPPLVTANTILSILAAEYPVEKLSCYVSDDGGALLTFEAMAEAASFANIWVPFCRKHAIEPRNPDSYFSLKRDPYKNKVKSDFVKDRRRVKREFDEFKVRVNSLPDSIRRRSDAYHAREEIKAMKMQRQNRDDEPMEPVKIPKATWMADGTHWPGTWLTSASDHAKGDHAGIIQVMLKPPSDEPLHGVSEGFLDLTDVDIRLPLLVYVSREKRPGYDHNKKAGAMNALVRASAIMSNGPFILNLDCDHYIYNSEALREGMCFMMDRGGDRLCYVQFPQRFEGIDPSDRYANHNTVFFDVNMRALDGLMGPVYVGTGCLFRRIALYGFNPPRSKDFSPSCWSCCFPRSKKKNIPEENRALRMSDYDDEEMNLSLVPKKFGNSTFLIDSIPVAEFQGRPLADHPAVKNGRPPGALTIPRELLDASTVAEAIAVISCWYEDKTEWGSRIGWIYGSVTEDVVTGYRMHNRGWKSVYCVTKRDAFRGTAPINLTDRLHQVLRWATGSVEIFFSRNNALLASSKMKILQRIAYLNVGIYPFTSIFLIVYCFLPALSLFSGQFIVQTLNVTFLVYLLIISITLCLLALLEIKWSGISLEEWWRNEQFWLIGGTSAHLAAVLQGLLKVVAGVEISFTLTSKSGGDDIDDEFADLYMVKWTSLMIPPITIIMVNLIAIAVGFSRTIYSVVPQWSKLIGGVFFSFWVLAHLYPFAKGLMGRRGRTPTIVYVWSGLVAITISLLWVAINPPAGNTEIGGNFSFP

SEQ ID NO: 45958 - DNA, 2131 bp, Arabidopsis thaliana
  misc_feature (1)..(2131): Ceres Seq. ID no. 12600445
  misc_feature: MA Experiment ID: 20000179 Result: Up-regulated in Transcription
  misc_feature: MA Experiment 20000179 PARAMETER Experiment Name: At_Germinating_Seeds_P Parameter: Age (hr) Value: 6 vs. 0
  misc_feature: MA Experiment 20000179 PARAMETER Experiment Name: At_Germinating_Seeds_P Parameter: Tissue Value: Germinating Seeds
  misc_feature: MA Experiment ID: 20000234 Result: Up-regulated in Transcription
  misc_feature: MA Experiment 20000234 PARAMETER Experiment Name: At_Siliques_P Parameter: Age (day) Value: 21
  misc_feature: MA Experiment 20000234 PARAMETER Experiment Name: At_Siliques_P Parameter: Organism Value: A. thaliana
  misc_feature: MA Experiment 20000234 PARAMETER Experiment Name: At_Siliques_P Parameter: Plant Line Value: WS
  misc_feature: MA Experiment 20000234 PARAMETER Experiment Name: At_Siliques_P Parameter: Tissue Value: Less Than 5mm Siliques vs. Whole Plant
  misc_feature: MA Experiment ID: 20000286 Result: Up-regulated in Transcription
  misc_feature: MA Experiment 20000286 PARAMETER Experiment Name: At_Open_Flower_P Parameter: Age (day) Value: 21
  misc_feature: MA Experiment 20000286 PARAMETER Experiment Name: At_Open_Flower_P Parameter: Plant Line Value: WS
  misc_feature: MA Experiment 20000286 PARAMETER Experiment Name: At_Open_Flower_P Parameter: Tissue Value: Half Open vs. Whole Plant
  misc_feature: MA Experiment ID: 20000439 Result: Up-regulated in Transcription
  misc_feature: MA Experiment 20000439 PARAMETER Experiment Name: At_Roots__P Parameter: Age (day) Value: 14 vs. 21
  misc_feature: MA Experiment 20000439 PARAMETER Experiment Name: At_Roots__P Parameter: Organism Value: A. thaliana
  misc_feature: MA Experiment 20000439 PARAMETER Experiment Name: At_Roots__P Parameter: Tissue Value: Roots vs. Whole Plant
gaggttctgaagaagaagactctctcccagcagatttagagcgtgtgagggagataggaagagagaaagtgagcgagagacgatcacggccgcgctgaaatccacgaccacggccgctctgaagaagaagactctctccgtctcctcccttctcctcctccgtctaagagacaaggcatccccagacgccatgatctctctcactccctcgttgtttctgaacaagacggttgttcctggatgttccacacgcctctctctgcgccagcctagaactataattactcctcctgcttccttgagagtcttttcctctctcggatctaaccaggatcccaccggcagcgttttgattgagaccactgccacttcatcctcctctctcgagacctccgccgccgacattgttcccaaatccaccgtatctggtggagttcaggatgtctacggcgaggatgccgccaccgaggacatgcctatcactccttggtctctctctgtcgccagtgggtatacgttgttgcgtgatccacatcacaacaaaggccttgcctttagccacagagagcgtgacgctcactatctacgcggcctcctcccccccactgttatctcacaagatcttcaggttaaaaaaattatgcacactcttcgtcagtatcaagttcccttgcagaagtatatggctatgatggatctccaggagaccaacgagaggctgttttacaaacttctcattgatcacgtcgaggagttgctacccgttatctacactccaacggttggggaagcctgccagaagtatggtagcattttcctgcgtccacaggggctttttatcagcttgaaagaaaaaggtaagattcatgaagtgctgaggaactggcctgagaagaacatccaggtcattgttgtcactgatggggagcgcattttagggttaggagatcttggatgtcagggaatgggaatacctgttgggaaactttctctctacacagcccttggaggtgtccggccatctgcctgtctgcccgtaacaatcgatgttgggacaaacaacgaaaagctattgaacgatgagttctacatagggctccgccaaaggagagctacaggagaggaatactccgaacttatgcatgaattcatgacagcagtcaagcagaactatggggagaaagtcgttattcagtttgaagactttgccaaccataatgcttttgatctgttagctaagtatggtacaacacatcttgttttcaatgacgatattcagggcacagcatcagttgtgcttgctggacttatcgctgctcttagatttgtggggggatccttgtcagaccacagattcctcttcctcggggctggagaggctggcactggaatagctgaactaattgctcttgagatttcaaagaagtcccatattccattggaagaggctcggaagaatatttggctcgtggattcaaagggattgattgtcagttcccggaaagaatccattcaacatttcaaaaagccctgggctcatgaccatgaaccaataagggaacttgttgatgccgtcaaggcaatcaagccgacagttctgatcggaacatcaggtgtaggtcaaacattcactcaagacgtggtggaaaccatggcaaagctaaatgagaaacccatcattctttctctttcgaacccaacttctcagtcagaatgtacggcagaagaggcctatacgtggagtcagggacgggcgatctttgcaagtggaagcccatttgcgccagtagagtatgagggaaagacgtttgtgcctggacaggcaaacaacgcatacatcttccctgggtttggactcgggctaataatgtcagggacgatccgtgtccatgatgacatgcttctggcagcatcagaagctttggctgaggaactgatggaggaacactatgagaaggggatgatataccctcccttcaggaatatcagaaaaatctcagctcgtattgcagctaaggtggctgccaaggcctacgaactgggactggccacgaggttgcctcagcccaaggagctggagcagtgtgctgagagcagcatgtacagcccttcgtatcgaagctaccgctga

SEQ ID NO: 45959 - protein, 646 aa, Arabidopsis thaliana
  peptide (1)..(646): Ceres Seq. ID no. 12600446
  misc_feature (362)..(615): Pfam Name: Malic enzyme, NAD binding domain Pfam Description: Malic enzyme, NAD binding domain
  misc_feature (362)..(615): Pfam Name: Malic enzyme, NAD binding domain Pfam Description: Malic enzyme, NAD binding domain
  misc_feature (90)..(646): Homolog of NCBI NO: 126737 NR Description: NADP-DEPENDENT MALIC ENZYME, CHLOROPLAST
  misc_feature (78)..(646): Homolog of NCBI NO: 7431235 NR Description: probable malate dehydrogenase
  misc_feature (55)..(646): Homolog of NCBI NO: 7431234 NR Description: malate dehydrogenase
  misc_feature (68)..(646): Homolog of NCBI NO: 282848 NR Description: malate dehydrogenase (NADP+) (EC 1.1.1.40) (clone 064) - western balsam poplar x
  misc_feature (68)..(646): Homolog of NCBI NO: 228412 NR Description: malic enzyme
  misc_feature (90)..(646): Homolog of NCBI NO: 126737 NR Description: NADP-DEPENDENT MALIC ENZYME, CHLOROPLAST
  misc_feature (55)..(646): Homolog of NCBI NO: 7431234 NR Description: malate dehydrogenase
  misc_feature (68)..(646): Homolog of NCBI NO: 228412 NR Description: malic enzyme
  misc_feature (1)..(646): Homolog of NCBI NO: 8118507 NR Description: NADP-dependent malic protein [Ricinus communis]
  misc_feature (1)..(646): Homolog of NCBI NO: 7431231 NR Description: malate dehydrogenase
  misc_feature (1)..(646): Homolog of NCBI NO: 1561774 NR Description: malate dehydrogenase [Vitis vinifera]
  misc_feature (19)..(646): Homolog of NCBI NO: 547886 NR Description: NADP-DEPENDENT MALIC ENZYME, CHLOROPLAST
  misc_feature (68)..(646): Homolog of NCBI NO: 1346485 NR Description: NADP-DEPENDENT MALIC ENZYME (NADP-ME)
  misc_feature (68)..(646): Homolog of NCBI NO: 282848 NR Description: malate dehydrogenase (NADP+) (EC 1.1.1.40) (clone 064) - western balsam poplar x
  misc_feature (78)..(646): Homolog of NCBI NO: 7431235 NR Description: probable malate dehydrogenase
  misc_feature (68)..(646): Homolog of NCBI NO: 1346485 NR Description: NADP-DEPENDENT MALIC ENZYME (NADP-ME)
  misc_feature (19)..(646): Homolog of NCBI NO: 547886 NR Description: NADP-DEPENDENT MALIC ENZYME, CHLOROPLAST
  misc_feature (1)..(646): Homolog of NCBI NO: 1561774 NR Description: malate dehydrogenase [Vitis vinifera]
  misc_feature (1)..(646): Homolog of NCBI NO: 7431231 NR Description: malate dehydrogenase
  misc_feature (1)..(646): Homolog of NCBI NO: 8118507 NR Description: NADP-dependent malic protein [Ricinus communis]
MISLTPSLFLNKTVVPGCSTRLSLRQPRTIITPPASLRVFSSLGSNQDPTGSVLIETTATSSSSLETSAADIVPKSTVSGGVQDVYGEDAATEDMPITPWSLSVASGYTLLRDPHHNKGLAFSHRERDAHYLRGLLPPTVISQDLQVKKIMHTLRQYQVPLQKYMAMMDLQETNERLFYKLLIDHVEELLPVIYTPTVGEACQKYGSIFLRPQGLFISLKEKGKIHEVLRNWPEKNIQVIVVTDGERILGLGDLGCQGMGIPVGKLSLYTALGGVRPSACLPVTIDVGTNNEKLLNDEFYIGLRQRRATGEEYSELMHEFMTAVKQNYGEKVVIQFEDFANHNAFDLLAKYGTTHLVFNDDIQGTASVVLAGLIAALRFVGGSLSDHRFLFLGAGEAGTGIAELIALEISKKSHIPLEEARKNIWLVDSKGLIVSSRKESIQHFKKPWAHDHEPIRELVDAVKAIKPTVLIGTSGVGQTFTQDVVETMAKLNEKPIILSLSNPTSQSECTAEEAYTWSQGRAIFASGSPFAPVEYEGKTFVPGQANNAYIFPGFGLGLIMSGTIRVHDDMLLAASEALAEELMEEHYEKGMIYPPFRNIRKISARIAAKVAAKAYELGLATRLPQPKELEQCAESSMYSPSYRSYR

SEQ ID NO: 45960 - protein, 552 aa, Arabidopsis thaliana
  peptide (1)..(552): Ceres Seq. ID no. 12600447
  misc_feature (268)..(521): Pfam Name: Malic enzyme, NAD binding domain Pfam Description: Malic enzyme, NAD binding domain
  misc_feature (268)..(521): Pfam Name: Malic enzyme, NAD binding domain Pfam Description: Malic enzyme, NAD binding domain
  misc_feature (1)..(552): Homolog of NCBI NO: 126737 NR Description: NADP-DEPENDENT MALIC ENZYME, CHLOROPLAST
  misc_feature (1)..(552): Homolog of NCBI NO: 7431235 NR Description: probable malate dehydrogenase
  misc_feature (1)..(552): Homolog of NCBI NO: 7431234 NR Description: malate dehydrogenase
  misc_feature (1)..(552): Homolog of NCBI NO: 282848 NR Description: malate dehydrogenase (NADP+) (EC 1.1.1.40) (clone 064) - western balsam poplar x
  misc_feature (1)..(552): Homolog of NCBI NO: 228412 NR Description: malic enzyme
  misc_feature (1)..(552): Homolog of NCBI NO: 126737 NR Description: NADP-DEPENDENT MALIC ENZYME, CHLOROPLAST
  misc_feature (1)..(552): Homolog of NCBI NO: 7431234 NR Description: malate dehydrogenase
  misc_feature (1)..(552): Homolog of NCBI NO: 228412 NR Description: malic enzyme
  misc_feature (1)..(552): Homolog of NCBI NO: 8118507 NR Description: NADP-dependent malic protein [Ricinus communis]
  misc_feature (1)..(552): Homolog of NCBI NO: 7431231 NR Description: malate dehydrogenase
  misc_feature (1)..(552): Homolog of NCBI NO: 1561774 NR Description: malate dehydrogenase [Vitis vinifera]
  misc_feature (1)..(552): Homolog of NCBI NO: 547886 NR Description: NADP-DEPENDENT MALIC ENZYME, CHLOROPLAST
  misc_feature (1)..(552): Homolog of NCBI NO: 1346485 NR Description: NADP-DEPENDENT MALIC ENZYME (NADP-ME)
  misc_feature (1)..(552): Homolog of NCBI NO: 282848 NR Description: malate dehydrogenase (NADP+) (EC 1.1.1.40) (clone 064) - western balsam poplar x
  misc_feature (1)..(552): Homolog of NCBI NO: 7431235 NR Description: probable malate dehydrogenase
  misc_feature (1)..(552): Homolog of NCBI NO: 1346485 NR Description: NADP-DEPENDENT MALIC ENZYME (NADP-ME)
  misc_feature (1)..(552): Homolog of NCBI NO: 547886 NR Description: NADP-DEPENDENT MALIC ENZYME, CHLOROPLAST
  misc_feature (1)..(552): Homolog of NCBI NO: 1561774 NR Description: malate dehydrogenase [Vitis vinifera]
  misc_feature (1)..(552): Homolog of NCBI NO: 7431231 NR Description: malate dehydrogenase
  misc_feature (1)..(552): Homolog of NCBI NO: 8118507 NR Description: NADP-dependent malic protein [Ricinus communis]
MPITPWSLSVASGYTLLRDPHHNKGLAFSHRERDAHYLRGLLPPTVISQDLQVKKIMHTLRQYQVPLQKYMAMMDLQETNERLFYKLLIDHVEELLPVIYTPTVGEACQKYGSIFLRPQGLFISLKEKGKIHEVLRNWPEKNIQVIVVTDGERILGLGDLGCQGMGIPVGKLSLYTALGGVRPSACLPVTIDVGTNNEKLLNDEFYIGLRQRRATGEEYSELMHEFMTAVKQNYGEKVVIQFEDFANHNAFDLLAKYGTTHLVFNDDIQGTASVVLAGLIAALRFVGGSLSDHRFLFLGAGEAGTGIAELIALEISKKSHIPLEEARKNIWLVDSKGLIVSSRKESIQHFKKPWAHDHEPIRELVDAVKAIKPTVLIGTSGVGQTFTQDVVETMAKLNEKPIILSLSNPTSQSECTAEEAYTWSQGRAIFASGSPFAPVEYEGKTFVPGQANNAYIFPGFGLGLIMSGTIRVHDDMLLAASEALAEELMEEHYEKGMIYPPFRNIRKISARIAAKVAAKAYELGLATRLPQPKELEQCAESSMYSPSYRSYR

SEQ ID NO: 45961 - protein, 496 aa, Arabidopsis thaliana
  peptide (1)..(496): Ceres Seq. ID no. 12600448
  misc_feature (212)..(465): Pfam Name: Malic enzyme, NAD binding domain Pfam Description: Malic enzyme, NAD binding domain
  misc_feature (212)..(465): Pfam Name: Malic enzyme, NAD binding domain Pfam Description: Malic enzyme, NAD binding domain
  misc_feature (1)..(496): Homolog of NCBI NO: 126737 NR Description: NADP-DEPENDENT MALIC ENZYME, CHLOROPLAST
  misc_feature (1)..(496): Homolog of NCBI NO: 7431235 NR Description: probable malate dehydrogenase
  misc_feature (1)..(496): Homolog of NCBI NO: 7431234 NR Description: malate dehydrogenase
  misc_feature (1)..(496): Homolog of NCBI NO: 282848 NR Description: malate dehydrogenase (NADP+) (EC 1.1.1.40) (clone 064) - western balsam poplar x
  misc_feature (1)..(496): Homolog of NCBI NO: 228412 NR Description: malic enzyme
  misc_feature (1)..(496): Homolog of NCBI NO: 126737 NR Description: NADP-DEPENDENT MALIC ENZYME, CHLOROPLAST
  misc_feature (1)..(496): Homolog of NCBI NO: 7431234 NR Description: malate dehydrogenase
  misc_feature (1)..(496): Homolog of NCBI NO: 228412 NR Description: malic enzyme
  misc_feature (1)..(496): Homolog of NCBI NO: 8118507 NR Description: NADP-dependent malic protein [Ricinus communis]
  misc_feature (1)..(496): Homolog of NCBI NO: 7431231 NR Description: malate dehydrogenase
  misc_feature (1)..(496): Homolog of NCBI NO: 1561774 NR Description: malate dehydrogenase [Vitis vinifera]
  misc_feature (1)..(496): Homolog of NCBI NO: 547886 NR Description: NADP-DEPENDENT MALIC ENZYME, CHLOROPLAST
  misc_feature (1)..(496): Homolog of NCBI NO: 1346485 NR Description: NADP-DEPENDENT MALIC ENZYME (NADP-ME)
  misc_feature (1)..(496): Homolog of NCBI NO: 282848 NR Description: malate dehydrogenase (NADP+) (EC 1.1.1.40) (clone 064) - western balsam poplar x
  misc_feature (1)..(496): Homolog of NCBI NO: 7431235 NR Description: probable malate dehydrogenase
  misc_feature (1)..(496): Homolog of NCBI NO: 1346485 NR Description: NADP-DEPENDENT MALIC ENZYME (NADP-ME)
  misc_feature (1)..(496): Homolog of NCBI NO: 547886 NR Description: NADP-DEPENDENT MALIC ENZYME, CHLOROPLAST
  misc_feature (1)..(496): Homolog of NCBI NO: 1561774 NR Description: malate dehydrogenase [Vitis vinifera]
  misc_feature (1)..(496): Homolog of NCBI NO: 7431231 NR Description: malate dehydrogenase
  misc_feature (1)..(496): Homolog of NCBI NO: 8118507 NR Description: NADP-dependent malic protein [Ricinus communis]
MHTLRQYQVPLQKYMAMMDLQETNERLFYKLLIDHVEELLPVIYTPTVGEACQKYGSIFLRPQGLFISLKEKGKIHEVLRNWPEKNIQVIVVTDGERILGLGDLGCQGMGIPVGKLSLYTALGGVRPSACLPVTIDVGTNNEKLLNDEFYIGLRQRRATGEEYSELMHEFMTAVKQNYGEKVVIQFEDFANHNAFDLLAKYGTTHLVFNDDIQGTASVVLAGLIAALRFVGGSLSDHRFLFLGAGEAGTGIAELIALEISKKSHIPLEEARKNIWLVDSKGLIVSSRKESIQHFKKPWAHDHEPIRELVDAVKAIKPTVLIGTSGVGQTFTQDVVETMAKLNEKPIILSLSNPTSQSECTAEEAYTWSQGRAIFASGSPFAPVEYEGKTFVPGQANNAYIFPGFGLGLIMSGTIRVHDDMLLAASEALAEELMEEHYEKGMIYPPFRNIRKISARIAAKVAAKAYELGLATRLPQPKELEQCAESSMYSPSYRSYR

SEQ ID NO: 45962 - DNA, 1002 bp, Arabidopsis thaliana
  misc_feature (1)..(1002): Ceres Seq. ID no. 13576161
  misc_feature: MA Experiment ID: 20001451 Result: Down-regulated in Transcription
  misc_feature: MA Experiment 20001451 PARAMETER Experiment Name: At_Far-red-induction_P Parameter: Age (day) Value: 7
  misc_feature: MA Experiment 20001451 PARAMETER Experiment Name: At_Far-red-induction_P Parameter: Light Value: Far-red vs. White
  misc_feature: MA Experiment 20001451 PARAMETER Experiment Name: At_Far-red-induction_P Parameter: Organism Value: A. thaliana
  misc_feature: MA Experiment 20001451 PARAMETER Experiment Name: At_Far-red-induction_P Parameter: Plant Line Value: Columbia
  misc_feature: MA Experiment 20001451 PARAMETER Experiment Name: At_Far-red-induction_P Parameter: Timepoint (hr) Value: 24
  misc_feature: MA Experiment 20001451 PARAMETER Experiment Name: At_Far-red-induction_P Parameter: Tissue Value: Whole Plant
atgccactattctcccaccgcttcaccaccgcatcttcttcttccccggcgtctccttcttactacaataaaccctcttcgaaaacccataaaccaaactcttcttcttcttcttatacttcgtctcgtattcatgtagctatcatattcttctcccttgtctctgttttcatcggagtcgccggaactatcttcgcactctcctccaccggtcctgcttctgtttatcgatgcggcggatctaaagacacttctcgggttgtgtctgcttcaagaaagctcggaggagatggtggtaataatggtgttgttgttgaaagacgaaagcttttagggtttgttgggatccagactggttttgattccggtgatcgtagaactgctttgagaagtacttggttcccttctgatcctgattctcttctaaggttggaacaagcgactggattagcttttagattcgtcattggaaagtcaaaggatgccaaaaagatggctgagcttgagaaggagataaaagagtacagagattttgtgcttcttgataccgaggaagaatatatacgacttccatataaaacgttggctttcttcaaagcagcttttaaactctttgaagctgattattatgtcaaagccgacgatgacatttatttgagaccagatcgacttgcgacgcttcttgccaatgaaagacttcattcacagacatacattggctgcatgaagaaaggaccagttataactgaccctaaactaaaatgtctgagaatgtttaataatgaagatgtaactatcggatcttggatgcttgcaatggatgtacatcacgaagacaaccgcgctttatgcgatccgcattgttccccaaagtccatagcagtttgggacattcccaaatgctcagggctttgtgacccggagagtcggttaaaagagcttcataagacggatatgtgctccaagagtccgacattacctcccgatgacatcgatcagtag

SEQ ID NO: 45963 - protein, 333 aa, Arabidopsis thaliana
  peptide (1)..(333): Ceres Seq. ID no. 13576162
  misc_feature (76)..(281): Pfam Name: Galactosyltransferase Pfam Description: Galactosyltransferase
  misc_feature (38)..(254): Homolog of NCBI NO: 15232447 NR Description: galactosyltransferase family [Arabidopsis
  misc_feature (257)..(333): Homolog of NCBI NO: 22553074 NR Description: beta 1,3-glycosyltransferase-like protein III
  misc_feature (165)..(254): Homolog of NCBI NO: 22553074 NR Description: beta 1,3-glycosyltransferase-like protein III
  misc_feature (224)..(330): Homolog of NCBI NO: 25405979 NR Description: protein F12M16.19 [imported] - Arabidopsis
  misc_feature (30)..(254): Homolog of NCBI NO: 25405979 NR Description: protein F12M16.19 [imported] - Arabidopsis
  misc_feature (224)..(330): Homolog of NCBI NO: 30695469 NR Description: galactosyltransferase family [Arabidopsis
  misc_feature (30)..(254): Homolog of NCBI NO: 30695469 NR Description: galactosyltransferase family [Arabidopsis
  misc_feature (256)..(333): Homolog of NCBI NO: 30683005 NR Description: galactosyltransferase family [Arabidopsis
  misc_feature (1)..(254): Homolog of NCBI NO: 30683005 NR Description: galactosyltransferase family [Arabidopsis
  misc_feature (1)..(333): Homolog of NCBI NO: 7487205 NR Description: hypothetical protein At2g26100 [imported] -
MPLFSHRFTTASSSSPASPSYYNKPSSKTHKPNSSSSSYTSSRIHVAIIFFSLVSVFIGVAGTIFALSSTGPASVYRCGGSKDTSRVVSASRKLGGDGGNNGVVVERRKLLGFVGIQTGFDSGDRRTALRSTWFPSDPDSLLRLEQATGLAFRFVIGKSKDAKKMAELEKEIKEYRDFVLLDTEEEYIRLPYKTLAFFKAAFKLFEADYYVKADDDIYLRPDRLATLLANERLHSQTYIGCMKKGPVITDPKLKCLRMFNNEDVTIGSWMLAMDVHHEDNRALCDPHCSPKSIAVWDIPKCSGLCDPESRLKELHKTDMCSKSPTLPPDDIDQ

SEQ ID NO: 45964 - protein, 169 aa, Arabidopsis thaliana
  peptide (1)..(169): Ceres Seq. ID no. 13576163
  misc_feature (1)..(117): Pfam Name: Galactosyltransferase Pfam Description: Galactosyltransferase
  misc_feature (1)..(90): Homolog of NCBI NO: 15232447 NR Description: galactosyltransferase family [Arabidopsis
  misc_feature (93)..(169): Homolog of NCBI NO: 22553074 NR Description: beta 1,3-glycosyltransferase-like protein III
  misc_feature (1)..(90): Homolog of NCBI NO: 22553074 NR Description: beta 1,3-glycosyltransferase-like protein III
  misc_feature (60)..(166): Homolog of NCBI NO: 25405979 NR Description: protein F12M16.19 [imported] - Arabidopsis
  misc_feature (1)..(90): Homolog of NCBI NO: 25405979 NR Description: protein F12M16.19 [imported] - Arabidopsis
  misc_feature (60)..(166): Homolog of NCBI NO: 30695469 NR Description: galactosyltransferase family [Arabidopsis
  misc_feature (1)..(90): Homolog of NCBI NO: 30695469 NR Description: galactosyltransferase family [Arabidopsis
  misc_feature (92)..(169): Homolog of NCBI NO: 30683005 NR Description: galactosyltransferase family [Arabidopsis
  misc_feature (1)..(90): Homolog of NCBI NO: 30683005 NR Description: galactosyltransferase family [Arabidopsis
  misc_feature (1)..(169): Homolog of NCBI NO: 7487205 NR Description: hypothetical protein At2g26100 [imported] -
MAELEKEIKEYRDFVLLDTEEEYIRLPYKTLAFFKAAFKLFEADYYVKADDDIYLRPDRLATLLANERLHSQTYIGCMKKGPVITDPKLKCLRMFNNEDVTIGSWMLAMDVHHEDNRALCDPHCSPKSIAVWDIPKCSGLCDPESRLKELHKTDMCSKSPTLPPDDIDQ

SEQ ID NO: 45965 - DNA, 2941 bp, Arabidopsis thaliana
  misc_feature (1)..(2941): Ceres Seq. ID no. 12600180
  misc_feature: MA Experiment ID: 20000171 Result: Up-regulated in Transcription
  misc_feature: MA Experiment 20000171 PARAMETER Experiment Name: At_42deg_Heat_P Parameter: Age (day) Value: 14
  misc_feature: MA Experiment 20000171 PARAMETER Experiment Name: At_42deg_Heat_P Parameter: Organism Value: A. thaliana
  misc_feature: MA Experiment 20000171 PARAMETER Experiment Name: At_42deg_Heat_P Parameter: Plant Line Value: WS
  misc_feature: MA Experiment 20000171 PARAMETER Experiment Name: At_42deg_Heat_P Parameter: Temperature (deg C) Value: 42 vs. 22
  misc_feature: MA Experiment 20000171 PARAMETER Experiment Name: At_42deg_Heat_P Parameter: Timepoint (hr) Value: 1
  misc_feature: MA Experiment 20000171 PARAMETER Experiment Name: At_42deg_Heat_P Parameter: Tissue Value: Aerial
  misc_feature: MA Experiment ID: 20000173 Result: Up-regulated in Transcription
  misc_feature: MA Experiment 20000173 PARAMETER Experiment Name: At_42deg_Heat_P Parameter: Age (day) Value: 14
  misc_feature: MA Experiment 20000173 PARAMETER Experiment Name: At_42deg_Heat_P Parameter: Organism Value: A. thaliana
  misc_feature: MA Experiment 20000173 PARAMETER Experiment Name: At_42deg_Heat_P Parameter: Plant Line Value: WS
  misc_feature: MA Experiment 20000173 PARAMETER Experiment Name: At_42deg_Heat_P Parameter: Temperature (deg C) Value: 42 vs. 22
  misc_feature: MA Experiment 20000173 PARAMETER Experiment Name: At_42deg_Heat_P Parameter: Timepoint (hr) Value: 6
  misc_feature: MA Experiment 20000173 PARAMETER Experiment Name: At_42deg_Heat_P Parameter: Tissue Value: Aerial
  misc_feature: MA Experiment ID: 20000495 Result: Down-regulated in Transcription
  misc_feature: MA Experiment 20000495 PARAMETER Experiment Name: At_Guard_Cells_P Parameter: Harvest Date Value: 8/2/2002
  misc_feature: MA Experiment 20000495 PARAMETER Experiment Name: At_Guard_Cells_P Parameter: Organism Value: A. thaliana
  misc_feature: MA Experiment 20000495 PARAMETER Experiment Name: At_Guard_Cells_P Parameter: Tissue Value: Guard Cells vs. Leaves
  misc_feature: MA Experiment ID: 20001451 Result: Down-regulated in Transcription
  misc_feature: MA Experiment 20001451 PARAMETER Experiment Name: At_Far-red-induction_P Parameter: Age (day) Value: 7
  misc_feature: MA Experiment 20001451 PARAMETER Experiment Name: At_Far-red-induction_P Parameter: Light Value: Far-red vs. White
  misc_feature: MA Experiment 20001451 PARAMETER Experiment Name: At_Far-red-induction_P Parameter: Organism Value: A. thaliana
  misc_feature: MA Experiment 20001451 PARAMETER Experiment Name: At_Far-red-induction_P Parameter: Plant Line Value: Columbia
  misc_feature: MA Experiment 20001451 PARAMETER Experiment Name: At_Far-red-induction_P Parameter: Timepoint (hr) Value: 24
  misc_feature: MA Experiment 20001451 PARAMETER Experiment Name: At_Far-red-induction_P Parameter: Tissue Value: Whole Plant
  misc_feature: MA Experiment ID: 20001557 Result: Up-regulated in Transcription
  misc_feature: MA Experiment 20001557 PARAMETER Experiment Name: At_Drought_Soil_Dry_P Parameter: Age (day) Value: 27
  misc_feature: MA Experiment 20001557 PARAMETER Experiment Name: At_Drought_Soil_Dry_P Parameter: Organism Value: A. thaliana
  misc_feature: MA Experiment 20001557 PARAMETER Experiment Name: At_Drought_Soil_Dry_P Parameter: Plant Line Value: WS
  misc_feature: MA Experiment 20001557 PARAMETER Experiment Name: At_Drought_Soil_Dry_P Parameter: Post Timepoint (hr) Value: 3
  misc_feature: MA Experiment 20001557 PARAMETER Experiment Name: At_Drought_Soil_Dry_P Parameter: Post-Treatment Value: Re-Water vs. No Drought
  misc_feature: MA Experiment 20001557 PARAMETER Experiment Name: At_Drought_Soil_Dry_P Parameter: Timepoint (day) Value: 13
  misc_feature: MA Experiment 20001557 PARAMETER Experiment Name: At_Drought_Soil_Dry_P Parameter: Treatment Value: Drought vs. No Drought
actttttggctgcgacacgattacagatttctcaccttcacccagatttcggtggaagcttccagaacgcgaacccctctcgcgatccaggttgctatcgaacacgtgggacgccccagtactgaagaacacaaagcctaacaatgagtgtagttggttttgattttggaaacgagaattgccttgttgctgttgcaaggcaaagaggtatcgacgtcgtgcttaatgatgagtcaaatcgcgagactccggctatcgtttgctttggtgacaagcagcgcttcatcggtactgctggagctgcttctaccatgatgaaccccaaaaactccatctcacaaatcaagcgcttaattggtcgccagttttccgaccctgagcttcaaagggatatcaaatcccttcccttttctgtcactgaaggccctgatggctatcctttgatccatgctaattatttgggagagattagagcctttaccccgactcaggtcatgggtatgatgttgtccaacttgaaaggtattgctgagaagaatttgaatacagctgtggtcgactgctgtattggtattcctgtttactttaccgacctccagcgtagggctgttctcgatgctgccacaattgcaggcttgcatcccttgcacttgatccatgagactacagctacggctttggcatacggaatttataagacagatctgccagagaatgaccagctcaatgttgcattcattgacattggacacgcaagcatgcaagtctgtattgcaggcttcaaaaaaggacagctcaaaatcttgtctcacgctttcgatcgctcccttgggggaagggattttgatgaagttcttttcaatcattttgctgctaagttcaaggacgagtacaagattgacgtctcccagaatgctaaggcttctctcaggctccgcgctacatgcgagaaactgaaaaaggttctaagcgctaatcctatggcaccattgaatatcgagtgtttgatggctgagaaagatgttaggggtgtcatcaagagggaagagtttgaagagatcagcatcccgattttggagcgtgttaagaggcctttagagaaagctctctctgatgcgggcctcactgttgaagatgtacatatggtcgaggttgtcggctctggctctcgtgtccctgctatgatcaagattctaactgagttttttggtaaggagcccaggcgtacaatgaatgcaagtgagtgtgtgtcgaggggatgtgccttgcagtgtgccattctcagtccgacctttaaagttcgcgaattccaggttcatgagagcttccctttctcaatatcgcttgcttggaaaggagcagcgactgatgctcaaaatggaggcactgagaaccagcagagcactattgtttttccgaaaggaaatcctattcctagtgtcaaggctctaacattttatcgttctggaacattctctattgatgtgcagtacagtgatgtgaacgatttgcaagcacctcctaaaatcagcacatacacgattggtcccttccagtcatcaaaaggcgagagggcaaagctgaaagtgaaagttagattgaacctgcatggaattgtctctgttgaatcagcaactcttttggaagaggaagaagttgaagtatcggtcacaaaagatcaatcagaggaaactgctaagatggacactgacaaagcttctgccgaggcagctcctgcttctggtgactctgatgttaacatgcaggacgccaaagataccagtgatgcaactggtactgacaatggtgttccagagtctgctgagaagccggtgcaaatggaaactgattcaaaggcagaggctccaaagaagaaggtgaagaaaacaaatgtaccactgtcagaattggtctatggtgccttgaaaactgtggaagttgaaaaggcagtggagaaggaatttgagatggctctgcaagacagagttatggaagagaccaaggaccggaagaatgctgttgagtcttatgtttatgatatgcgaaacaaactgagtgacaaataccagaatatatcactgactcggagagggaagcattcctggcgaatctgcaggaagttgaggattggttgtatgaagatggggaagatgagaccaaaggtgtttatgttgcaaagctcgaggagctcaagaaggtgggtgaccctgttgaagtgcgttacaaggagtcgttggaaagagggtcggtcattgatcagcttggctactgtattaacagctacagagaggcagctgtgtctaatgatcccaagtttgatcacattgaattggcagagaagcaaaaggttttgaacgagtgtgtggaagcagaagcatggctgcgggagaagcagcagcagcaggacacgcttcccaagtatgccacaccggctctcttgtcagctgacgtaaaaagcaaggcagaggcattggacaagttttgcaggcctataatgaccaaaccaaagccggcggctaaagcagaggcaccacaagccaagggaggtgagcaggcggatgagggcaagagtgagccagagcaaccagcttctgccgaagcaatggagactgagaatcccgcggaaggtagtacctaaatgaatgacgagagcgagatggtgttgttgtatcgattttgttttaatttacctagtggaaccactttttgtagtttcgctattatcccccaaacgattctatatttagttcttcctttcgacattttttaggaggtatattttttattgtctgttccttgtggtttcattttagtttgaaggtcttgttactttatttttgtttgtctctataatgattgttgtgtgtaacgtggattagctatacattgaacttgtttttaaaagcaaatgagattcaaatcagacattgggattttaatc

SEQ ID NO: 45966 - protein, 736 aa, Arabidopsis thaliana
  peptide (1)..(736): Ceres Seq. ID no. 12600181
  misc_feature (105)..(626): Homolog of NCBI NO: 19114449 NR Description: heat shock protein 70-like protein Ssp1p
  misc_feature (2)..(626): Homolog of NCBI NO: 12230134 NR Description: HEAT SHOCK PROTEIN HOMOLOG PSS1
  misc_feature (2)..(626): Homolog of NCBI NO: 7441858 NR Description: heat shock protein 70 - fission yeast
  misc_feature (1)..(634): Homolog of NCBI NO: 39591675 NR Description: Hypothetical protein CBG18133 [Caenorhabditis
  misc_feature (1)..(642): Homolog of NCBI NO: 3170190 NR Description: antigen NY-CO-25 [Homo sapiens]
  misc_feature (1)..(642): Homolog of NCBI NO: 39645395 NR Description: Unknown (protein for MGC:76295) [Silurana
  misc_feature (1)..(642): Homolog of NCBI NO: 40254361 NR Description: osmotic stress protein; osmotic stress protein 94
  misc_feature (1)..(642): Homolog of NCBI NO: 34856875 NR Description: similar to osmotic stress protein [Rattus
  misc_feature (1)..(621): Homolog of NCBI NO: 15221072 NR Description: putative heat-shock protein; protein id:
  misc_feature (1)..(643): Homolog of NCBI NO: 25326732 NR Description: hypothetical protein [imported] - Arabidopsis
  misc_feature (105)..(626): Homolog of NCBI NO: 19114449 NR Description: heat shock protein 70-like protein Ssp1p
  misc_feature (2)..(626): Homolog of NCBI NO: 12230134 NR Description: HEAT SHOCK PROTEIN HOMOLOG PSS1
  misc_feature (2)..(626): Homolog of NCBI NO: 7441858 NR Description: heat shock protein 70 - fission yeast
  misc_feature (1)..(634): Homolog of NCBI NO: 39591675 NR Description: Hypothetical protein CBG18133 [Caenorhabditis
  misc_feature (1)..(642): Homolog of NCBI NO: 3170190 NR Description: antigen NY-CO-25 [Homo sapiens]
  misc_feature (1)..(642): Homolog of NCBI NO: 39645395 NR Description: Unknown (protein for MGC:76295) [Silurana
  misc_feature (1)..(642): Homolog of NCBI NO: 40254361 NR Description: osmotic stress protein; osmotic stress protein 94
  misc_feature (1)..(642): Homolog of NCBI NO: 34856875 NR Description: similar to osmotic stress protein [Rattus
  misc_feature (1)..(621): Homolog of NCBI NO: 15221072 NR Description: putative heat-shock protein; protein id:
  misc_feature (1)..(643): Homolog of NCBI NO: 25326732 NR Description: hypothetical protein [imported] - Arabidopsis
  misc_feature (105)..(626): Homolog of NCBI NO: 19114449 NR Description: heat shock protein 70-like protein Ssp1p
  misc_feature (2)..(626): Homolog of NCBI NO: 12230134 NR Description: HEAT SHOCK PROTEIN HOMOLOG PSS1
  misc_feature (2)..(626): Homolog of NCBI NO: 7441858 NR Description: heat shock protein 70 - fission yeast
  misc_feature (1)..(634): Homolog of NCBI NO: 39591675 NR Description: Hypothetical protein CBG18133 [Caenorhabditis
  misc_feature (1)..(642): Homolog of NCBI NO: 3170190 NR Description: antigen NY-CO-25 [Homo sapiens]
  misc_feature (1)..(642): Homolog of NCBI NO: 39645395 NR Description: Unknown (protein for MGC:76295) [Silurana
  misc_feature (1)..(642): Homolog of NCBI NO: 40254361 NR Description: osmotic stress protein; osmotic stress protein 94
  misc_feature (1)..(642): Homolog of NCBI NO: 34856875 NR Description: similar to osmotic stress protein [Rattus
  misc_feature (1)..(621): Homolog of NCBI NO: 15221072 NR Description: putative heat-shock protein; protein id:
  misc_feature (1)..(643): Homolog of NCBI NO: 25326732 NR Description: hypothetical protein [imported] - Arabidopsis
MSVVGFDFGNENCLVAVARQRGIDVVLNDESNRETPAIVCFGDKQRFIGTAGAASTMMNPKNSISQIKRLIGRQFSDPELQRDIKSLPFSVTEGPDGYPLIHANYLGEIRAFTPTQVMGMMLSNLKGIAEKNLNTAVVDCCIGIPVYFTDLQRRAVLDAATIAGLHPLHLIHETTATALAYGIYKTDLPENDQLNVAFIDIGHASMQVCIAGFKKGQLKILSHAFDRSLGGRDFDEVLFNHFAAKFKDEYKIDVSQNAKASLRLRATCEKLKKVLSANPMAPLNIECLMAEKDVRGVIKREEFEEISIPILERVKRPLEKALSDAGLTVEDVHMVEVVGSGSRVPAMIKILTEFFGKEPRRTMNASECVSRGCALQCAILSPTFKVREFQVHESFPFSISLAWKGAATDAQNGGTENQQSTIVFPKGNPIPSVKALTFYRSGTFSIDVQYSDVNDLQAPPKISTYTIGPFQSSKGERAKLKVKVRLNLHGIVSVESATLLEEEEVEVSVTKDQSEETAKMDTDKASAEAAPASGDSDVNMQDAKDTSDATGTDNGVPESAEKPVQMETDSKAEAPKKKVKKTNVPLSELVYGALKTVEVEKAVEKEFEMALQDRVMEETKDRKNAVESYVYDMRNKLSDKYQNISLTRRGKHSWRICRKLRIGCMKMGKMRPKVFMLQSSRSSRRWVTLLKCVTRSRWKEGRSLISLATVLTATERQLCLMIPSLITLNWQRSKRF

SEQ ID NO: 45967 - protein, 680 aa, Arabidopsis thaliana
  peptide (1)..(680): Ceres Seq. ID no. 12600182
  misc_feature (49)..(570): Homolog of NCBI NO: 19114449 NR Description: heat shock protein 70-like protein Ssp1p
  misc_feature (1)..(570): Homolog of NCBI NO: 12230134 NR Description: HEAT SHOCK PROTEIN HOMOLOG PSS1
  misc_feature (1)..(570): Homolog of NCBI NO: 7441858 NR Description: heat shock protein 70 - fission yeast
  misc_feature (1)..(578): Homolog of NCBI NO: 39591675 NR Description: Hypothetical protein CBG18133 [Caenorhabditis
  misc_feature (1)..(586): Homolog of NCBI NO: 3170190 NR Description: antigen NY-CO-25 [Homo sapiens]
  misc_feature (1)..(586): Homolog of NCBI NO: 39645395 NR Description: Unknown (protein for MGC:76295) [Silurana
  misc_feature (1)..(586): Homolog of NCBI NO: 40254361 NR Description: osmotic stress protein; osmotic stress protein 94
  misc_feature (1)..(586): Homolog of NCBI NO: 34856875 NR Description: similar to osmotic stress protein [Rattus
  misc_feature (1)..(565): Homolog of NCBI NO: 15221072 NR Description: putative heat-shock protein; protein id:
  misc_feature (1)..(587): Homolog of NCBI NO: 25326732 NR Description: hypothetical protein [imported] - Arabidopsis
  misc_feature (49)..(570): Homolog of NCBI NO: 19114449 NR Description: heat shock protein 70-like protein Ssp1p
  misc_feature (1)..(570): Homolog of NCBI NO: 12230134 NR Description: HEAT SHOCK PROTEIN HOMOLOG PSS1
  misc_feature (1)..(570): Homolog of NCBI NO: 7441858 NR Description: heat shock protein 70 - fission yeast
  misc_feature (1)..(578): Homolog of NCBI NO: 39591675 NR Description: Hypothetical protein CBG18133 [Caenorhabditis
  misc_feature (1)..(586): Homolog of NCBI NO: 3170190 NR Description: antigen NY-CO-25 [Homo sapiens]
  misc_feature (1)..(586): Homolog of NCBI NO: 39645395 NR Description: Unknown (protein for MGC:76295) [Silurana
  misc_feature (1)..(586): Homolog of NCBI NO: 40254361 NR Description: osmotic stress protein; osmotic stress protein 94
  misc_feature (1)..(586): Homolog of NCBI NO: 34856875 NR Description: similar to osmotic stress protein [Rattus
  misc_feature (1)..(565): Homolog of NCBI NO: 15221072 NR Description: putative heat-shock protein; protein id:
  misc_feature (1)..(587): Homolog of NCBI NO: 25326732 NR Description: hypothetical protein [imported] - Arabidopsis
  misc_feature (49)..(570): Homolog of NCBI NO: 19114449 NR Description: heat shock protein 70-like protein Ssp1p
  misc_feature (1)..(570): Homolog of NCBI NO: 12230134 NR Description: HEAT SHOCK PROTEIN HOMOLOG PSS1
  misc_feature (1)..(570): Homolog of NCBI NO: 7441858 NR Description: heat shock protein 70 - fission yeast
  misc_feature (1)..(578): Homolog of NCBI NO: 39591675 NR Description: Hypothetical protein CBG18133 [Caenorhabditis
  misc_feature (1)..(586): Homolog of NCBI NO: 3170190 NR Description: antigen NY-CO-25 [Homo sapiens]
  misc_feature (1)..(586): Homolog of NCBI NO: 39645395 NR Description: Unknown (protein for MGC:76295) [Silurana
  misc_feature (1)..(586): Homolog of NCBI NO: 40254361 NR Description: osmotic stress protein; osmotic stress protein 94
  misc_feature (1)..(586): Homolog of NCBI NO: 34856875 NR Description: similar to osmotic stress protein [Rattus
  misc_feature (1)..(565): Homolog of NCBI NO: 15221072 NR Description: putative heat-shock protein; protein id:
  misc_feature (1)..(587): Homolog of NCBI NO: 25326732 NR Description: hypothetical protein [imported] - Arabidopsis
MMNPKNSISQIKRLIGRQFSDPELQRDIKSLPFSVTEGPDGYPLIHANYLGEIRAFTPTQVMGMMLSNLKGIAEKNLNTAVVDCCIGIPVYFTDLQRRAVLDAATIAGLHPLHLIHETTATALAYGIYKTDLPENDQLNVAFIDIGHASMQVCIAGFKKGQLKILSHAFDRSLGGRDFDEVLFNHFAAKFKDEYKIDVSQNAKASLRLRATCEKLKKVLSANPMAPLNIECLMAEKDVRGVIKREEFEEISIPILERVKRPLEKALSDAGLTVEDVHMVEVVGSGSRVPAMIKILTEFFGKEPRRTMNASECVSRGCALQCAILSPTFKVREFQVHESFPFSISLAWKGAATDAQNGGTENQQSTIVFPKGNPIPSVKALTFYRSGTFSIDVQYSDVNDLQAPPKISTYTIGPFQSSKGERAKLKVKVRLNLHGIVSVESATLLEEEEVEVSVTKDQSEETAKMDTDKASAEAAPASGDSDVNMQDAKDTSDATGTDNGVPESAEKPVQMETDSKAEAPKKKVKKTNVPLSELVYGALKTVEVEKAVEKEFEMALQDRVMEETKDRKNAVESYVYDMRNKLSDKYQNISLTRRGKHSWRICRKLRIGCMKMGKMRPKVFMLQSSRSSRRWVTLLKCVTRSRWKEGRSLISLATVLTATERQLCLMIPSLITLNWQRSKRF

SEQ ID NO: 45968 - protein, 679 aa, Arabidopsis thaliana
  peptide (1)..(679): Ceres Seq. ID no. 12600183
  misc_feature (48)..(569): Homolog of NCBI NO: 19114449 NR Description: heat shock protein 70-like protein Ssp1p
  misc_feature (1)..(569): Homolog of NCBI NO: 12230134 NR Description: HEAT SHOCK PROTEIN HOMOLOG PSS1
  misc_feature (1)..(569): Homolog of NCBI NO: 7441858 NR Description: heat shock protein 70 - fission yeast
  misc_feature (1)..(577): Homolog of NCBI NO: 39591675 NR Description: Hypothetical protein CBG18133 [Caenorhabditis
  misc_feature (1)..(585): Homolog of NCBI NO: 3170190 NR Description: antigen NY-CO-25 [Homo sapiens]
  misc_feature (1)..(585): Homolog of NCBI NO: 39645395 NR Description: Unknown (protein for MGC:76295) [Silurana
  misc_feature (1)..(585): Homolog of NCBI NO: 40254361 NR Description: osmotic stress protein; osmotic stress protein 94
  misc_feature (1)..(585): Homolog of NCBI NO: 34856875 NR Description: similar to osmotic stress protein [Rattus
  misc_feature (1)..(564): Homolog of NCBI NO: 15221072 NR Description: putative heat-shock protein; protein id:
  misc_feature (1)..(586): Homolog of NCBI NO: 25326732 NR Description: hypothetical protein [imported] - Arabidopsis
  misc_feature (48)..(569): Homolog of NCBI NO: 19114449 NR Description: heat shock protein 70-like protein Ssp1p
  misc_feature (1)..(569): Homolog of NCBI NO: 12230134 NR Description: HEAT SHOCK PROTEIN HOMOLOG PSS1
  misc_feature (1)..(569): Homolog of NCBI NO: 7441858 NR Description: heat shock protein 70 - fission yeast
  misc_feature (1)..(577): Homolog of NCBI NO: 39591675 NR Description: Hypothetical protein CBG18133 [Caenorhabditis
  misc_feature (1)..(585): Homolog of NCBI NO: 3170190 NR Description: antigen NY-CO-25 [Homo sapiens]
  misc_feature (1)..(585): Homolog of NCBI NO: 39645395 NR Description: Unknown (protein for MGC:76295) [Silurana
  misc_feature (1)..(585): Homolog of NCBI NO: 40254361 NR Description: osmotic stress protein; osmotic stress protein 94
  misc_feature (1)..(585): Homolog of NCBI NO: 34856875 NR Description: similar to osmotic stress protein [Rattus
  misc_feature (1)..(564): Homolog of NCBI NO: 15221072 NR Description: putative heat-shock protein; protein id:
  misc_feature (1)..(586): Homolog of NCBI NO: 25326732 NR Description: hypothetical protein [imported] - Arabidopsis
  misc_feature (48)..(569): Homolog of NCBI NO: 19114449 NR Description: heat shock protein 70-like protein Ssp1p
  misc_feature (1)..(569): Homolog of NCBI NO: 12230134 NR Description: HEAT SHOCK PROTEIN HOMOLOG PSS1
  misc_feature (1)..(569): Homolog of NCBI NO: 7441858 NR Description: heat shock protein 70 - fission yeast
  misc_feature (1)..(577): Homolog of NCBI NO: 39591675 NR Description: Hypothetical protein CBG18133 [Caenorhabditis
  misc_feature (1)..(585): Homolog of NCBI NO: 3170190 NR Description: antigen NY-CO-25 [Homo sapiens]
  misc_feature (1)..(585): Homolog of NCBI NO: 39645395 NR Description: Unknown (protein for MGC:76295) [Silurana
  misc_feature (1)..(585): Homolog of NCBI NO: 40254361 NR Description: osmotic stress protein; osmotic stress protein 94
  misc_feature (1)..(585): Homolog of NCBI NO: 34856875 NR Description: similar to osmotic stress protein [Rattus
  misc_feature (1)..(564): Homolog of NCBI NO: 15221072 NR Description: putative heat-shock protein; protein id:
  misc_feature (1)..(586): Homolog of NCBI NO: 25326732 NR Description: hypothetical protein [imported] - Arabidopsis
MNPKNSISQIKRLIGRQFSDPELQRDIKSLPFSVTEGPDGYPLIHANYLGEIRAFTPTQVMGMMLSNLKGIAEKNLNTAVVDCCIGIPVYFTDLQRRAVLDAATIAGLHPLHLIHETTATALAYGIYKTDLPENDQLNVAFIDIGHASMQVCIAGFKKGQLKILSHAFDRSLGGRDFDEVLFNHFAAKFKDEYKIDVSQNAKASLRLRATCEKLKKVLSANPMAPLNIECLMAEKDVRGVIKREEFEEISIPILERVKRPLEKALSDAGLTVEDVHMVEVVGSGSRVPAMIKILTEFFGKEPRRTMNASECVSRGCALQCAILSPTFKVREFQVHESFPFSISLAWKGAATDAQNGGTENQQSTIVFPKGNPIPSVKALTFYRSGTFSIDVQYSDVNDLQAPPKISTYTIGPFQSSKGERAKLKVKVRLNLHGIVSVESATLLEEEEVEVSVTKDQSEETAKMDTDKASAEAAPASGDSDVNMQDAKDTSDATGTDNGVPESAEKPVQMETDSKAEAPKKKVKKTNVPLSELVYGALKTVEVEKAVEKEFEMALQDRVMEETKDRKNAVESYVYDMRNKLSDKYQNISLTRRGKHSWRICRKLRIGCMKMGKMRPKVFMLQSSRSSRRWVTLLKCVTRSRWKEGRSLISLATVLTATERQLCLMIPSLITLNWQRSKRF

SEQ ID NO: 45969 - DNA, 1829 bp, Arabidopsis thaliana
  misc_feature (1)..(1829): Ceres Seq. ID no. 13576075
  misc_feature: MA Experiment ID: 20000182 Result: Up-regulated in Transcription
  misc_feature: MA Experiment 20000182 PARAMETER Experiment Name: At_2mM_SA_P Parameter: Age (day) Value: 14
  misc_feature: MA Experiment 20000182 PARAMETER Experiment Name: At_2mM_SA_P Parameter: Organism Value: A. thaliana
  misc_feature: MA Experiment 20000182 PARAMETER Experiment Name: At_2mM_SA_P Parameter: Plant Line Value: WS
  misc_feature: MA Experiment 20000182 PARAMETER Experiment Name: At_2mM_SA_P Parameter: Timepoint (hr) Value: 6
  misc_feature: MA Experiment 20000182 PARAMETER Experiment Name: At_2mM_SA_P Parameter: Tissue Value: Aerial
  misc_feature: MA Experiment 20000182 PARAMETER Experiment Name: At_2mM_SA_P Parameter: Treatment Value: 2mM SA vs. No Treatment
gaggttccagacacagacagaacaaacaacgaagaaaattcaaaatcttatttcaattcaacgtatactttccttaaattaggaatttggttttcgagaaaattgagatccgaataactatggtgagactcaagacgagtctctgggttcttctccttgccctcgtttcaattcagttaaatggttcgtttggatctgaatcaagtaaagtagcttatgtcacacttttgtatggagatgagttcttattaggagttagggtattgggtaaatcgattcgtgacactggatccactaaggatatggtcgctttggtttctgatggtgtctcagactactctaagaagttactcaaggctgatggatggaaagtagagaagattagtttactggcaaatccaaatcaagttcatccgactaggttctggggtgtttatacaaagcttaagatctttaacatgactgattataagaaagttgtgtatcttgatgctgatactattgtggtaaagaacattgaggatctgtttaagtgttctaagttttgcgcaaacttgaagcattctgagaggctaaactctggtgtgatggttgttgaaccatctgaagctctttttaatgacatgatgcggaaagtgaagactttgtcttcttatactggaggagatcaagggttcttgaattcgtattatccggatttcccgaatgctcgtgttttcgatcctagtgtaactcctgaagtcttgaaaaccagaccagttcctgctatggagaggctttcgacattatacaatgcggatgttggtctttatatgcttgctaataagtggatggttgatgacagtaaacttcacgtcattcactacactctaggccctcttaagccttgggactggtggacagcatggctcgtgaaacctgttgatgcttggcatagcattagggtaaagcttgaggaaactcttcctggaactggaggtggtagtaaccaacatgatgaactcgtcgtcaagttccttttcttgttacctctttgtgcacttttgttctgcatttaccgatccattcagggccgtgagggttcattgtgctggagctcgttcagcaatcagattagatatctttattacaaagttagatctaatggaacacttggttatggcggtgtatctaccatgagtcccagctatcaaccccacagtggcaacgcacagtccaaggttcctcaacacttaggcgcagtttcagttgtcgtctgttttactgctgttctgttatctcttggaatttcctttgcgattgtgcctaggcaaatcatgccatggactggcttggtcttggtgtatgaatggacttttacaatcttctttcttttgtttggtgtcttcttgctttttgtgcatcaacatggaaagagaatagcgatacaatcagaatcatcttccttggatgattccgcaaaagttcatcagcgagcaggtgggtcttgtgacgttactacattgtattatggattagggatggcttttctggctattgctgcagtttctttaccttacattttggggatcactgctttattcacgaggttgggtctaatggtgggtctagccataattctagctgccttcatgacttatgcttcagagcacctcgcggtgagatggttcttgaaaggtctagaagaccgtcgtgacacgacgagatcaaattccctatgtttcctctgttgacaacaaaatatgtaaaagtgtcaccaatcaccattgtaactttcagaaacaacagagcctataattctgtcttgaaatggttacacctttgttctt

SEQ ID NO: 45970 - protein, 537 aa, Arabidopsis thaliana
  peptide (1)..(537): Ceres Seq. ID no. 13576076
  misc_feature (16)..(257): Homolog of NCBI NO: 22330689 NR Description: glycogenin glucosyltransferase (glycogenin) -
  misc_feature (28)..(191): Homolog of NCBI NO: 15223990 NR Description: glycogenin glucosyltransferase (glycogenin) -
  misc_feature (114)..(309): Homolog of NCBI NO: 39596633 NR Description: Hypothetical protein CBG07620 [Caenorhabditis
  misc_feature (114)..(280): Homolog of NCBI NO: 17569749 NR Description: Predicted CDS, glycogenin like [Caenorhabditis
  misc_feature (183)..(313): Homolog of NCBI NO: 38568059 NR Description: OSJNBa0073E02.8 [Oryza sativa (japonica
  misc_feature (105)..(280): Homolog of NCBI NO: 7507569 NR Description: hypothetical protein T10B10.8 - Caenorhabditis
  misc_feature (361)..(431): Homolog of NCBI NO: 38568059 NR Description: OSJNBa0073E02.8 [Oryza sativa (japonica
  misc_feature (1)..(236): Homolog of NCBI NO: 38568059 NR Description: OSJNBa0073E02.8 [Oryza sativa (japonica
  misc_feature (1)..(537): Homolog of NCBI NO: 18087513 NR Description: AT5g18480/F20L16_200 [Arabidopsis thaliana]
  misc_feature (1)..(537): Homolog of NCBI NO: 22326882 NR Description: glycogenin glucosyltransferase (glycogenin) -
  misc_feature (16)..(257): Homolog of NCBI NO: 22330689 NR Description: glycogenin glucosyltransferase (glycogenin) -
  misc_feature (28)..(191): Homolog of NCBI NO: 15223990 NR Description: glycogenin glucosyltransferase (glycogenin) -
  misc_feature (114)..(309): Homolog of NCBI NO: 39596633 NR Description: Hypothetical protein CBG07620 [Caenorhabditis
  misc_feature (114)..(280): Homolog of NCBI NO: 17569749 NR Description: Predicted CDS, glycogenin like [Caenorhabditis
  misc_feature (183)..(313): Homolog of NCBI NO: 38568059 NR Description: OSJNBa0073E02.8 [Oryza sativa (japonica
  misc_feature (105)..(280): Homolog of NCBI NO: 7507569 NR Description: hypothetical protein T10B10.8 - Caenorhabditis
  misc_feature (361)..(431): Homolog of NCBI NO: 38568059 NR Description: OSJNBa0073E02.8 [Oryza sativa (japonica
  misc_feature (1)..(236): Homolog of NCBI NO: 38568059 NR Description: OSJNBa0073E02.8 [Oryza sativa (japonica
  misc_feature (1)..(537): Homolog of NCBI NO: 18087513 NR Description: AT5g18480/F20L16_200 [Arabidopsis thaliana]
  misc_feature (1)..(537): Homolog of NCBI NO: 22326882 NR Description: glycogenin glucosyltransferase (glycogenin) -
MVRLKTSLWVLLLALVSIQLNGSFGSESSKVAYVTLLYGDEFLLGVRVLGKSIRDTGSTKDMVALVSDGVSDYSKKLLKADGWKVEKISLLANPNQVHPTRFWGVYTKLKIFNMTDYKKVVYLDADTIVVKNIEDLFKCSKFCANLKHSERLNSGVMVVEPSEALFNDMMRKVKTLSSYTGGDQGFLNSYYPDFPNARVFDPSVTPEVLKTRPVPAMERLSTLYNADVGLYMLANKWMVDDSKLHVIHYTLGPLKPWDWWTAWLVKPVDAWHSIRVKLEETLPGTGGGSNQHDELVVKFLFLLPLCALLFCIYRSIQGREGSLCWSSFSNQIRYLYYKVRSNGTLGYGGVSTMSPSYQPHSGNAQSKVPQHLGAVSVVVCFTAVLLSLGISFAIVPRQIMPWTGLVLVYEWTFTIFFLLFGVFLLFVHQHGKRIAIQSESSSLDDSAKVHQRAGGSCDVTTLYYGLGMAFLAIAAVSLPYILGITALFTRLGLMVGLAIILAAFMTYASEHLAVRWFLKGLEDRRDTTRSNSLCFLC

SEQ ID NO: 45971 - protein, 476 aa, Arabidopsis thaliana
  peptide (1)..(476): Ceres Seq. ID no. 13576077
  misc_feature (1)..(196): Homolog of NCBI NO: 22330689 NR Description: glycogenin glucosyltransferase (glycogenin) -
  misc_feature (1)..(130): Homolog of NCBI NO: 15223990 NR Description: glycogenin glucosyltransferase (glycogenin) -
  misc_feature (53)..(248): Homolog of NCBI NO: 39596633 NR Description: Hypothetical protein CBG07620 [Caenorhabditis
  misc_feature (53)..(219): Homolog of NCBI NO: 17569749 NR Description: Predicted CDS, glycogenin like [Caenorhabditis
  misc_feature (122)..(252): Homolog of NCBI NO: 38568059 NR Description: OSJNBa0073E02.8 [Oryza sativa (japonica
  misc_feature (44)..(219): Homolog of NCBI NO: 7507569 NR Description: hypothetical protein T10B10.8 - Caenorhabditis
  misc_feature (300)..(370): Homolog of NCBI NO: 38568059 NR Description: OSJNBa0073E02.8 [Oryza sativa (japonica
  misc_feature (1)..(175): Homolog of NCBI NO: 38568059 NR Description: OSJNBa0073E02.8 [Oryza sativa (japonica
  misc_feature (1)..(476): Homolog of NCBI NO: 18087513 NR Description: AT5g18480/F20L16_200 [Arabidopsis thaliana]
  misc_feature (1)..(476): Homolog of NCBI NO: 22326882 NR Description: glycogenin glucosyltransferase (glycogenin) -
  misc_feature (1)..(196): Homolog of NCBI NO: 22330689 NR Description: glycogenin glucosyltransferase (glycogenin) -
  misc_feature (1)..(130): Homolog of NCBI NO: 15223990 NR Description: glycogenin glucosyltransferase (glycogenin) -
  misc_feature (53)..(248): Homolog of NCBI NO: 39596633 NR Description: Hypothetical protein CBG07620 [Caenorhabditis
  misc_feature (53)..(219): Homolog of NCBI NO: 17569749 NR Description: Predicted CDS, glycogenin like [Caenorhabditis
  misc_feature (122)..(252): Homolog of NCBI NO: 38568059 NR Description: OSJNBa0073E02.8 [Oryza sativa (japonica
  misc_feature (44)..(219): Homolog of NCBI NO: 7507569 NR Description: hypothetical protein T10B10.8 - Caenorhabditis
  misc_feature (300)..(370): Homolog of NCBI NO: 38568059 NR Description: OSJNBa0073E02.8 [Oryza sativa (japonica
  misc_feature (1)..(175): Homolog of NCBI NO: 38568059 NR Description: OSJNBa0073E02.8 [Oryza sativa (japonica
  misc_feature (1)..(476): Homolog of NCBI NO: 18087513 NR Description: AT5g18480/F20L16_200 [Arabidopsis thaliana]
  misc_feature (1)..(476): Homolog of NCBI NO: 22326882 NR Description: glycogenin glucosyltransferase (glycogenin) -
MVALVSDGVSDYSKKLLKADGWKVEKISLLANPNQVHPTRFWGVYTKLKIFNMTDYKKVVYLDADTIVVKNIEDLFKCSKFCANLKHSERLNSGVMVVEPSEALFNDMMRKVKTLSSYTGGDQGFLNSYYPDFPNARVFDPSVTPEVLKTRPVPAMERLSTLYNADVGLYMLANKWMVDDSKLHVIHYTLGPLKPWDWWTAWLVKPVDAWHSIRVKLEETLPGTGGGSNQHDELVVKFLFLLPLCALLFCIYRSIQGREGSLCWSSFSNQIRYLYYKVRSNGTLGYGGVSTMSPSYQPHSGNAQSKVPQHLGAVSVVVCFTAVLLSLGISFAIVPRQIMPWTGLVLVYEWTFTIFFLLFGVFLLFVHQHGKRIAIQSESSSLDDSAKVHQRAGGSCDVTTLYYGLGMAFLAIAAVSLPYILGITALFTRLGLMVGLAIILAAFMTYASEHLAVRWFLKGLEDRRDTTRSNSLCFLC

SEQ ID NO: 45972 - protein, 424 aa, Arabidopsis thaliana
  peptide (1)..(424): Ceres Seq. ID no. 13576078
  misc_feature (1)..(144): Homolog of NCBI NO: 22330689 NR Description: glycogenin glucosyltransferase (glycogenin) -
  misc_feature (1)..(78): Homolog of NCBI NO: 15223990 NR Description: glycogenin glucosyltransferase (glycogenin) -
  misc_feature (1)..(196): Homolog of NCBI NO: 39596633 NR Description: Hypothetical protein CBG07620 [Caenorhabditis
  misc_feature (1)..(167): Homolog of NCBI NO: 17569749 NR Description: Predicted CDS, glycogenin like [Caenorhabditis
  misc_feature (70)..(200): Homolog of NCBI NO: 38568059 NR Description: OSJNBa0073E02.8 [Oryza sativa (japonica
  misc_feature (1)..(167): Homolog of NCBI NO: 7507569 NR Description: hypothetical protein T10B10.8 - Caenorhabditis
  misc_feature (248)..(318): Homolog of NCBI NO: 38568059 NR Description: OSJNBa0073E02.8 [Oryza sativa (japonica
  misc_feature (1)..(123): Homolog of NCBI NO: 38568059 NR Description: OSJNBa0073E02.8 [Oryza sativa (japonica
  misc_feature (1)..(424): Homolog of NCBI NO: 18087513 NR Description: AT5g18480/F20L16_200 [Arabidopsis thaliana]
  misc_feature (1)..(424): Homolog of NCBI NO: 22326882 NR Description: glycogenin glucosyltransferase (glycogenin) -
  misc_feature (1)..(144): Homolog of NCBI NO: 22330689 NR Description: glycogenin glucosyltransferase (glycogenin) -
  misc_feature (1)..(78): Homolog of NCBI NO: 15223990 NR Description: glycogenin glucosyltransferase (glycogenin) -
  misc_feature (1)..(196): Homolog of NCBI NO: 39596633 NR Description: Hypothetical protein CBG07620 [Caenorhabditis
  misc_feature (1)..(167): Homolog of NCBI NO: 17569749 NR Description: Predicted CDS, glycogenin like [Caenorhabditis
  misc_feature (70)..(200): Homolog of NCBI NO: 38568059 NR Description: OSJNBa0073E02.8 [Oryza sativa (japonica
  misc_feature (1)..(167): Homolog of NCBI NO: 7507569 NR Description: hypothetical protein T10B10.8 - Caenorhabditis
  misc_feature (248)..(318): Homolog of NCBI NO: 38568059 NR Description: OSJNBa0073E02.8 [Oryza sativa (japonica
  misc_feature (1)..(123): Homolog of NCBI NO: 38568059 NR Description: OSJNBa0073E02.8 [Oryza sativa (japonica
  misc_feature (1)..(424): Homolog of NCBI NO: 18087513 NR Description: AT5g18480/F20L16_200 [Arabidopsis thaliana]
  misc_feature (1)..(424): Homolog of NCBI NO: 22326882 NR Description: glycogenin glucosyltransferase (glycogenin) -
MTDYKKVVYLDADTIVVKNIEDLFKCSKFCANLKHSERLNSGVMVVEPSEALFNDMMRKVKTLSSYTGGDQGFLNSYYPDFPNARVFDPSVTPEVLKTRPVPAMERLSTLYNADVGLYMLANKWMVDDSKLHVIHYTLGPLKPWDWWTAWLVKPVDAWHSIRVKLEETLPGTGGGSNQHDELVVKFLFLLPLCALLFCIYRSIQGREGSLCWSSFSNQIRYLYYKVRSNGTLGYGGVSTMSPSYQPHSGNAQSKVPQHLGAVSVVVCFTAVLLSLGISFAIVPRQIMPWTGLVLVYEWTFTIFFLLFGVFLLFVHQHGKRIAIQSESSSLDDSAKVHQRAGGSCDVTTLYYGLGMAFLAIAAVSLPYILGITALFTRLGLMVGLAIILAAFMTYASEHLAVRWFLKGLEDRRDTTRSNSLCFLC

SEQ ID NO: 45973 - DNA, 2322 bp, Arabidopsis thaliana
  misc_feature (1)..(2322): Ceres Seq. ID no. 12600192
  misc_feature: MA Experiment ID: 20000438 Result: Up-regulated in Transcription
  misc_feature: MA Experiment 20000438 PARAMETER Experiment Name: At_Shoots__P Parameter: Age (day) Value: 14
  misc_feature: MA Experiment 20000438 PARAMETER Experiment Name: At_Shoots__P Parameter: Tissue Value: Shoots vs. Whole Plant
  misc_feature: MA Experiment ID: 20001247 Result: Up-regulated in Transcription
  misc_feature: MA Experiment 20001247 PARAMETER Experiment Name: At_Far-red-induction_P Parameter: Age (day) Value: 7
  misc_feature: MA Experiment 20001247 PARAMETER Experiment Name: At_Far-red-induction_P Parameter: Light Value: Far-red vs. White
  misc_feature: MA Experiment 20001247 PARAMETER Experiment Name: At_Far-red-induction_P Parameter: Organism Value: A. thaliana
  misc_feature: MA Experiment 20001247 PARAMETER Experiment Name: At_Far-red-induction_P Parameter: Plant Line Value: Columbia
  misc_feature: MA Experiment 20001247 PARAMETER Experiment Name: At_Far-red-induction_P Parameter: Timepoint (hr) Value: 1
  misc_feature: MA Experiment 20001247 PARAMETER Experiment Name: At_Far-red-induction_P Parameter: Tissue Value: Whole Plant
  misc_feature: MA Experiment ID: 20001248 Result: Down-regulated in Transcription
  misc_feature: MA Experiment 20001248 PARAMETER Experiment Name: At_Far-red-induction_P Parameter: Age (day) Value: 7
  misc_feature: MA Experiment 20001248 PARAMETER Experiment Name: At_Far-red-induction_P Parameter: Light Value: Far-red vs. White
  misc_feature: MA Experiment 20001248 PARAMETER Experiment Name: At_Far-red-induction_P Parameter: Organism Value: A. thaliana
  misc_feature: MA Experiment 20001248 PARAMETER Experiment Name: At_Far-red-induction_P Parameter: Plant Line Value: Columbia
  misc_feature: MA Experiment 20001248 PARAMETER Experiment Name: At_Far-red-induction_P Parameter: Timepoint (hr) Value: 4
  misc_feature: MA Experiment 20001248 PARAMETER Experiment Name: At_Far-red-induction_P Parameter: Tissue Value: Whole Plant
  misc_feature: MA Experiment ID: 20001451 Result: Up-regulated in Transcription
  misc_feature: MA Experiment 20001451 PARAMETER Experiment Name: At_Far-red-induction_P Parameter: Age (day) Value: 7
  misc_feature: MA Experiment 20001451 PARAMETER Experiment Name: At_Far-red-induction_P Parameter: Light Value: Far-red vs. White
  misc_feature: MA Experiment 20001451 PARAMETER Experiment Name: At_Far-red-induction_P Parameter: Organism Value: A. thaliana
  misc_feature: MA Experiment 20001451 PARAMETER Experiment Name: At_Far-red-induction_P Parameter: Plant Line Value: Columbia
  misc_feature: MA Experiment 20001451 PARAMETER Experiment Name: At_Far-red-induction_P Parameter: Timepoint (hr) Value: 24
  misc_feature: MA Experiment 20001451 PARAMETER Experiment Name: At_Far-red-induction_P Parameter: Tissue Value: Whole Plant
  misc_feature: MA Experiment ID: 20001560 Result: Down-regulated in Transcription
  misc_feature: MA Experiment 20001560 PARAMETER Experiment Name: At_Drought_Soil_Dry_P Parameter: Age (day) Value: 28
  misc_feature: MA Experiment 20001560 PARAMETER Experiment Name: At_Drought_Soil_Dry_P Parameter: Organism Value: A. thaliana
  misc_feature: MA Experiment 20001560 PARAMETER Experiment Name: At_Drought_Soil_Dry_P Parameter: Plant Line Value: WS
  misc_feature: MA Experiment 20001560 PARAMETER Experiment Name: At_Drought_Soil_Dry_P Parameter: Post Timepoint (hr) Value: None
  misc_feature: MA Experiment 20001560 PARAMETER Experiment Name: At_Drought_Soil_Dry_P Parameter: Post-Treatment Value: None
  misc_feature: MA Experiment 20001560 PARAMETER Experiment Name: At_Drought_Soil_Dry_P Parameter: Timepoint (day) Value: 14
  misc_feature: MA Experiment 20001560 PARAMETER Experiment Name: At_Drought_Soil_Dry_P Parameter: Treatment Value: Drought vs. No Drought
agaaactcttatcaaagcttttgatttctctctcgagggtttcttactctgctgcttcttcttcttcttcagtagagcgagattctctcgcgctctctatcgctacatataaccatgggtttatcaacgaatctccatagcctcgacctccgttcaactttcttcaccggtctacgtacatctccaatcccttccaatttcatcaaaatctcttccatttccaaccctagacgcgatatctccaccatcagagcccaagtctccaccatcagcctcgagacctccgttaaacagcgtcaagacgaaatcgaatctcttttctcgaagcaaccctctcagcaagactccgatcggaaacgaaacgggaagagttccaaaaacggagcttctgggatatcttcaggtgtgaagctagagaacataaggaaaagctacaaaggcgtgactgtgcttaaagatgtgacatgggaagtgaagagaggtgagaaagtagggttagttggtgtgaacggagctgggaagacgactcagctcaggattatcactggtcaagaagagcctgattctggtaacgtaatcaaggccaaacccaatatgaaagtagctttcttgagccaggaatttgaggtttcgatgagtaagactgtgagggaagagttcatgactgctttcaaggaagagatggagattactgagaagcttgagaaagttcagaaggctattgagggatctgttgatgatttggatcttatgggaaggttattagatgaatttgatttgttgcagagacgagctcaggctgtgaatttagattccgttgatgctaagattagtaagttgatgccggaattagggtttgctcctgaggatgctgataggcttgtggcttcgtttagtggtggatggcaaatgagaatgtcacttggaaagattttgcttcaggatccagatttgctgctacttgatgagccgacaaatcatttggatcttgatactattgagtggcttgaaggttatttgcaaaagcaagatgtgcctatggttattatttcacatgacagagcctttcttgatcagttatgtactaaaattgtggaaactgagatgggtgtgtccaggacatttgagggtaattattctcagtatgtgatctcaaaggctgagtggatcgaaactcagaatgcagcgtgggaaaagcaacagaaagatatcgactcaactaaggacttgatcgccaggcttggtgctggtgccaattctggtcgtgcttccactgcagaaaagaaactagagaagcttcaagaacaggagctaatagagaagccatttcagcggaagcagatgaagattaggtttccagagcgtgggacaagtggaagatcggtagtcaatgttaaaaacattgattttggtttcgaggataagatgctatttaagaaggctaatctatcaatagaaagaggggagaaaatcgccatccttgggccaaacggttgtgggaaaagtacgttattgaagctaattatgggtttagagaagcctgtgaaaggtgaagttattcttggagagcacaatgtactgccaaactactttgaacagaatcaggctgaggtccttgatttggataaaacagtgcttgaaactgtttgtgaagctgcagaagactggagaagtgatgatataaaaggtcttcttggacgctgcaacttcaaagcagacatgcttgatcgaaaggtctctcttttaagtggtggggagaaagcgcgtcttgctttctgcaaattcatggtgacgccatctactttactcgttttggacgaaccaaccaatcacttagacattccttcaaaagaaatgctcgaggaagcgataaacgagtaccaaggtacagtcattgcggtatcccacgatcgatacttcatcaaacaaatcgttaacagagtgatagaagtagaagatggttgtttagaagattatgcaggcgactacaattattacttggagaagaatctggatgctagaacaaaggagctagagagagaagcagagctagaagagaaagcaccaaaagtgaaggcaaagtcaaagatgtcaaaagcagagaaagaagcgaggaagaagcagaagatgcaagcatttcaacaagctaaacagaagtcaaaggctagcaagaactccaagagatggaactgaacaaacattgaaaactgaaaggagtcaagatttataaaaaaggcttcttcacagtctcacaaaatcgtcattgtggaatgtatatagatattacttttagaaatgcagagagagtattaatgtttctac

SEQ ID NO: 45974 - protein, 692 aa, Arabidopsis thaliana
  peptide (1)..(692): Ceres Seq. ID no. 12600193
  misc_feature (123)..(332): Pfam Name: ABC transporter Pfam Description: ABC transporter
  misc_feature (98)..(673): Homolog of NCBI NO: 20807041 NR Description: ATPase components of ABC transporters with
  misc_feature (100)..(686): Homolog of NCBI NO: 39996025 NR Description: ABC transporter, ATP-binding protein
  misc_feature (98)..(686): Homolog of NCBI NO: 37519667 NR Description: ABC transporter ATP-binding protein [Gloeobacter
  misc_feature (1)..(403): Homolog of NCBI NO: 9758971 NR Description: ABC transporter, ATP-binding protein-like
  misc_feature (98)..(661): Homolog of NCBI NO: 23123983 NR Description: hypothetical protein [Nostoc punctiforme]
  misc_feature (98)..(684): Homolog of NCBI NO: 23039563 NR Description: hypothetical protein [Trichodesmium erythraeum
  misc_feature (98)..(671): Homolog of NCBI NO: 16330402 NR Description: ABC transporter [Synechocystis sp. PCC 6803]
  misc_feature (98)..(665): Homolog of NCBI NO: 17231675 NR Description: ATP-binding protein of ABC transporter [Nostoc
  misc_feature (42)..(692): Homolog of NCBI NO: 9758971 NR Description: ABC transporter, ATP-binding protein-like
  misc_feature (1)..(692): Homolog of NCBI NO: 22326697 NR Description: ABC transporter family protein; protein id:
MGLSTNLHSLDLRSTFFTGLRTSPIPSNFIKISSISNPRRDISTIRAQVSTISLETSVKQRQDEIESLFSKQPSQQDSDRKRNGKSSKNGASGISSGVKLENIRKSYKGVTVLKDVTWEVKRGEKVGLVGVNGAGKTTQLRIITGQEEPDSGNVIKAKPNMKVAFLSQEFEVSMSKTVREEFMTAFKEEMEITEKLEKVQKAIEGSVDDLDLMGRLLDEFDLLQRRAQAVNLDSVDAKISKLMPELGFAPEDADRLVASFSGGWQMRMSLGKILLQDPDLLLLDEPTNHLDLDTIEWLEGYLQKQDVPMVIISHDRAFLDQLCTKIVETEMGVSRTFEGNYSQYVISKAEWIETQNAAWEKQQKDIDSTKDLIARLGAGANSGRASTAEKKLEKLQEQELIEKPFQRKQMKIRFPERGTSGRSVVNVKNIDFGFEDKMLFKKANLSIERGEKIAILGPNGCGKSTLLKLIMGLEKPVKGEVILGEHNVLPNYFEQNQAEVLDLDKTVLETVCEAAEDWRSDDIKGLLGRCNFKADMLDRKVSLLSGGEKARLAFCKFMVTPSTLLVLDEPTNHLDIPSKEMLEEAINEYQGTVIAVSHDRYFIKQIVNRVIEVEDGCLEDYAGDYNYYLEKNLDARTKELEREAELEEKAPKVKAKSKMSKAEKEARKKQKMQAFQQAKQKSKASKNSKRWN

SEQ ID NO: 45975 - protein, 532 aa, Arabidopsis thaliana
  peptide (1)..(532): Ceres Seq. ID no. 12600194
  misc_feature (1)..(172): Pfam Name: ABC transporter Pfam Description: ABC transporter
  misc_feature (1)..(513): Homolog of NCBI NO: 20807041 NR Description: ATPase components of ABC transporters with
  misc_feature (1)..(526): Homolog of NCBI NO: 39996025 NR Description: ABC transporter, ATP-binding protein
  misc_feature (1)..(526): Homolog of NCBI NO: 37519667 NR Description: ABC transporter ATP-binding protein [Gloeobacter
  misc_feature (1)..(243): Homolog of NCBI NO: 9758971 NR Description: ABC transporter, ATP-binding protein-like
  misc_feature (1)..(501): Homolog of NCBI NO: 23123983 NR Description: hypothetical protein [Nostoc punctiforme]
  misc_feature (1)..(524): Homolog of NCBI NO: 23039563 NR Description: hypothetical protein [Trichodesmium erythraeum
  misc_feature (1)..(511): Homolog of NCBI NO: 16330402 NR Description: ABC transporter [Synechocystis sp. PCC 6803]
  misc_feature (1)..(505): Homolog of NCBI NO: 17231675 NR Description: ATP-binding protein of ABC transporter [Nostoc
  misc_feature (1)..(532): Homolog of NCBI NO: 9758971 NR Description: ABC transporter, ATP-binding protein-like
  misc_feature (1)..(532): Homolog of NCBI NO: 22326697 NR Description: ABC transporter family protein; protein id:
MKVAFLSQEFEVSMSKTVREEFMTAFKEEMEITEKLEKVQKAIEGSVDDLDLMGRLLDEFDLLQRRAQAVNLDSVDAKISKLMPELGFAPEDADRLVASFSGGWQMRMSLGKILLQDPDLLLLDEPTNHLDLDTIEWLEGYLQKQDVPMVIISHDRAFLDQLCTKIVETEMGVSRTFEGNYSQYVISKAEWIETQNAAWEKQQKDIDSTKDLIARLGAGANSGRASTAEKKLEKLQEQELIEKPFQRKQMKIRFPERGTSGRSVVNVKNIDFGFEDKMLFKKANLSIERGEKIAILGPNGCGKSTLLKLIMGLEKPVKGEVILGEHNVLPNYFEQNQAEVLDLDKTVLETVCEAAEDWRSDDIKGLLGRCNFKADMLDRKVSLLSGGEKARLAFCKFMVTPSTLLVLDEPTNHLDIPSKEMLEEAINEYQGTVIAVSHDRYFIKQIVNRVIEVEDGCLEDYAGDYNYYLEKNLDARTKELEREAELEEKAPKVKAKSKMSKAEKEARKKQKMQAFQQAKQKSKASKNSKRWN

SEQ ID NO: 45976 - protein, 519 aa, Arabidopsis thaliana
  peptide (1)..(519): Ceres Seq. ID no. 12600195
  misc_feature (1)..(159): Pfam Name: ABC transporter Pfam Description: ABC transporter
  misc_feature (1)..(500): Homolog of NCBI NO: 20807041 NR Description: ATPase components of ABC transporters with
  misc_feature (1)..(513): Homolog of NCBI NO: 39996025 NR Description: ABC transporter, ATP-binding protein
  misc_feature (1)..(513): Homolog of NCBI NO: 37519667 NR Description: ABC transporter ATP-binding protein [Gloeobacter
  misc_feature (1)..(230): Homolog of NCBI NO: 9758971 NR Description: ABC transporter, ATP-binding protein-like
  misc_feature (1)..(488): Homolog of NCBI NO: 23123983 NR Description: hypothetical protein [Nostoc punctiforme]
  misc_feature (1)..(511): Homolog of NCBI NO: 23039563 NR Description: hypothetical protein [Trichodesmium erythraeum
  misc_feature (1)..(498): Homolog of NCBI NO: 16330402 NR Description: ABC transporter [Synechocystis sp. PCC 6803]
  misc_feature (1)..(492): Homolog of NCBI NO: 17231675 NR Description: ATP-binding protein of ABC transporter [Nostoc
  misc_feature (1)..(519): Homolog of NCBI NO: 9758971 NR Description: ABC transporter, ATP-binding protein-like
  misc_feature (1)..(519): Homolog of NCBI NO: 22326697 NR Description: ABC transporter family protein; protein id:
MSKTVREEFMTAFKEEMEITEKLEKVQKAIEGSVDDLDLMGRLLDEFDLLQRRAQAVNLDSVDAKISKLMPELGFAPEDADRLVASFSGGWQMRMSLGKILLQDPDLLLLDEPTNHLDLDTIEWLEGYLQKQDVPMVIISHDRAFLDQLCTKIVETEMGVSRTFEGNYSQYVISKAEWIETQNAAWEKQQKDIDSTKDLIARLGAGANSGRASTAEKKLEKLQEQELIEKPFQRKQMKIRFPERGTSGRSVVNVKNIDFGFEDKMLFKKANLSIERGEKIAILGPNGCGKSTLLKLIMGLEKPVKGEVILGEHNVLPNYFEQNQAEVLDLDKTVLETVCEAAEDWRSDDIKGLLGRCNFKADMLDRKVSLLSGGEKARLAFCKFMVTPSTLLVLDEPTNHLDIPSKEMLEEAINEYQGTVIAVSHDRYFIKQIVNRVIEVEDGCLEDYAGDYNYYLEKNLDARTKELEREAELEEKAPKVKAKSKMSKAEKEARKKQKMQAFQQAKQKSKASKNSKRWN

SEQ ID NO: 45977 - DNA, 2055 bp, Arabidopsis thaliana
  misc_feature (1)..(2055): Ceres Seq. ID no. 13576063
  misc_feature: MA Experiment ID: 20000182 Result: Up-regulated in Transcription
  misc_feature: MA Experiment 20000182 PARAMETER Experiment Name: At_2mM_SA_P Parameter: Age (day) Value: 14
  misc_feature: MA Experiment 20000182 PARAMETER Experiment Name: At_2mM_SA_P Parameter: Organism Value: A. thaliana
  misc_feature: MA Experiment 20000182 PARAMETER Experiment Name: At_2mM_SA_P Parameter: Plant Line Value: WS
  misc_feature: MA Experiment 20000182 PARAMETER Experiment Name: At_2mM_SA_P Parameter: Timepoint (hr) Value: 6
  misc_feature: MA Experiment 20000182 PARAMETER Experiment Name: At_2mM_SA_P Parameter: Tissue Value: Aerial
  misc_feature: MA Experiment 20000182 PARAMETER Experiment Name: At_2mM_SA_P Parameter: Treatment Value: 2mM SA vs. No Treatment
  misc_feature: MA Experiment ID: 20000439 Result: Down-regulated in Transcription
  misc_feature: MA Experiment 20000439 PARAMETER Experiment Name: At_Roots__P Parameter: Age (day) Value: 14 vs. 21
  misc_feature: MA Experiment 20000439 PARAMETER Experiment Name: At_Roots__P Parameter: Organism Value: A. thaliana
  misc_feature: MA Experiment 20000439 PARAMETER Experiment Name: At_Roots__P Parameter: Tissue Value: Roots vs. Whole Plant
  misc_feature: MA Experiment ID: 20000445 Result: Up-regulated in Transcription
  misc_feature: MA Experiment 20000445 PARAMETER Experiment Name: At_100uM_NAA__P Parameter: Age (day) Value: 14
  misc_feature: MA Experiment 20000445 PARAMETER Experiment Name: At_100uM_NAA__P Parameter: Organism Value: A. thaliana
  misc_feature: MA Experiment 20000445 PARAMETER Experiment Name: At_100uM_NAA__P Parameter: Plant Line Value: WS
  misc_feature: MA Experiment 20000445 PARAMETER Experiment Name: At_100uM_NAA__P Parameter: Timepoint (hr) Value: 6
  misc_feature: MA Experiment 20000445 PARAMETER Experiment Name: At_100uM_NAA__P Parameter: Tissue Value: Aerial
  misc_feature: MA Experiment 20000445 PARAMETER Experiment Name: At_100uM_NAA__P Parameter: Treatment Value: 100uM NAA vs. No Treatment
  misc_feature: MA Experiment ID: 20001451 Result: Down-regulated in Transcription
  misc_feature: MA Experiment 20001451 PARAMETER Experiment Name: At_Far-red-induction_P Parameter: Age (day) Value: 7
  misc_feature: MA Experiment 20001451 PARAMETER Experiment Name: At_Far-red-induction_P Parameter: Light Value: Far-red vs. White
  misc_feature: MA Experiment 20001451 PARAMETER Experiment Name: At_Far-red-induction_P Parameter: Organism Value: A. thaliana
  misc_feature: MA Experiment 20001451 PARAMETER Experiment Name: At_Far-red-induction_P Parameter: Plant Line Value: Columbia
  misc_feature: MA Experiment 20001451 PARAMETER Experiment Name: At_Far-red-induction_P Parameter: Timepoint (hr) Value: 24
  misc_feature: MA Experiment 20001451 PARAMETER Experiment Name: At_Far-red-induction_P Parameter: Tissue Value: Whole Plant
gaaaatcagtgtgaattggagagagagagaagacaggaattgggaagtttcgtctttcgagcaaaactatcgaaatctaaatttagattgagaaacaagccaacaagctttttagtataaatcccataccacacaatcacaaatgcggagattcgtgattggccaagctaaaaatctcatagatcagagtcgtcgtcgtcaacttcatcatcacaaaaatctcagctttgtctctcttattcctcctttttctgctccttccgattcttcatcgcgccacttgtcttcttcttcttcttccgatatgtctgcttctgattcctcttcctctcttcccgttactcttgacaccatcaaccccaaggttatcaaatgtgagtatgctgtccgtggagaaattgtcaacattgctcagaaattgcaagaagatttgaagactaacaaggacgcttatccctttgatgagattatctactgtaatatcgggaatcctcaatctcttggtcaacagcctataacattcttcagagaggttcttgctttatgttcctacacagccctgttggatgagagtgcaacacacggtttgttcagttctgattcgattgagcgtgcttggaagattctggaccaaattcccgggagagcgactggtgcttacagccacagccagggtatcaaggggttacgtgatgcaattgctgatggaatcgaagcccgtgatggtttccctgctgatcctaatgatatattcatgacagatggtgcaagtccaggggttcatatgatgatgcaacttctcataacttcagagaaagatggaatcctttgtcctattcctcagtatccattgtactcagcttcaattgcccttcacggtggaactttggttccatactaccttgatgaagcatcaggatggggtcttgaaatatctgagctgaagaaacaacttgaagatgctaggtcaaagggcatcactgtgagagctttggctgtcattaaccctggaaacccgacagggcaggttctttcggaagaaaaccagcgtgacgttgttaagttctgcaagcaagagggtttagttcttttagcagacgaggtttatcaagagaatgtctatgtccctgacaaaaagttccattccttcaagaaagtagcccgctctatgggctacggtgagaaggatcttgccttagtctctttccaatctgtctccaaagggtactatggagagtgtgggaaaagaggtggttacatggaggttactggattcacttctgatgtaagagagcagatatacaaaatggcttctgtgaatctttgttccaacatctctggtcaaattcttgctagcctcatcatgagcccacccaagcctggtgacgactcctatgaatcatacatagcagagaaggatggaattctctcatctttggcaagacgtgcaaagactcttgaagaggctctgaacaagctagagggagttacatgcaatagagcagaaggagctatgtatctattcccttgccttcaccttccacaaaaggcaattgcagctgctgaggcggaaaagacagcaccagacaatttctactgcaaacgccttctaaaagctactggaatagtcgttgtccctggttctggctttagacaggtacctggaacatggcatttcaggtgcactatacttccccaagaggataagattccagcgattgttgatcgtctaactgcgttccaccagagcttcatggacgagttccgcgactaagcattctgttttcaagatccctctatagattatatgagtaataataagaaaaaggtcccatgccgtttctttttcatcgactttgtgtttacagaagctaagatgtgagagcattagttagtgctctctttcttattcactttttgttctgttctctttatagtgaaaaaccgtaatataaattgagagagtttcttataaacggttagtcaaaatgtaatctcatcaagaaaacacaagattgaaccattgttgaattccatgttcaaagtttcgatttc

SEQ ID NO: 45978 - protein, 543 aa, Arabidopsis thaliana
  peptide (1)..(543): Ceres Seq. ID no. 13576064
  misc_feature (194)..(534): Pfam Name: Aminotransferase class I and II Pfam Description: Aminotransferase class I and II
  misc_feature (194)..(534): Pfam Name: Aminotransferase class I and II Pfam Description: Aminotransferase class I and II
  misc_feature (1)..(542): Homolog of NCBI NO: 24641760 NR Description: CG1640-PA [Drosophila melanogaster]
  misc_feature (66)..(543): Homolog of NCBI NO: 4730884 NR Description: alanine aminotransferase [Oryza sativa]
  misc_feature (66)..(543): Homolog of NCBI NO: 1703227 NR Description: ALANINE AMINOTRANSFERASE 2 (GPT)
  misc_feature (66)..(543): Homolog of NCBI NO: 3694807 NR Description: alanine aminotransferase [Zea mays]
  misc_feature (66)..(543): Homolog of NCBI NO: 461498 NR Description: ALANINE AMINOTRANSFERASE 2 (GPT)
  misc_feature (1)..(542): Homolog of NCBI NO: 24641760 NR Description: CG1640-PA [Drosophila melanogaster]
  misc_feature (66)..(543): Homolog of NCBI NO: 1703227 NR Description: ALANINE AMINOTRANSFERASE 2 (GPT)
  misc_feature (66)..(543): Homolog of NCBI NO: 461498 NR Description: ALANINE AMINOTRANSFERASE 2 (GPT)
  misc_feature (1)..(543): Homolog of NCBI NO: 9082270 NR Description: alanine aminotransferase [Arabidopsis thaliana]
  misc_feature (3)..(543): Homolog of NCBI NO: 21954071 NR Description: putative alanine aminotransferase [Arabidopsis
  misc_feature (75)..(543): Homolog of NCBI NO: 25287212 NR Description: hypothetical protein T13M22.3 [imported] -
  misc_feature (1)..(543): Homolog of NCBI NO: 30698866 NR Description: alanine aminotransferase, putative [Arabidopsis
  misc_feature (9)..(543): Homolog of NCBI NO: 21954069 NR Description: putative alanine aminotransferase [Arabidopsis
  misc_feature (66)..(543): Homolog of NCBI NO: 3694807 NR Description: alanine aminotransferase [Zea mays]
  misc_feature (66)..(543): Homolog of NCBI NO: 4730884 NR Description: alanine aminotransferase [Oryza sativa]
  misc_feature (9)..(543): Homolog of NCBI NO: 21954069 NR Description: putative alanine aminotransferase [Arabidopsis
  misc_feature (1)..(543): Homolog of NCBI NO: 30698866 NR Description: alanine aminotransferase, putative [Arabidopsis
  misc_feature (75)..(543): Homolog of NCBI NO: 25287212 NR Description: hypothetical protein T13M22.3 [imported] -
  misc_feature (3)..(543): Homolog of NCBI NO: 21954071 NR Description: putative alanine aminotransferase [Arabidopsis
  misc_feature (1)..(543): Homolog of NCBI NO: 9082270 NR Description: alanine aminotransferase [Arabidopsis thaliana]
MRRFVIGQAKNLIDQSRRRQLHHHKNLSFVSLIPPFSAPSDSSSRHLSSSSSSDMSASDSSSSLPVTLDTINPKVIKCEYAVRGEIVNIAQKLQEDLKTNKDAYPFDEIIYCNIGNPQSLGQQPITFFREVLALCSYTALLDESATHGLFSSDSIERAWKILDQIPGRATGAYSHSQGIKGLRDAIADGIEARDGFPADPNDIFMTDGASPGVHMMMQLLITSEKDGILCPIPQYPLYSASIALHGGTLVPYYLDEASGWGLEISELKKQLEDARSKGITVRALAVINPGNPTGQVLSEENQRDVVKFCKQEGLVLLADEVYQENVYVPDKKFHSFKKVARSMGYGEKDLALVSFQSVSKGYYGECGKRGGYMEVTGFTSDVREQIYKMASVNLCSNISGQILASLIMSPPKPGDDSYESYIAEKDGILSSLARRAKTLEEALNKLEGVTCNRAEGAMYLFPCLHLPQKAIAAAEAEKTAPDNFYCKRLLKATGIVVVPGSGFRQVPGTWHFRCTILPQEDKIPAIVDRLTAFHQSFMDEFRD

SEQ ID NO: 45979 - protein, 489 aa, Arabidopsis thaliana
  peptide (1)..(489): Ceres Seq. ID no. 13576065
  misc_feature (140)..(480): Pfam Name: Aminotransferase class I and II Pfam Description: Aminotransferase class I and II
  misc_feature (140)..(480): Pfam Name: Aminotransferase class I and II Pfam Description: Aminotransferase class I and II
  misc_feature (1)..(488): Homolog of NCBI NO: 24641760 NR Description: CG1640-PA [Drosophila melanogaster]
  misc_feature (12)..(489): Homolog of NCBI NO: 4730884 NR Description: alanine aminotransferase [Oryza sativa]
  misc_feature (12)..(489): Homolog of NCBI NO: 1703227 NR Description: ALANINE AMINOTRANSFERASE 2 (GPT)
  misc_feature (12)..(489): Homolog of NCBI NO: 3694807 NR Description: alanine aminotransferase [Zea mays]
  misc_feature (12)..(489): Homolog of NCBI NO: 461498 NR Description: ALANINE AMINOTRANSFERASE 2 (GPT)
  misc_feature (1)..(488): Homolog of NCBI NO: 24641760 NR Description: CG1640-PA [Drosophila melanogaster]
  misc_feature (12)..(489): Homolog of NCBI NO: 1703227 NR Description: ALANINE AMINOTRANSFERASE 2 (GPT)
  misc_feature (12)..(489): Homolog of NCBI NO: 461498 NR Description: ALANINE AMINOTRANSFERASE 2 (GPT)
  misc_feature (1)..(489): Homolog of NCBI NO: 9082270 NR Description: alanine aminotransferase [Arabidopsis thaliana]
  misc_feature (1)..(489): Homolog of NCBI NO: 21954071 NR Description: putative alanine aminotransferase [Arabidopsis
  misc_feature (21)..(489): Homolog of NCBI NO: 25287212 NR Description: hypothetical protein T13M22.3 [imported] -
  misc_feature (1)..(489): Homolog of NCBI NO: 30698866 NR Description: alanine aminotransferase, putative [Arabidopsis
  misc_feature (1)..(489): Homolog of NCBI NO: 21954069 NR Description: putative alanine aminotransferase [Arabidopsis
  misc_feature (12)..(489): Homolog of NCBI NO: 3694807 NR Description: alanine aminotransferase [Zea mays]
  misc_feature (12)..(489): Homolog of NCBI NO: 4730884 NR Description: alanine aminotransferase [Oryza sativa]
  misc_feature (1)..(489): Homolog of NCBI NO: 21954069 NR Description: putative alanine aminotransferase [Arabidopsis
  misc_feature (1)..(489): Homolog of NCBI NO: 30698866 NR Description: alanine aminotransferase, putative [Arabidopsis
  misc_feature (21)..(489): Homolog of NCBI NO: 25287212 NR Description: hypothetical protein T13M22.3 [imported] -
  misc_feature (1)..(489): Homolog of NCBI NO: 21954071 NR Description: putative alanine aminotransferase [Arabidopsis
  misc_feature (1)..(489): Homolog of NCBI NO: 9082270 NR Description: alanine aminotransferase [Arabidopsis thaliana]
MSASDSSSSLPVTLDTINPKVIKCEYAVRGEIVNIAQKLQEDLKTNKDAYPFDEIIYCNIGNPQSLGQQPITFFREVLALCSYTALLDESATHGLFSSDSIERAWKILDQIPGRATGAYSHSQGIKGLRDAIADGIEARDGFPADPNDIFMTDGASPGVHMMMQLLITSEKDGILCPIPQYPLYSASIALHGGTLVPYYLDEASGWGLEISELKKQLEDARSKGITVRALAVINPGNPTGQVLSEENQRDVVKFCKQEGLVLLADEVYQENVYVPDKKFHSFKKVARSMGYGEKDLALVSFQSVSKGYYGECGKRGGYMEVTGFTSDVREQIYKMASVNLCSNISGQILASLIMSPPKPGDDSYESYIAEKDGILSSLARRAKTLEEALNKLEGVTCNRAEGAMYLFPCLHLPQKAIAAAEAEKTAPDNFYCKRLLKATGIVVVPGSGFRQVPGTWHFRCTILPQEDKIPAIVDRLTAFHQSFMDEFRD

SEQ ID NO: 45980 - protein, 339 aa, Arabidopsis thaliana
  peptide (1)..(339): Ceres Seq. ID no. 13576066
  misc_feature (1)..(330): Pfam Name: Aminotransferase class I and II Pfam Description: Aminotransferase class I and II
  misc_feature (1)..(330): Pfam Name: Aminotransferase class I and II Pfam Description: Aminotransferase class I and II
  misc_feature (1)..(338): Homolog of NCBI NO: 24641760 NR Description: CG1640-PA [Drosophila melanogaster]
  misc_feature (1)..(339): Homolog of NCBI NO: 4730884 NR Description: alanine aminotransferase [Oryza sativa]
  misc_feature (1)..(339): Homolog of NCBI NO: 1703227 NR Description: ALANINE AMINOTRANSFERASE 2 (GPT)
  misc_feature (1)..(339): Homolog of NCBI NO: 3694807 NR Description: alanine aminotransferase [Zea mays]
  misc_feature (1)..(339): Homolog of NCBI NO: 461498 NR Description: ALANINE AMINOTRANSFERASE 2 (GPT)
  misc_feature (1)..(338): Homolog of NCBI NO: 24641760 NR Description: CG1640-PA [Drosophila melanogaster]
  misc_feature (1)..(339): Homolog of NCBI NO: 1703227 NR Description: ALANINE AMINOTRANSFERASE 2 (GPT)
  misc_feature (1)..(339): Homolog of NCBI NO: 461498 NR Description: ALANINE AMINOTRANSFERASE 2 (GPT)
  misc_feature (1)..(339): Homolog of NCBI NO: 9082270 NR Description: alanine aminotransferase [Arabidopsis thaliana]
  misc_feature (1)..(339): Homolog of NCBI NO: 21954071 NR Description: putative alanine aminotransferase [Arabidopsis
  misc_feature (1)..(339): Homolog of NCBI NO: 25287212 NR Description: hypothetical protein T13M22.3 [imported] -
  misc_feature (1)..(339): Homolog of NCBI NO: 30698866 NR Description: alanine aminotransferase, putative [Arabidopsis
  misc_feature (1)..(339): Homolog of NCBI NO: 21954069 NR Description: putative alanine aminotransferase [Arabidopsis
  misc_feature (1)..(339): Homolog of NCBI NO: 3694807 NR Description: alanine aminotransferase [Zea mays]
  misc_feature (1)..(339): Homolog of NCBI NO: 4730884 NR Description: alanine aminotransferase [Oryza sativa]
  misc_feature (1)..(339): Homolog of NCBI NO: 21954069 NR Description: putative alanine aminotransferase [Arabidopsis
  misc_feature (1)..(339): Homolog of NCBI NO: 30698866 NR Description: alanine aminotransferase, putative [Arabidopsis
  misc_feature (1)..(339): Homolog of NCBI NO: 25287212 NR Description: hypothetical protein T13M22.3 [imported] -
  misc_feature (1)..(339): Homolog of NCBI NO: 21954071 NR Description: putative alanine aminotransferase [Arabidopsis
  misc_feature (1)..(339): Homolog of NCBI NO: 9082270 NR Description: alanine aminotransferase [Arabidopsis thaliana]
MTDGASPGVHMMMQLLITSEKDGILCPIPQYPLYSASIALHGGTLVPYYLDEASGWGLEISELKKQLEDARSKGITVRALAVINPGNPTGQVLSEENQRDVVKFCKQEGLVLLADEVYQENVYVPDKKFHSFKKVARSMGYGEKDLALVSFQSVSKGYYGECGKRGGYMEVTGFTSDVREQIYKMASVNLCSNISGQILASLIMSPPKPGDDSYESYIAEKDGILSSLARRAKTLEEALNKLEGVTCNRAEGAMYLFPCLHLPQKAIAAAEAEKTAPDNFYCKRLLKATGIVVVPGSGFRQVPGTWHFRCTILPQEDKIPAIVDRLTAFHQSFMDEFRD

SEQ ID NO: 45981 - DNA, 1385 bp, Arabidopsis thaliana
  misc_feature (1)..(1385): Ceres Seq. ID no. 14310101
  misc_feature: MA Experiment ID: 20000171 Result: Up-regulated in Transcription
  misc_feature: MA Experiment 20000171 PARAMETER Experiment Name: At_42deg_Heat_P Parameter: Age (day) Value: 14
  misc_feature: MA Experiment 20000171 PARAMETER Experiment Name: At_42deg_Heat_P Parameter: Organism Value: A. thaliana
  misc_feature: MA Experiment 20000171 PARAMETER Experiment Name: At_42deg_Heat_P Parameter: Plant Line Value: WS
  misc_feature: MA Experiment 20000171 PARAMETER Experiment Name: At_42deg_Heat_P Parameter: Temperature (deg C) Value: 42 vs. 22
  misc_feature: MA Experiment 20000171 PARAMETER Experiment Name: At_42deg_Heat_P Parameter: Timepoint (hr) Value: 1
  misc_feature: MA Experiment 20000171 PARAMETER Experiment Name: At_42deg_Heat_P Parameter: Tissue Value: Aerial
  misc_feature: MA Experiment ID: 20000184 Result: Down-regulated in Transcription
  misc_feature: MA Experiment 20000184 PARAMETER Experiment Name: At_Shoots__P Parameter: Age (day) Value: 7
  misc_feature: MA Experiment 20000184 PARAMETER Experiment Name: At_Shoots__P Parameter: Tissue Value: Shoots vs. Whole Plant
gaccctaatttgagcagatctttccaattgaaagcgaaccgtgaattttgagtctctttaccggcggcgaaaaaatgcttggtggattatacggagatcttcctccaccgaccgatgatgagaaacccagtggaaactcctcttccgtctggtcaagcagtaccaaaatggctccacctacacttcgcaaaccaccagcttttgctcccccgcaaacaatcttaagacctctcaacaaacctaaacctatcgtttcggctccgtacaagcctcctcctccttcgaattcatcgcaatcggtgcttattccggcgaacgaatcagcaccttcgcatcagcctgcattggttggtgtgacttcatcggtgattgaagagtacgatccagcgagacctaacgattacgaggagtataagagggagaagaagaggaaagctacggaagctgagatgaaacgagagatggataagagaaggcaagaggatgaggaaagagataagagagaaagagaagagagggagaaggagagagagagagataacagtgatccgtctcggttgaatatctccggtgaggaagcgtggaagagacgcgctgctatgagtggtggtggaagtggtgggaagggaagatcttcgtctccgccggggaatgttgatgggtttagtattgggaaatcggagacgagtgggttaggagtaggagcaggtggacagatgacagctgctcagaggatgatggcgaagatgggatggaaacaaggacaagggcttgggaaatcagagcaagggattactacgccattgatggctaagaagactgatcgtagagctggtgtcattgtcaatgctagtgagaataaatcttcttcggcggagaagaaggttgttaagagtgttaatatcaatggtgaaccaaccagggttttgcttcttagaaacatggttgggccaggacaagtagatgatgagctagaagatgaggtaggaggcgagtgtggcaaatacggtacagtcactcgtgtactgatattcgagatcactgaaccgaacttccctgtacacgaagcagtaagaatctttgttcagttttcaagacccgaggaaacaactaaagcccttgtagacctcgatgggagatactttggaggaagaaccgtacgtgcaacgttctatgatgaagagaaattcagtaagaacgagttggctccagttccaggtgaaatccctggctattaataactcctaagacaaagaagaaacttcatcttctaggagattcttgttagaaagaaaccatagatgaggttttaaaaacatttgtaaagtacttagaaatcttgggattatctctttattgttgttcaaagtagcttcacaaggatc

SEQ ID NO: 45982 - protein, 387 aa, Arabidopsis thaliana
  peptide (1)..(387): Ceres Seq. ID no. 14310102
  misc_feature (285)..(364): Pfam Name: RNA recognition motif. (a.k.a. RRM, RBD, or RNP domain) Pfam Description: RNA recognition motif. (a.k.a. RRM, RBD, or RNP
  misc_feature (281)..(372): Homolog of NCBI NO: 30923530 NR Description: CG17540-PA.3 [Drosophila melanogaster]
  misc_feature (15)..(261): Homolog of NCBI NO: 30923530 NR Description: CG17540-PA.3 [Drosophila melanogaster]
  misc_feature (99)..(383): Homolog of NCBI NO: 21666567 NR Description: DNA repair enzyme [Toxoplasma gondii]
  misc_feature (51)..(378): Homolog of NCBI NO: 22779924 NR Description: RIKEN cDNA 2700027J02 [Mus musculus]
  misc_feature (58)..(378): Homolog of NCBI NO: 14249678 NR Description: splicing factor (45kD) [Homo sapiens]
  misc_feature (58)..(378): Homolog of NCBI NO: 14290573 NR Description: Unknown (protein for IMAGE:3868191) [Homo sapiens]
  misc_feature (1)..(271): Homolog of NCBI NO: 34913374 NR Description: putative DNA damage repair protein
  misc_feature (44)..(387): Homolog of NCBI NO: 34913374 NR Description: putative DNA damage repair protein
  misc_feature (1)..(387): Homolog of NCBI NO: 421829 NR Description: DNA-damage repair protein DRT111 precursor -
  misc_feature (1)..(387): Homolog of NCBI NO: 15220757 NR Description: DNA damage repair protein -related [Arabidopsis
MLGGLYGDLPPPTDDEKPSGNSSSVWSSSTKMAPPTLRKPPAFAPPQTILRPLNKPKPIVSAPYKPPPPSNSSQSVLIPANESAPSHQPALVGVTSSVIEEYDPARPNDYEEYKREKKRKATEAEMKREMDKRRQEDEERDKREREEREKERERDNSDPSRLNISGEEAWKRRAAMSGGGSGGKGRSSSPPGNVDGFSIGKSETSGLGVGAGGQMTAAQRMMAKMGWKQGQGLGKSEQGITTPLMAKKTDRRAGVIVNASENKSSSAEKKVVKSVNINGEPTRVLLLRNMVGPGQVDDELEDEVGGECGKYGTVTRVLIFEITEPNFPVHEAVRIFVQFSRPEETTKALVDLDGRYFGGRTVRATFYDEEKFSKNELAPVPGEIPGY

SEQ ID NO: 45983 - protein, 356 aa, Arabidopsis thaliana
  peptide (1)..(356): Ceres Seq. ID no. 14310103
  misc_feature (254)..(333): Pfam Name: RNA recognition motif. (a.k.a. RRM, RBD, or RNP domain) Pfam Description: RNA recognition motif. (a.k.a. RRM, RBD, or RNP
  misc_feature (250)..(341): Homolog of NCBI NO: 30923530 NR Description: CG17540-PA.3 [Drosophila melanogaster]
  misc_feature (1)..(230): Homolog of NCBI NO: 30923530 NR Description: CG17540-PA.3 [Drosophila melanogaster]
  misc_feature (68)..(352): Homolog of NCBI NO: 21666567 NR Description: DNA repair enzyme [Toxoplasma gondii]
  misc_feature (20)..(347): Homolog of NCBI NO: 22779924 NR Description: RIKEN cDNA 2700027J02 [Mus musculus]
  misc_feature (27)..(347): Homolog of NCBI NO: 14249678 NR Description: splicing factor (45kD) [Homo sapiens]
  misc_feature (27)..(347): Homolog of NCBI NO: 14290573 NR Description: Unknown (protein for IMAGE:3868191) [Homo sapiens]
  misc_feature (1)..(240): Homolog of NCBI NO: 34913374 NR Description: putative DNA damage repair protein
  misc_feature (13)..(356): Homolog of NCBI NO: 34913374 NR Description: putative DNA damage repair protein
  misc_feature (1)..(356): Homolog of NCBI NO: 421829 NR Description: DNA-damage repair protein DRT111 precursor -
  misc_feature (1)..(356): Homolog of NCBI NO: 15220757 NR Description: DNA damage repair protein -related [Arabidopsis
MAPPTLRKPPAFAPPQTILRPLNKPKPIVSAPYKPPPPSNSSQSVLIPANESAPSHQPALVGVTSSVIEEYDPARPNDYEEYKREKKRKATEAEMKREMDKRRQEDEERDKREREEREKERERDNSDPSRLNISGEEAWKRRAAMSGGGSGGKGRSSSPPGNVDGFSIGKSETSGLGVGAGGQMTAAQRMMAKMGWKQGQGLGKSEQGITTPLMAKKTDRRAGVIVNASENKSSSAEKKVVKSVNINGEPTRVLLLRNMVGPGQVDDELEDEVGGECGKYGTVTRVLIFEITEPNFPVHEAVRIFVQFSRPEETTKALVDLDGRYFGGRTVRATFYDEEKFSKNELAPVPGEIPGY

SEQ ID NO: 45984 - protein, 262 aa, Arabidopsis thaliana
  peptide (1)..(262): Ceres Seq. ID no. 14310104
  misc_feature (160)..(239): Pfam Name: RNA recognition motif. (a.k.a. RRM, RBD, or RNP domain) Pfam Description: RNA recognition motif. (a.k.a. RRM, RBD, or RNP
  misc_feature (156)..(247): Homolog of NCBI NO: 30923530 NR Description: CG17540-PA.3 [Drosophila melanogaster]
  misc_feature (1)..(136): Homolog of NCBI NO: 30923530 NR Description: CG17540-PA.3 [Drosophila melanogaster]
  misc_feature (1)..(258): Homolog of NCBI NO: 21666567 NR Description: DNA repair enzyme [Toxoplasma gondii]
  misc_feature (1)..(253): Homolog of NCBI NO: 22779924 NR Description: RIKEN cDNA 2700027J02 [Mus musculus]
  misc_feature (1)..(253): Homolog of NCBI NO: 14249678 NR Description: splicing factor (45kD) [Homo sapiens]
  misc_feature (1)..(253): Homolog of NCBI NO: 14290573 NR Description: Unknown (protein for IMAGE:3868191) [Homo sapiens]
  misc_feature (1)..(146): Homolog of NCBI NO: 34913374 NR Description: putative DNA damage repair protein
  misc_feature (1)..(262): Homolog of NCBI NO: 34913374 NR Description: putative DNA damage repair protein
  misc_feature (1)..(262): Homolog of NCBI NO: 421829 NR Description: DNA-damage repair protein DRT111 precursor -
  misc_feature (1)..(262): Homolog of NCBI NO: 15220757 NR Description: DNA damage repair protein -related [Arabidopsis
MKREMDKRRQEDEERDKREREEREKERERDNSDPSRLNISGEEAWKRRAAMSGGGSGGKGRSSSPPGNVDGFSIGKSETSGLGVGAGGQMTAAQRMMAKMGWKQGQGLGKSEQGITTPLMAKKTDRRAGVIVNASENKSSSAEKKVVKSVNINGEPTRVLLLRNMVGPGQVDDELEDEVGGECGKYGTVTRVLIFEITEPNFPVHEAVRIFVQFSRPEETTKALVDLDGRYFGGRTVRATFYDEEKFSKNELAPVPGEIPGY

SEQ ID NO: 45985 - DNA, 1923 bp, Arabidopsis thaliana
  misc_feature (1)..(1923): Ceres Seq. ID no. 15168953
  misc_feature: MA Experiment ID: 20000437 Result: Up-regulated in Transcription
  misc_feature: MA Experiment 20000437 PARAMETER Experiment Name: At_Drought_P Parameter: Age (day) Value: 8
  misc_feature: MA Experiment 20000437 PARAMETER Experiment Name: At_Drought_P Parameter: Organism Value: A. thaliana
  misc_feature: MA Experiment 20000437 PARAMETER Experiment Name: At_Drought_P Parameter: Plant Line Value: WS
  misc_feature: MA Experiment 20000437 PARAMETER Experiment Name: At_Drought_P Parameter: Timepoint (hr) Value: 24
  misc_feature: MA Experiment 20000437 PARAMETER Experiment Name: At_Drought_P Parameter: Tissue Value: Whole Plant
  misc_feature: MA Experiment 20000437 PARAMETER Experiment Name: At_Drought_P Parameter: Treatment Value: Drought vs. No Drought
  misc_feature: MA Experiment ID: 20000794 Result: Up-regulated in Transcription
  misc_feature: MA Experiment 20000794 PARAMETER Experiment Name: At_Petals_P Parameter: Age (day) Value: 23-25 days
  misc_feature: MA Experiment 20000794 PARAMETER Experiment Name: At_Petals_P Parameter: Plant Line Value: WS
  misc_feature: MA Experiment 20000794 PARAMETER Experiment Name: At_Petals_P Parameter: Tissue Value: Petals vs. Whole plant
  misc_feature: MA Experiment ID: 20001451 Result: Up-regulated in Transcription
  misc_feature: MA Experiment 20001451 PARAMETER Experiment Name: At_Far-red-induction_P Parameter: Age (day) Value: 7
  misc_feature: MA Experiment 20001451 PARAMETER Experiment Name: At_Far-red-induction_P Parameter: Light Value: Far-red vs. White
  misc_feature: MA Experiment 20001451 PARAMETER Experiment Name: At_Far-red-induction_P Parameter: Organism Value: A. thaliana
  misc_feature: MA Experiment 20001451 PARAMETER Experiment Name: At_Far-red-induction_P Parameter: Plant Line Value: Columbia
  misc_feature: MA Experiment 20001451 PARAMETER Experiment Name: At_Far-red-induction_P Parameter: Timepoint (hr) Value: 24
  misc_feature: MA Experiment 20001451 PARAMETER Experiment Name: At_Far-red-induction_P Parameter: Tissue Value: Whole Plant
atttctttattattcccttcttcttctttctctttctcttttcttccgcaaatctccgcaaaatcttccctcaaactcagatccgattcttctaattctttgcccccctagagattcttcttctttctccaagtaaaagaaaacaactttctttctcttttcttgcgaaagtcctcaactttcaccactaaatcagcttccttcaatcactgtgtttgctttggacccagtttctgatttagcgactagggttttgattggaaccgtattaagtatatgagaatcgggttttactggtgaatcggattatcatcggaattcggaaaaagatggatcggaatcaaaagatggatcacgttatcggcgggaagtttaagttgggtaggaagcttggaagtggatcattcggtgaactttatttagggatcaatattcaaactggagaagaagtcgcagttaagctggaacctgtgaagacgaggcatcctcaactgcagtatgaatcgaaaatatatatgtttcttcaaggaggaacgggtgttccccatctgaaatggtttggagttgagggtgaatacagttgcatggttatcgatcttcttgggccaagcttggaggacttattcaattactgcaagcgaatattttcattaaaatctgttttaatgcttgcagatcaattgatatgtagagttgagtatatgcattcgcggggttttcttcaccgcgatattaaaccagacaactttttgatgggtcttgggcgcagagcaaaccaggtgtatatcattgattatggccttgctaaaaaatacaaggatcttcagacacaaaagcatataccatacagggaaaacaagaatcttacaggaactgctcggtatgcaagtgtgaacacacaccttgggattgagcaaagtagaagagatgatctggagtcacttggttatgtgttgatgtattttctacgaggaagtcttccgtggcaaggtttaaaagctggtacgaagaagcagaaatatgacaagattagtgaaaagaagatgcttacttctgtagagactctttgcaagtcgtatccatcagagttcacatcgtacttccattactgtcgttcattgagatttgaggacaaaccggattattcatatctgagaagactttttagggatcttttcattcgtgaaggttatcagcttgattatgtgtttgattggacaatctcgaagtatcctcagattggctctagttcgagaccaaggccaactccaagaccagcgttggaccctccaggaccacctgcagaaagagctgaaaagcctacagtcggacaggacctgcgaggaagatttacaggtgcaattgaggcattcaccagacgaaatgtttcaagccaaggcgctcttggtgatcgctctagacacagatcttctgatgatataccctcttctgccaaggaagtgcacgagtctcgaaatggaagtacctcaaagagaggtgtgatatcaagcaccagacctggctcatcagctgaaccaagcgagaaccactcaagccgactattttcaagtggttcacgtcatgccacaacccaacgggttccacagagctatgaatctgcagctgcagcaaggcctgggcatgaggatgccattagaaacttcgagctccttaccatcggctctggaaagaagaggaaatgaagatagggaaggagaagtttgatgagagtgaaaagacaacattcggtgctgatggctctctcctctgaaaataggaaagacatgtcctcgaattgttttttaaccttgggaacaagatgagaaagtgagagagagaaagagagttaatgtaatctgcctctcccaatctctcagtctctgtttttaaaagaatctgttaataaagctttaaagtgtaact

SEQ ID NO: 45986 - protein, 457 aa, Arabidopsis thaliana
  peptide (1)..(457): Ceres Seq. ID no. 15168954
  misc_feature (7)..(385): Homolog of NCBI NO: 13122442 NR Description: casein kinase1 epsilon-2 [Rattus norvegicus]
  misc_feature (7)..(439): Homolog of NCBI NO: 21536851 NR Description: protein kinase ADK1-like protein [Arabidopsis
  misc_feature (6)..(439): Homolog of NCBI NO: 18417216 NR Description: casein kinase, putative [Arabidopsis thaliana]
  misc_feature (7)..(456): Homolog of NCBI NO: 32482941 NR Description: OSJNBb0072M01.6 [Oryza sativa (japonica
  misc_feature (7)..(435): Homolog of NCBI NO: 15239840 NR Description: casein kinase I, putative [Arabidopsis thaliana]
  misc_feature (7)..(436): Homolog of NCBI NO: 27754653 NR Description: putative casein kinase I [Arabidopsis thaliana]
  misc_feature (7)..(436): Homolog of NCBI NO: 15219733 NR Description: casein kinase, putative [Arabidopsis thaliana]
  misc_feature (32)..(456): Homolog of NCBI NO: 1197461 NR Description: casein kinase I [Arabidopsis thaliana]
  misc_feature (7)..(456): Homolog of NCBI NO: 15229427 NR Description: casein kinase, putative [Arabidopsis thaliana]
  misc_feature (1)..(457): Homolog of NCBI NO: 15236471 NR Description: casein kinase I (CKI1) [Arabidopsis thaliana]
MDRNQKMDHVIGGKFKLGRKLGSGSFGELYLGINIQTGEEVAVKLEPVKTRHPQLQYESKIYMFLQGGTGVPHLKWFGVEGEYSCMVIDLLGPSLEDLFNYCKRIFSLKSVLMLADQLICRVEYMHSRGFLHRDIKPDNFLMGLGRRANQVYIIDYGLAKKYKDLQTQKHIPYRENKNLTGTARYASVNTHLGIEQSRRDDLESLGYVLMYFLRGSLPWQGLKAGTKKQKYDKISEKKMLTSVETLCKSYPSEFTSYFHYCRSLRFEDKPDYSYLRRLFRDLFIREGYQLDYVFDWTISKYPQIGSSSRPRPTPRPALDPPGPPAERAEKPTVGQDLRGRFTGAIEAFTRRNVSSQGALGDRSRHRSSDDIPSSAKEVHESRNGSTSKRGVISSTRPGSSAEPSENHSSRLFSSGSRHATTQRVPQSYESAAAARPGHEDAIRNFELLTIGSGKKRK

SEQ ID NO: 45987 - protein, 451 aa, Arabidopsis thaliana
  peptide (1)..(451): Ceres Seq. ID no. 15168955
  misc_feature (1)..(379): Homolog of NCBI NO: 13122442 NR Description: casein kinase1 epsilon-2 [Rattus norvegicus]
  misc_feature (1)..(433): Homolog of NCBI NO: 21536851 NR Description: protein kinase ADK1-like protein [Arabidopsis
  misc_feature (1)..(433): Homolog of NCBI NO: 18417216 NR Description: casein kinase, putative [Arabidopsis thaliana]
  misc_feature (1)..(450): Homolog of NCBI NO: 32482941 NR Description: OSJNBb0072M01.6 [Oryza sativa (japonica
  misc_feature (1)..(429): Homolog of NCBI NO: 15239840 NR Description: casein kinase I, putative [Arabidopsis thaliana]
  misc_feature (1)..(430): Homolog of NCBI NO: 27754653 NR Description: putative casein kinase I [Arabidopsis thaliana]
  misc_feature (1)..(430): Homolog of NCBI NO: 15219733 NR Description: casein kinase, putative [Arabidopsis thaliana]
  misc_feature (26)..(450): Homolog of NCBI NO: 1197461 NR Description: casein kinase I [Arabidopsis thaliana]
  misc_feature (1)..(450): Homolog of NCBI NO: 15229427 NR Description: casein kinase, putative [Arabidopsis thaliana]
  misc_feature (1)..(451): Homolog of NCBI NO: 15236471 NR Description: casein kinase I (CKI1) [Arabidopsis thaliana]
MDHVIGGKFKLGRKLGSGSFGELYLGINIQTGEEVAVKLEPVKTRHPQLQYESKIYMFLQGGTGVPHLKWFGVEGEYSCMVIDLLGPSLEDLFNYCKRIFSLKSVLMLADQLICRVEYMHSRGFLHRDIKPDNFLMGLGRRANQVYIIDYGLAKKYKDLQTQKHIPYRENKNLTGTARYASVNTHLGIEQSRRDDLESLGYVLMYFLRGSLPWQGLKAGTKKQKYDKISEKKMLTSVETLCKSYPSEFTSYFHYCRSLRFEDKPDYSYLRRLFRDLFIREGYQLDYVFDWTISKYPQIGSSSRPRPTPRPALDPPGPPAERAEKPTVGQDLRGRFTGAIEAFTRRNVSSQGALGDRSRHRSSDDIPSSAKEVHESRNGSTSKRGVISSTRPGSSAEPSENHSSRLFSSGSRHATTQRVPQSYESAAAARPGHEDAIRNFELLTIGSGKKRK

SEQ ID NO: 45988 - protein, 395 aa, Arabidopsis thaliana
  peptide (1)..(395): Ceres Seq. ID no. 15168956
  misc_feature (1)..(323): Homolog of NCBI NO: 13122442 NR Description: casein kinase1 epsilon-2 [Rattus norvegicus]
  misc_feature (1)..(377): Homolog of NCBI NO: 21536851 NR Description: protein kinase ADK1-like protein [Arabidopsis
  misc_feature (1)..(377): Homolog of NCBI NO: 18417216 NR Description: casein kinase, putative [Arabidopsis thaliana]
  misc_feature (1)..(394): Homolog of NCBI NO: 32482941 NR Description: OSJNBb0072M01.6 [Oryza sativa (japonica
  misc_feature (1)..(373): Homolog of NCBI NO: 15239840 NR Description: casein kinase I, putative [Arabidopsis thaliana]
  misc_feature (1)..(374): Homolog of NCBI NO: 27754653 NR Description: putative casein kinase I [Arabidopsis thaliana]
  misc_feature (1)..(374): Homolog of NCBI NO: 15219733 NR Description: casein kinase, putative [Arabidopsis thaliana]
  misc_feature (1)..(394): Homolog of NCBI NO: 1197461 NR Description: casein kinase I [Arabidopsis thaliana]
  misc_feature (1)..(394): Homolog of NCBI NO: 15229427 NR Description: casein kinase, putative [Arabidopsis thaliana]
  misc_feature (1)..(395): Homolog of NCBI NO: 15236471 NR Description: casein kinase I (CKI1) [Arabidopsis thaliana]
MFLQGGTGVPHLKWFGVEGEYSCMVIDLLGPSLEDLFNYCKRIFSLKSVLMLADQLICRVEYMHSRGFLHRDIKPDNFLMGLGRRANQVYIIDYGLAKKYKDLQTQKHIPYRENKNLTGTARYASVNTHLGIEQSRRDDLESLGYVLMYFLRGSLPWQGLKAGTKKQKYDKISEKKMLTSVETLCKSYPSEFTSYFHYCRSLRFEDKPDYSYLRRLFRDLFIREGYQLDYVFDWTISKYPQIGSSSRPRPTPRPALDPPGPPAERAEKPTVGQDLRGRFTGAIEAFTRRNVSSQGALGDRSRHRSSDDIPSSAKEVHESRNGSTSKRGVISSTRPGSSAEPSENHSSRLFSSGSRHATTQRVPQSYESAAAARPGHEDAIRNFELLTIGSGKKRK

SEQ ID NO: 45989 - DNA, 1872 bp, Arabidopsis thaliana
  misc_feature (1)..(1872): Ceres Seq. ID no. 14315804
  misc_feature: MA Experiment ID: 20000171 Result: Down-regulated in Transcription
  misc_feature: MA Experiment 20000171 PARAMETER Experiment Name: At_42deg_Heat_P Parameter: Age (day) Value: 14
  misc_feature: MA Experiment 20000171 PARAMETER Experiment Name: At_42deg_Heat_P Parameter: Organism Value: A. thaliana
  misc_feature: MA Experiment 20000171 PARAMETER Experiment Name: At_42deg_Heat_P Parameter: Plant Line Value: WS
  misc_feature: MA Experiment 20000171 PARAMETER Experiment Name: At_42deg_Heat_P Parameter: Temperature (deg C) Value: 42 vs. 22
  misc_feature: MA Experiment 20000171 PARAMETER Experiment Name: At_42deg_Heat_P Parameter: Timepoint (hr) Value: 1
  misc_feature: MA Experiment 20000171 PARAMETER Experiment Name: At_42deg_Heat_P Parameter: Tissue Value: Aerial
  misc_feature: MA Experiment ID: 20000173 Result: Down-regulated in Transcription
  misc_feature: MA Experiment 20000173 PARAMETER Experiment Name: At_42deg_Heat_P Parameter: Age (day) Value: 14
  misc_feature: MA Experiment 20000173 PARAMETER Experiment Name: At_42deg_Heat_P Parameter: Organism Value: A. thaliana
  misc_feature: MA Experiment 20000173 PARAMETER Experiment Name: At_42deg_Heat_P Parameter: Plant Line Value: WS
  misc_feature: MA Experiment 20000173 PARAMETER Experiment Name: At_42deg_Heat_P Parameter: Temperature (deg C) Value: 42 vs. 22
  misc_feature: MA Experiment 20000173 PARAMETER Experiment Name: At_42deg_Heat_P Parameter: Timepoint (hr) Value: 6
  misc_feature: MA Experiment 20000173 PARAMETER Experiment Name: At_42deg_Heat_P Parameter: Tissue Value: Aerial
  misc_feature: MA Experiment ID: 20000437 Result: Down-regulated in Transcription
  misc_feature: MA Experiment 20000437 PARAMETER Experiment Name: At_Drought_P Parameter: Age (day) Value: 8
  misc_feature: MA Experiment 20000437 PARAMETER Experiment Name: At_Drought_P Parameter: Organism Value: A. thaliana
  misc_feature: MA Experiment 20000437 PARAMETER Experiment Name: At_Drought_P Parameter: Plant Line Value: WS
  misc_feature: MA Experiment 20000437 PARAMETER Experiment Name: At_Drought_P Parameter: Timepoint (hr) Value: 24
  misc_feature: MA Experiment 20000437 PARAMETER Experiment Name: At_Drought_P Parameter: Tissue Value: Whole Plant
  misc_feature: MA Experiment 20000437 PARAMETER Experiment Name: At_Drought_P Parameter: Treatment Value: Drought vs. No Drought
  misc_feature: MA Experiment ID: 20000495 Result: Down-regulated in Transcription
  misc_feature: MA Experiment 20000495 PARAMETER Experiment Name: At_Guard_Cells_P Parameter: Harvest Date Value: 8/2/2002
  misc_feature: MA Experiment 20000495 PARAMETER Experiment Name: At_Guard_Cells_P Parameter: Organism Value: A. thaliana
  misc_feature: MA Experiment 20000495 PARAMETER Experiment Name: At_Guard_Cells_P Parameter: Tissue Value: Guard Cells vs. Leaves
  misc_feature: MA Experiment ID: 20000527 Result: Down-regulated in Transcription
  misc_feature: MA Experiment 20000527 PARAMETER Experiment Name: At_10percent_PEG_P Parameter: Age (day) Value: 20
  misc_feature: MA Experiment 20000527 PARAMETER Experiment Name: At_10percent_PEG_P Parameter: Organism Value: A. thaliana
  misc_feature: MA Experiment 20000527 PARAMETER Experiment Name: At_10percent_PEG_P Parameter: Plant Line Value: WS
  misc_feature: MA Experiment 20000527 PARAMETER Experiment Name: At_10percent_PEG_P Parameter: Timepoint (day) Value: 20
  misc_feature: MA Experiment 20000527 PARAMETER Experiment Name: At_10percent_PEG_P Parameter: Tissue Value: Whole Plant
  misc_feature: MA Experiment 20000527 PARAMETER Experiment Name: At_10percent_PEG_P Parameter: Treatment Value: 10percent PEG vs. No Treatment
  misc_feature: MA Experiment ID: 20000794 Result: Down-regulated in Transcription
  misc_feature: MA Experiment 20000794 PARAMETER Experiment Name: At_Petals_P Parameter: Age (day) Value: 23-25 days
  misc_feature: MA Experiment 20000794 PARAMETER Experiment Name: At_Petals_P Parameter: Plant Line Value: WS
  misc_feature: MA Experiment 20000794 PARAMETER Experiment Name: At_Petals_P Parameter: Tissue Value: Petals vs. Whole plant
  misc_feature: MA Experiment ID: 20001247 Result: Up-regulated in Transcription
  misc_feature: MA Experiment 20001247 PARAMETER Experiment Name: At_Far-red-induction_P Parameter: Age (day) Value: 7
  misc_feature: MA Experiment 20001247 PARAMETER Experiment Name: At_Far-red-induction_P Parameter: Light Value: Far-red vs. White
  misc_feature: MA Experiment 20001247 PARAMETER Experiment Name: At_Far-red-induction_P Parameter: Organism Value: A. thaliana
  misc_feature: MA Experiment 20001247 PARAMETER Experiment Name: At_Far-red-induction_P Parameter: Plant Line Value: Columbia
  misc_feature: MA Experiment 20001247 PARAMETER Experiment Name: At_Far-red-induction_P Parameter: Timepoint (hr) Value: 1
  misc_feature: MA Experiment 20001247 PARAMETER Experiment Name: At_Far-red-induction_P Parameter: Tissue Value: Whole Plant
  misc_feature: MA Experiment ID: 20001248 Result: Down-regulated in Transcription
  misc_feature: MA Experiment 20001248 PARAMETER Experiment Name: At_Far-red-induction_P Parameter: Age (day) Value: 7
  misc_feature: MA Experiment 20001248 PARAMETER Experiment Name: At_Far-red-induction_P Parameter: Light Value: Far-red vs. White
  misc_feature: MA Experiment 20001248 PARAMETER Experiment Name: At_Far-red-induction_P Parameter: Organism Value: A. thaliana
  misc_feature: MA Experiment 20001248 PARAMETER Experiment Name: At_Far-red-induction_P Parameter: Plant Line Value: Columbia
  misc_feature: MA Experiment 20001248 PARAMETER Experiment Name: At_Far-red-induction_P Parameter: Timepoint (hr) Value: 4
  misc_feature: MA Experiment 20001248 PARAMETER Experiment Name: At_Far-red-induction_P Parameter: Tissue Value: Whole Plant
  misc_feature: MA Experiment ID: 20001451 Result: Down-regulated in Transcription
  misc_feature: MA Experiment 20001451 PARAMETER Experiment Name: At_Far-red-induction_P Parameter: Age (day) Value: 7
  misc_feature: MA Experiment 20001451 PARAMETER Experiment Name: At_Far-red-induction_P Parameter: Light Value: Far-red vs. White
  misc_feature: MA Experiment 20001451 PARAMETER Experiment Name: At_Far-red-induction_P Parameter: Organism Value: A. thaliana
  misc_feature: MA Experiment 20001451 PARAMETER Experiment Name: At_Far-red-induction_P Parameter: Plant Line Value: Columbia
  misc_feature: MA Experiment 20001451 PARAMETER Experiment Name: At_Far-red-induction_P Parameter: Timepoint (hr) Value: 24
  misc_feature: MA Experiment 20001451 PARAMETER Experiment Name: At_Far-red-induction_P Parameter: Tissue Value: Whole Plant
  misc_feature: MA Experiment ID: 20001554 Result: Down-regulated in Transcription
  misc_feature: MA Experiment 20001554 PARAMETER Experiment Name: At_Drought_Soil_Dry_P Parameter: Age (day) Value: 21
  misc_feature: MA Experiment 20001554 PARAMETER Experiment Name: At_Drought_Soil_Dry_P Parameter: Organism Value: A. thaliana
  misc_feature: MA Experiment 20001554 PARAMETER Experiment Name: At_Drought_Soil_Dry_P Parameter: Plant Line Value: WS
  misc_feature: MA Experiment 20001554 PARAMETER Experiment Name: At_Drought_Soil_Dry_P Parameter: Post Timepoint (hr) Value: None
  misc_feature: MA Experiment 20001554 PARAMETER Experiment Name: At_Drought_Soil_Dry_P Parameter: Post-Treatment Value: None
  misc_feature: MA Experiment 20001554 PARAMETER Experiment Name: At_Drought_Soil_Dry_P Parameter: Timepoint (day) Value: 7
  misc_feature: MA Experiment 20001554 PARAMETER Experiment Name: At_Drought_Soil_Dry_P Parameter: Treatment Value: Drought vs. No Drought
  misc_feature: MA Experiment ID: 20001555 Result: Down-regulated in Transcription
  misc_feature: MA Experiment 20001555 PARAMETER Experiment Name: At_Drought_Soil_Dry_P Parameter: Age (day) Value: 24
  misc_feature: MA Experiment 20001555 PARAMETER Experiment Name: At_Drought_Soil_Dry_P Parameter: Organism Value: A. thaliana
  misc_feature: MA Experiment 20001555 PARAMETER Experiment Name: At_Drought_Soil_Dry_P Parameter: Plant Line Value: WS
  misc_feature: MA Experiment 20001555 PARAMETER Experiment Name: At_Drought_Soil_Dry_P Parameter: Post Timepoint (hr) Value: None
  misc_feature: MA Experiment 20001555 PARAMETER Experiment Name: At_Drought_Soil_Dry_P Parameter: Post-Treatment Value: None
  misc_feature: MA Experiment 20001555 PARAMETER Experiment Name: At_Drought_Soil_Dry_P Parameter: Timepoint (day) Value: 10
  misc_feature: MA Experiment 20001555 PARAMETER Experiment Name: At_Drought_Soil_Dry_P Parameter: Treatment Value: Drought vs. No Drought
  misc_feature: MA Experiment ID: 20001556 Result: Down-regulated in Transcription
  misc_feature: MA Experiment 20001556 PARAMETER Experiment Name: At_Drought_Soil_Dry_P Parameter: Age (day) Value: 26
  misc_feature: MA Experiment 20001556 PARAMETER Experiment Name: At_Drought_Soil_Dry_P Parameter: Organism Value: A. thaliana
  misc_feature: MA Experiment 20001556 PARAMETER Experiment Name: At_Drought_Soil_Dry_P Parameter: Plant Line Value: WS
  misc_feature: MA Experiment 20001556 PARAMETER Experiment Name: At_Drought_Soil_Dry_P Parameter: Post Timepoint (hr) Value: None
  misc_feature: MA Experiment 20001556 PARAMETER Experiment Name: At_Drought_Soil_Dry_P Parameter: Post-Treatment Value: None
  misc_feature: MA Experiment 20001556 PARAMETER Experiment Name: At_Drought_Soil_Dry_P Parameter: Timepoint (day) Value: 12
  misc_feature: MA Experiment 20001556 PARAMETER Experiment Name: At_Drought_Soil_Dry_P Parameter: Treatment Value: Drought vs. No Drought
  misc_feature: MA Experiment ID: 20001560 Result: Down-regulated in Transcription
  misc_feature: MA Experiment 20001560 PARAMETER Experiment Name: At_Drought_Soil_Dry_P Parameter: Age (day) Value: 28
  misc_feature: MA Experiment 20001560 PARAMETER Experiment Name: At_Drought_Soil_Dry_P Parameter: Organism Value: A. thaliana
  misc_feature: MA Experiment 20001560 PARAMETER Experiment Name: At_Drought_Soil_Dry_P Parameter: Plant Line Value: WS
  misc_feature: MA Experiment 20001560 PARAMETER Experiment Name: At_Drought_Soil_Dry_P Parameter: Post Timepoint (hr) Value: None
  misc_feature: MA Experiment 20001560 PARAMETER Experiment Name: At_Drought_Soil_Dry_P Parameter: Post-Treatment Value: None
  misc_feature: MA Experiment 20001560 PARAMETER Experiment Name: At_Drought_Soil_Dry_P Parameter: Timepoint (day) Value: 14
  misc_feature: MA Experiment 20001560 PARAMETER Experiment Name: At_Drought_Soil_Dry_P Parameter: Treatment Value: Drought vs. No Drought
  misc_feature: MA Experiment ID: 20001904 Result: Down-regulated in Transcription
  misc_feature: MA Experiment 20001904 PARAMETER Experiment Name: At_Drought_Reproduction_P Parameter: Age (day) Value: 37
  misc_feature: MA Experiment 20001904 PARAMETER Experiment Name: At_Drought_Reproduction_P Parameter: Organism Value: A. thaliana
  misc_feature: MA Experiment 20001904 PARAMETER Experiment Name: At_Drought_Reproduction_P Parameter: Plant Line Value: WS
  misc_feature: MA Experiment 20001904 PARAMETER Experiment Name: At_Drought_Reproduction_P Parameter: Timepoint (day) Value: 7
  misc_feature: MA Experiment 20001904 PARAMETER Experiment Name: At_Drought_Reproduction_P Parameter: Tissue Value: Rosettes
  misc_feature: MA Experiment 20001904 PARAMETER Experiment Name: At_Drought_Reproduction_P Parameter: Treatment Value: Drought vs. No Drought
acttccgccatgagaaaaacctgcacacacgcctgaaaaaccaaatcatcctcatcatcttctgatctaatgtctaccgacactatcccttccctctcatctccaccggcgccggagtttccttccaccacaccagacacggcgacgtcaccagctccgtctcagccatccatcatcggaccttcttcgttggctccgttcccggagacaacaacaaacattgatggaggctcgagaaatgtagcattaactggacttattactggagtagttctcggagctacgtttgtcctactcggagtttgtatctttgtctgtttctataaaagaaagaagaggaagttaaagaagaagaagaaagaagatatcgaagcttctattaacagagactcactagatcccaaagataatagcaataatcttcagcaatggagttcatcagagattggacaaaacttgtttacatatgaagatttgtctaaagcaactagtaacttctccaacactaaccttcttggacaaggtgggtttggttatgttcatagaggagttcttgttgatggaactttggttgctattaagcagcttaaatctggaagtggacaaggtgaacgagagtttcaagctgagatacagactattagtagagttcatcataggcatcttgtttctcttcttggttattgtatcactggtgctcaaagattgcttgtttatgagtttgtgcctaataagactctcgaatttcatttgcacgagaaagagagaccggtaatggagtggtcaaagaggatgaagattgctttgggtgcagctaaaggattggcatacttacatgaagattgtaatcctaagacaatacaccgcgatgtcaaggctgcaaatattctaattgacgatagctatgaggcgaagttagcagattttggacttgccaggtcttctttagacactgatactcatgtctccactcggattatgggaaccttcggttacttggctcctgaatatgcttcttcagggaaacttactgagaaatcagatgtcttctcaattggagtggtgcttcttgaactgataaccggacgccgtcctgttgataaatcacagccttttgctgatgatgatagcatcgttgattgggttggttatcttgtttcccttaccaccacttttaataagcttttaaactttacctcatgctctaggcaaaacctctgatgatacaagcgttaaacgatggaaactttgacggtcttgttgacccgcggttagagaatgattttgatatcaacgaaatgacgagaatggttgcttgcgctgctgctagtgtccgtcattcagctaaacgtcgcccaaaaatgagccagatagttcgagcattcgaaggaaatatatctatagatgacctaacagaaggagctgccccaggacaaagtactatttacagcttagacgggagctcagattatagctcaacacaatacaaagaagacttgaagaaattcaagaaaatggcgttcgaaagcaaaacatttggtagcagcgaatgcagtggtttgactagcgacaatgctcagaacccatcaggctcgtctagtatcaccgaaggccaacgtacaacgcaggagatcgaaccggagaagaataccaaggacacatgaactttaaacagaggattcttggtaatagttaagtcttatcattttggggtaggaccggtaggtttaggtgtaaaacacattattcattagacgcgctttcacttttaattatttccatgtgtggctctaatcaaaactgtcatgagcctgatattgcacgtgaatattatttgttggagatttttttgagtttggtgtgaagatattg

SEQ ID NO: 45990 - protein, 383 aa, Arabidopsis thaliana
  peptide (1)..(383): Ceres Seq. ID no. 14315805
  misc_feature (128)..(358): Homolog of NCBI NO: 30690042 NR Description: serine threonine protein kinase -related
  misc_feature (128)..(364): Homolog of NCBI NO: 15230130 NR Description: protein kinase -related [Arabidopsis thaliana]
  misc_feature (128)..(364): Homolog of NCBI NO: 13877617 NR Description: protein kinase-like protein [Arabidopsis
  misc_feature (128)..(364): Homolog of NCBI NO: 13447449 NR Description: receptor protein kinase PERK1 [Brassica napus]
  misc_feature (128)..(358): Homolog of NCBI NO: 29367569 NR Description: putative receptor protein kinase
  misc_feature (4)..(129): Homolog of NCBI NO: 15224182 NR Description: protein kinase -related [Arabidopsis thaliana]
  misc_feature (128)..(372): Homolog of NCBI NO: 15224182 NR Description: protein kinase -related [Arabidopsis thaliana]
  misc_feature (1)..(90): Homolog of NCBI NO: 34904234 NR Description: putative receptor protein kinase PERK1
  misc_feature (113)..(358): Homolog of NCBI NO: 34904234 NR Description: putative receptor protein kinase PERK1
  misc_feature (1)..(358): Homolog of NCBI NO: 15218207 NR Description: protein kinase -related [Arabidopsis thaliana]
MSTDTIPSLSSPPAPEFPSTTPDTATSPAPSQPSIIGPSSLAPFPETTTNIDGGSRNVALTGLITGVVLGATFVLLGVCIFVCFYKRKKRKLKKKKKEDIEASINRDSLDPKDNSNNLQQWSSSEIGQNLFTYEDLSKATSNFSNTNLLGQGGFGYVHRGVLVDGTLVAIKQLKSGSGQGEREFQAEIQTISRVHHRHLVSLLGYCITGAQRLLVYEFVPNKTLEFHLHEKERPVMEWSKRMKIALGAAKGLAYLHEDCNPKTIHRDVKAANILIDDSYEAKLADFGLARSSLDTDTHVSTRIMGTFGYLAPEYASSGKLTEKSDVFSIGVVLLELITGRRPVDKSQPFADDDSIVDWVGYLVSLTTTFNKLLNFTSCSRQNL

SEQ ID NO: 45991 - DNA, 2138 bp, Arabidopsis thaliana
  misc_feature (1)..(2138): Ceres Seq. ID no. 12600200
  misc_feature: MA Experiment ID: 20000180 Result: Down-regulated in Transcription
  misc_feature: MA Experiment 20000180 PARAMETER Experiment Name: At_Germinating_Seeds_P Parameter: Age (hr) Value: 24 vs. 0
  misc_feature: MA Experiment 20000180 PARAMETER Experiment Name: At_Germinating_Seeds_P Parameter: Tissue Value: Germinating Seeds
  misc_feature: MA Experiment ID: 20001451 Result: Down-regulated in Transcription
  misc_feature: MA Experiment 20001451 PARAMETER Experiment Name: At_Far-red-induction_P Parameter: Age (day) Value: 7
  misc_feature: MA Experiment 20001451 PARAMETER Experiment Name: At_Far-red-induction_P Parameter: Light Value: Far-red vs. White
  misc_feature: MA Experiment 20001451 PARAMETER Experiment Name: At_Far-red-induction_P Parameter: Organism Value: A. thaliana
  misc_feature: MA Experiment 20001451 PARAMETER Experiment Name: At_Far-red-induction_P Parameter: Plant Line Value: Columbia
  misc_feature: MA Experiment 20001451 PARAMETER Experiment Name: At_Far-red-induction_P Parameter: Timepoint (hr) Value: 24
  misc_feature: MA Experiment 20001451 PARAMETER Experiment Name: At_Far-red-induction_P Parameter: Tissue Value: Whole Plant
gagcttttttttcttcctcttcttaaaaccctaccgccgcgaccaccaacactgagagacttcgccgccgttaaaccaccagtgagaagcttaccgctgcgacttgaatgaagaggagacagaagaaactgatgataaacaatgagatggatttgtcagatgcagtgattgtaaaatctggtagattgaaatcagtagtgtggaatgatttcgatagagttagaaaaggtgagacatacattgcaatctgcaggcattgtaagaagcgacttagcggctcaagcgcgagcgggacttcgcatttgaggaaccatttgattagatgtaggaggagaactaatggtaacaacaacggtgttgctcagtatttcgttaaggggaagaagaaagagttagctaatgagcggataaaggatgaagaagtgcttagtgtagtgaatgttagatatgaacatgagaaagaagaacatgaagatgttaatgttgtgagtatgggtttggatcagaggcggtgtcgattcgatttagccaggatgattatcttacatggttatccgttgagtatggttgaagatgttggattcagaatgtttattggaaatttacagcctttgtttgagcttgttgcttttgaaagagttgaatctgattgtatggagatttatgcgaaagagaagcataagattttcgaagcgttggataagttacctgggaagattagtattagtgttgatgtgtggagtggttcgggtgattctgatgaattcttgtgtttggcagcgcattatattgatgaaggatgggaattgaaaaagagagttttgaacttctttatggttgatccatctcatagtggtgagatgcttgctgaagttataatgacgtgtttgatggagtgggatattgaccggaagttgttttctatggcgtcgagtcatgctcctccgtttagtgagaacgtagctagtaaaatcagagaccggttatcgcagaataagttcctttactgttacggccaattgtttgatgtgagctgtggagttaatgtcattaacgagatggttcaagattccctggaagcttgttgtgacacaataaacattattcgagagagtattagatatgttaaaagctcagaatctattcaagatagattcaaccagtggatagttgaaacgggagctgtaagtgaaaggaacctatgcatcgatgacccaatgagatgggactcaacatgcaccatgctggagaatgctttagagcaaaagagcgcgttttcgctcatgaatgaacatgatcctgattccgtgttatgtccatctgatttggaatgggagagattaggaacaattgttgagttcttgaaagtctttgttgaagtgataaatgcattcacaaagagcagttgtttacccgccaatatgtacttcccagaggtatgcgacatacacctccggttaattgagtggagcaagaacccggatgatttcattagctctctagttgtaaacatgagaaagaaatttgacgatttctgggataaaaactacctggttctagccatcgctaccatattagacccgcggttcaaaatgaagctggttgaatactattaccctctgttttatggtactagtgcttcagagctcattgaagatatttctgagtgcatcaaactgctgtacgatgagcattctgtaggatcgctattagcgtcgtcaaatcaagctcttgactggcagaatcatcatcatcggtcaaacggtgttgcccatgggaaagagcctgacgatagactcacagaattcgataggtacattaacgaaacaactactacaccgggtcaagactctaaatcagatctagaaaagtatctagaagagccactttttccccggaattcagatttcgacatcctgaactggtggaaagttcacacacctaagtacccaattctctccatgatggcacgtaacgtgttagcagttccaatgttgaatgtatcatcagaagaagacgcctttgaaacttgtcaaaggagacgggttagtgaaacatggcgttcgcttagaccgagtaccgtgcaagccttgatgtgtgcacaagattggatccaaagcgaactagaaagctcttga

SEQ ID NO: 45992 - protein, 676 aa, Arabidopsis thaliana
  peptide (1)..(676): Ceres Seq. ID no. 12600201
  misc_feature (585)..(669): Pfam Name: hAT family dimerisation domain Pfam Description: hAT family dimerisation domain
  misc_feature (132)..(670): Homolog of NCBI NO: 20521440 NR Description: B1003B09.3 [Oryza sativa (japonica
  misc_feature (581)..(671): Homolog of NCBI NO: 15218119 NR Description: hypothetical protein
  misc_feature (50)..(595): Homolog of NCBI NO: 15218119 NR Description: hypothetical protein
  misc_feature (562)..(676): Homolog of NCBI NO: 15220044 NR Description: hypothetical protein; protein id: At1g80020.1
  misc_feature (131)..(556): Homolog of NCBI NO: 15220044 NR Description: hypothetical protein; protein id: At1g80020.1
  misc_feature (552)..(676): Homolog of NCBI NO: 15228474 NR Description: putative transposase; protein id: At3g42170.1
  misc_feature (11)..(575): Homolog of NCBI NO: 15228474 NR Description: putative transposase; protein id: At3g42170.1
  misc_feature (23)..(674): Homolog of NCBI NO: 22535576 NR Description: Ac transposase-like protein
  misc_feature (14)..(674): Homolog of NCBI NO: 30683310 NR Description: expressed protein [Arabidopsis thaliana]
  misc_feature (14)..(676): Homolog of NCBI NO: 22331085 NR Description: hypothetical protein
MKRRQKKLMINNEMDLSDAVIVKSGRLKSVVWNDFDRVRKGETYIAICRHCKKRLSGSSASGTSHLRNHLIRCRRRTNGNNNGVAQYFVKGKKKELANERIKDEEVLSVVNVRYEHEKEEHEDVNVVSMGLDQRRCRFDLARMIILHGYPLSMVEDVGFRMFIGNLQPLFELVAFERVESDCMEIYAKEKHKIFEALDKLPGKISISVDVWSGSGDSDEFLCLAAHYIDEGWELKKRVLNFFMVDPSHSGEMLAEVIMTCLMEWDIDRKLFSMASSHAPPFSENVASKIRDRLSQNKFLYCYGQLFDVSCGVNVINEMVQDSLEACCDTINIIRESIRYVKSSESIQDRFNQWIVETGAVSERNLCIDDPMRWDSTCTMLENALEQKSAFSLMNEHDPDSVLCPSDLEWERLGTIVEFLKVFVEVINAFTKSSCLPANMYFPEVCDIHLRLIEWSKNPDDFISSLVVNMRKKFDDFWDKNYLVLAIATILDPRFKMKLVEYYYPLFYGTSASELIEDISECIKLLYDEHSVGSLLASSNQALDWQNHHHRSNGVAHGKEPDDRLTEFDRYINETTTTPGQDSKSDLEKYLEEPLFPRNSDFDILNWWKVHTPKYPILSMMARNVLAVPMLNVSSEEDAFETCQRRRVSETWRSLRPSTVQALMCAQDWIQSELESS

SEQ ID NO: 45993 - protein, 668 aa, Arabidopsis thaliana
  peptide (1)..(668): Ceres Seq. ID no. 12600202
  misc_feature (577)..(661): Pfam Name: hAT family dimerisation domain Pfam Description: hAT family dimerisation domain
  misc_feature (124)..(662): Homolog of NCBI NO: 20521440 NR Description: B1003B09.3 [Oryza sativa (japonica
  misc_feature (573)..(663): Homolog of NCBI NO: 15218119 NR Description: hypothetical protein
  misc_feature (42)..(587): Homolog of NCBI NO: 15218119 NR Description: hypothetical protein
  misc_feature (554)..(668): Homolog of NCBI NO: 15220044 NR Description: hypothetical protein; protein id: At1g80020.1
  misc_feature (123)..(548): Homolog of NCBI NO: 15220044 NR Description: hypothetical protein; protein id: At1g80020.1
  misc_feature (544)..(668): Homolog of NCBI NO: 15228474 NR Description: putative transposase; protein id: At3g42170.1
  misc_feature (3)..(567): Homolog of NCBI NO: 15228474 NR Description: putative transposase; protein id: At3g42170.1
  misc_feature (15)..(666): Homolog of NCBI NO: 22535576 NR Description: Ac transposase-like protein
  misc_feature (6)..(666): Homolog of NCBI NO: 30683310 NR Description: expressed protein [Arabidopsis thaliana]
  misc_feature (6)..(668): Homolog of NCBI NO: 22331085 NR Description: hypothetical protein
MINNEMDLSDAVIVKSGRLKSVVWNDFDRVRKGETYIAICRHCKKRLSGSSASGTSHLRNHLIRCRRRTNGNNNGVAQYFVKGKKKELANERIKDEEVLSVVNVRYEHEKEEHEDVNVVSMGLDQRRCRFDLARMIILHGYPLSMVEDVGFRMFIGNLQPLFELVAFERVESDCMEIYAKEKHKIFEALDKLPGKISISVDVWSGSGDSDEFLCLAAHYIDEGWELKKRVLNFFMVDPSHSGEMLAEVIMTCLMEWDIDRKLFSMASSHAPPFSENVASKIRDRLSQNKFLYCYGQLFDVSCGVNVINEMVQDSLEACCDTINIIRESIRYVKSSESIQDRFNQWIVETGAVSERNLCIDDPMRWDSTCTMLENALEQKSAFSLMNEHDPDSVLCPSDLEWERLGTIVEFLKVFVEVINAFTKSSCLPANMYFPEVCDIHLRLIEWSKNPDDFISSLVVNMRKKFDDFWDKNYLVLAIATILDPRFKMKLVEYYYPLFYGTSASELIEDISECIKLLYDEHSVGSLLASSNQALDWQNHHHRSNGVAHGKEPDDRLTEFDRYINETTTTPGQDSKSDLEKYLEEPLFPRNSDFDILNWWKVHTPKYPILSMMARNVLAVPMLNVSSEEDAFETCQRRRVSETWRSLRPSTVQALMCAQDWIQSELESS

SEQ ID NO: 45994 - protein, 663 aa, Arabidopsis thaliana
  peptide (1)..(663): Ceres Seq. ID no. 12600203
  misc_feature (572)..(656): Pfam Name: hAT family dimerisation domain Pfam Description: hAT family dimerisation domain
  misc_feature (119)..(657): Homolog of NCBI NO: 20521440 NR Description: B1003B09.3 [Oryza sativa (japonica
  misc_feature (568)..(658): Homolog of NCBI NO: 15218119 NR Description: hypothetical protein
  misc_feature (37)..(582): Homolog of NCBI NO: 15218119 NR Description: hypothetical protein
  misc_feature (549)..(663): Homolog of NCBI NO: 15220044 NR Description: hypothetical protein; protein id: At1g80020.1
  misc_feature (118)..(543): Homolog of NCBI NO: 15220044 NR Description: hypothetical protein; protein id: At1g80020.1
  misc_feature (539)..(663): Homolog of NCBI NO: 15228474 NR Description: putative transposase; protein id: At3g42170.1
  misc_feature (1)..(562): Homolog of NCBI NO: 15228474 NR Description: putative transposase; protein id: At3g42170.1
  misc_feature (10)..(661): Homolog of NCBI NO: 22535576 NR Description: Ac transposase-like protein
  misc_feature (1)..(661): Homolog of NCBI NO: 30683310 NR Description: expressed protein [Arabidopsis thaliana]
  misc_feature (1)..(663): Homolog of NCBI NO: 22331085 NR Description: hypothetical protein
MDLSDAVIVKSGRLKSVVWNDFDRVRKGETYIAICRHCKKRLSGSSASGTSHLRNHLIRCRRRTNGNNNGVAQYFVKGKKKELANERIKDEEVLSVVNVRYEHEKEEHEDVNVVSMGLDQRRCRFDLARMIILHGYPLSMVEDVGFRMFIGNLQPLFELVAFERVESDCMEIYAKEKHKIFEALDKLPGKISISVDVWSGSGDSDEFLCLAAHYIDEGWELKKRVLNFFMVDPSHSGEMLAEVIMTCLMEWDIDRKLFSMASSHAPPFSENVASKIRDRLSQNKFLYCYGQLFDVSCGVNVINEMVQDSLEACCDTINIIRESIRYVKSSESIQDRFNQWIVETGAVSERNLCIDDPMRWDSTCTMLENALEQKSAFSLMNEHDPDSVLCPSDLEWERLGTIVEFLKVFVEVINAFTKSSCLPANMYFPEVCDIHLRLIEWSKNPDDFISSLVVNMRKKFDDFWDKNYLVLAIATILDPRFKMKLVEYYYPLFYGTSASELIEDISECIKLLYDEHSVGSLLASSNQALDWQNHHHRSNGVAHGKEPDDRLTEFDRYINETTTTPGQDSKSDLEKYLEEPLFPRNSDFDILNWWKVHTPKYPILSMMARNVLAVPMLNVSSEEDAFETCQRRRVSETWRSLRPSTVQALMCAQDWIQSELESS

SEQ ID NO: 45995 - DNA, 1029 bp, Arabidopsis thaliana
  misc_feature (1)..(1029): Ceres Seq. ID no. 14310076
  misc_feature: MA Experiment ID: 20001451 Result: Down-regulated in Transcription
  misc_feature: MA Experiment 20001451 PARAMETER Experiment Name: At_Far-red-induction_P Parameter: Age (day) Value: 7
  misc_feature: MA Experiment 20001451 PARAMETER Experiment Name: At_Far-red-induction_P Parameter: Light Value: Far-red vs. White
  misc_feature: MA Experiment 20001451 PARAMETER Experiment Name: At_Far-red-induction_P Parameter: Organism Value: A. thaliana
  misc_feature: MA Experiment 20001451 PARAMETER Experiment Name: At_Far-red-induction_P Parameter: Plant Line Value: Columbia
  misc_feature: MA Experiment 20001451 PARAMETER Experiment Name: At_Far-red-induction_P Parameter: Timepoint (hr) Value: 24
  misc_feature: MA Experiment 20001451 PARAMETER Experiment Name: At_Far-red-induction_P Parameter: Tissue Value: Whole Plant
  misc_feature: MA Experiment ID: 20001560 Result: Down-regulated in Transcription
  misc_feature: MA Experiment 20001560 PARAMETER Experiment Name: At_Drought_Soil_Dry_P Parameter: Age (day) Value: 28
  misc_feature: MA Experiment 20001560 PARAMETER Experiment Name: At_Drought_Soil_Dry_P Parameter: Organism Value: A. thaliana
  misc_feature: MA Experiment 20001560 PARAMETER Experiment Name: At_Drought_Soil_Dry_P Parameter: Plant Line Value: WS
  misc_feature: MA Experiment 20001560 PARAMETER Experiment Name: At_Drought_Soil_Dry_P Parameter: Post Timepoint (hr) Value: None
  misc_feature: MA Experiment 20001560 PARAMETER Experiment Name: At_Drought_Soil_Dry_P Parameter: Post-Treatment Value: None
  misc_feature: MA Experiment 20001560 PARAMETER Experiment Name: At_Drought_Soil_Dry_P Parameter: Timepoint (day) Value: 14
  misc_feature: MA Experiment 20001560 PARAMETER Experiment Name: At_Drought_Soil_Dry_P Parameter: Treatment Value: Drought vs. No Drought
aaagaggcgacgtaccacccacctaaccacaaccagatccccaaaagacagagaactttctcgatacgaacgccaaagagaagaagacgaagacgaagatgatgggtgtgttgaagtcggcgattggggatatgttgatgaccttctcttgggttgtcctctccgctacctttggaattcagacggcggcgattatctccgccggtgattttcaggcaatcacttgggctccgttggtgattttgacgtcgttgattttcgtctacgtctcgatcttcaccgttatcttcggtagcgctagcttcaatcctaccggaagcgctgccatttatgtcgccggtgtccccggagatactcttttctccttggcgattagattacctgctcaggcaattggtgctgcaggaggtgcattggcgatcatggagttcataccagagaaatacaagcatatgattggaggtccttctcttcaggttgatgtgcacactggagctattgctgaaacgatcttaagttttggtattacctttgcggttttgctaattatcctcaggggtccacggagattgcttgctaagacgttcttgcttgctcttgcaaccatctcatttgttgtcgccggatctaaatacactggaccagccatgaatcctgccattgcgtttggatgggcatacatgtacagctcccacaacacatgggaccatatctacgtctactggatcagttctttcgtaggagcattatctgctgcattgcttttccgttctatcttcccgccacctcggccccagaagaagaaacaaaagaaagcctgaggaaaataaaacaattgggagaacaccggtcagattcttcaccggtttgggctgtagaaagattcacaaagctgttccattctaaaataaggagaccaacaacaacaaaaagtcaaaagtctccttgtcattgtttagatccacacgcttattttacagatttgtgcgacgtaacttttctcttttatgttcataaatcattcagact

SEQ ID NO: 45996 - protein, 240 aa, Arabidopsis thaliana
  peptide (1)..(240): Ceres Seq. ID no. 14310077
  misc_feature (2)..(223): Pfam Name: Major intrinsic protein Pfam Description: Major intrinsic protein
  misc_feature (1)..(220): Homolog of NCBI NO: 15227302 NR Description: putative plasma membrane intrinsic protein
  misc_feature (1)..(234): Homolog of NCBI NO: 15811692 NR Description: aquaporin [Pyrocoelia rufa]
  misc_feature (69)..(226): Homolog of NCBI NO: 23496461 NR Description: aquaporin [Oryzias latipes]
  misc_feature (9)..(239): Homolog of NCBI NO: 13447817 NR Description: small basic membrane integral protein ZmSIP2-1
  misc_feature (2)..(238): Homolog of NCBI NO: 15230175 NR Description: expressed protein [Arabidopsis thaliana]
  misc_feature (2)..(240): Homolog of NCBI NO: 13447813 NR Description: small basic membrane integral protein ZmSIP1-1
  misc_feature (2)..(240): Homolog of NCBI NO: 34906220 NR Description: P0666G04.16 [Oryza sativa (japonica
  misc_feature (2)..(236): Homolog of NCBI NO: 13447815 NR Description: small basic membrane integral protein ZmSIP1-2
  misc_feature (2)..(240): Homolog of NCBI NO: 15238785 NR Description: expressed protein [Arabidopsis thaliana]
  misc_feature (1)..(240): Homolog of NCBI NO: 15229225 NR Description: major intrinsic protein (MIP) family [Arabidopsis
MMGVLKSAIGDMLMTFSWVVLSATFGIQTAAIISAGDFQAITWAPLVILTSLIFVYVSIFTVIFGSASFNPTGSAAIYVAGVPGDTLFSLAIRLPAQAIGAAGGALAIMEFIPEKYKHMIGGPSLQVDVHTGAIAETILSFGITFAVLLIILRGPRRLLAKTFLLALATISFVVAGSKYTGPAMNPAIAFGWAYMYSSHNTWDHIYVYWISSFVGALSAALLFRSIFPPPRPQKKKQKKA

SEQ ID NO: 45997 - protein, 239 aa, Arabidopsis thaliana
  peptide (1)..(239): Ceres Seq. ID no. 14310078
  misc_feature (1)..(222): Pfam Name: Major intrinsic protein Pfam Description: Major intrinsic protein
  misc_feature (1)..(219): Homolog of NCBI NO: 15227302 NR Description: putative plasma membrane intrinsic protein
  misc_feature (1)..(233): Homolog of NCBI NO: 15811692 NR Description: aquaporin [Pyrocoelia rufa]
  misc_feature (68)..(225): Homolog of NCBI NO: 23496461 NR Description: aquaporin [Oryzias latipes]
  misc_feature (8)..(238): Homolog of NCBI NO: 13447817 NR Description: small basic membrane integral protein ZmSIP2-1
  misc_feature (1)..(237): Homolog of NCBI NO: 15230175 NR Description: expressed protein [Arabidopsis thaliana]
  misc_feature (1)..(239): Homolog of NCBI NO: 13447813 NR Description: small basic membrane integral protein ZmSIP1-1
  misc_feature (1)..(239): Homolog of NCBI NO: 34906220 NR Description: P0666G04.16 [Oryza sativa (japonica
  misc_feature (1)..(235): Homolog of NCBI NO: 13447815 NR Description: small basic membrane integral protein ZmSIP1-2
  misc_feature (1)..(239): Homolog of NCBI NO: 15238785 NR Description: expressed protein [Arabidopsis thaliana]
  misc_feature (1)..(239): Homolog of NCBI NO: 15229225 NR Description: major intrinsic protein (MIP) family [Arabidopsis
MGVLKSAIGDMLMTFSWVVLSATFGIQTAAIISAGDFQAITWAPLVILTSLIFVYVSIFTVIFGSASFNPTGSAAIYVAGVPGDTLFSLAIRLPAQAIGAAGGALAIMEFIPEKYKHMIGGPSLQVDVHTGAIAETILSFGITFAVLLIILRGPRRLLAKTFLLALATISFVVAGSKYTGPAMNPAIAFGWAYMYSSHNTWDHIYVYWISSFVGALSAALLFRSIFPPPRPQKKKQKKA

SEQ ID NO: 45998 - protein, 229 aa, Arabidopsis thaliana
  peptide (1)..(229): Ceres Seq. ID no. 14310079
  misc_feature (1)..(212): Pfam Name: Major intrinsic protein Pfam Description: Major intrinsic protein
  misc_feature (1)..(209): Homolog of NCBI NO: 15227302 NR Description: putative plasma membrane intrinsic protein
  misc_feature (1)..(223): Homolog of NCBI NO: 15811692 NR Description: aquaporin [Pyrocoelia rufa]
  misc_feature (58)..(215): Homolog of NCBI NO: 23496461 NR Description: aquaporin [Oryzias latipes]
  misc_feature (1)..(228): Homolog of NCBI NO: 13447817 NR Description: small basic membrane integral protein ZmSIP2-1
  misc_feature (1)..(227): Homolog of NCBI NO: 15230175 NR Description: expressed protein [Arabidopsis thaliana]
  misc_feature (1)..(229): Homolog of NCBI NO: 13447813 NR Description: small basic membrane integral protein ZmSIP1-1
  misc_feature (1)..(229): Homolog of NCBI NO: 34906220 NR Description: P0666G04.16 [Oryza sativa (japonica
  misc_feature (1)..(225): Homolog of NCBI NO: 13447815 NR Description: small basic membrane integral protein ZmSIP1-2
  misc_feature (1)..(229): Homolog of NCBI NO: 15238785 NR Description: expressed protein [Arabidopsis thaliana]
  misc_feature (1)..(229): Homolog of NCBI NO: 15229225 NR Description: major intrinsic protein (MIP) family [Arabidopsis
MLMTFSWVVLSATFGIQTAAIISAGDFQAITWAPLVILTSLIFVYVSIFTVIFGSASFNPTGSAAIYVAGVPGDTLFSLAIRLPAQAIGAAGGALAIMEFIPEKYKHMIGGPSLQVDVHTGAIAETILSFGITFAVLLIILRGPRRLLAKTFLLALATISFVVAGSKYTGPAMNPAIAFGWAYMYSSHNTWDHIYVYWISSFVGALSAALLFRSIFPPPRPQKKKQKKA

SEQ ID NO: 45999 - DNA, 1839 bp, Arabidopsis thaliana
  misc_feature (1)..(1839): Ceres Seq. ID no. 12581062
  misc_feature: MA Experiment ID: 20000307 Result: Up-regulated in Transcription
  misc_feature: MA Experiment 20000307 PARAMETER Experiment Name: At_Germinating_Seeds_Sub_P Parameter: Age (hr) Value: 24 vs. 0
  misc_feature: MA Experiment 20000307 PARAMETER Experiment Name: At_Germinating_Seeds_Sub_P Parameter: Organism Value: A. thaliana
  misc_feature: MA Experiment 20000307 PARAMETER Experiment Name: At_Germinating_Seeds_Sub_P Parameter: Plant Line Value: WS
  misc_feature: MA Experiment 20000307 PARAMETER Experiment Name: At_Germinating_Seeds_Sub_P Parameter: Tissue Value: Germinating Seeds
ataaaccataactctctctccctctctccctctctccctctctctctgctcgaatcgaaccgttcccaggagctgctttgatttggtttatcgttgatctgtgaaaatggggacgaatgatctcgacatcgaagaagggactctggagatcggcatggagtatagaactgtttctggtgttgctggaccattggtcattcttgacaaagtgaagggtccaaagtaccaggagattgttaatattcgcttaggagatggatcaacgagacgtggtcaggttttggaagttgatggcgagaaagcagttgtgcaggtttttgaaggaacatctggaattgacaacaagtttacaaccgtgcaattcacaggagaggttttgaaaacacctgtatcattggacatgcttgggcgcatatttaacggttcaggaaagccgattgataatggccctcctattctgccagaagcataccttgatatttcaggaagttcaatcaaccccagtgaaagaacctatcctgaagagatgatacagacaggcatatcgaccatcgatgtcatgaattccattgctcgtggacagaagattccacttttctctgctgctggtcttccacataatgaaatagctgctcagatttgtcgtcaggctggtctagtcaagcgtttggaaaagactgttgatctacttgaggatcatggagaggacaattttgcaattgtgtttgcagctatgggtgtgaacatggagacagctcagttcttcaagcgagattttgaagaaaatggatcaatggagagagttactcttttcctgaacctggccaatgacccaaccattgagagaatcatcactcctcgaattgccctcacaacagctgaatatctggcttatgaatgtgggaaacacgtccttgttatattgacggatatgagttcttatgctgatgctcttcgtgaggtttccgctgcccgagaagaggttcccggaagacgtggatatccaggttatatgtacactgatcttgcaactatttatgaacgtgctgggcgtatagaaggaagaaaaggttccatcacccaaattccaatcctcactatgcccaatgacgatatcactcatccaactccggatcttactggttacattactgaaggtcagatatatatcgataggcaacttcacaacagacagatatatccacccatcaacgtgcttccatccctttctcgtttaatgaagagtgctatcggcgagggcatgactcgtaaagaccattctgatgtgtcgaaccagctgtatgcaaattatgcaatcgggaaagatgttcaagcgatgaaagctgttgttggagaagaagcactttcttcagaggatttgctttatctagagtttttggataagtttgagaggaagtttgtgatgcaaggagcttatgatacacgcaacatcttccagtcgctggacttagcttggacattgctccgtatcttcccacgggagcttcttcatcgtatccctgcaaagacacttgaccaattctacagccgcgactcaaccagttaaaatgaggtaatggaggttatcttatcgaaactcttttgagagaaaagtgtgaatttttgtgatgtgtattatttggtgcttattataaagaggaaaaacaaagaaaagctatatattctgtgtctccctatctggtgatattttttttggttctgcattgtgttccaaagtggaaataaaaatcgataaacgatgtcgtattgtagtactttccttttctttgtatgaatttgttaagattggtttataaatgggattataataagtatctt

SEQ ID NO: 46000 - protein, 486 aa, Arabidopsis thaliana
  peptide (1)..(486): Ceres Seq. ID no. 12581063
  misc_feature (202)..(381): Pfam Name: ATP synthase alpha/beta family, Pfam Description: ATP synthase alpha/beta family,
  misc_feature (202)..(381): Pfam Name: ATP synthase alpha/beta family, Pfam Description: ATP synthase alpha/beta family,
  misc_feature (4)..(486): Homolog of NCBI NO: 11266665 NR Description: H+-transporting two-sector ATPase (EC 3.6.3.14)
  misc_feature (1)..(486): Homolog of NCBI NO: 26986106 NR Description: vacuolar ATPase subunit B [Mesembryanthemum
  misc_feature (7)..(485): Homolog of NCBI NO: 2493132 NR Description: Vacuolar ATP synthase subunit B isoform 2
  misc_feature (1)..(484): Homolog of NCBI NO: 2493129 NR Description: Vacuolar ATP synthase subunit B isoform 1
  misc_feature (1)..(486): Homolog of NCBI NO: 15233891 NR Description: probable H+-transporting ATPase
  misc_feature (4)..(486): Homolog of NCBI NO: 11266665 NR Description: H+-transporting two-sector ATPase (EC 3.6.3.14)
  misc_feature (7)..(485): Homolog of NCBI NO: 2493132 NR Description: Vacuolar ATP synthase subunit B isoform 2
  misc_feature (1)..(486): Homolog of NCBI NO: 15233891 NR Description: probable H+-transporting ATPase
  misc_feature (1)..(486): Homolog of NCBI NO: 81637 NR Description: H+-exporting ATPase (EC 3.6.3.6) 57K chain -
  misc_feature (1)..(486): Homolog of NCBI NO: 15222929 NR Description: vacuolar ATP synthase subunit B
  misc_feature (240)..(486): Homolog of NCBI NO: 25290419 NR Description: protein T4O12.24 [imported] - Arabidopsis
  misc_feature (1)..(241): Homolog of NCBI NO: 25290419 NR Description: protein T4O12.24 [imported] - Arabidopsis
  misc_feature (1)..(486): Homolog of NCBI NO: 17065080 NR Description: Unknown protein [Arabidopsis thaliana]
  misc_feature (1)..(484): Homolog of NCBI NO: 2493129 NR Description: Vacuolar ATP synthase subunit B isoform 1
  misc_feature (1)..(486): Homolog of NCBI NO: 26986106 NR Description: vacuolar ATPase subunit B [Mesembryanthemum
  misc_feature (1)..(486): Homolog of NCBI NO: 17065080 NR Description: Unknown protein [Arabidopsis thaliana]
  misc_feature (1)..(241): Homolog of NCBI NO: 25290419 NR Description: protein T4O12.24 [imported] - Arabidopsis
  misc_feature (240)..(486): Homolog of NCBI NO: 25290419 NR Description: protein T4O12.24 [imported] - Arabidopsis
  misc_feature (1)..(486): Homolog of NCBI NO: 15222929 NR Description: vacuolar ATP synthase subunit B
  misc_feature (1)..(486): Homolog of NCBI NO: 81637 NR Description: H+-exporting ATPase (EC 3.6.3.6) 57K chain -
MGTNDLDIEEGTLEIGMEYRTVSGVAGPLVILDKVKGPKYQEIVNIRLGDGSTRRGQVLEVDGEKAVVQVFEGTSGIDNKFTTVQFTGEVLKTPVSLDMLGRIFNGSGKPIDNGPPILPEAYLDISGSSINPSERTYPEEMIQTGISTIDVMNSIARGQKIPLFSAAGLPHNEIAAQICRQAGLVKRLEKTVDLLEDHGEDNFAIVFAAMGVNMETAQFFKRDFEENGSMERVTLFLNLANDPTIERIITPRIALTTAEYLAYECGKHVLVILTDMSSYADALREVSAAREEVPGRRGYPGYMYTDLATIYERAGRIEGRKGSITQIPILTMPNDDITHPTPDLTGYITEGQIYIDRQLHNRQIYPPINVLPSLSRLMKSAIGEGMTRKDHSDVSNQLYANYAIGKDVQAMKAVVGEEALSSEDLLYLEFLDKFERKFVMQGAYDTRNIFQSLDLAWTLLRIFPRELLHRIPAKTLDQFYSRDSTS

SEQ ID NO: 46001 - protein, 470 aa, Arabidopsis thaliana
  peptide (1)..(470): Ceres Seq. ID no. 12581064
  misc_feature (186)..(365): Pfam Name: ATP synthase alpha/beta family, Pfam Description: ATP synthase alpha/beta family,
  misc_feature (186)..(365): Pfam Name: ATP synthase alpha/beta family, Pfam Description: ATP synthase alpha/beta family,
  misc_feature (1)..(470): Homolog of NCBI NO: 11266665 NR Description: H+-transporting two-sector ATPase (EC 3.6.3.14)
  misc_feature (1)..(470): Homolog of NCBI NO: 26986106 NR Description: vacuolar ATPase subunit B [Mesembryanthemum
  misc_feature (1)..(469): Homolog of NCBI NO: 2493132 NR Description: Vacuolar ATP synthase subunit B isoform 2
  misc_feature (1)..(468): Homolog of NCBI NO: 2493129 NR Description: Vacuolar ATP synthase subunit B isoform 1
  misc_feature (1)..(470): Homolog of NCBI NO: 15233891 NR Description: probable H+-transporting ATPase
  misc_feature (1)..(470): Homolog of NCBI NO: 11266665 NR Description: H+-transporting two-sector ATPase (EC 3.6.3.14)
  misc_feature (1)..(469): Homolog of NCBI NO: 2493132 NR Description: Vacuolar ATP synthase subunit B isoform 2
  misc_feature (1)..(470): Homolog of NCBI NO: 15233891 NR Description: probable H+-transporting ATPase
  misc_feature (1)..(470): Homolog of NCBI NO: 81637 NR Description: H+-exporting ATPase (EC 3.6.3.6) 57K chain -
  misc_feature (1)..(470): Homolog of NCBI NO: 15222929 NR Description: vacuolar ATP synthase subunit B
  misc_feature (224)..(470): Homolog of NCBI NO: 25290419 NR Description: protein T4O12.24 [imported] - Arabidopsis
  misc_feature (1)..(225): Homolog of NCBI NO: 25290419 NR Description: protein T4O12.24 [imported] - Arabidopsis
  misc_feature (1)..(470): Homolog of NCBI NO: 17065080 NR Description: Unknown protein [Arabidopsis thaliana]
  misc_feature (1)..(468): Homolog of NCBI NO: 2493129 NR Description: Vacuolar ATP synthase subunit B isoform 1
  misc_feature (1)..(470): Homolog of NCBI NO: 26986106 NR Description: vacuolar ATPase subunit B [Mesembryanthemum
  misc_feature (1)..(470): Homolog of NCBI NO: 17065080 NR Description: Unknown protein [Arabidopsis thaliana]
  misc_feature (1)..(225): Homolog of NCBI NO: 25290419 NR Description: protein T4O12.24 [imported] - Arabidopsis
  misc_feature (224)..(470): Homolog of NCBI NO: 25290419 NR Description: protein T4O12.24 [imported] - Arabidopsis
  misc_feature (1)..(470): Homolog of NCBI NO: 15222929 NR Description: vacuolar ATP synthase subunit B
  misc_feature (1)..(470): Homolog of NCBI NO: 81637 NR Description: H+-exporting ATPase (EC 3.6.3.6) 57K chain -
MEYRTVSGVAGPLVILDKVKGPKYQEIVNIRLGDGSTRRGQVLEVDGEKAVVQVFEGTSGIDNKFTTVQFTGEVLKTPVSLDMLGRIFNGSGKPIDNGPPILPEAYLDISGSSINPSERTYPEEMIQTGISTIDVMNSIARGQKIPLFSAAGLPHNEIAAQICRQAGLVKRLEKTVDLLEDHGEDNFAIVFAAMGVNMETAQFFKRDFEENGSMERVTLFLNLANDPTIERIITPRIALTTAEYLAYECGKHVLVILTDMSSYADALREVSAAREEVPGRRGYPGYMYTDLATIYERAGRIEGRKGSITQIPILTMPNDDITHPTPDLTGYITEGQIYIDRQLHNRQIYPPINVLPSLSRLMKSAIGEGMTRKDHSDVSNQLYANYAIGKDVQAMKAVVGEEALSSEDLLYLEFLDKFERKFVMQGAYDTRNIFQSLDLAWTLLRIFPRELLHRIPAKTLDQFYSRDSTS

SEQ ID NO: 46002 - protein, 388 aa, Arabidopsis thaliana
  peptide (1)..(388): Ceres Seq. ID no. 12581065
  misc_feature (104)..(283): Pfam Name: ATP synthase alpha/beta family, Pfam Description: ATP synthase alpha/beta family,
  misc_feature (104)..(283): Pfam Name: ATP synthase alpha/beta family, Pfam Description: ATP synthase alpha/beta family,
  misc_feature (1)..(388): Homolog of NCBI NO: 11266665 NR Description: H+-transporting two-sector ATPase (EC 3.6.3.14)
  misc_feature (1)..(388): Homolog of NCBI NO: 26986106 NR Description: vacuolar ATPase subunit B [Mesembryanthemum
  misc_feature (1)..(387): Homolog of NCBI NO: 2493132 NR Description: Vacuolar ATP synthase subunit B isoform 2
  misc_feature (1)..(386): Homolog of NCBI NO: 2493129 NR Description: Vacuolar ATP synthase subunit B isoform 1
  misc_feature (1)..(388): Homolog of NCBI NO: 15233891 NR Description: probable H+-transporting ATPase
  misc_feature (1)..(388): Homolog of NCBI NO: 11266665 NR Description: H+-transporting two-sector ATPase (EC 3.6.3.14)
  misc_feature (1)..(387): Homolog of NCBI NO: 2493132 NR Description: Vacuolar ATP synthase subunit B isoform 2
  misc_feature (1)..(388): Homolog of NCBI NO: 15233891 NR Description: probable H+-transporting ATPase
  misc_feature (1)..(388): Homolog of NCBI NO: 81637 NR Description: H+-exporting ATPase (EC 3.6.3.6) 57K chain -
  misc_feature (1)..(388): Homolog of NCBI NO: 15222929 NR Description: vacuolar ATP synthase subunit B
  misc_feature (142)..(388): Homolog of NCBI NO: 25290419 NR Description: protein T4O12.24 [imported] - Arabidopsis
  misc_feature (1)..(143): Homolog of NCBI NO: 25290419 NR Description: protein T4O12.24 [imported] - Arabidopsis
  misc_feature (1)..(388): Homolog of NCBI NO: 17065080 NR Description: Unknown protein [Arabidopsis thaliana]
  misc_feature (1)..(386): Homolog of NCBI NO: 2493129 NR Description: Vacuolar ATP synthase subunit B isoform 1
  misc_feature (1)..(388): Homolog of NCBI NO: 26986106 NR Description: vacuolar ATPase subunit B [Mesembryanthemum
  misc_feature (1)..(388): Homolog of NCBI NO: 17065080 NR Description: Unknown protein [Arabidopsis thaliana]
  misc_feature (1)..(143): Homolog of NCBI NO: 25290419 NR Description: protein T4O12.24 [imported] - Arabidopsis
  misc_feature (142)..(388): Homolog of NCBI NO: 25290419 NR Description: protein T4O12.24 [imported] - Arabidopsis
  misc_feature (1)..(388): Homolog of NCBI NO: 15222929 NR Description: vacuolar ATP synthase subunit B
  misc_feature (1)..(388): Homolog of NCBI NO: 81637 NR Description: H+-exporting ATPase (EC 3.6.3.6) 57K chain -
MLGRIFNGSGKPIDNGPPILPEAYLDISGSSINPSERTYPEEMIQTGISTIDVMNSIARGQKIPLFSAAGLPHNEIAAQICRQAGLVKRLEKTVDLLEDHGEDNFAIVFAAMGVNMETAQFFKRDFEENGSMERVTLFLNLANDPTIERIITPRIALTTAEYLAYECGKHVLVILTDMSSYADALREVSAAREEVPGRRGYPGYMYTDLATIYERAGRIEGRKGSITQIPILTMPNDDITHPTPDLTGYITEGQIYIDRQLHNRQIYPPINVLPSLSRLMKSAIGEGMTRKDHSDVSNQLYANYAIGKDVQAMKAVVGEEALSSEDLLYLEFLDKFERKFVMQGAYDTRNIFQSLDLAWTLLRIFPRELLHRIPAKTLDQFYSRDSTS

SEQ ID NO: 46003 - DNA, 1289 bp, Arabidopsis thaliana
  misc_feature (1)..(1289): Ceres Seq. ID no. 13591715
  misc_feature: MA Experiment ID: 20000169 Result: Down-regulated in Transcription
  misc_feature: MA Experiment 20000169 PARAMETER Experiment Name: At_100uM_ABA_P Parameter: Age (day) Value: 14
  misc_feature: MA Experiment 20000169 PARAMETER Experiment Name: At_100uM_ABA_P Parameter: Organism Value: A. thaliana
  misc_feature: MA Experiment 20000169 PARAMETER Experiment Name: At_100uM_ABA_P Parameter: Plant Line Value: WS
  misc_feature: MA Experiment 20000169 PARAMETER Experiment Name: At_100uM_ABA_P Parameter: Timepoint (hr) Value: 6
  misc_feature: MA Experiment 20000169 PARAMETER Experiment Name: At_100uM_ABA_P Parameter: Tissue Value: Aerial
  misc_feature: MA Experiment 20000169 PARAMETER Experiment Name: At_100uM_ABA_P Parameter: Treatment Value: 100uM ABA vs. No Treatment
  misc_feature: MA Experiment ID: 20000184 Result: Up-regulated in Transcription
  misc_feature: MA Experiment 20000184 PARAMETER Experiment Name: At_Shoots__P Parameter: Age (day) Value: 7
  misc_feature: MA Experiment 20000184 PARAMETER Experiment Name: At_Shoots__P Parameter: Tissue Value: Shoots vs. Whole Plant
  misc_feature: MA Experiment ID: 20000185 Result: Down-regulated in Transcription
  misc_feature: MA Experiment 20000185 PARAMETER Experiment Name: At_Roots__P Parameter: Age (day) Value: 7 vs. 21
  misc_feature: MA Experiment 20000185 PARAMETER Experiment Name: At_Roots__P Parameter: Organism Value: A. thaliana
  misc_feature: MA Experiment 20000185 PARAMETER Experiment Name: At_Roots__P Parameter: Tissue Value: Roots vs. Whole Plant
  misc_feature: MA Experiment ID: 20000437 Result: Down-regulated in Transcription
  misc_feature: MA Experiment 20000437 PARAMETER Experiment Name: At_Drought_P Parameter: Age (day) Value: 8
  misc_feature: MA Experiment 20000437 PARAMETER Experiment Name: At_Drought_P Parameter: Organism Value: A. thaliana
  misc_feature: MA Experiment 20000437 PARAMETER Experiment Name: At_Drought_P Parameter: Plant Line Value: WS
  misc_feature: MA Experiment 20000437 PARAMETER Experiment Name: At_Drought_P Parameter: Timepoint (hr) Value: 24
  misc_feature: MA Experiment 20000437 PARAMETER Experiment Name: At_Drought_P Parameter: Tissue Value: Whole Plant
  misc_feature: MA Experiment 20000437 PARAMETER Experiment Name: At_Drought_P Parameter: Treatment Value: Drought vs. No Drought
  misc_feature: MA Experiment ID: 20000438 Result: Up-regulated in Transcription
  misc_feature: MA Experiment 20000438 PARAMETER Experiment Name: At_Shoots__P Parameter: Age (day) Value: 14
  misc_feature: MA Experiment 20000438 PARAMETER Experiment Name: At_Shoots__P Parameter: Tissue Value: Shoots vs. Whole Plant
  misc_feature: MA Experiment ID: 20000439 Result: Down-regulated in Transcription
  misc_feature: MA Experiment 20000439 PARAMETER Experiment Name: At_Roots__P Parameter: Age (day) Value: 14 vs. 21
  misc_feature: MA Experiment 20000439 PARAMETER Experiment Name: At_Roots__P Parameter: Organism Value: A. thaliana
  misc_feature: MA Experiment 20000439 PARAMETER Experiment Name: At_Roots__P Parameter: Tissue Value: Roots vs. Whole Plant
  misc_feature: MA Experiment ID: 20000574 Result: Down-regulated in Transcription
  misc_feature: MA Experiment 20000574 PARAMETER Experiment Name: At_100uM_ABA_Mutants__P Parameter: Organism Value: A. thaliana
  misc_feature: MA Experiment 20000574 PARAMETER Experiment Name: At_100uM_ABA_Mutants__P Parameter: Plant Line Value: CS23 vs. Ler wt
  misc_feature: MA Experiment 20000574 PARAMETER Experiment Name: At_100uM_ABA_Mutants__P Parameter: Timepoint (hr) Value: N/A
  misc_feature: MA Experiment 20000574 PARAMETER Experiment Name: At_100uM_ABA_Mutants__P Parameter: Tissue Value: Whole Plant
  misc_feature: MA Experiment 20000574 PARAMETER Experiment Name: At_100uM_ABA_Mutants__P Parameter: Treatment Value: None
  misc_feature: MA Experiment ID: 20000794 Result: Down-regulated in Transcription
  misc_feature: MA Experiment 20000794 PARAMETER Experiment Name: At_Petals_P Parameter: Age (day) Value: 23-25 days
  misc_feature: MA Experiment 20000794 PARAMETER Experiment Name: At_Petals_P Parameter: Plant Line Value: WS
  misc_feature: MA Experiment 20000794 PARAMETER Experiment Name: At_Petals_P Parameter: Tissue Value: Petals vs. Whole plant
  misc_feature: MA Experiment ID: 20001248 Result: Up-regulated in Transcription
  misc_feature: MA Experiment 20001248 PARAMETER Experiment Name: At_Far-red-induction_P Parameter: Age (day) Value: 7
  misc_feature: MA Experiment 20001248 PARAMETER Experiment Name: At_Far-red-induction_P Parameter: Light Value: Far-red vs. White
  misc_feature: MA Experiment 20001248 PARAMETER Experiment Name: At_Far-red-induction_P Parameter: Organism Value: A. thaliana
  misc_feature: MA Experiment 20001248 PARAMETER Experiment Name: At_Far-red-induction_P Parameter: Plant Line Value: Columbia
  misc_feature: MA Experiment 20001248 PARAMETER Experiment Name: At_Far-red-induction_P Parameter: Timepoint (hr) Value: 4
  misc_feature: MA Experiment 20001248 PARAMETER Experiment Name: At_Far-red-induction_P Parameter: Tissue Value: Whole Plant
  misc_feature: MA Experiment ID: 20001560 Result: Down-regulated in Transcription
  misc_feature: MA Experiment 20001560 PARAMETER Experiment Name: At_Drought_Soil_Dry_P Parameter: Age (day) Value: 28
  misc_feature: MA Experiment 20001560 PARAMETER Experiment Name: At_Drought_Soil_Dry_P Parameter: Organism Value: A. thaliana
  misc_feature: MA Experiment 20001560 PARAMETER Experiment Name: At_Drought_Soil_Dry_P Parameter: Plant Line Value: WS
  misc_feature: MA Experiment 20001560 PARAMETER Experiment Name: At_Drought_Soil_Dry_P Parameter: Post Timepoint (hr) Value: None
  misc_feature: MA Experiment 20001560 PARAMETER Experiment Name: At_Drought_Soil_Dry_P Parameter: Post-Treatment Value: None
  misc_feature: MA Experiment 20001560 PARAMETER Experiment Name: At_Drought_Soil_Dry_P Parameter: Timepoint (day) Value: 14
  misc_feature: MA Experiment 20001560 PARAMETER Experiment Name: At_Drought_Soil_Dry_P Parameter: Treatment Value: Drought vs. No Drought
  misc_feature: MA Experiment ID: 20001757 Result: Up-regulated in Transcription
  misc_feature: MA Experiment 20001757 PARAMETER Experiment Name: At_50mM_NH4NO3_L-to-H_P Parameter: Timepoint (hr) Value: 6
  misc_feature: MA Experiment 20001757 PARAMETER Experiment Name: At_50mM_NH4NO3_L-to-H_P Parameter: Tissue Value: Leaf
  misc_feature: MA Experiment 20001757 PARAMETER Experiment Name: At_50mM_NH4NO3_L-to-H_P Parameter: Treatment Value: 50mM NH4NO3 vs 100mM Mannitol
  misc_feature: MA Experiment ID: 20001904 Result: Down-regulated in Transcription
  misc_feature: MA Experiment 20001904 PARAMETER Experiment Name: At_Drought_Reproduction_P Parameter: Age (day) Value: 37
  misc_feature: MA Experiment 20001904 PARAMETER Experiment Name: At_Drought_Reproduction_P Parameter: Organism Value: A. thaliana
  misc_feature: MA Experiment 20001904 PARAMETER Experiment Name: At_Drought_Reproduction_P Parameter: Plant Line Value: WS
  misc_feature: MA Experiment 20001904 PARAMETER Experiment Name: At_Drought_Reproduction_P Parameter: Timepoint (day) Value: 7
  misc_feature: MA Experiment 20001904 PARAMETER Experiment Name: At_Drought_Reproduction_P Parameter: Tissue Value: Rosettes
  misc_feature: MA Experiment 20001904 PARAMETER Experiment Name: At_Drought_Reproduction_P Parameter: Treatment Value: Drought vs. No Drought
  misc_feature: MA Experiment ID: 20001905 Result: Down-regulated in Transcription
  misc_feature: MA Experiment 20001905 PARAMETER Experiment Name: At_Drought_Reproduction_P Parameter: Age (day) Value: 40
  misc_feature: MA Experiment 20001905 PARAMETER Experiment Name: At_Drought_Reproduction_P Parameter: Organism Value: A. thaliana
  misc_feature: MA Experiment 20001905 PARAMETER Experiment Name: At_Drought_Reproduction_P Parameter: Plant Line Value: WS
  misc_feature: MA Experiment 20001905 PARAMETER Experiment Name: At_Drought_Reproduction_P Parameter: Timepoint (day) Value: 10
  misc_feature: MA Experiment 20001905 PARAMETER Experiment Name: At_Drought_Reproduction_P Parameter: Tissue Value: Rosettes
  misc_feature: MA Experiment 20001905 PARAMETER Experiment Name: At_Drought_Reproduction_P Parameter: Treatment Value: Drought vs. No Drought
ggtactgctgcacaagtgtagaggcagtggcacaacatctttaagaaagagagagagaaagagtcatttattcatttcctcgcttaaaaatcttgagcacccagacagaattcttctttcttctttctggggttgagaaaaatgagtgaaagagatgatggattggggctaagtttgagcttgagtttaggttttaatcaaaaggacccgtcctcgaggttaaatccaatgcctctggcttcttatgcatcttcatcacacatgcagcatatgcagcagagcaattataaccatcctcaaaagattcagaacacttggattaacatgtttcagtcatcagagagaaactcggacatgagatcgtttctccggggaatagacgtaaacagagctccatcgacggtggtggttgacgtggaggatgaaggcgccggagtttcgtctccgaacagcaccgtctcaagcgtgatgagcgggaagaagagcgagcgagagctaatggctgcggcaggtgcagttggaggaggtagagtagaagataatgagattgagagagcttcttgctcgctcggcggtggtagcgacgatgaagacggtagcgggaacggagatgacagttcgaggaagaaactccgattgtctaaagaacaagctttggttcttgaagaaacttttaaagaacatagtacactcaatccgaagcaaaagatggctttggctaagcagttgaatctgaggacgagacaagttgaagtgtggttccaaaaccgaaggcaaaggacgaagctgaagcaaacggaagtagactgtgaatatcttaagagatgttgcgagaatctaacggatgagaatcggagattgcaaaaggaagtgagtgagcttagggctttaaagctttctccacacttatacatgcacatgaaacctcccactactctcacaatgtgtccttcttgcgagcgagtcgctgttacgtcatctccgtcatcggtggctcctcctgtgatgaattcatcgtctccgatgggtccgatgagtccgtgggctgccatgcctctacggcaacgacctgctgctggttctcattagagtttaattagtctaaagataataggtttggtgatttgtttttattatattgttgaacggacttggaagttcttttcaagagttggtcccatgctcttctttcctttgttttattcagtttctatttatagctgaattcaggataatggaaaatctactaatattattgtccaattattagtttggggccctgacgtagc

SEQ ID NO: 46004 - protein, 315 aa, Arabidopsis thaliana
  peptide (1)..(315): Ceres Seq. ID no. 13591716
  misc_feature (1)..(120): Pfam Name: HD-ZIP protein N terminus Pfam Description: HD-ZIP protein N terminus
  misc_feature (71)..(303): Homolog of NCBI NO: 15238078 NR Description: homeobox-leucine zipper protein HAT2 (HD-ZIP
  misc_feature (65)..(304): Homolog of NCBI NO: 25457630 NR Description: homeobox protein THOM1 [imported] - tomato
  misc_feature (59)..(304): Homolog of NCBI NO: 21592922 NR Description: homeobox-leucine zipper protein HAT1 (hd-zip
  misc_feature (59)..(304): Homolog of NCBI NO: 15236076 NR Description: homeobox-leucine zipper protein HAT1 (HD-Zip
  misc_feature (12)..(311): Homolog of NCBI NO: 18034437 NR Description: homeodomain leucine zipper protein CPHB-3
  misc_feature (1)..(309): Homolog of NCBI NO: 15225368 NR Description: homeobox-leucine zipper protein Athb-4
  misc_feature (1)..(315): Homolog of NCBI NO: 15232311 NR Description: homeobox-leucine zipper protein HAT3 [Arabidopsis
  misc_feature (1)..(315): Homolog of NCBI NO: 25453563 NR Description: homeobox protein HAT3 [imported] - Arabidopsis
MSERDDGLGLSLSLSLGFNQKDPSSRLNPMPLASYASSSHMQHMQQSNYNHPQKIQNTWINMFQSSERNSDMRSFLRGIDVNRAPSTVVVDVEDEGAGVSSPNSTVSSVMSGKKSERELMAAAGAVGGGRVEDNEIERASCSLGGGSDDEDGSGNGDDSSRKKLRLSKEQALVLEETFKEHSTLNPKQKMALAKQLNLRTRQVEVWFQNRRQRTKLKQTEVDCEYLKRCCENLTDENRRLQKEVSELRALKLSPHLYMHMKPPTTLTMCPSCERVAVTSSPSSVAPPVMNSSSPMGPMSPWAAMPLRQRPAAGSH

SEQ ID NO: 46005 - protein, 286 aa, Arabidopsis thaliana
  peptide (1)..(286): Ceres Seq. ID no. 13591717
  misc_feature (1)..(91): Pfam Name: HD-ZIP protein N terminus Pfam Description: HD-ZIP protein N terminus
  misc_feature (42)..(274): Homolog of NCBI NO: 15238078 NR Description: homeobox-leucine zipper protein HAT2 (HD-ZIP
  misc_feature (36)..(275): Homolog of NCBI NO: 25457630 NR Description: homeobox protein THOM1 [imported] - tomato
  misc_feature (30)..(275): Homolog of NCBI NO: 21592922 NR Description: homeobox-leucine zipper protein HAT1 (hd-zip
  misc_feature (30)..(275): Homolog of NCBI NO: 15236076 NR Description: homeobox-leucine zipper protein HAT1 (HD-Zip
  misc_feature (1)..(282): Homolog of NCBI NO: 18034437 NR Description: homeodomain leucine zipper protein CPHB-3
  misc_feature (1)..(280): Homolog of NCBI NO: 15225368 NR Description: homeobox-leucine zipper protein Athb-4
  misc_feature (1)..(286): Homolog of NCBI NO: 15232311 NR Description: homeobox-leucine zipper protein HAT3 [Arabidopsis
  misc_feature (1)..(286): Homolog of NCBI NO: 25453563 NR Description: homeobox protein HAT3 [imported] - Arabidopsis
MPLASYASSSHMQHMQQSNYNHPQKIQNTWINMFQSSERNSDMRSFLRGIDVNRAPSTVVVDVEDEGAGVSSPNSTVSSVMSGKKSERELMAAAGAVGGGRVEDNEIERASCSLGGGSDDEDGSGNGDDSSRKKLRLSKEQALVLEETFKEHSTLNPKQKMALAKQLNLRTRQVEVWFQNRRQRTKLKQTEVDCEYLKRCCENLTDENRRLQKEVSELRALKLSPHLYMHMKPPTTLTMCPSCERVAVTSSPSSVAPPVMNSSSPMGPMSPWAAMPLRQRPAAGSH

SEQ ID NO: 46006 - protein, 275 aa, Arabidopsis thaliana
  peptide (1)..(275): Ceres Seq. ID no. 13591718
  misc_feature (1)..(80): Pfam Name: HD-ZIP protein N terminus Pfam Description: HD-ZIP protein N terminus
  misc_feature (31)..(263): Homolog of NCBI NO: 15238078 NR Description: homeobox-leucine zipper protein HAT2 (HD-ZIP
  misc_feature (25)..(264): Homolog of NCBI NO: 25457630 NR Description: homeobox protein THOM1 [imported] - tomato
  misc_feature (19)..(264): Homolog of NCBI NO: 21592922 NR Description: homeobox-leucine zipper protein HAT1 (hd-zip
  misc_feature (19)..(264): Homolog of NCBI NO: 15236076 NR Description: homeobox-leucine zipper protein HAT1 (HD-Zip
  misc_feature (1)..(271): Homolog of NCBI NO: 18034437 NR Description: homeodomain leucine zipper protein CPHB-3
  misc_feature (1)..(269): Homolog of NCBI NO: 15225368 NR Description: homeobox-leucine zipper protein Athb-4
  misc_feature (1)..(275): Homolog of NCBI NO: 15232311 NR Description: homeobox-leucine zipper protein HAT3 [Arabidopsis
  misc_feature (1)..(275): Homolog of NCBI NO: 25453563 NR Description: homeobox protein HAT3 [imported] - Arabidopsis
MQHMQQSNYNHPQKIQNTWINMFQSSERNSDMRSFLRGIDVNRAPSTVVVDVEDEGAGVSSPNSTVSSVMSGKKSERELMAAAGAVGGGRVEDNEIERASCSLGGGSDDEDGSGNGDDSSRKKLRLSKEQALVLEETFKEHSTLNPKQKMALAKQLNLRTRQVEVWFQNRRQRTKLKQTEVDCEYLKRCCENLTDENRRLQKEVSELRALKLSPHLYMHMKPPTTLTMCPSCERVAVTSSPSSVAPPVMNSSSPMGPMSPWAAMPLRQRPAAGSH

SEQ ID NO: 46007 - DNA, 1275 bp, Arabidopsis thaliana
  misc_feature (1)..(1275): Ceres Seq. ID no. 12560769
  misc_feature: MA Experiment ID: 20000171 Result: Down-regulated in Transcription
  misc_feature: MA Experiment 20000171 PARAMETER Experiment Name: At_42deg_Heat_P Parameter: Age (day) Value: 14
  misc_feature: MA Experiment 20000171 PARAMETER Experiment Name: At_42deg_Heat_P Parameter: Organism Value: A. thaliana
  misc_feature: MA Experiment 20000171 PARAMETER Experiment Name: At_42deg_Heat_P Parameter: Plant Line Value: WS
  misc_feature: MA Experiment 20000171 PARAMETER Experiment Name: At_42deg_Heat_P Parameter: Temperature (deg C) Value: 42 vs. 22
  misc_feature: MA Experiment 20000171 PARAMETER Experiment Name: At_42deg_Heat_P Parameter: Timepoint (hr) Value: 1
  misc_feature: MA Experiment 20000171 PARAMETER Experiment Name: At_42deg_Heat_P Parameter: Tissue Value: Aerial
  misc_feature: MA Experiment ID: 20001247 Result: Up-regulated in Transcription
  misc_feature: MA Experiment 20001247 PARAMETER Experiment Name: At_Far-red-induction_P Parameter: Age (day) Value: 7
  misc_feature: MA Experiment 20001247 PARAMETER Experiment Name: At_Far-red-induction_P Parameter: Light Value: Far-red vs. White
  misc_feature: MA Experiment 20001247 PARAMETER Experiment Name: At_Far-red-induction_P Parameter: Organism Value: A. thaliana
  misc_feature: MA Experiment 20001247 PARAMETER Experiment Name: At_Far-red-induction_P Parameter: Plant Line Value: Columbia
  misc_feature: MA Experiment 20001247 PARAMETER Experiment Name: At_Far-red-induction_P Parameter: Timepoint (hr) Value: 1
  misc_feature: MA Experiment 20001247 PARAMETER Experiment Name: At_Far-red-induction_P Parameter: Tissue Value: Whole Plant
atgtcctttgaatttcaaaagaaaaaaaggggaagctggtggagcttgtactggtgttttggatccaagaagaacaataaaaggataggccacgcggtgcttgtacccgaaccagctgcatcaggagctgcggtggctccagtccaaaactcttcgagcaattctacttcaatattcatgccctttatagctcctccttcatctcctgcttcctttctgccatcaggtcctccctctgcgtcacatactcctgatcctggtctactttgttccctaaccgtcaatgaaccgccttcagcctttactattggaccatacgctcatgagactcaacctgttactcctccagtgttctctgctttcacaacggaaccctccaccgcgccattcacgccacctcctgaatcaccttcttcccctgaagtgccttttgctcagttacttacatcttcattggaaagggctaggaggaacagtggtggtggaatgaatcagaagttttcagctgcacactacgagtttaagtcttgtcaagtgtatcctggaagtccaggtggtaatctaatctctcctggttcaggtacatcttctccttacccagggaaatgctccatcatcgagtttcgtatcggcgaacctccaaagtttcttggttttgagcacttcacagcgcgtaaatggggatcaagattcggttctggatccatcacacctgctggacaaggttcaaggttgggttcaggtgctttgactcctgatggctcaaagctaacttctggtgtagtgacaccaaatggtgcagagactgttataagaatgagttatgggaatctcacaccacttgaaggcagtcttttggatagtcagatctctgaggttgcgtctttagccaattcggaccacgggtcgtcaaggcataatgatgaagctctcgtggttcctcacagagtttctttcgagttgactggtgaagacgttgcacggtgtcttgcaagcaagctaaaccgttccggttcacatgaaaaagcaagcggcgaacatttaagaccaaactgttgtaaaacgtcgggagaaacagagagcgaacagagtcagaagctaagatcgttttctacaggctctaacaaagaattcaagtttgatagcaccaatgaagagatgatagagaaaattcgatcggagtggtgggcgaatgagaaggtcgccggaaaaggtgatcacagtccaagaaacagttggactttctttccagtcttacgctctggacatacttag

SEQ ID NO: 46008 - protein, 424 aa, Arabidopsis thaliana
  peptide (1)..(424): Ceres Seq. ID no. 12560770
  misc_feature (19)..(200): Homolog of NCBI NO: 34894046 NR Description: P0436E04.7 [Oryza sativa (japonica
  misc_feature (6)..(204): Homolog of NCBI NO: 15223134 NR Description: unknown protein; protein id: At1g76660.1
  misc_feature (50)..(217): Homolog of NCBI NO: 25404436 NR Description: hypothetical protein F24D7.9 [imported] -
  misc_feature (8)..(217): Homolog of NCBI NO: 18407879 NR Description: expressed protein
  misc_feature (6)..(397): Homolog of NCBI NO: 15237154 NR Description: unknown protein; protein id: At5g52430.1
  misc_feature (7)..(424): Homolog of NCBI NO: 30686949 NR Description: proline-rich protein family [Arabidopsis
  misc_feature (1)..(424): Homolog of NCBI NO: 7486810 NR Description: hypothetical protein M7J2.10 - Arabidopsis
MSFEFQKKKRGSWWSLYWCFGSKKNNKRIGHAVLVPEPAASGAAVAPVQNSSSNSTSIFMPFIAPPSSPASFLPSGPPSASHTPDPGLLCSLTVNEPPSAFTIGPYAHETQPVTPPVFSAFTTEPSTAPFTPPPESPSSPEVPFAQLLTSSLERARRNSGGGMNQKFSAAHYEFKSCQVYPGSPGGNLISPGSGTSSPYPGKCSIIEFRIGEPPKFLGFEHFTARKWGSRFGSGSITPAGQGSRLGSGALTPDGSKLTSGVVTPNGAETVIRMSYGNLTPLEGSLLDSQISEVASLANSDHGSSRHNDEALVVPHRVSFELTGEDVARCLASKLNRSGSHEKASGEHLRPNCCKTSGETESEQSQKLRSFSTGSNKEFKFDSTNEEMIEKIRSEWWANEKVAGKGDHSPRNSWTFFPVLRSGHT

SEQ ID NO: 46009 - protein, 365 aa, Arabidopsis thaliana
  peptide (1)..(365): Ceres Seq. ID no. 12560771
  misc_feature (1)..(141): Homolog of NCBI NO: 34894046 NR Description: P0436E04.7 [Oryza sativa (japonica
  misc_feature (1)..(145): Homolog of NCBI NO: 15223134 NR Description: unknown protein; protein id: At1g76660.1
  misc_feature (1)..(158): Homolog of NCBI NO: 25404436 NR Description: hypothetical protein F24D7.9 [imported] -
  misc_feature (1)..(158): Homolog of NCBI NO: 18407879 NR Description: expressed protein
  misc_feature (1)..(338): Homolog of NCBI NO: 15237154 NR Description: unknown protein; protein id: At5g52430.1
  misc_feature (1)..(365): Homolog of NCBI NO: 30686949 NR Description: proline-rich protein family [Arabidopsis
  misc_feature (1)..(365): Homolog of NCBI NO: 7486810 NR Description: hypothetical protein M7J2.10 - Arabidopsis
MPFIAPPSSPASFLPSGPPSASHTPDPGLLCSLTVNEPPSAFTIGPYAHETQPVTPPVFSAFTTEPSTAPFTPPPESPSSPEVPFAQLLTSSLERARRNSGGGMNQKFSAAHYEFKSCQVYPGSPGGNLISPGSGTSSPYPGKCSIIEFRIGEPPKFLGFEHFTARKWGSRFGSGSITPAGQGSRLGSGALTPDGSKLTSGVVTPNGAETVIRMSYGNLTPLEGSLLDSQISEVASLANSDHGSSRHNDEALVVPHRVSFELTGEDVARCLASKLNRSGSHEKASGEHLRPNCCKTSGETESEQSQKLRSFSTGSNKEFKFDSTNEEMIEKIRSEWWANEKVAGKGDHSPRNSWTFFPVLRSGHT

SEQ ID NO: 46010 - protein, 262 aa, Arabidopsis thaliana
  peptide (1)..(262): Ceres Seq. ID no. 12560772
  misc_feature (1)..(38): Homolog of NCBI NO: 34894046 NR Description: P0436E04.7 [Oryza sativa (japonica
  misc_feature (1)..(42): Homolog of NCBI NO: 15223134 NR Description: unknown protein; protein id: At1g76660.1
  misc_feature (1)..(55): Homolog of NCBI NO: 25404436 NR Description: hypothetical protein F24D7.9 [imported] -
  misc_feature (1)..(55): Homolog of NCBI NO: 18407879 NR Description: expressed protein
  misc_feature (1)..(235): Homolog of NCBI NO: 15237154 NR Description: unknown protein; protein id: At5g52430.1
  misc_feature (1)..(262): Homolog of NCBI NO: 30686949 NR Description: proline-rich protein family [Arabidopsis
  misc_feature (1)..(262): Homolog of NCBI NO: 7486810 NR Description: hypothetical protein M7J2.10 - Arabidopsis
MNQKFSAAHYEFKSCQVYPGSPGGNLISPGSGTSSPYPGKCSIIEFRIGEPPKFLGFEHFTARKWGSRFGSGSITPAGQGSRLGSGALTPDGSKLTSGVVTPNGAETVIRMSYGNLTPLEGSLLDSQISEVASLANSDHGSSRHNDEALVVPHRVSFELTGEDVARCLASKLNRSGSHEKASGEHLRPNCCKTSGETESEQSQKLRSFSTGSNKEFKFDSTNEEMIEKIRSEWWANEKVAGKGDHSPRNSWTFFPVLRSGHT

SEQ ID NO: 46011 - DNA, 1628 bp, Arabidopsis thaliana
  misc_feature (1)..(1628): Ceres Seq. ID no. 12560773
  misc_feature: MA Experiment ID: 20000171 Result: Down-regulated in Transcription
  misc_feature: MA Experiment 20000171 PARAMETER Experiment Name: At_42deg_Heat_P Parameter: Age (day) Value: 14
  misc_feature: MA Experiment 20000171 PARAMETER Experiment Name: At_42deg_Heat_P Parameter: Organism Value: A. thaliana
  misc_feature: MA Experiment 20000171 PARAMETER Experiment Name: At_42deg_Heat_P Parameter: Plant Line Value: WS
  misc_feature: MA Experiment 20000171 PARAMETER Experiment Name: At_42deg_Heat_P Parameter: Temperature (deg C) Value: 42 vs. 22
  misc_feature: MA Experiment 20000171 PARAMETER Experiment Name: At_42deg_Heat_P Parameter: Timepoint (hr) Value: 1
  misc_feature: MA Experiment 20000171 PARAMETER Experiment Name: At_42deg_Heat_P Parameter: Tissue Value: Aerial
  misc_feature: MA Experiment ID: 20000173 Result: Down-regulated in Transcription
  misc_feature: MA Experiment 20000173 PARAMETER Experiment Name: At_42deg_Heat_P Parameter: Age (day) Value: 14
  misc_feature: MA Experiment 20000173 PARAMETER Experiment Name: At_42deg_Heat_P Parameter: Organism Value: A. thaliana
  misc_feature: MA Experiment 20000173 PARAMETER Experiment Name: At_42deg_Heat_P Parameter: Plant Line Value: WS
  misc_feature: MA Experiment 20000173 PARAMETER Experiment Name: At_42deg_Heat_P Parameter: Temperature (deg C) Value: 42 vs. 22
  misc_feature: MA Experiment 20000173 PARAMETER Experiment Name: At_42deg_Heat_P Parameter: Timepoint (hr) Value: 6
  misc_feature: MA Experiment 20000173 PARAMETER Experiment Name: At_42deg_Heat_P Parameter: Tissue Value: Aerial
  misc_feature: MA Experiment ID: 20000180 Result: Up-regulated in Transcription
  misc_feature: MA Experiment 20000180 PARAMETER Experiment Name: At_Germinating_Seeds_P Parameter: Age (hr) Value: 24 vs. 0
  misc_feature: MA Experiment 20000180 PARAMETER Experiment Name: At_Germinating_Seeds_P Parameter: Tissue Value: Germinating Seeds
  misc_feature: MA Experiment ID: 20000184 Result: Up-regulated in Transcription
  misc_feature: MA Experiment 20000184 PARAMETER Experiment Name: At_Shoots__P Parameter: Age (day) Value: 7
  misc_feature: MA Experiment 20000184 PARAMETER Experiment Name: At_Shoots__P Parameter: Tissue Value: Shoots vs. Whole Plant
  misc_feature: MA Experiment ID: 20000185 Result: Down-regulated in Transcription
  misc_feature: MA Experiment 20000185 PARAMETER Experiment Name: At_Roots__P Parameter: Age (day) Value: 7 vs. 21
  misc_feature: MA Experiment 20000185 PARAMETER Experiment Name: At_Roots__P Parameter: Organism Value: A. thaliana
  misc_feature: MA Experiment 20000185 PARAMETER Experiment Name: At_Roots__P Parameter: Tissue Value: Roots vs. Whole Plant
  misc_feature: MA Experiment ID: 20000227 Result: Down-regulated in Transcription
  misc_feature: MA Experiment 20000227 PARAMETER Experiment Name: At_Root-Tips-vs-Tops_P Parameter: Tissue Value: Root Tips vs. Root Tops
  misc_feature: MA Experiment ID: 20000265 Result: Up-regulated in Transcription
  misc_feature: MA Experiment 20000265 PARAMETER Experiment Name: At_Open_Flower_P Parameter: Age (day) Value: 21
  misc_feature: MA Experiment 20000265 PARAMETER Experiment Name: At_Open_Flower_P Parameter: Plant Line Value: WS
  misc_feature: MA Experiment 20000265 PARAMETER Experiment Name: At_Open_Flower_P Parameter: Tissue Value: Closed Flower vs. Whole Plant
  misc_feature: MA Experiment ID: 20000438 Result: Up-regulated in Transcription
  misc_feature: MA Experiment 20000438 PARAMETER Experiment Name: At_Shoots__P Parameter: Age (day) Value: 14
  misc_feature: MA Experiment 20000438 PARAMETER Experiment Name: At_Shoots__P Parameter: Tissue Value: Shoots vs. Whole Plant
  misc_feature: MA Experiment ID: 20001248 Result: Down-regulated in Transcription
  misc_feature: MA Experiment 20001248 PARAMETER Experiment Name: At_Far-red-induction_P Parameter: Age (day) Value: 7
  misc_feature: MA Experiment 20001248 PARAMETER Experiment Name: At_Far-red-induction_P Parameter: Light Value: Far-red vs. White
  misc_feature: MA Experiment 20001248 PARAMETER Experiment Name: At_Far-red-induction_P Parameter: Organism Value: A. thaliana
  misc_feature: MA Experiment 20001248 PARAMETER Experiment Name: At_Far-red-induction_P Parameter: Plant Line Value: Columbia
  misc_feature: MA Experiment 20001248 PARAMETER Experiment Name: At_Far-red-induction_P Parameter: Timepoint (hr) Value: 4
  misc_feature: MA Experiment 20001248 PARAMETER Experiment Name: At_Far-red-induction_P Parameter: Tissue Value: Whole Plant
  misc_feature: MA Experiment ID: 20001450 Result: Down-regulated in Transcription
  misc_feature: MA Experiment 20001450 PARAMETER Experiment Name: At_Far-red-induction_P Parameter: Age (day) Value: 7
  misc_feature: MA Experiment 20001450 PARAMETER Experiment Name: At_Far-red-induction_P Parameter: Light Value: Far-red vs. White
  misc_feature: MA Experiment 20001450 PARAMETER Experiment Name: At_Far-red-induction_P Parameter: Organism Value: A. thaliana
  misc_feature: MA Experiment 20001450 PARAMETER Experiment Name: At_Far-red-induction_P Parameter: Plant Line Value: Columbia
  misc_feature: MA Experiment 20001450 PARAMETER Experiment Name: At_Far-red-induction_P Parameter: Timepoint (hr) Value: 8
  misc_feature: MA Experiment 20001450 PARAMETER Experiment Name: At_Far-red-induction_P Parameter: Tissue Value: Whole Plant
  misc_feature: MA Experiment ID: 20001451 Result: Down-regulated in Transcription
  misc_feature: MA Experiment 20001451 PARAMETER Experiment Name: At_Far-red-induction_P Parameter: Age (day) Value: 7
  misc_feature: MA Experiment 20001451 PARAMETER Experiment Name: At_Far-red-induction_P Parameter: Light Value: Far-red vs. White
  misc_feature: MA Experiment 20001451 PARAMETER Experiment Name: At_Far-red-induction_P Parameter: Organism Value: A. thaliana
  misc_feature: MA Experiment 20001451 PARAMETER Experiment Name: At_Far-red-induction_P Parameter: Plant Line Value: Columbia
  misc_feature: MA Experiment 20001451 PARAMETER Experiment Name: At_Far-red-induction_P Parameter: Timepoint (hr) Value: 24
  misc_feature: MA Experiment 20001451 PARAMETER Experiment Name: At_Far-red-induction_P Parameter: Tissue Value: Whole Plant
  misc_feature: MA Experiment ID: 20001757 Result: Up-regulated in Transcription
  misc_feature: MA Experiment 20001757 PARAMETER Experiment Name: At_50mM_NH4NO3_L-to-H_P Parameter: Timepoint (hr) Value: 6
  misc_feature: MA Experiment 20001757 PARAMETER Experiment Name: At_50mM_NH4NO3_L-to-H_P Parameter: Tissue Value: Leaf
  misc_feature: MA Experiment 20001757 PARAMETER Experiment Name: At_50mM_NH4NO3_L-to-H_P Parameter: Treatment Value: 50mM NH4NO3 vs 100mM Mannitol
tttcctcttccttccttccccaatagagagggattttcccgcttcagcgtctctcagtctctctctcggctttatccaaaggttccttcgtttactccgcttctatggaagaagcttgaatccttctctcttcttcttctccttcttcccttgacatttttgttctganaagcaacatggccctcggtggcttgatttcaaatcggaacttcggttccttcatcggctcaggcaatggttgtcagagacttggaaaaagtggtgcagaggtttccaagctttttccaaatgcattgttgtgccgtaatcatcaacctctgcaagctagtttacatcatgaatcgggacacatgagaagaagttttggatgtttccttcaaccaagaatggacagtgtaattaggtttaggaacagtatcaagatcaacagatctcgtgcttactacaaatcagaggagtcagatatcacggaaggagttgtgccatcggctgatggctcagctgaagctattttagttgaaggaaatctacagaacgcatctccatggtggcagcagtttcctagacgctgggtgatcgtcttgttatgcttttcgtcttttcttctttgcaatatggaccgtgtgaacatgagcattgcaattcttcccatgtcacaagaatataactggagtagtgcaactgttggcttaattcagtcctctttcttctggggctatttacttactcagattctgggaggtatatgggcagataagtttggcgggaagggtgttgcaatgcctgctatgaacaacatgctttctaaatggatccctgtctcagagagaagcagatcgcttgcactggtctatagtggcatgtatcttggttccgtcacaggattggcattctctcctatgctaatcaccaagttcggatggccatctgttttctactcgtttggctccctcggaagtatatggtttttgctatggctaaaatttgcatatagctctcccaaggatgacccggacctaagtgaagaagaaaaaaaggttatactgggaggtagcaaaccaagggaacctgttacagtgattccatggaagctaatactgtctaaacccccagtctgggctctcataatttcccacttctgccataattggggaactttcatactattgacatggatgcccacatattacaatcaggcacggagttcagcttcagttatatccttactgtttaatattttttgtgaacaagtcttgaagttcaacctcactgaatccgggctactatgcgttttgccatggctaaccatggctgtttttgctaatattggaggttggattgctgatactcttgtgagcagaggtctttcaattacaaacggctctgatgcattctctcagtcgggtctctactctaatcatcaagacattggcccacgatacgctggtgtactcttaggactatcaaacacagcaggagtcctagctggtgtctttggcactgcagctactggttacatcctccaacgaggttcatgggatgatgtgttcaaagtagcagttgcactgtatctaattggaactctggtctggaacttgttcgcaaccggagaaaaaattctcgactag

SEQ ID NO: 46012 - protein, 483 aa, Arabidopsis thaliana
  peptide (1)..(483): Ceres Seq. ID no. 12560774
  misc_feature (134)..(200): Pfam Name: Sugar (and other) transporter Pfam Description: Sugar (and other) transporter
  misc_feature (197)..(355): Homolog of NCBI NO: 15227589 NR Description: putative Na+-dependent inorganic phosphate
  misc_feature (197)..(340): Homolog of NCBI NO: 30678625 NR Description: expressed protein [Arabidopsis thaliana]
  misc_feature (355)..(400): Homolog of NCBI NO: 34903342 NR Description: unnamed protein product [Oryza sativa (japonica
  misc_feature (397)..(483): Homolog of NCBI NO: 34903342 NR Description: unnamed protein product [Oryza sativa (japonica
  misc_feature (107)..(200): Homolog of NCBI NO: 34903342 NR Description: unnamed protein product [Oryza sativa (japonica
  misc_feature (197)..(340): Homolog of NCBI NO: 34903342 NR Description: unnamed protein product [Oryza sativa (japonica
  misc_feature (355)..(401): Homolog of NCBI NO: 30678625 NR Description: expressed protein [Arabidopsis thaliana]
  misc_feature (397)..(483): Homolog of NCBI NO: 30678625 NR Description: expressed protein [Arabidopsis thaliana]
  misc_feature (1)..(268): Homolog of NCBI NO: 30678625 NR Description: expressed protein [Arabidopsis thaliana]
  misc_feature (71)..(483): Homolog of NCBI NO: 7485271 NR Description: hypothetical protein A_IG005I10.nn - Arabidopsis
MALGGLISNRNFGSFIGSGNGCQRLGKSGAEVSKLFPNALLCRNHQPLQASLHHESGHMRRSFGCFLQPRMDSVIRFRNSIKINRSRAYYKSEESDITEGVVPSADGSAEAILVEGNLQNASPWWQQFPRRWVIVLLCFSSFLLCNMDRVNMSIAILPMSQEYNWSSATVGLIQSSFFWGYLLTQILGGIWADKFGGKGVAMPAMNNMLSKWIPVSERSRSLALVYSGMYLGSVTGLAFSPMLITKFGWPSVFYSFGSLGSIWFLLWLKFAYSSPKDDPDLSEEEKKVILGGSKPREPVTVIPWKLILSKPPVWALIISHFCHNWGTFILLTWMPTYYNQARSSASVISLLFNIFCEQVLKFNLTESGLLCVLPWLTMAVFANIGGWIADTLVSRGLSITNGSDAFSQSGLYSNHQDIGPRYAGVLLGLSNTAGVLAGVFGTAATGYILQRGSWDDVFKVAVALYLIGTLVWNLFATGEKILD

SEQ ID NO: 46013 - protein, 425 aa, Arabidopsis thaliana
  peptide (1)..(425): Ceres Seq. ID no. 12560775
  misc_feature (76)..(142): Pfam Name: Sugar (and other) transporter Pfam Description: Sugar (and other) transporter
  misc_feature (139)..(297): Homolog of NCBI NO: 15227589 NR Description: putative Na+-dependent inorganic phosphate
  misc_feature (139)..(282): Homolog of NCBI NO: 30678625 NR Description: expressed protein [Arabidopsis thaliana]
  misc_feature (297)..(342): Homolog of NCBI NO: 34903342 NR Description: unnamed protein product [Oryza sativa (japonica
  misc_feature (339)..(425): Homolog of NCBI NO: 34903342 NR Description: unnamed protein product [Oryza sativa (japonica
  misc_feature (49)..(142): Homolog of NCBI NO: 34903342 NR Description: unnamed protein product [Oryza sativa (japonica
  misc_feature (139)..(282): Homolog of NCBI NO: 34903342 NR Description: unnamed protein product [Oryza sativa (japonica
  misc_feature (297)..(343): Homolog of NCBI NO: 30678625 NR Description: expressed protein [Arabidopsis thaliana]
  misc_feature (339)..(425): Homolog of NCBI NO: 30678625 NR Description: expressed protein [Arabidopsis thaliana]
  misc_feature (1)..(210): Homolog of NCBI NO: 30678625 NR Description: expressed protein [Arabidopsis thaliana]
  misc_feature (13)..(425): Homolog of NCBI NO: 7485271 NR Description: hypothetical protein A_IG005I10.nn - Arabidopsis
MRRSFGCFLQPRMDSVIRFRNSIKINRSRAYYKSEESDITEGVVPSADGSAEAILVEGNLQNASPWWQQFPRRWVIVLLCFSSFLLCNMDRVNMSIAILPMSQEYNWSSATVGLIQSSFFWGYLLTQILGGIWADKFGGKGVAMPAMNNMLSKWIPVSERSRSLALVYSGMYLGSVTGLAFSPMLITKFGWPSVFYSFGSLGSIWFLLWLKFAYSSPKDDPDLSEEEKKVILGGSKPREPVTVIPWKLILSKPPVWALIISHFCHNWGTFILLTWMPTYYNQARSSASVISLLFNIFCEQVLKFNLTESGLLCVLPWLTMAVFANIGGWIADTLVSRGLSITNGSDAFSQSGLYSNHQDIGPRYAGVLLGLSNTAGVLAGVFGTAATGYILQRGSWDDVFKVAVALYLIGTLVWNLFATGEKILD

SEQ ID NO: 46014 - protein, 413 aa, Arabidopsis thaliana
  peptide (1)..(413): Ceres Seq. ID no. 12560776
  misc_feature (64)..(130): Pfam Name: Sugar (and other) transporter Pfam Description: Sugar (and other) transporter
  misc_feature (127)..(285): Homolog of NCBI NO: 15227589 NR Description: putative Na+-dependent inorganic phosphate
  misc_feature (127)..(270): Homolog of NCBI NO: 30678625 NR Description: expressed protein [Arabidopsis thaliana]
  misc_feature (285)..(330): Homolog of NCBI NO: 34903342 NR Description: unnamed protein product [Oryza sativa (japonica
  misc_feature (327)..(413): Homolog of NCBI NO: 34903342 NR Description: unnamed protein product [Oryza sativa (japonica
  misc_feature (37)..(130): Homolog of NCBI NO: 34903342 NR Description: unnamed protein product [Oryza sativa (japonica
  misc_feature (127)..(270): Homolog of NCBI NO: 34903342 NR Description: unnamed protein product [Oryza sativa (japonica
  misc_feature (285)..(331): Homolog of NCBI NO: 30678625 NR Description: expressed protein [Arabidopsis thaliana]
  misc_feature (327)..(413): Homolog of NCBI NO: 30678625 NR Description: expressed protein [Arabidopsis thaliana]
  misc_feature (1)..(198): Homolog of NCBI NO: 30678625 NR Description: expressed protein [Arabidopsis thaliana]
  misc_feature (1)..(413): Homolog of NCBI NO: 7485271 NR Description: hypothetical protein A_IG005I10.nn - Arabidopsis
MDSVIRFRNSIKINRSRAYYKSEESDITEGVVPSADGSAEAILVEGNLQNASPWWQQFPRRWVIVLLCFSSFLLCNMDRVNMSIAILPMSQEYNWSSATVGLIQSSFFWGYLLTQILGGIWADKFGGKGVAMPAMNNMLSKWIPVSERSRSLALVYSGMYLGSVTGLAFSPMLITKFGWPSVFYSFGSLGSIWFLLWLKFAYSSPKDDPDLSEEEKKVILGGSKPREPVTVIPWKLILSKPPVWALIISHFCHNWGTFILLTWMPTYYNQARSSASVISLLFNIFCEQVLKFNLTESGLLCVLPWLTMAVFANIGGWIADTLVSRGLSITNGSDAFSQSGLYSNHQDIGPRYAGVLLGLSNTAGVLAGVFGTAATGYILQRGSWDDVFKVAVALYLIGTLVWNLFATGEKILD

SEQ ID NO: 46015 - DNA, 1485 bp, Arabidopsis thaliana
  misc_feature (1)..(1485): Ceres Seq. ID no. 12560747
  misc_feature: MA Experiment ID: 20000182 Result: Up-regulated in Transcription
  misc_feature: MA Experiment 20000182 PARAMETER Experiment Name: At_2mM_SA_P Parameter: Age (day) Value: 14
  misc_feature: MA Experiment 20000182 PARAMETER Experiment Name: At_2mM_SA_P Parameter: Organism Value: A. thaliana
  misc_feature: MA Experiment 20000182 PARAMETER Experiment Name: At_2mM_SA_P Parameter: Plant Line Value: WS
  misc_feature: MA Experiment 20000182 PARAMETER Experiment Name: At_2mM_SA_P Parameter: Timepoint (hr) Value: 6
  misc_feature: MA Experiment 20000182 PARAMETER Experiment Name: At_2mM_SA_P Parameter: Tissue Value: Aerial
  misc_feature: MA Experiment 20000182 PARAMETER Experiment Name: At_2mM_SA_P Parameter: Treatment Value: 2mM SA vs. No Treatment
  misc_feature: MA Experiment ID: 20000185 Result: Down-regulated in Transcription
  misc_feature: MA Experiment 20000185 PARAMETER Experiment Name: At_Roots__P Parameter: Age (day) Value: 7 vs. 21
  misc_feature: MA Experiment 20000185 PARAMETER Experiment Name: At_Roots__P Parameter: Organism Value: A. thaliana
  misc_feature: MA Experiment 20000185 PARAMETER Experiment Name: At_Roots__P Parameter: Tissue Value: Roots vs. Whole Plant
  misc_feature: MA Experiment ID: 20000436 Result: Down-regulated in Transcription
  misc_feature: MA Experiment 20000436 PARAMETER Experiment Name: At_Drought_P Parameter: Age (day) Value: 7
  misc_feature: MA Experiment 20000436 PARAMETER Experiment Name: At_Drought_P Parameter: Organism Value: A. thaliana
  misc_feature: MA Experiment 20000436 PARAMETER Experiment Name: At_Drought_P Parameter: Plant Line Value: WS
  misc_feature: MA Experiment 20000436 PARAMETER Experiment Name: At_Drought_P Parameter: Timepoint (hr) Value: 12
  misc_feature: MA Experiment 20000436 PARAMETER Experiment Name: At_Drought_P Parameter: Tissue Value: Whole Plant
  misc_feature: MA Experiment 20000436 PARAMETER Experiment Name: At_Drought_P Parameter: Treatment Value: Drought vs. No Drought
  misc_feature: MA Experiment ID: 20000437 Result: Down-regulated in Transcription
  misc_feature: MA Experiment 20000437 PARAMETER Experiment Name: At_Drought_P Parameter: Age (day) Value: 8
  misc_feature: MA Experiment 20000437 PARAMETER Experiment Name: At_Drought_P Parameter: Organism Value: A. thaliana
  misc_feature: MA Experiment 20000437 PARAMETER Experiment Name: At_Drought_P Parameter: Plant Line Value: WS
  misc_feature: MA Experiment 20000437 PARAMETER Experiment Name: At_Drought_P Parameter: Timepoint (hr) Value: 24
  misc_feature: MA Experiment 20000437 PARAMETER Experiment Name: At_Drought_P Parameter: Tissue Value: Whole Plant
  misc_feature: MA Experiment 20000437 PARAMETER Experiment Name: At_Drought_P Parameter: Treatment Value: Drought vs. No Drought
  misc_feature: MA Experiment ID: 20000439 Result: Down-regulated in Transcription
  misc_feature: MA Experiment 20000439 PARAMETER Experiment Name: At_Roots__P Parameter: Age (day) Value: 14 vs. 21
  misc_feature: MA Experiment 20000439 PARAMETER Experiment Name: At_Roots__P Parameter: Organism Value: A. thaliana
  misc_feature: MA Experiment 20000439 PARAMETER Experiment Name: At_Roots__P Parameter: Tissue Value: Roots vs. Whole Plant
  misc_feature: MA Experiment ID: 20000460 Result: Down-regulated in Transcription
  misc_feature: MA Experiment 20000460 PARAMETER Experiment Name: At_10percent_PEG_P Parameter: Age (day) Value: 12
  misc_feature: MA Experiment 20000460 PARAMETER Experiment Name: At_10percent_PEG_P Parameter: Organism Value: A. thaliana
  misc_feature: MA Experiment 20000460 PARAMETER Experiment Name: At_10percent_PEG_P Parameter: Plant Line Value: WS
  misc_feature: MA Experiment 20000460 PARAMETER Experiment Name: At_10percent_PEG_P Parameter: Timepoint (day) Value: 12
  misc_feature: MA Experiment 20000460 PARAMETER Experiment Name: At_10percent_PEG_P Parameter: Tissue Value: Whole Plant
  misc_feature: MA Experiment 20000460 PARAMETER Experiment Name: At_10percent_PEG_P Parameter: Treatment Value: 10percent PEG vs. No Treatment
  misc_feature: MA Experiment ID: 20000527 Result: Down-regulated in Transcription
  misc_feature: MA Experiment 20000527 PARAMETER Experiment Name: At_10percent_PEG_P Parameter: Age (day) Value: 20
  misc_feature: MA Experiment 20000527 PARAMETER Experiment Name: At_10percent_PEG_P Parameter: Organism Value: A. thaliana
  misc_feature: MA Experiment 20000527 PARAMETER Experiment Name: At_10percent_PEG_P Parameter: Plant Line Value: WS
  misc_feature: MA Experiment 20000527 PARAMETER Experiment Name: At_10percent_PEG_P Parameter: Timepoint (day) Value: 20
  misc_feature: MA Experiment 20000527 PARAMETER Experiment Name: At_10percent_PEG_P Parameter: Tissue Value: Whole Plant
  misc_feature: MA Experiment 20000527 PARAMETER Experiment Name: At_10percent_PEG_P Parameter: Treatment Value: 10percent PEG vs. No Treatment
  misc_feature: MA Experiment ID: 20000794 Result: Down-regulated in Transcription
  misc_feature: MA Experiment 20000794 PARAMETER Experiment Name: At_Petals_P Parameter: Age (day) Value: 23-25 days
  misc_feature: MA Experiment 20000794 PARAMETER Experiment Name: At_Petals_P Parameter: Plant Line Value: WS
  misc_feature: MA Experiment 20000794 PARAMETER Experiment Name: At_Petals_P Parameter: Tissue Value: Petals vs. Whole plant
  misc_feature: MA Experiment ID: 20001450 Result: Down-regulated in Transcription
  misc_feature: MA Experiment 20001450 PARAMETER Experiment Name: At_Far-red-induction_P Parameter: Age (day) Value: 7
  misc_feature: MA Experiment 20001450 PARAMETER Experiment Name: At_Far-red-induction_P Parameter: Light Value: Far-red vs. White
  misc_feature: MA Experiment 20001450 PARAMETER Experiment Name: At_Far-red-induction_P Parameter: Organism Value: A. thaliana
  misc_feature: MA Experiment 20001450 PARAMETER Experiment Name: At_Far-red-induction_P Parameter: Plant Line Value: Columbia
  misc_feature: MA Experiment 20001450 PARAMETER Experiment Name: At_Far-red-induction_P Parameter: Timepoint (hr) Value: 8
  misc_feature: MA Experiment 20001450 PARAMETER Experiment Name: At_Far-red-induction_P Parameter: Tissue Value: Whole Plant
  misc_feature: MA Experiment ID: 20001451 Result: Down-regulated in Transcription
  misc_feature: MA Experiment 20001451 PARAMETER Experiment Name: At_Far-red-induction_P Parameter: Age (day) Value: 7
  misc_feature: MA Experiment 20001451 PARAMETER Experiment Name: At_Far-red-induction_P Parameter: Light Value: Far-red vs. White
  misc_feature: MA Experiment 20001451 PARAMETER Experiment Name: At_Far-red-induction_P Parameter: Organism Value: A. thaliana
  misc_feature: MA Experiment 20001451 PARAMETER Experiment Name: At_Far-red-induction_P Parameter: Plant Line Value: Columbia
  misc_feature: MA Experiment 20001451 PARAMETER Experiment Name: At_Far-red-induction_P Parameter: Timepoint (hr) Value: 24
  misc_feature: MA Experiment 20001451 PARAMETER Experiment Name: At_Far-red-induction_P Parameter: Tissue Value: Whole Plant
  misc_feature: MA Experiment ID: 20001554 Result: Down-regulated in Transcription
  misc_feature: MA Experiment 20001554 PARAMETER Experiment Name: At_Drought_Soil_Dry_P Parameter: Age (day) Value: 21
  misc_feature: MA Experiment 20001554 PARAMETER Experiment Name: At_Drought_Soil_Dry_P Parameter: Organism Value: A. thaliana
  misc_feature: MA Experiment 20001554 PARAMETER Experiment Name: At_Drought_Soil_Dry_P Parameter: Plant Line Value: WS
  misc_feature: MA Experiment 20001554 PARAMETER Experiment Name: At_Drought_Soil_Dry_P Parameter: Post Timepoint (hr) Value: None
  misc_feature: MA Experiment 20001554 PARAMETER Experiment Name: At_Drought_Soil_Dry_P Parameter: Post-Treatment Value: None
  misc_feature: MA Experiment 20001554 PARAMETER Experiment Name: At_Drought_Soil_Dry_P Parameter: Timepoint (day) Value: 7
  misc_feature: MA Experiment 20001554 PARAMETER Experiment Name: At_Drought_Soil_Dry_P Parameter: Treatment Value: Drought vs. No Drought
  misc_feature: MA Experiment ID: 20001555 Result: Down-regulated in Transcription
  misc_feature: MA Experiment 20001555 PARAMETER Experiment Name: At_Drought_Soil_Dry_P Parameter: Age (day) Value: 24
  misc_feature: MA Experiment 20001555 PARAMETER Experiment Name: At_Drought_Soil_Dry_P Parameter: Organism Value: A. thaliana
  misc_feature: MA Experiment 20001555 PARAMETER Experiment Name: At_Drought_Soil_Dry_P Parameter: Plant Line Value: WS
  misc_feature: MA Experiment 20001555 PARAMETER Experiment Name: At_Drought_Soil_Dry_P Parameter: Post Timepoint (hr) Value: None
  misc_feature: MA Experiment 20001555 PARAMETER Experiment Name: At_Drought_Soil_Dry_P Parameter: Post-Treatment Value: None
  misc_feature: MA Experiment 20001555 PARAMETER Experiment Name: At_Drought_Soil_Dry_P Parameter: Timepoint (day) Value: 10
  misc_feature: MA Experiment 20001555 PARAMETER Experiment Name: At_Drought_Soil_Dry_P Parameter: Treatment Value: Drought vs. No Drought
  misc_feature: MA Experiment ID: 20001556 Result: Down-regulated in Transcription
  misc_feature: MA Experiment 20001556 PARAMETER Experiment Name: At_Drought_Soil_Dry_P Parameter: Age (day) Value: 26
  misc_feature: MA Experiment 20001556 PARAMETER Experiment Name: At_Drought_Soil_Dry_P Parameter: Organism Value: A. thaliana
  misc_feature: MA Experiment 20001556 PARAMETER Experiment Name: At_Drought_Soil_Dry_P Parameter: Plant Line Value: WS
  misc_feature: MA Experiment 20001556 PARAMETER Experiment Name: At_Drought_Soil_Dry_P Parameter: Post Timepoint (hr) Value: None
  misc_feature: MA Experiment 20001556 PARAMETER Experiment Name: At_Drought_Soil_Dry_P Parameter: Post-Treatment Value: None
  misc_feature: MA Experiment 20001556 PARAMETER Experiment Name: At_Drought_Soil_Dry_P Parameter: Timepoint (day) Value: 12
  misc_feature: MA Experiment 20001556 PARAMETER Experiment Name: At_Drought_Soil_Dry_P Parameter: Treatment Value: Drought vs. No Drought
  misc_feature: MA Experiment ID: 20001557 Result: Down-regulated in Transcription
  misc_feature: MA Experiment 20001557 PARAMETER Experiment Name: At_Drought_Soil_Dry_P Parameter: Age (day) Value: 27
  misc_feature: MA Experiment 20001557 PARAMETER Experiment Name: At_Drought_Soil_Dry_P Parameter: Organism Value: A. thaliana
  misc_feature: MA Experiment 20001557 PARAMETER Experiment Name: At_Drought_Soil_Dry_P Parameter: Plant Line Value: WS
  misc_feature: MA Experiment 20001557 PARAMETER Experiment Name: At_Drought_Soil_Dry_P Parameter: Post Timepoint (hr) Value: 3
  misc_feature: MA Experiment 20001557 PARAMETER Experiment Name: At_Drought_Soil_Dry_P Parameter: Post-Treatment Value: Re-Water vs. No Drought
  misc_feature: MA Experiment 20001557 PARAMETER Experiment Name: At_Drought_Soil_Dry_P Parameter: Timepoint (day) Value: 13
  misc_feature: MA Experiment 20001557 PARAMETER Experiment Name: At_Drought_Soil_Dry_P Parameter: Treatment Value: Drought vs. No Drought
  misc_feature: MA Experiment ID: 20001559 Result: Down-regulated in Transcription
  misc_feature: MA Experiment 20001559 PARAMETER Experiment Name: At_Drought_Soil_Dry_P Parameter: Age (day) Value: 28
  misc_feature: MA Experiment 20001559 PARAMETER Experiment Name: At_Drought_Soil_Dry_P Parameter: Organism Value: A. thaliana
  misc_feature: MA Experiment 20001559 PARAMETER Experiment Name: At_Drought_Soil_Dry_P Parameter: Plant Line Value: WS
  misc_feature: MA Experiment 20001559 PARAMETER Experiment Name: At_Drought_Soil_Dry_P Parameter: Post Timepoint (hr) Value: 29
  misc_feature: MA Experiment 20001559 PARAMETER Experiment Name: At_Drought_Soil_Dry_P Parameter: Post-Treatment Value: Re-Water vs. No Drought
  misc_feature: MA Experiment 20001559 PARAMETER Experiment Name: At_Drought_Soil_Dry_P Parameter: Timepoint (day) Value: 14
  misc_feature: MA Experiment 20001559 PARAMETER Experiment Name: At_Drought_Soil_Dry_P Parameter: Treatment Value: Drought vs. No Drought
  misc_feature: MA Experiment ID: 20001560 Result: Down-regulated in Transcription
  misc_feature: MA Experiment 20001560 PARAMETER Experiment Name: At_Drought_Soil_Dry_P Parameter: Age (day) Value: 28
  misc_feature: MA Experiment 20001560 PARAMETER Experiment Name: At_Drought_Soil_Dry_P Parameter: Organism Value: A. thaliana
  misc_feature: MA Experiment 20001560 PARAMETER Experiment Name: At_Drought_Soil_Dry_P Parameter: Plant Line Value: WS
  misc_feature: MA Experiment 20001560 PARAMETER Experiment Name: At_Drought_Soil_Dry_P Parameter: Post Timepoint (hr) Value: None
  misc_feature: MA Experiment 20001560 PARAMETER Experiment Name: At_Drought_Soil_Dry_P Parameter: Post-Treatment Value: None
  misc_feature: MA Experiment 20001560 PARAMETER Experiment Name: At_Drought_Soil_Dry_P Parameter: Timepoint (day) Value: 14
  misc_feature: MA Experiment 20001560 PARAMETER Experiment Name: At_Drought_Soil_Dry_P Parameter: Treatment Value: Drought vs. No Drought
  misc_feature: MA Experiment ID: 20001757 Result: Up-regulated in Transcription
  misc_feature: MA Experiment 20001757 PARAMETER Experiment Name: At_50mM_NH4NO3_L-to-H_P Parameter: Timepoint (hr) Value: 6
  misc_feature: MA Experiment 20001757 PARAMETER Experiment Name: At_50mM_NH4NO3_L-to-H_P Parameter: Tissue Value: Leaf
  misc_feature: MA Experiment 20001757 PARAMETER Experiment Name: At_50mM_NH4NO3_L-to-H_P Parameter: Treatment Value: 50mM NH4NO3 vs 100mM Mannitol
  misc_feature: MA Experiment ID: 20001904 Result: Down-regulated in Transcription
  misc_feature: MA Experiment 20001904 PARAMETER Experiment Name: At_Drought_Reproduction_P Parameter: Age (day) Value: 37
  misc_feature: MA Experiment 20001904 PARAMETER Experiment Name: At_Drought_Reproduction_P Parameter: Organism Value: A. thaliana
  misc_feature: MA Experiment 20001904 PARAMETER Experiment Name: At_Drought_Reproduction_P Parameter: Plant Line Value: WS
  misc_feature: MA Experiment 20001904 PARAMETER Experiment Name: At_Drought_Reproduction_P Parameter: Timepoint (day) Value: 7
  misc_feature: MA Experiment 20001904 PARAMETER Experiment Name: At_Drought_Reproduction_P Parameter: Tissue Value: Rosettes
  misc_feature: MA Experiment 20001904 PARAMETER Experiment Name: At_Drought_Reproduction_P Parameter: Treatment Value: Drought vs. No Drought
  misc_feature: MA Experiment ID: 20001905 Result: Down-regulated in Transcription
  misc_feature: MA Experiment 20001905 PARAMETER Experiment Name: At_Drought_Reproduction_P Parameter: Age (day) Value: 40
  misc_feature: MA Experiment 20001905 PARAMETER Experiment Name: At_Drought_Reproduction_P Parameter: Organism Value: A. thaliana
  misc_feature: MA Experiment 20001905 PARAMETER Experiment Name: At_Drought_Reproduction_P Parameter: Plant Line Value: WS
  misc_feature: MA Experiment 20001905 PARAMETER Experiment Name: At_Drought_Reproduction_P Parameter: Timepoint (day) Value: 10
  misc_feature: MA Experiment 20001905 PARAMETER Experiment Name: At_Drought_Reproduction_P Parameter: Tissue Value: Rosettes
  misc_feature: MA Experiment 20001905 PARAMETER Experiment Name: At_Drought_Reproduction_P Parameter: Treatment Value: Drought vs. No Drought
  misc_feature: MA Experiment ID: 20001907 Result: Down-regulated in Transcription
  misc_feature: MA Experiment 20001907 PARAMETER Experiment Name: At_Drought_Reproduction_P Parameter: Age (day) Value: 37
  misc_feature: MA Experiment 20001907 PARAMETER Experiment Name: At_Drought_Reproduction_P Parameter: Organism Value: A. thaliana
  misc_feature: MA Experiment 20001907 PARAMETER Experiment Name: At_Drought_Reproduction_P Parameter: Plant Line Value: WS
  misc_feature: MA Experiment 20001907 PARAMETER Experiment Name: At_Drought_Reproduction_P Parameter: Timepoint (day) Value: 7
  misc_feature: MA Experiment 20001907 PARAMETER Experiment Name: At_Drought_Reproduction_P Parameter: Tissue Value: Siliques
  misc_feature: MA Experiment 20001907 PARAMETER Experiment Name: At_Drought_Reproduction_P Parameter: Treatment Value: Drought vs. No Drought
  misc_feature: MA Experiment ID: 20001909 Result: Down-regulated in Transcription
  misc_feature: MA Experiment 20001909 PARAMETER Experiment Name: At_Drought_Reproduction_P Parameter: Age (day) Value: 35
  misc_feature: MA Experiment 20001909 PARAMETER Experiment Name: At_Drought_Reproduction_P Parameter: Organism Value: A. thaliana
  misc_feature: MA Experiment 20001909 PARAMETER Experiment Name: At_Drought_Reproduction_P Parameter: Plant Line Value: WS
  misc_feature: MA Experiment 20001909 PARAMETER Experiment Name: At_Drought_Reproduction_P Parameter: Timepoint (day) Value: 5
  misc_feature: MA Experiment 20001909 PARAMETER Experiment Name: At_Drought_Reproduction_P Parameter: Tissue Value: Flowers
  misc_feature: MA Experiment 20001909 PARAMETER Experiment Name: At_Drought_Reproduction_P Parameter: Treatment Value: Drought vs. No Drought
  misc_feature: MA Experiment ID: 20001910 Result: Down-regulated in Transcription
  misc_feature: MA Experiment 20001910 PARAMETER Experiment Name: At_Drought_Reproduction_P Parameter: Age (day) Value: 37
  misc_feature: MA Experiment 20001910 PARAMETER Experiment Name: At_Drought_Reproduction_P Parameter: Organism Value: A. thaliana
  misc_feature: MA Experiment 20001910 PARAMETER Experiment Name: At_Drought_Reproduction_P Parameter: Plant Line Value: WS
  misc_feature: MA Experiment 20001910 PARAMETER Experiment Name: At_Drought_Reproduction_P Parameter: Timepoint (day) Value: 7
  misc_feature: MA Experiment 20001910 PARAMETER Experiment Name: At_Drought_Reproduction_P Parameter: Tissue Value: Flowers
  misc_feature: MA Experiment 20001910 PARAMETER Experiment Name: At_Drought_Reproduction_P Parameter: Treatment Value: Drought vs. No Drought
  misc_feature: MA Experiment ID: 20001911 Result: Down-regulated in Transcription
  misc_feature: MA Experiment 20001911 PARAMETER Experiment Name: At_Drought_Reproduction_P Parameter: Age (day) Value: 40
  misc_feature: MA Experiment 20001911 PARAMETER Experiment Name: At_Drought_Reproduction_P Parameter: Organism Value: A. thaliana
  misc_feature: MA Experiment 20001911 PARAMETER Experiment Name: At_Drought_Reproduction_P Parameter: Plant Line Value: WS
  misc_feature: MA Experiment 20001911 PARAMETER Experiment Name: At_Drought_Reproduction_P Parameter: Timepoint (day) Value: 10
  misc_feature: MA Experiment 20001911 PARAMETER Experiment Name: At_Drought_Reproduction_P Parameter: Tissue Value: Flowers
  misc_feature: MA Experiment 20001911 PARAMETER Experiment Name: At_Drought_Reproduction_P Parameter: Treatment Value: Drought vs. No Drought
atggcttcaattctctcaattcttcttctcattctttcactttcaaatctccacttcacttcaaccaccggaaacaaccacattaacgacagaaaatccttagaaatcattatcggtggtggtaacgacaacaatcctccaccgtcaccttcaccggaaccagaaccagaacctgcagattgccctcctccccctcctcctcctccatgccctcctccaccttctccccctccatgccctcctccaccctctcctcctccaagccctcctcctccacagcttccacctcctccacagcttccgccgcctgcaccgcctaaaccccagccatcgccgccaacacctgatctaccgtttgcgagctcattattaaagaaagtctatccagttctccaaagatttaaggatctagtcgcagatgataaacttaagtcttgggaaggccccgacatttgcaacaaatacctcggactcaaatgcgccattttcccgaaaacaaagcatctcgcactcgcgagcgtccagtttaatgggttaaacttgagaggcaagataggcaagatcctcaagttagataacttcctcgacaagttagaagaagtcaccatcttccacgcaaactccaacggtttcacaggctctgtgcctgatttcagcaatttgaaattcttatacgagctcgatctaagcaacaacaaactcacaggagatttcccaactagtgtcttgaaaggaaacaatctcacgtttcttgatctcaggttcaattctttctcaggctctgttcctcctcaggtctttaatctcgacctcgacgtcttgttcatcaacaacaacaatcttgttcagaagcttccactcaatcttggatccatcactgctctttacctcaccttcgccaacaacaggttcacgggtccaattcccgaaagcataggcaacatcaagtacctacaagaagtccttttcctgaataacaagttaaccggatgcttaccgtaccaaatcggaaacctaacccgagccactgttttcgatgttgggttcaaccaattaaccggtccaataccgtactctttcggttgcttagaaacgatggaacaactcaatttagccggaaacaagttctatggaaccataccggagattgtatgcgagattgcttgtctccaaaacgtttctctctcgaataattacttcactcaggttggtccgaaatgtagaaaactcatcaagagaaaaattatggacgttagtatgaattgtatacttgatcttccaaaccagaaaacgccatcggagtgtgctaagttcttcatgcggaaacagacttgtcctaattccaagtctttgtttactgtcccttgtgataagaatccaaaccggggtaaaccggatcaagaacgattggaggaggaaaaagctcaagtttctcatccggtaacttacaacacacttaacccggaccggcttcggaatctataa

SEQ ID NO: 46016 - protein, 494 aa, Arabidopsis thaliana
  peptide (1)..(494): Ceres Seq. ID no. 12560748
  misc_feature (45)..(130): Pfam Name: T-cell surface antigen CD2 protein Pfam Description: T-cell surface antigen CD2 protein
  misc_feature (119)..(449): Homolog of NCBI NO: 15226640 NR Description: unknown protein; protein id: At2g15880.1
  misc_feature (115)..(441): Homolog of NCBI NO: 15235668 NR Description: extensin-like protein; protein id: At4g13340.1
  misc_feature (115)..(445): Homolog of NCBI NO: 15220780 NR Description: hypothetical protein; protein id: At1g62440.1
  misc_feature (115)..(445): Homolog of NCBI NO: 7484956 NR Description: extensin homolog F24O1.18 - Arabidopsis thaliana
  misc_feature (44)..(72): Homolog of NCBI NO: 37718858 NR Description: putative leucine-rich receptor-like protein
  misc_feature (78)..(441): Homolog of NCBI NO: 37718858 NR Description: putative leucine-rich receptor-like protein
  misc_feature (119)..(488): Homolog of NCBI NO: 32490271 NR Description: OSJNBb0116K07.13 [Oryza sativa (japonica
  misc_feature (117)..(447): Homolog of NCBI NO: 30680322 NR Description: extensin-related protein [Arabidopsis thaliana]
  misc_feature (8)..(494): Homolog of NCBI NO: 15230349 NR Description: unknown protein; protein id: At3g19320.1
  misc_feature (1)..(494): Homolog of NCBI NO: 15222811 NR Description: unknown protein; protein id: At1g49750.1
MASILSILLLILSLSNLHFTSTTGNNHINDRKSLEIIIGGGNDNNPPPSPSPEPEPEPADCPPPPPPPPCPPPPSPPPCPPPPSPPPSPPPPQLPPPPQLPPPAPPKPQPSPPTPDLPFASSLLKKVYPVLQRFKDLVADDKLKSWEGPDICNKYLGLKCAIFPKTKHLALASVQFNGLNLRGKIGKILKLDNFLDKLEEVTIFHANSNGFTGSVPDFSNLKFLYELDLSNNKLTGDFPTSVLKGNNLTFLDLRFNSFSGSVPPQVFNLDLDVLFINNNNLVQKLPLNLGSITALYLTFANNRFTGPIPESIGNIKYLQEVLFLNNKLTGCLPYQIGNLTRATVFDVGFNQLTGPIPYSFGCLETMEQLNLAGNKFYGTIPEIVCEIACLQNVSLSNNYFTQVGPKCRKLIKRKIMDVSMNCILDLPNQKTPSECAKFFMRKQTCPNSKSLFTVPCDKNPNRGKPDQERLEEEKAQVSHPVTYNTLNPDRLRNL

SEQ ID NO: 46017 - DNA, 1438 bp, Arabidopsis thaliana
  misc_feature (1)..(1438): Ceres Seq. ID no. 15168593
  misc_feature: MA Experiment ID: 20000355 Result: Down-regulated in Transcription
  misc_feature: MA Experiment 20000355 PARAMETER Experiment Name: At_Siliques_Sub_P Parameter: Age (day) Value: 21
  misc_feature: MA Experiment 20000355 PARAMETER Experiment Name: At_Siliques_Sub_P Parameter: Organism Value: A. thaliana
  misc_feature: MA Experiment 20000355 PARAMETER Experiment Name: At_Siliques_Sub_P Parameter: Plant Line Value: WS
  misc_feature: MA Experiment 20000355 PARAMETER Experiment Name: At_Siliques_Sub_P Parameter: Tissue Value: Less Than 5mm Siliques vs. Whole Plant
  misc_feature: MA Experiment ID: 20000440 Result: Down-regulated in Transcription
  misc_feature: MA Experiment 20000440 PARAMETER Experiment Name: At_Closed-Flower__Sub_P Parameter: Tissue Value: Closed Flower vs. Whole Plant
gaagaaaagtctgcgtttcttcaccaaccctacacgaaccaagatagatagaaaccttctccttcttctgcttcttttatcatcggagaattcgaatcttcttttcctctttttgagattctctaattatccttttggaagagtttcgtgtgagagagaagcgtaatgggctgctttggttgttgtggtggtggtgaggatttccgtagagtttctgaaactggaccaaagccagtgcataacactggaggttacaatggaggtcaccatcaaagggcagatccacccaaaaaccttccagtcattcagatgcagcctatctctgttgcggccattccagctgatgaattgagggatataacggataactatggttcaaagtccttgattggtgagggttcatatggaagagtcttttatggtattcttaaaagtggtaaagcagctgccattaagaaactggattctagtaagcaaccagatcaagaatttctcgcccaggtatcaatggtttcgagattgcgacaagaaaatgttgttgcgcttctgggctattgtgttgatggcccactccgtgttcttgcttatgaatatgctcctaatggatctcttcatgatattcttcatggtcgaaaaggtgttaaaggggcacagccaggtcctgttctgtcgtggcaccagagagtcaaaattgctgttggtgcggctagaggactcgagtacttgcatgagaaggcaaaccctcatgttatccacagagacatcaaatccagcaatgtacttctgttcgatgatgatgttgccaagattgctgattttgatttgtccaaccaagcccctgacatggctgctcgccttcactcaacccgtgtgctcggaacctttggctatcacgctccagagtatgcaatgacggggacgttgagcacaaagagtgatgtctatagttttggcgttgttctgctggagctcctcacaggtcgtaaaccagttgatcataccttaccacgtggacagcagagtgtcgtgacatgggcaacccctaaattgagtgaagacaaggtgaagcagtgtgttgacgcaagactaaacggagaatatcctcccaaagctgttgctaagctggctgcggtagctgcactgtgtgtgcaatatgaggcagacttcaggcctaacatgagcatagtggtgaaggctcttcagccgttgctcaatcctcctcgctctgctccccagactccacacaggaacccgtattgatatgctccagtctgatatcaccctttatgatcatcactatttcatttgtttttgtttgaatccgatttgtgtaaatttgtgaaataggcgtttattctctcataaaccccctgccacttcactgaaaatcttacttggaaagacctgaatgttactgtatttctatattatttcatgc

SEQ ID NO: 46018 - protein, 364 aa, Arabidopsis thaliana
  peptide (1)..(364): Ceres Seq. ID no. 15168594
  misc_feature (1)..(343): Homolog of NCBI NO: 1586940 NR Description: Ser/Thr kinase
  misc_feature (318)..(356): Homolog of NCBI NO: 30690586 NR Description: serine/threonine protein kinase, putative
  misc_feature (1)..(320): Homolog of NCBI NO: 30690586 NR Description: serine/threonine protein kinase, putative
  misc_feature (1)..(364): Homolog of NCBI NO: 8778965 NR Description: Similar to Pto kinase interactor 1 from esculentum gb|U28007. It contains a Eukaryotic protein kinase
  misc_feature (1)..(356): Homolog of NCBI NO: 15226492 NR Description: serine/threonine protein kinase, putative
  misc_feature (1)..(356): Homolog of NCBI NO: 3668069 NR Description: Pto kinase interactor 1 [Lycopersicon esculentum]
  misc_feature (1)..(342): Homolog of NCBI NO: 25405922 NR Description: protein F21D18.6 [imported] - Arabidopsis
  misc_feature (1)..(364): Homolog of NCBI NO: 15451196 NR Description: similar to Pto kinase interactor 1 gb|AAC61805.1
  misc_feature (1)..(364): Homolog of NCBI NO: 15221111 NR Description: serine/threonine protein kinase, putative
  misc_feature (1)..(364): Homolog of NCBI NO: 22331138 NR Description: serine/threonine protein kinase, putative
MGCFGCCGGGEDFRRVSETGPKPVHNTGGYNGGHHQRADPPKNLPVIQMQPISVAAIPADELRDITDNYGSKSLIGEGSYGRVFYGILKSGKAAAIKKLDSSKQPDQEFLAQVSMVSRLRQENVVALLGYCVDGPLRVLAYEYAPNGSLHDILHGRKGVKGAQPGPVLSWHQRVKIAVGAARGLEYLHEKANPHVIHRDIKSSNVLLFDDDVAKIADFDLSNQAPDMAARLHSTRVLGTFGYHAPEYAMTGTLSTKSDVYSFGVVLLELLTGRKPVDHTLPRGQQSVVTWATPKLSEDKVKQCVDARLNGEYPPKAVAKLAAVAALCVQYEADFRPNMSIVVKALQPLLNPPRSAPQTPHRNPY

SEQ ID NO: 46019 - protein, 316 aa, Arabidopsis thaliana
  peptide (1)..(316): Ceres Seq. ID no. 15168595
  misc_feature (1)..(295): Homolog of NCBI NO: 1586940 NR Description: Ser/Thr kinase
  misc_feature (270)..(308): Homolog of NCBI NO: 30690586 NR Description: serine/threonine protein kinase, putative
  misc_feature (1)..(272): Homolog of NCBI NO: 30690586 NR Description: serine/threonine protein kinase, putative
  misc_feature (1)..(316): Homolog of NCBI NO: 8778965 NR Description: Similar to Pto kinase interactor 1 from esculentum gb|U28007. It contains a Eukaryotic protein kinase
  misc_feature (1)..(308): Homolog of NCBI NO: 15226492 NR Description: serine/threonine protein kinase, putative
  misc_feature (1)..(308): Homolog of NCBI NO: 3668069 NR Description: Pto kinase interactor 1 [Lycopersicon esculentum]
  misc_feature (1)..(294): Homolog of NCBI NO: 25405922 NR Description: protein F21D18.6 [imported] - Arabidopsis
  misc_feature (1)..(316): Homolog of NCBI NO: 15451196 NR Description: similar to Pto kinase interactor 1 gb|AAC61805.1
  misc_feature (1)..(316): Homolog of NCBI NO: 15221111 NR Description: serine/threonine protein kinase, putative
  misc_feature (1)..(316): Homolog of NCBI NO: 22331138 NR Description: serine/threonine protein kinase, putative
MQPISVAAIPADELRDITDNYGSKSLIGEGSYGRVFYGILKSGKAAAIKKLDSSKQPDQEFLAQVSMVSRLRQENVVALLGYCVDGPLRVLAYEYAPNGSLHDILHGRKGVKGAQPGPVLSWHQRVKIAVGAARGLEYLHEKANPHVIHRDIKSSNVLLFDDDVAKIADFDLSNQAPDMAARLHSTRVLGTFGYHAPEYAMTGTLSTKSDVYSFGVVLLELLTGRKPVDHTLPRGQQSVVTWATPKLSEDKVKQCVDARLNGEYPPKAVAKLAAVAALCVQYEADFRPNMSIVVKALQPLLNPPRSAPQTPHRNPY

SEQ ID NO: 46020 - protein, 250 aa, Arabidopsis thaliana
  peptide (1)..(250): Ceres Seq. ID no. 15168596
  misc_feature (1)..(229): Homolog of NCBI NO: 1586940 NR Description: Ser/Thr kinase
  misc_feature (204)..(242): Homolog of NCBI NO: 30690586 NR Description: serine/threonine protein kinase, putative
  misc_feature (1)..(206): Homolog of NCBI NO: 30690586 NR Description: serine/threonine protein kinase, putative
  misc_feature (1)..(250): Homolog of NCBI NO: 8778965 NR Description: Similar to Pto kinase interactor 1 from esculentum gb|U28007. It contains a Eukaryotic protein kinase
  misc_feature (1)..(242): Homolog of NCBI NO: 15226492 NR Description: serine/threonine protein kinase, putative
  misc_feature (1)..(242): Homolog of NCBI NO: 3668069 NR Description: Pto kinase interactor 1 [Lycopersicon esculentum]
  misc_feature (1)..(228): Homolog of NCBI NO: 25405922 NR Description: protein F21D18.6 [imported] - Arabidopsis
  misc_feature (1)..(250): Homolog of NCBI NO: 15451196 NR Description: similar to Pto kinase interactor 1 gb|AAC61805.1
  misc_feature (1)..(250): Homolog of NCBI NO: 15221111 NR Description: serine/threonine protein kinase, putative
  misc_feature (1)..(250): Homolog of NCBI NO: 22331138 NR Description: serine/threonine protein kinase, putative
MVSRLRQENVVALLGYCVDGPLRVLAYEYAPNGSLHDILHGRKGVKGAQPGPVLSWHQRVKIAVGAARGLEYLHEKANPHVIHRDIKSSNVLLFDDDVAKIADFDLSNQAPDMAARLHSTRVLGTFGYHAPEYAMTGTLSTKSDVYSFGVVLLELLTGRKPVDHTLPRGQQSVVTWATPKLSEDKVKQCVDARLNGEYPPKAVAKLAAVAALCVQYEADFRPNMSIVVKALQPLLNPPRSAPQTPHRNPY

SEQ ID NO: 46021 - DNA, 2378 bp, Arabidopsis thaliana
  misc_feature (1)..(2378): Ceres Seq. ID no. 12560715
  misc_feature: MA Experiment ID: 20000171 Result: Down-regulated in Transcription
  misc_feature: MA Experiment 20000171 PARAMETER Experiment Name: At_42deg_Heat_P Parameter: Age (day) Value: 14
  misc_feature: MA Experiment 20000171 PARAMETER Experiment Name: At_42deg_Heat_P Parameter: Organism Value: A. thaliana
  misc_feature: MA Experiment 20000171 PARAMETER Experiment Name: At_42deg_Heat_P Parameter: Plant Line Value: WS
  misc_feature: MA Experiment 20000171 PARAMETER Experiment Name: At_42deg_Heat_P Parameter: Temperature (deg C) Value: 42 vs. 22
  misc_feature: MA Experiment 20000171 PARAMETER Experiment Name: At_42deg_Heat_P Parameter: Timepoint (hr) Value: 1
  misc_feature: MA Experiment 20000171 PARAMETER Experiment Name: At_42deg_Heat_P Parameter: Tissue Value: Aerial
  misc_feature: MA Experiment ID: 20000185 Result: Up-regulated in Transcription
  misc_feature: MA Experiment 20000185 PARAMETER Experiment Name: At_Roots__P Parameter: Age (day) Value: 7 vs. 21
  misc_feature: MA Experiment 20000185 PARAMETER Experiment Name: At_Roots__P Parameter: Organism Value: A. thaliana
  misc_feature: MA Experiment 20000185 PARAMETER Experiment Name: At_Roots__P Parameter: Tissue Value: Roots vs. Whole Plant
  misc_feature: MA Experiment ID: 20001557 Result: Up-regulated in Transcription
  misc_feature: MA Experiment 20001557 PARAMETER Experiment Name: At_Drought_Soil_Dry_P Parameter: Age (day) Value: 27
  misc_feature: MA Experiment 20001557 PARAMETER Experiment Name: At_Drought_Soil_Dry_P Parameter: Organism Value: A. thaliana
  misc_feature: MA Experiment 20001557 PARAMETER Experiment Name: At_Drought_Soil_Dry_P Parameter: Plant Line Value: WS
  misc_feature: MA Experiment 20001557 PARAMETER Experiment Name: At_Drought_Soil_Dry_P Parameter: Post Timepoint (hr) Value: 3
  misc_feature: MA Experiment 20001557 PARAMETER Experiment Name: At_Drought_Soil_Dry_P Parameter: Post-Treatment Value: Re-Water vs. No Drought
  misc_feature: MA Experiment 20001557 PARAMETER Experiment Name: At_Drought_Soil_Dry_P Parameter: Timepoint (day) Value: 13
  misc_feature: MA Experiment 20001557 PARAMETER Experiment Name: At_Drought_Soil_Dry_P Parameter: Treatment Value: Drought vs. No Drought
  misc_feature: MA Experiment ID: 20001558 Result: Up-regulated in Transcription
  misc_feature: MA Experiment 20001558 PARAMETER Experiment Name: At_Drought_Soil_Dry_P Parameter: Age (day) Value: 27
  misc_feature: MA Experiment 20001558 PARAMETER Experiment Name: At_Drought_Soil_Dry_P Parameter: Organism Value: A. thaliana
  misc_feature: MA Experiment 20001558 PARAMETER Experiment Name: At_Drought_Soil_Dry_P Parameter: Plant Line Value: WS
  misc_feature: MA Experiment 20001558 PARAMETER Experiment Name: At_Drought_Soil_Dry_P Parameter: Post Timepoint (hr) Value: 6
  misc_feature: MA Experiment 20001558 PARAMETER Experiment Name: At_Drought_Soil_Dry_P Parameter: Post-Treatment Value: Re-Water vs. No Drought
  misc_feature: MA Experiment 20001558 PARAMETER Experiment Name: At_Drought_Soil_Dry_P Parameter: Timepoint (day) Value: 13
  misc_feature: MA Experiment 20001558 PARAMETER Experiment Name: At_Drought_Soil_Dry_P Parameter: Treatment Value: Drought vs. No Drought
ttttttttcaaatttagaaaaaatatctcaaattcggtatttttaaaatcctctctcgtcttcttcttcttcgatcgctggatctaggttttgctcttctctgtatcgtcttcttcacagactgggcttgattttgagttcttctagttttcggattcttagcaatctaggtttttttttttttttacttttcgaaaagccgatccagatttttgataattttgaagaagaagatgcaacaaaatcaagtgaagaagggcacgaaagagatggagtttttcacagagtatggtgatgcaaacagatataggattctggaagttattggtaaaggaagctatggagttgtgtgtgcagctattgatacacatactggagagaaagttgctattaagaagattaatgatgtctttgaacatatttctgatgcgcttcgtattctccgtgaagtgaagcttcttcggcttttacggcatcctgatattgtggagatcaaaagcattatgctgcctccttctaagagagagtttaaagatatctatgttgtgtttgagctcatggaatcagatcttcatcaagttattaaagctaatgatgatttgactcgtgaacaccaccagtttttcctttatcagatgcttcgtgctttaaagttcatgcatacagctaatgtttatcaccgtgatcttaagccaaagaatatacttgcaaacgcaaattgcaagttgaaagtttgtgactttggattggctagagtagcgtttaatgatactcctacgacagtcttttggacggactatgttgccacaagatggtatagagcacctgagctctgtggatcattcttttcgaagtacactccagctatcgacgtttggagcattggctgcatctttgcagaggtactaacagggaagccattgtttccgggaaaaagtgttgtccatcagttggagttgattactgatcttcttggcacaccaaaatcagaaacaatttctggagttcgtaatgataaagctagaaaatacttgactgaaatgaggaagaaaaatcctgtcaccttctcgcaaaaattttccaaagcagatccattagcactccgtcttttgcagaggctgttggctttcgatccaaaggatcgaccgactcctgcagaggcattagctgatccttacttcaagggtctttctaagattgaaagagaaccttcaagtcagcaaatctcgaaaatggagtttgaatttgagaggcgaaggttgacaaaggacgacattagagaactaatatacagagaaatactggagtaccatcctcagttgctcaaggactatatgagcggatctgaggggtctaattttgtatatcctagcgccattggacatcttagacagcagttcacttacttagaggaaaatagcagtagaaatgggccggtcatacctctcgagaggaaacacgcatcactaccgcggtctacggttcactcaactgtagtccattccacctcgcaacccaacttgggtgcaacagatagtagacgtgtttctttcgagccttcaaaaaatggagcttcttctgcaggacatccatcaacttccgcgtatcctactaaatccatcggacctccaccaagagttccaccatcaggtagaccaggtcgtgttgtggaatcatctgtatcttatgagaatggcaggaacctcaaagaagcttatttcagaagcgcggtttcatctcctcattgctacttccgaccaaacaccatgacaaacccggagaaccgcaacatagaagcttcgtcttttccaccaaagccacaaaatcctgtccaccaattcagtcccactgagccaccagctgctacaactaaccaagcagacgttgagactatgaaccacccaaacccttactttcaaccacagctcccgaagacagatcaattaaacaacaacacacatatggccattgatgctaagctgttgcaggcacaatcacagtttggtccagcaggagctgcagcggttgcagtagcagcacaccggaacataggcacaattagttacagcgcagcatcatagacaacacttcagacagatctttaaccaccacatcttcctccaccaggtgattctctagtttttatgtaagtattattcagtccaggctctgatatgaactacgttgcaatgatataagaaagacttttatttagttgtaactctccagaacaagatcgccttggattagtctgattgcgggtcagtcccggttattgtttcggttatcttgttggctccataatctttgaatttgccataagcgtagttcaccgtagagaagaatatcgtggtgattatatacttcttaaacttctt

SEQ ID NO: 46022 - protein, 615 aa, Arabidopsis thaliana
  peptide (1)..(615): Ceres Seq. ID no. 12560716
  misc_feature (25)..(316): Pfam Name: Protein kinase domain Pfam Description: Protein kinase domain
  misc_feature (13)..(417): Homolog of NCBI NO: 5815410 NR Description: blast and wounding induced mitogen-activated
  misc_feature (1)..(417): Homolog of NCBI NO: 25406284 NR Description: probable MAP kinase F25P22.9 [imported] -
  misc_feature (1)..(544): Homolog of NCBI NO: 17064906 NR Description: Unknown protein [Arabidopsis thaliana]
  misc_feature (13)..(472): Homolog of NCBI NO: 24412850 NR Description: putative mitogen-activated protein kinase wjumk1
  misc_feature (2)..(611): Homolog of NCBI NO: 34912932 NR Description: MAP kinase-like protein [Oryza sativa (japonica
  misc_feature (13)..(611): Homolog of NCBI NO: 25408817 NR Description: probable MAP kinase [imported] - Arabidopsis
  misc_feature (1)..(611): Homolog of NCBI NO: 18406088 NR Description: putative MAP kinase
  misc_feature (1)..(611): Homolog of NCBI NO: 4732123 NR Description: mitogen-activated protein kinase homologue
  misc_feature (13)..(611): Homolog of NCBI NO: 15231915 NR Description: putative MAP kinase; protein id: At3g14720.1
  misc_feature (11)..(611): Homolog of NCBI NO: 9294393 NR Description: mitogen-activated protein kinase [Arabidopsis
MQQNQVKKGTKEMEFFTEYGDANRYRILEVIGKGSYGVVCAAIDTHTGEKVAIKKINDVFEHISDALRILREVKLLRLLRHPDIVEIKSIMLPPSKREFKDIYVVFELMESDLHQVIKANDDLTREHHQFFLYQMLRALKFMHTANVYHRDLKPKNILANANCKLKVCDFGLARVAFNDTPTTVFWTDYVATRWYRAPELCGSFFSKYTPAIDVWSIGCIFAEVLTGKPLFPGKSVVHQLELITDLLGTPKSETISGVRNDKARKYLTEMRKKNPVTFSQKFSKADPLALRLLQRLLAFDPKDRPTPAEALADPYFKGLSKIEREPSSQQISKMEFEFERRRLTKDDIRELIYREILEYHPQLLKDYMSGSEGSNFVYPSAIGHLRQQFTYLEENSSRNGPVIPLERKHASLPRSTVHSTVVHSTSQPNLGATDSRRVSFEPSKNGASSAGHPSTSAYPTKSIGPPPRVPPSGRPGRVVESSVSYENGRNLKEAYFRSAVSSPHCYFRPNTMTNPENRNIEASSFPPKPQNPVHQFSPTEPPAATTNQADVETMNHPNPYFQPQLPKTDQLNNNTHMAIDAKLLQAQSQFGPAGAAAVAVAAHRNIGTISYSAAS

SEQ ID NO: 46023 - protein, 603 aa, Arabidopsis thaliana
  peptide (1)..(603): Ceres Seq. ID no. 12560717
  misc_feature (13)..(304): Pfam Name: Protein kinase domain Pfam Description: Protein kinase domain
  misc_feature (1)..(405): Homolog of NCBI NO: 5815410 NR Description: blast and wounding induced mitogen-activated
  misc_feature (1)..(405): Homolog of NCBI NO: 25406284 NR Description: probable MAP kinase F25P22.9 [imported] -
  misc_feature (1)..(532): Homolog of NCBI NO: 17064906 NR Description: Unknown protein [Arabidopsis thaliana]
  misc_feature (1)..(460): Homolog of NCBI NO: 24412850 NR Description: putative mitogen-activated protein kinase wjumk1
  misc_feature (1)..(599): Homolog of NCBI NO: 34912932 NR Description: MAP kinase-like protein [Oryza sativa (japonica
  misc_feature (1)..(599): Homolog of NCBI NO: 25408817 NR Description: probable MAP kinase [imported] - Arabidopsis
  misc_feature (1)..(599): Homolog of NCBI NO: 18406088 NR Description: putative MAP kinase
  misc_feature (1)..(599): Homolog of NCBI NO: 4732123 NR Description: mitogen-activated protein kinase homologue
  misc_feature (1)..(599): Homolog of NCBI NO: 15231915 NR Description: putative MAP kinase; protein id: At3g14720.1
  misc_feature (1)..(599): Homolog of NCBI NO: 9294393 NR Description: mitogen-activated protein kinase [Arabidopsis
MEFFTEYGDANRYRILEVIGKGSYGVVCAAIDTHTGEKVAIKKINDVFEHISDALRILREVKLLRLLRHPDIVEIKSIMLPPSKREFKDIYVVFELMESDLHQVIKANDDLTREHHQFFLYQMLRALKFMHTANVYHRDLKPKNILANANCKLKVCDFGLARVAFNDTPTTVFWTDYVATRWYRAPELCGSFFSKYTPAIDVWSIGCIFAEVLTGKPLFPGKSVVHQLELITDLLGTPKSETISGVRNDKARKYLTEMRKKNPVTFSQKFSKADPLALRLLQRLLAFDPKDRPTPAEALADPYFKGLSKIEREPSSQQISKMEFEFERRRLTKDDIRELIYREILEYHPQLLKDYMSGSEGSNFVYPSAIGHLRQQFTYLEENSSRNGPVIPLERKHASLPRSTVHSTVVHSTSQPNLGATDSRRVSFEPSKNGASSAGHPSTSAYPTKSIGPPPRVPPSGRPGRVVESSVSYENGRNLKEAYFRSAVSSPHCYFRPNTMTNPENRNIEASSFPPKPQNPVHQFSPTEPPAATTNQADVETMNHPNPYFQPQLPKTDQLNNNTHMAIDAKLLQAQSQFGPAGAAAVAVAAHRNIGTISYSAAS

SEQ ID NO: 46024 - protein, 525 aa, Arabidopsis thaliana
  peptide (1)..(525): Ceres Seq. ID no. 12560718
  misc_feature (1)..(226): Pfam Name: Protein kinase domain Pfam Description: Protein kinase domain
  misc_feature (1)..(327): Homolog of NCBI NO: 5815410 NR Description: blast and wounding induced mitogen-activated
  misc_feature (1)..(327): Homolog of NCBI NO: 25406284 NR Description: probable MAP kinase F25P22.9 [imported] -
  misc_feature (1)..(454): Homolog of NCBI NO: 17064906 NR Description: Unknown protein [Arabidopsis thaliana]
  misc_feature (1)..(382): Homolog of NCBI NO: 24412850 NR Description: putative mitogen-activated protein kinase wjumk1
  misc_feature (1)..(521): Homolog of NCBI NO: 34912932 NR Description: MAP kinase-like protein [Oryza sativa (japonica
  misc_feature (1)..(521): Homolog of NCBI NO: 25408817 NR Description: probable MAP kinase [imported] - Arabidopsis
  misc_feature (1)..(521): Homolog of NCBI NO: 18406088 NR Description: putative MAP kinase
  misc_feature (1)..(521): Homolog of NCBI NO: 4732123 NR Description: mitogen-activated protein kinase homologue
  misc_feature (1)..(521): Homolog of NCBI NO: 15231915 NR Description: putative MAP kinase; protein id: At3g14720.1
  misc_feature (1)..(521): Homolog of NCBI NO: 9294393 NR Description: mitogen-activated protein kinase [Arabidopsis
MLPPSKREFKDIYVVFELMESDLHQVIKANDDLTREHHQFFLYQMLRALKFMHTANVYHRDLKPKNILANANCKLKVCDFGLARVAFNDTPTTVFWTDYVATRWYRAPELCGSFFSKYTPAIDVWSIGCIFAEVLTGKPLFPGKSVVHQLELITDLLGTPKSETISGVRNDKARKYLTEMRKKNPVTFSQKFSKADPLALRLLQRLLAFDPKDRPTPAEALADPYFKGLSKIEREPSSQQISKMEFEFERRRLTKDDIRELIYREILEYHPQLLKDYMSGSEGSNFVYPSAIGHLRQQFTYLEENSSRNGPVIPLERKHASLPRSTVHSTVVHSTSQPNLGATDSRRVSFEPSKNGASSAGHPSTSAYPTKSIGPPPRVPPSGRPGRVVESSVSYENGRNLKEAYFRSAVSSPHCYFRPNTMTNPENRNIEASSFPPKPQNPVHQFSPTEPPAATTNQADVETMNHPNPYFQPQLPKTDQLNNNTHMAIDAKLLQAQSQFGPAGAAAVAVAAHRNIGTISYSAAS

SEQ ID NO: 46025 - DNA, 1730 bp, Arabidopsis thaliana
  misc_feature (1)..(1730): Ceres Seq. ID no. 12560749
  misc_feature: MA Experiment ID: 20000185 Result: Up-regulated in Transcription
  misc_feature: MA Experiment 20000185 PARAMETER Experiment Name: At_Roots__P Parameter: Age (day) Value: 7 vs. 21
  misc_feature: MA Experiment 20000185 PARAMETER Experiment Name: At_Roots__P Parameter: Organism Value: A. thaliana
  misc_feature: MA Experiment 20000185 PARAMETER Experiment Name: At_Roots__P Parameter: Tissue Value: Roots vs. Whole Plant
gaaaaaagcagagaacaagagaaaaaaaaaagaagaagacgactttatctttttctgggttttgttgttcttctttgactttatgggttcttttgttttagatttaggctcctacagatctgcttaaatctctgtgatcttgtctcttaattcttctgtttacccgtaatttccggaggattctcttcttgcttttccctgagcttctggatttggtcagagaagccttaagttcaaaaggatttggcttttgaagattggtgttaattaagcttctgggttttcatcagtttgtctaaaagtgagtggagtctctcatcttagtctgaagctcttttttttggatttgagcatttctggnttgagaagaatcttgtggaaaccaaagagaaatgtcgtttcgaggcattgttcaagatttgagagatgggtttgggagcttgtcaaggaggagtttcgattttaggctctcgagtcttcataaagggaaagctcagggttcttcgttccgtgagtattcgtcatcccgtgatctcttgtcgcctgtgatagttcagacaagtagatgggctaatcttcctccagagttactctttgatgtgatcaaaagattagaggaaagtgagagtaattggcctgcaagaaaacatgttgtggcttgtgcttcggtttgtcggtcttggagagctatgtgccaagagattgttttggggcctgaaatctgtgggaaactcactttccctgtttccctcaaacagccagggcctcgtgatgcaatgattcagtgtttcatcaaaagggataaatcaaagctaacatttcacctttttctttgtttaagtcccgctctattagtggagaatgggaaatttcttctttcagctaaaagaactcgtagaactactcgaaccgagtacattatctccatggatgctgataacatctcaagatccagcaactcttacctcggaaagctcagatcaaacttccttgggacaaagttcttggtgtacgacacgcaaccaccaccaaacacatcttcgagcgcacttatcactgatcgaacaagccgaagcaggtttcactccagacgagtttctcctaaagtaccatccggaagctacaacattgctcaaatcacctatgagctcaacgtgttgggcacacgcgggccacgacgaatgcactgcatcatgaactccatcccaatttcatcgctcgaaccaggcggttcagtccctaaccaacccgagaaactcgtccctgcaccatactctctcgacgactcattccgcagtaacatctccttctccaaatcatcatttgaccaccgctccctcgatttcagcagttctagattctccgaaatgggaatatcctgcgacgacaacgaagaagaagcgagtttcagaccgttgattctaaagaacaagcagccaaggtggcacgagcagttgcaatgctggtgtttgaatttccgcggacgtgtgacagttgcatcggttaagaatttccagcttgtagcagcaagacagccgcagcctcaagggacaggtgcagcagcagcaccaacaagtgcacctgctcaccctgagcaagacaaggtgattctccagtttggtaaagtagggaaagatatgttcacaatggactataggtatccattatcggcgtttcaggcgtttgcgatatgcttaagcagctttgacaccaagcttgcttgtgaatag

SEQ ID NO: 46026 - protein, 445 aa, Arabidopsis thaliana
  peptide (1)..(445): Ceres Seq. ID no. 12560750
  misc_feature (123)..(445): Pfam Name: Tub family Pfam Description: Tub family
  misc_feature (1)..(316): Homolog of NCBI NO: 30690823 NR Description: F-box containing tubby family protein
  misc_feature (1)..(402): Homolog of NCBI NO: 5777631 NR Description: CAA303719.1 protein [Oryza sativa]
  misc_feature (1)..(445): Homolog of NCBI NO: 18400968 NR Description: expressed protein
  misc_feature (179)..(445): Homolog of NCBI NO: 25082857 NR Description: unknown protein [Arabidopsis thaliana]
  misc_feature (1)..(445): Homolog of NCBI NO: 15223772 NR Description: Tub family protein, putative; protein id:
  misc_feature (18)..(432): Homolog of NCBI NO: 28188617 NR Description: unknown protein [Arabidopsis lyrata]
  misc_feature (18)..(432): Homolog of NCBI NO: 28188615 NR Description: unknown protein [Arabidopsis thaliana]
  misc_feature (18)..(432): Homolog of NCBI NO: 28188613 NR Description: unknown protein [Arabidopsis thaliana]
  misc_feature (18)..(432): Homolog of NCBI NO: 28188595 NR Description: unknown protein [Arabidopsis thaliana]
  misc_feature (1)..(445): Homolog of NCBI NO: 15222543 NR Description: F-box containing tubby family protein; protein
MSFRGIVQDLRDGFGSLSRRSFDFRLSSLHKGKAQGSSFREYSSSRDLLSPVIVQTSRWANLPPELLFDVIKRLEESESNWPARKHVVACASVCRSWRAMCQEIVLGPEICGKLTFPVSLKQPGPRDAMIQCFIKRDKSKLTFHLFLCLSPALLVENGKFLLSAKRTRRTTRTEYIISMDADNISRSSNSYLGKLRSNFLGTKFLVYDTQPPPNTSSSALITDRTSRSRFHSRRVSPKVPSGSYNIAQITYELNVLGTRGPRRMHCIMNSIPISSLEPGGSVPNQPEKLVPAPYSLDDSFRSNISFSKSSFDHRSLDFSSSRFSEMGISCDDNEEEASFRPLILKNKQPRWHEQLQCWCLNFRGRVTVASVKNFQLVAARQPQPQGTGAAAAPTSAPAHPEQDKVILQFGKVGKDMFTMDYRYPLSAFQAFAICLSSFDTKLACE

SEQ ID NO: 46027 - protein, 346 aa, Arabidopsis thaliana
  peptide (1)..(346): Ceres Seq. ID no. 12560751
  misc_feature (24)..(346): Pfam Name: Tub family Pfam Description: Tub family
  misc_feature (1)..(217): Homolog of NCBI NO: 30690823 NR Description: F-box containing tubby family protein
  misc_feature (1)..(303): Homolog of NCBI NO: 5777631 NR Description: CAA303719.1 protein [Oryza sativa]
  misc_feature (1)..(346): Homolog of NCBI NO: 18400968 NR Description: expressed protein
  misc_feature (80)..(346): Homolog of NCBI NO: 25082857 NR Description: unknown protein [Arabidopsis thaliana]
  misc_feature (1)..(346): Homolog of NCBI NO: 15223772 NR Description: Tub family protein, putative; protein id:
  misc_feature (1)..(333): Homolog of NCBI NO: 28188617 NR Description: unknown protein [Arabidopsis lyrata]
  misc_feature (1)..(333): Homolog of NCBI NO: 28188615 NR Description: unknown protein [Arabidopsis thaliana]
  misc_feature (1)..(333): Homolog of NCBI NO: 28188613 NR Description: unknown protein [Arabidopsis thaliana]
  misc_feature (1)..(333): Homolog of NCBI NO: 28188595 NR Description: unknown protein [Arabidopsis thaliana]
  misc_feature (1)..(346): Homolog of NCBI NO: 15222543 NR Description: F-box containing tubby family protein; protein
MCQEIVLGPEICGKLTFPVSLKQPGPRDAMIQCFIKRDKSKLTFHLFLCLSPALLVENGKFLLSAKRTRRTTRTEYIISMDADNISRSSNSYLGKLRSNFLGTKFLVYDTQPPPNTSSSALITDRTSRSRFHSRRVSPKVPSGSYNIAQITYELNVLGTRGPRRMHCIMNSIPISSLEPGGSVPNQPEKLVPAPYSLDDSFRSNISFSKSSFDHRSLDFSSSRFSEMGISCDDNEEEASFRPLILKNKQPRWHEQLQCWCLNFRGRVTVASVKNFQLVAARQPQPQGTGAAAAPTSAPAHPEQDKVILQFGKVGKDMFTMDYRYPLSAFQAFAICLSSFDTKLACE

SEQ ID NO: 46028 - protein, 317 aa, Arabidopsis thaliana
  peptide (1)..(317): Ceres Seq. ID no. 12560752
  misc_feature (1)..(317): Pfam Name: Tub family Pfam Description: Tub family
  misc_feature (1)..(188): Homolog of NCBI NO: 30690823 NR Description: F-box containing tubby family protein
  misc_feature (1)..(274): Homolog of NCBI NO: 5777631 NR Description: CAA303719.1 protein [Oryza sativa]
  misc_feature (1)..(317): Homolog of NCBI NO: 18400968 NR Description: expressed protein
  misc_feature (51)..(317): Homolog of NCBI NO: 25082857 NR Description: unknown protein [Arabidopsis thaliana]
  misc_feature (1)..(317): Homolog of NCBI NO: 15223772 NR Description: Tub family protein, putative; protein id:
  misc_feature (1)..(304): Homolog of NCBI NO: 28188617 NR Description: unknown protein [Arabidopsis lyrata]
  misc_feature (1)..(304): Homolog of NCBI NO: 28188615 NR Description: unknown protein [Arabidopsis thaliana]
  misc_feature (1)..(304): Homolog of NCBI NO: 28188613 NR Description: unknown protein [Arabidopsis thaliana]
  misc_feature (1)..(304): Homolog of NCBI NO: 28188595 NR Description: unknown protein [Arabidopsis thaliana]
  misc_feature (1)..(317): Homolog of NCBI NO: 15222543 NR Description: F-box containing tubby family protein; protein
MIQCFIKRDKSKLTFHLFLCLSPALLVENGKFLLSAKRTRRTTRTEYIISMDADNISRSSNSYLGKLRSNFLGTKFLVYDTQPPPNTSSSALITDRTSRSRFHSRRVSPKVPSGSYNIAQITYELNVLGTRGPRRMHCIMNSIPISSLEPGGSVPNQPEKLVPAPYSLDDSFRSNISFSKSSFDHRSLDFSSSRFSEMGISCDDNEEEASFRPLILKNKQPRWHEQLQCWCLNFRGRVTVASVKNFQLVAARQPQPQGTGAAAAPTSAPAHPEQDKVILQFGKVGKDMFTMDYRYPLSAFQAFAICLSSFDTKLACE

SEQ ID NO: 46029 - DNA, 629 bp, Arabidopsis thaliana; identical to SEQ ID NO: 28299
  misc_feature (1)..(629): Ceres Seq. ID no. 12680276
  misc_feature: MA Experiment ID: 108435 Result: Down-regulated in Transcription
  misc_feature: MA Experiment 108435 PARAMETER Experiment Name: At_stm_Mutants_cDNA_P Parameter: Plant Line Value: wt Landsburg vs stm
  misc_feature: MA Experiment 108435 PARAMETER Experiment Name: At_stm_Mutants_cDNA_P Parameter: Tissue Value: Shoot Apical Meristem Region
  misc_feature: MA Experiment ID: 108461 Result: Up-regulated in Transcription
  misc_feature: MA Experiment 108461 PARAMETER Experiment Name: At_Germinating_Seeds_cDNA_P Parameter: Age (day) Value: 1 vs. 0
  misc_feature: MA Experiment 108461 PARAMETER Experiment Name: At_Germinating_Seeds_cDNA_P Parameter: Tissue Value: Germinating Seeds
  misc_feature: MA Experiment ID: 108462 Result: Up-regulated in Transcription
  misc_feature: MA Experiment 108462 PARAMETER Experiment Name: At_Germinating_Seeds_cDNA_P Parameter: Age (day) Value: 2 vs. 0
  misc_feature: MA Experiment 108462 PARAMETER Experiment Name: At_Germinating_Seeds_cDNA_P Parameter: Tissue Value: Germinating Seeds
  misc_feature: MA Experiment ID: 108463 Result: Up-regulated in Transcription
  misc_feature: MA Experiment 108463 PARAMETER Experiment Name: At_Germinating_Seeds_cDNA_P Parameter: Age (day) Value: 3 vs. 0
  misc_feature: MA Experiment 108463 PARAMETER Experiment Name: At_Germinating_Seeds_cDNA_P Parameter: Tissue Value: Germinating Seeds
  misc_feature: MA Experiment ID: 108464 Result: Up-regulated in Transcription
  misc_feature: MA Experiment 108464 PARAMETER Experiment Name: At_Germinating_Seeds_cDNA_P Parameter: Age (day) Value: 4 vs. 0
  misc_feature: MA Experiment 108464 PARAMETER Experiment Name: At_Germinating_Seeds_cDNA_P Parameter: Tissue Value: Germinating Seeds
  misc_feature: MA Experiment ID: 108488 Result: Up-regulated in Transcription
  misc_feature: MA Experiment ID: 108489 Result: Down-regulated in Transcription
  misc_feature: MA Experiment ID: 108594 Result: Down-regulated in Transcription
  misc_feature: MA Experiment 108594 PARAMETER Experiment Name: At_Ler-rhl_Root_cDNA_P Parameter: Plant Line Value: null
  misc_feature: MA Experiment ID: 108595 Result: Down-regulated in Transcription
  misc_feature: MA Experiment 108595 PARAMETER Experiment Name: At_Ler-pi_Ovule_cDNA_P Parameter: Plant Line Value: null
  misc_feature: MA Experiment ID: 20000184 Result: Up-regulated in Transcription
  misc_feature: MA Experiment 20000184 PARAMETER Experiment Name: At_Shoots__P Parameter: Age (day) Value: 7
  misc_feature: MA Experiment 20000184 PARAMETER Experiment Name: At_Shoots__P Parameter: Tissue Value: Shoots vs. Whole Plant
  misc_feature: MA Experiment ID: 20000224 Result: Down-regulated in Transcription
  misc_feature: MA Experiment ID: 20000438 Result: Up-regulated in Transcription
  misc_feature: MA Experiment 20000438 PARAMETER Experiment Name: At_Shoots__P Parameter: Age (day) Value: 14
  misc_feature: MA Experiment 20000438 PARAMETER Experiment Name: At_Shoots__P Parameter: Tissue Value: Shoots vs. Whole Plant
  misc_feature: MA Experiment ID: 20000495 Result: Down-regulated in Transcription
  misc_feature: MA Experiment 20000495 PARAMETER Experiment Name: At_Guard_Cells_P Parameter: Harvest Date Value: 8/2/2002
  misc_feature: MA Experiment 20000495 PARAMETER Experiment Name: At_Guard_Cells_P Parameter: Organism Value: A. thaliana
  misc_feature: MA Experiment 20000495 PARAMETER Experiment Name: At_Guard_Cells_P Parameter: Tissue Value: Guard Cells vs. Leaves

SEQ ID NO: 46030 - protein, 145 aa, Arabidopsis thaliana; identical to SEQ ID NO: 28300
  peptide (1)..(145): Ceres Seq. ID no. 12680277
  misc_feature (6)..(145): Pfam Name: Photosystem I reaction centre subunit VI Pfam Description: Photosystem I reaction centre subunit VI
  misc_feature (6)..(145): Pfam Name: Photosystem I reaction centre subunit VI Pfam Description: Photosystem I reaction centre subunit VI
  misc_feature (1)..(145): Homolog of NCBI NO: 445929 NR Description: photosystem I:SUBUNIT=PS I-H
  misc_feature (1)..(145): Homolog of NCBI NO: 445928 NR Description: photosystem I:SUBUNIT=PS I-H
  misc_feature (1)..(145): Homolog of NCBI NO: 7443140 NR Description: photosystem I psaH precursor - wood tobacco
  misc_feature (1)..(145): Homolog of NCBI NO: 7443139 NR Description: photosystem I protein psaH precursor - wood
  misc_feature (1)..(145): Homolog of NCBI NO: 131199 NR Description: Photosystem I reaction center subunit VI,
  misc_feature (1)..(145): Homolog of NCBI NO: 445929 NR Description: photosystem I:SUBUNIT=PS I-H
  misc_feature (1)..(145): Homolog of NCBI NO: 7443140 NR Description: photosystem I psaH precursor - wood tobacco
  misc_feature (1)..(145): Homolog of NCBI NO: 131199 NR Description: Photosystem I reaction center subunit VI,
  misc_feature (1)..(145): Homolog of NCBI NO: 15233291 NR Description: photosystem I subunit VI precursor
  misc_feature (1)..(145): Homolog of NCBI NO: 15218186 NR Description: photosystem I subunit VI precursor
  misc_feature (1)..(145): Homolog of NCBI NO: 3914442 NR Description: Photosystem I reaction center subunit VI,
  misc_feature (1)..(145): Homolog of NCBI NO: 7443138 NR Description: photosystem I protein psaH precursor - wood
  misc_feature (1)..(145): Homolog of NCBI NO: 33520419 NR Description: photosystem I psaH protein [Trifolium pratense]
  misc_feature (1)..(145): Homolog of NCBI NO: 7443139 NR Description: photosystem I protein psaH precursor - wood
  misc_feature (1)..(145): Homolog of NCBI NO: 445928 NR Description: photosystem I:SUBUNIT=PS I-H
  misc_feature (1)..(145): Homolog of NCBI NO: 33520419 NR Description: photosystem I psaH protein [Trifolium pratense]
  misc_feature (1)..(145): Homolog of NCBI NO: 7443138 NR Description: photosystem I protein psaH precursor - wood
  misc_feature (1)..(145): Homolog of NCBI NO: 3914442 NR Description: Photosystem I reaction center subunit VI,
  misc_feature (1)..(145): Homolog of NCBI NO: 15218186 NR Description: photosystem I subunit VI precursor
  misc_feature (1)..(145): Homolog of NCBI NO: 15233291 NR Description: photosystem I subunit VI precursor

SEQ ID NO: 46031 - DNA, 1746 bp, Arabidopsis thaliana
  misc_feature (1)..(1746): Ceres Seq. ID no. 13591719
  misc_feature: MA Experiment ID: 20000234 Result: Up-regulated in Transcription
  misc_feature: MA Experiment 20000234 PARAMETER Experiment Name: At_Siliques_P Parameter: Age (day) Value: 21
  misc_feature: MA Experiment 20000234 PARAMETER Experiment Name: At_Siliques_P Parameter: Organism Value: A. thaliana
  misc_feature: MA Experiment 20000234 PARAMETER Experiment Name: At_Siliques_P Parameter: Plant Line Value: WS
  misc_feature: MA Experiment 20000234 PARAMETER Experiment Name: At_Siliques_P Parameter: Tissue Value: Less Than 5mm Siliques vs. Whole Plant
  misc_feature: MA Experiment ID: 20000437 Result: Down-regulated in Transcription
  misc_feature: MA Experiment 20000437 PARAMETER Experiment Name: At_Drought_P Parameter: Age (day) Value: 8
  misc_feature: MA Experiment 20000437 PARAMETER Experiment Name: At_Drought_P Parameter: Organism Value: A. thaliana
  misc_feature: MA Experiment 20000437 PARAMETER Experiment Name: At_Drought_P Parameter: Plant Line Value: WS
  misc_feature: MA Experiment 20000437 PARAMETER Experiment Name: At_Drought_P Parameter: Timepoint (hr) Value: 24
  misc_feature: MA Experiment 20000437 PARAMETER Experiment Name: At_Drought_P Parameter: Tissue Value: Whole Plant
  misc_feature: MA Experiment 20000437 PARAMETER Experiment Name: At_Drought_P Parameter: Treatment Value: Drought vs. No Drought
  misc_feature: MA Experiment ID: 20000495 Result: Up-regulated in Transcription
  misc_feature: MA Experiment 20000495 PARAMETER Experiment Name: At_Guard_Cells_P Parameter: Harvest Date Value: 8/2/2002
  misc_feature: MA Experiment 20000495 PARAMETER Experiment Name: At_Guard_Cells_P Parameter: Organism Value: A. thaliana
  misc_feature: MA Experiment 20000495 PARAMETER Experiment Name: At_Guard_Cells_P Parameter: Tissue Value: Guard Cells vs. Leaves
  misc_feature: MA Experiment ID: 20001556 Result: Down-regulated in Transcription
  misc_feature: MA Experiment 20001556 PARAMETER Experiment Name: At_Drought_Soil_Dry_P Parameter: Age (day) Value: 26
  misc_feature: MA Experiment 20001556 PARAMETER Experiment Name: At_Drought_Soil_Dry_P Parameter: Organism Value: A. thaliana
  misc_feature: MA Experiment 20001556 PARAMETER Experiment Name: At_Drought_Soil_Dry_P Parameter: Plant Line Value: WS
  misc_feature: MA Experiment 20001556 PARAMETER Experiment Name: At_Drought_Soil_Dry_P Parameter: Post Timepoint (hr) Value: None
  misc_feature: MA Experiment 20001556 PARAMETER Experiment Name: At_Drought_Soil_Dry_P Parameter: Post-Treatment Value: None
  misc_feature: MA Experiment 20001556 PARAMETER Experiment Name: At_Drought_Soil_Dry_P Parameter: Timepoint (day) Value: 12
  misc_feature: MA Experiment 20001556 PARAMETER Experiment Name: At_Drought_Soil_Dry_P Parameter: Treatment Value: Drought vs. No Drought
  misc_feature: MA Experiment ID: 20001911 Result: Down-regulated in Transcription
  misc_feature: MA Experiment 20001911 PARAMETER Experiment Name: At_Drought_Reproduction_P Parameter: Age (day) Value: 40
  misc_feature: MA Experiment 20001911 PARAMETER Experiment Name: At_Drought_Reproduction_P Parameter: Organism Value: A. thaliana
  misc_feature: MA Experiment 20001911 PARAMETER Experiment Name: At_Drought_Reproduction_P Parameter: Plant Line Value: WS
  misc_feature: MA Experiment 20001911 PARAMETER Experiment Name: At_Drought_Reproduction_P Parameter: Timepoint (day) Value: 10
  misc_feature: MA Experiment 20001911 PARAMETER Experiment Name: At_Drought_Reproduction_P Parameter: Tissue Value: Flowers
  misc_feature: MA Experiment 20001911 PARAMETER Experiment Name: At_Drought_Reproduction_P Parameter: Treatment Value: Drought vs. No Drought
ggaagaagaagattgattataaaggtgttagctttttcaatacttcacaccaaataaagcctttctcgttagataagtaacaagcatttactcaaaagcttcttcctttctcactctctctctctctctgtctcttcttgtttgctttagacttaagatgggtgcggcgcattttagtaaggagagggtcttcagagggtttctggtttggttctgcttttggggactgatgtctctaacatgcgctgggagactcagtgtttcaaggcagaattttgaagtgcacaaacacttgaatcgattgaataaaccagccgttaagagcattcagagtccagatggtgacataatagactgtgttcacatatcgaagcaaccagcttttgatcaccctttcctcaaagatcacaagattcagatgggacctagttacactccagaatcgctgtttggtgagagcaaagtgtctgagaaaccaaaagagagtgtcaatcctattacacagttatggcaccagaacggagtttgttctgaagggacaataccagtgaggaggacaaagaaagaggatgtcttgagggcgagttctgttaaacggtatggtaagaagaagcacctttctgttcctctgcctcgatctgctgatcctgatctcattaaccaaagtggtcatcagcacgcgatagcttatgtggaaggaggcaagttttacggggcaaaggcgacaataaatgtatgggaacccaaagtgcaaagctctaatgagtttagcttgtctcagttatggattcttggaggttcttttggtcaagatctcaacagcattgaagctggttggcaggttagtccagatttatatggcgataacaacacaaggcttttcacatactggacgagcgatgcttatcaagctacgggctgctacaatctcctttgttcgggtttcatacaaatcaacagtcaaatagcaatgggagcaagtatctctccggtatctggcttccataacccgcaatacgatataagtattaccatttggaaggatccaaaagaagggcactggtggatgcagtttggagacgggtatgtgttgggatactggccaagctttctattctcttacttagcagatagtgcatcaatagtagagtggggtggagaagtagtgaacatggaagaagatggtcaccacacaaccacgcaaatgggaagcggtcaatttccggatgaagggttcacgaaagcgagttacttcaggaacattcaagtcgttgatagctctaataatctgaaagaaccaaaagggctcaacactttcactgagaaatcgaattgctatgatgttgaggttggtaagaatgatgattggggacattatttttactatggaggtcctggaagaaaccctaattgtcagtagaagttaaagaaagaagatgattgaagttgtagaggaacacttgtgctggattttttcttattatgtgaagtgtgaaaatatcgtttttgttgatttttccttacacttactctgtttttttattttacctggacggctggacactgttttgtttttttttggggtttttaggttttgattaggtttagttgaaggttttttaaatgttacttgggttgaaaggtttgtctttagtttgtaagtgtggaagagagaagttgatagtctcttttcttgtaggagtaacctttaagataagaagattaaagatctttggattgtcttag

SEQ ID NO: 46032 - protein, 420 aa, Arabidopsis thaliana
  peptide (1)..(420): Ceres Seq. ID no. 13591720
  misc_feature (184)..(380): Pfam Name: Arabidopsis proteins of unknown function Pfam Description: Arabidopsis proteins of unknown function
  misc_feature (184)..(380): Pfam Name: Arabidopsis proteins of unknown function Pfam Description: Arabidopsis proteins of unknown function
  misc_feature (42)..(419): Homolog of NCBI NO: 15238835 NR Description: expressed protein [Arabidopsis thaliana]
  misc_feature (39)..(419): Homolog of NCBI NO: 18406483 NR Description: expressed protein [Arabidopsis thaliana]
  misc_feature (24)..(419): Homolog of NCBI NO: 30103019 NR Description: unknown protein [Oryza sativa (japonica
  misc_feature (42)..(419): Homolog of NCBI NO: 34393299 NR Description: putative DD1A protein [Oryza sativa (japonica
  misc_feature (32)..(419): Homolog of NCBI NO: 34393554 NR Description: putative carboxyl-terminal proteinase
  misc_feature (42)..(419): Homolog of NCBI NO: 15238835 NR Description: expressed protein [Arabidopsis thaliana]
  misc_feature (24)..(419): Homolog of NCBI NO: 30103019 NR Description: unknown protein [Oryza sativa (japonica
  misc_feature (32)..(419): Homolog of NCBI NO: 34393554 NR Description: putative carboxyl-terminal proteinase
  misc_feature (1)..(420): Homolog of NCBI NO: 15241244 NR Description: expressed protein [Arabidopsis thaliana]
  misc_feature (1)..(419): Homolog of NCBI NO: 18400044 NR Description: expressed protein [Arabidopsis thaliana]
  misc_feature (2)..(419): Homolog of NCBI NO: 15222707 NR Description: expressed protein [Arabidopsis thaliana]
  misc_feature (1)..(419): Homolog of NCBI NO: 21593294 NR Description: putative carboxyl-terminal peptidase [Arabidopsis
  misc_feature (2)..(419): Homolog of NCBI NO: 27311623 NR Description: unknown protein [Arabidopsis thaliana]
  misc_feature (42)..(419): Homolog of NCBI NO: 34393299 NR Description: putative DD1A protein [Oryza sativa (japonica
  misc_feature (39)..(419): Homolog of NCBI NO: 18406483 NR Description: expressed protein [Arabidopsis thaliana]
  misc_feature (2)..(419): Homolog of NCBI NO: 27311623 NR Description: unknown protein [Arabidopsis thaliana]
  misc_feature (1)..(419): Homolog of NCBI NO: 21593294 NR Description: putative carboxyl-terminal peptidase [Arabidopsis
  misc_feature (2)..(419): Homolog of NCBI NO: 15222707 NR Description: expressed protein [Arabidopsis thaliana]
  misc_feature (1)..(419): Homolog of NCBI NO: 18400044 NR Description: expressed protein [Arabidopsis thaliana]
  misc_feature (1)..(420): Homolog of NCBI NO: 15241244 NR Description: expressed protein [Arabidopsis thaliana]
MGAAHFSKERVFRGFLVWFCFWGLMSLTCAGRLSVSRQNFEVHKHLNRLNKPAVKSIQSPDGDIIDCVHISKQPAFDHPFLKDHKIQMGPSYTPESLFGESKVSEKPKESVNPITQLWHQNGVCSEGTIPVRRTKKEDVLRASSVKRYGKKKHLSVPLPRSADPDLINQSGHQHAIAYVEGGKFYGAKATINVWEPKVQSSNEFSLSQLWILGGSFGQDLNSIEAGWQVSPDLYGDNNTRLFTYWTSDAYQATGCYNLLCSGFIQINSQIAMGASISPVSGFHNPQYDISITIWKDPKEGHWWMQFGDGYVLGYWPSFLFSYLADSASIVEWGGEVVNMEEDGHHTTTQMGSGQFPDEGFTKASYFRNIQVVDSSNNLKEPKGLNTFTEKSNCYDVEVGKNDDWGHYFYYGGPGRNPNCQ

SEQ ID NO: 46033 - protein, 396 aa, Arabidopsis thaliana
  peptide (1)..(396): Ceres Seq. ID no. 13591721
  misc_feature (160)..(356): Pfam Name: Arabidopsis proteins of unknown function Pfam Description: Arabidopsis proteins of unknown function
  misc_feature (160)..(356): Pfam Name: Arabidopsis proteins of unknown function Pfam Description: Arabidopsis proteins of unknown function
  misc_feature (18)..(395): Homolog of NCBI NO: 15238835 NR Description: expressed protein [Arabidopsis thaliana]
  misc_feature (15)..(395): Homolog of NCBI NO: 18406483 NR Description: expressed protein [Arabidopsis thaliana]
  misc_feature (1)..(395): Homolog of NCBI NO: 30103019 NR Description: unknown protein [Oryza sativa (japonica
  misc_feature (18)..(395): Homolog of NCBI NO: 34393299 NR Description: putative DD1A protein [Oryza sativa (japonica
  misc_feature (8)..(395): Homolog of NCBI NO: 34393554 NR Description: putative carboxyl-terminal proteinase
  misc_feature (18)..(395): Homolog of NCBI NO: 15238835 NR Description: expressed protein [Arabidopsis thaliana]
  misc_feature (1)..(395): Homolog of NCBI NO: 30103019 NR Description: unknown protein [Oryza sativa (japonica
  misc_feature (8)..(395): Homolog of NCBI NO: 34393554 NR Description: putative carboxyl-terminal proteinase
  misc_feature (1)..(396): Homolog of NCBI NO: 15241244 NR Description: expressed protein [Arabidopsis thaliana]
  misc_feature (1)..(395): Homolog of NCBI NO: 18400044 NR Description: expressed protein [Arabidopsis thaliana]
  misc_feature (1)..(395): Homolog of NCBI NO: 15222707 NR Description: expressed protein [Arabidopsis thaliana]
  misc_feature (1)..(395): Homolog of NCBI NO: 21593294 NR Description: putative carboxyl-terminal peptidase [Arabidopsis
  misc_feature (1)..(395): Homolog of NCBI NO: 27311623 NR Description: unknown protein [Arabidopsis thaliana]
  misc_feature (18)..(395): Homolog of NCBI NO: 34393299 NR Description: putative DD1A protein [Oryza sativa (japonica
  misc_feature (15)..(395): Homolog of NCBI NO: 18406483 NR Description: expressed protein [Arabidopsis thaliana]
  misc_feature (1)..(395): Homolog of NCBI NO: 27311623 NR Description: unknown protein [Arabidopsis thaliana]
  misc_feature (1)..(395): Homolog of NCBI NO: 21593294 NR Description: putative carboxyl-terminal peptidase [Arabidopsis
  misc_feature (1)..(395): Homolog of NCBI NO: 15222707 NR Description: expressed protein [Arabidopsis thaliana]
  misc_feature (1)..(395): Homolog of NCBI NO: 18400044 NR Description: expressed protein [Arabidopsis thaliana]
  misc_feature (1)..(396): Homolog of NCBI NO: 15241244 NR Description: expressed protein [Arabidopsis thaliana]
MSLTCAGRLSVSRQNFEVHKHLNRLNKPAVKSIQSPDGDIIDCVHISKQPAFDHPFLKDHKIQMGPSYTPESLFGESKVSEKPKESVNPITQLWHQNGVCSEGTIPVRRTKKEDVLRASSVKRYGKKKHLSVPLPRSADPDLINQSGHQHAIAYVEGGKFYGAKATINVWEPKVQSSNEFSLSQLWILGGSFGQDLNSIEAGWQVSPDLYGDNNTRLFTYWTSDAYQATGCYNLLCSGFIQINSQIAMGASISPVSGFHNPQYDISITIWKDPKEGHWWMQFGDGYVLGYWPSFLFSYLADSASIVEWGGEVVNMEEDGHHTTTQMGSGQFPDEGFTKASYFRNIQVVDSSNNLKEPKGLNTFTEKSNCYDVEVGKNDDWGHYFYYGGPGRNPNCQ

SEQ ID NO: 46034 - protein, 333 aa, Arabidopsis thaliana
  peptide (1)..(333): Ceres Seq. ID no. 13591722
  misc_feature (97)..(293): Pfam Name: Arabidopsis proteins of unknown function Pfam Description: Arabidopsis proteins of unknown function
  misc_feature (97)..(293): Pfam Name: Arabidopsis proteins of unknown function Pfam Description: Arabidopsis proteins of unknown function
  misc_feature (1)..(332): Homolog of NCBI NO: 15238835 NR Description: expressed protein [Arabidopsis thaliana]
  misc_feature (1)..(332): Homolog of NCBI NO: 18406483 NR Description: expressed protein [Arabidopsis thaliana]
  misc_feature (1)..(332): Homolog of NCBI NO: 30103019 NR Description: unknown protein [Oryza sativa (japonica
  misc_feature (1)..(332): Homolog of NCBI NO: 34393299 NR Description: putative DD1A protein [Oryza sativa (japonica
  misc_feature (1)..(332): Homolog of NCBI NO: 34393554 NR Description: putative carboxyl-terminal proteinase
  misc_feature (1)..(332): Homolog of NCBI NO: 15238835 NR Description: expressed protein [Arabidopsis thaliana]
  misc_feature (1)..(332): Homolog of NCBI NO: 30103019 NR Description: unknown protein [Oryza sativa (japonica
  misc_feature (1)..(332): Homolog of NCBI NO: 34393554 NR Description: putative carboxyl-terminal proteinase
  misc_feature (1)..(333): Homolog of NCBI NO: 15241244 NR Description: expressed protein [Arabidopsis thaliana]
  misc_feature (1)..(332): Homolog of NCBI NO: 18400044 NR Description: expressed protein [Arabidopsis thaliana]
  misc_feature (1)..(332): Homolog of NCBI NO: 15222707 NR Description: expressed protein [Arabidopsis thaliana]
  misc_feature (1)..(332): Homolog of NCBI NO: 21593294 NR Description: putative carboxyl-terminal peptidase [Arabidopsis
  misc_feature (1)..(332): Homolog of NCBI NO: 27311623 NR Description: unknown protein [Arabidopsis thaliana]
  misc_feature (1)..(332): Homolog of NCBI NO: 34393299 NR Description: putative DD1A protein [Oryza sativa (japonica
  misc_feature (1)..(332): Homolog of NCBI NO: 18406483 NR Description: expressed protein [Arabidopsis thaliana]
  misc_feature (1)..(332): Homolog of NCBI NO: 27311623 NR Description: unknown protein [Arabidopsis thaliana]
  misc_feature (1)..(332): Homolog of NCBI NO: 21593294 NR Description: putative carboxyl-terminal peptidase [Arabidopsis
  misc_feature (1)..(332): Homolog of NCBI NO: 15222707 NR Description: expressed protein [Arabidopsis thaliana]
  misc_feature (1)..(332): Homolog of NCBI NO: 18400044 NR Description: expressed protein [Arabidopsis thaliana]
  misc_feature (1)..(333): Homolog of NCBI NO: 15241244 NR Description: expressed protein [Arabidopsis thaliana]
MGPSYTPESLFGESKVSEKPKESVNPITQLWHQNGVCSEGTIPVRRTKKEDVLRASSVKRYGKKKHLSVPLPRSADPDLINQSGHQHAIAYVEGGKFYGAKATINVWEPKVQSSNEFSLSQLWILGGSFGQDLNSIEAGWQVSPDLYGDNNTRLFTYWTSDAYQATGCYNLLCSGFIQINSQIAMGASISPVSGFHNPQYDISITIWKDPKEGHWWMQFGDGYVLGYWPSFLFSYLADSASIVEWGGEVVNMEEDGHHTTTQMGSGQFPDEGFTKASYFRNIQVVDSSNNLKEPKGLNTFTEKSNCYDVEVGKNDDWGHYFYYGGPGRNPNCQ

SEQ ID NO: 46035 - DNA, 2313 bp, Arabidopsis thaliana
  misc_feature (1)..(2313): Ceres Seq. ID no. 15168627
  misc_feature: MA Experiment ID: 20000171 Result: Down-regulated in Transcription
  misc_feature: MA Experiment 20000171 PARAMETER Experiment Name: At_42deg_Heat_P Parameter: Age (day) Value: 14
  misc_feature: MA Experiment 20000171 PARAMETER Experiment Name: At_42deg_Heat_P Parameter: Organism Value: A. thaliana
  misc_feature: MA Experiment 20000171 PARAMETER Experiment Name: At_42deg_Heat_P Parameter: Plant Line Value: WS
  misc_feature: MA Experiment 20000171 PARAMETER Experiment Name: At_42deg_Heat_P Parameter: Temperature (deg C) Value: 42 vs. 22
  misc_feature: MA Experiment 20000171 PARAMETER Experiment Name: At_42deg_Heat_P Parameter: Timepoint (hr) Value: 1
  misc_feature: MA Experiment 20000171 PARAMETER Experiment Name: At_42deg_Heat_P Parameter: Tissue Value: Aerial
  misc_feature: MA Experiment ID: 20000173 Result: Down-regulated in Transcription
  misc_feature: MA Experiment 20000173 PARAMETER Experiment Name: At_42deg_Heat_P Parameter: Age (day) Value: 14
  misc_feature: MA Experiment 20000173 PARAMETER Experiment Name: At_42deg_Heat_P Parameter: Organism Value: A. thaliana
  misc_feature: MA Experiment 20000173 PARAMETER Experiment Name: At_42deg_Heat_P Parameter: Plant Line Value: WS
  misc_feature: MA Experiment 20000173 PARAMETER Experiment Name: At_42deg_Heat_P Parameter: Temperature (deg C) Value: 42 vs. 22
  misc_feature: MA Experiment 20000173 PARAMETER Experiment Name: At_42deg_Heat_P Parameter: Timepoint (hr) Value: 6
  misc_feature: MA Experiment 20000173 PARAMETER Experiment Name: At_42deg_Heat_P Parameter: Tissue Value: Aerial
  misc_feature: MA Experiment ID: 20000184 Result: Up-regulated in Transcription
  misc_feature: MA Experiment 20000184 PARAMETER Experiment Name: At_Shoots__P Parameter: Age (day) Value: 7
  misc_feature: MA Experiment 20000184 PARAMETER Experiment Name: At_Shoots__P Parameter: Tissue Value: Shoots vs. Whole Plant
  misc_feature: MA Experiment ID: 20000234 Result: Up-regulated in Transcription
  misc_feature: MA Experiment 20000234 PARAMETER Experiment Name: At_Siliques_P Parameter: Age (day) Value: 21
  misc_feature: MA Experiment 20000234 PARAMETER Experiment Name: At_Siliques_P Parameter: Organism Value: A. thaliana
  misc_feature: MA Experiment 20000234 PARAMETER Experiment Name: At_Siliques_P Parameter: Plant Line Value: WS
  misc_feature: MA Experiment 20000234 PARAMETER Experiment Name: At_Siliques_P Parameter: Tissue Value: Less Than 5mm Siliques vs. Whole Plant
  misc_feature: MA Experiment ID: 20000235 Result: Up-regulated in Transcription
  misc_feature: MA Experiment 20000235 PARAMETER Experiment Name: At_Siliques_P Parameter: Age (day) Value: 21
  misc_feature: MA Experiment 20000235 PARAMETER Experiment Name: At_Siliques_P Parameter: Organism Value: A. thaliana
  misc_feature: MA Experiment 20000235 PARAMETER Experiment Name: At_Siliques_P Parameter: Plant Line Value: WS
  misc_feature: MA Experiment 20000235 PARAMETER Experiment Name: At_Siliques_P Parameter: Tissue Value: 5-10mm Siliques vs. Whole Plant
  misc_feature: MA Experiment ID: 20000264 Result: Up-regulated in Transcription
  misc_feature: MA Experiment 20000264 PARAMETER Experiment Name: At_Open_Flower_P Parameter: Age (day) Value: 21
  misc_feature: MA Experiment 20000264 PARAMETER Experiment Name: At_Open_Flower_P Parameter: Plant Line Value: WS
  misc_feature: MA Experiment 20000264 PARAMETER Experiment Name: At_Open_Flower_P Parameter: Tissue Value: Open Flower vs. Whole Plant
  misc_feature: MA Experiment ID: 20000265 Result: Up-regulated in Transcription
  misc_feature: MA Experiment 20000265 PARAMETER Experiment Name: At_Open_Flower_P Parameter: Age (day) Value: 21
  misc_feature: MA Experiment 20000265 PARAMETER Experiment Name: At_Open_Flower_P Parameter: Plant Line Value: WS
  misc_feature: MA Experiment 20000265 PARAMETER Experiment Name: At_Open_Flower_P Parameter: Tissue Value: Closed Flower vs. Whole Plant
  misc_feature: MA Experiment ID: 20000286 Result: Up-regulated in Transcription
  misc_feature: MA Experiment 20000286 PARAMETER Experiment Name: At_Open_Flower_P Parameter: Age (day) Value: 21
  misc_feature: MA Experiment 20000286 PARAMETER Experiment Name: At_Open_Flower_P Parameter: Plant Line Value: WS
  misc_feature: MA Experiment 20000286 PARAMETER Experiment Name: At_Open_Flower_P Parameter: Tissue Value: Half Open vs. Whole Plant
  misc_feature: MA Experiment ID: 20000438 Result: Up-regulated in Transcription
  misc_feature: MA Experiment 20000438 PARAMETER Experiment Name: At_Shoots__P Parameter: Age (day) Value: 14
  misc_feature: MA Experiment 20000438 PARAMETER Experiment Name: At_Shoots__P Parameter: Tissue Value: Shoots vs. Whole Plant
  misc_feature: MA Experiment ID: 20000439 Result: Up-regulated in Transcription
  misc_feature: MA Experiment 20000439 PARAMETER Experiment Name: At_Roots__P Parameter: Age (day) Value: 14 vs. 21
  misc_feature: MA Experiment 20000439 PARAMETER Experiment Name: At_Roots__P Parameter: Organism Value: A. thaliana
  misc_feature: MA Experiment 20000439 PARAMETER Experiment Name: At_Roots__P Parameter: Tissue Value: Roots vs. Whole Plant
  misc_feature: MA Experiment ID: 20000495 Result: Up-regulated in Transcription
  misc_feature: MA Experiment 20000495 PARAMETER Experiment Name: At_Guard_Cells_P Parameter: Harvest Date Value: 8/2/2002
  misc_feature: MA Experiment 20000495 PARAMETER Experiment Name: At_Guard_Cells_P Parameter: Organism Value: A. thaliana
  misc_feature: MA Experiment 20000495 PARAMETER Experiment Name: At_Guard_Cells_P Parameter: Tissue Value: Guard Cells vs. Leaves
  misc_feature: MA Experiment ID: 20000794 Result: Up-regulated in Transcription
  misc_feature: MA Experiment 20000794 PARAMETER Experiment Name: At_Petals_P Parameter: Age (day) Value: 23-25 days
  misc_feature: MA Experiment 20000794 PARAMETER Experiment Name: At_Petals_P Parameter: Plant Line Value: WS
  misc_feature: MA Experiment 20000794 PARAMETER Experiment Name: At_Petals_P Parameter: Tissue Value: Petals vs. Whole plant
  misc_feature: MA Experiment ID: 20001557 Result: Up-regulated in Transcription
  misc_feature: MA Experiment 20001557 PARAMETER Experiment Name: At_Drought_Soil_Dry_P Parameter: Age (day) Value: 27
  misc_feature: MA Experiment 20001557 PARAMETER Experiment Name: At_Drought_Soil_Dry_P Parameter: Organism Value: A. thaliana
  misc_feature: MA Experiment 20001557 PARAMETER Experiment Name: At_Drought_Soil_Dry_P Parameter: Plant Line Value: WS
  misc_feature: MA Experiment 20001557 PARAMETER Experiment Name: At_Drought_Soil_Dry_P Parameter: Post Timepoint (hr) Value: 3
  misc_feature: MA Experiment 20001557 PARAMETER Experiment Name: At_Drought_Soil_Dry_P Parameter: Post-Treatment Value: Re-Water vs. No Drought
  misc_feature: MA Experiment 20001557 PARAMETER Experiment Name: At_Drought_Soil_Dry_P Parameter: Timepoint (day) Value: 13
  misc_feature: MA Experiment 20001557 PARAMETER Experiment Name: At_Drought_Soil_Dry_P Parameter: Treatment Value: Drought vs. No Drought
gtttcctctcaggtcctcttcaagaccttcaaaatctcggaaattccctctaggtccacctcttcaagcatttcctcctcctccccctaattcagattgttcttcaactatttgtttggaaccgtacacaaacacacctccgggatctccatgtggctgtgtctggccaattcaagttgagctacgccttagcatggcgctctacgacttcttcccaatggtttcagaatttgctcgggaaatcagcgccggagttttcatgaaacagagccaagtccgtataatgggagctaacgcggccagcgaacaacctgagaaatccattgttctaatcgatttagtaccgcttggagataaattcgataacatgactgcaatgctgacttaccagagattctggagtaaaaaagtctatatagatgaaccaatctttggcggatacgacgtgatttacgtgcgttatcctggtttacccgcttccccgccaacttctggtatgaccattatagatcaaggaccgtactctggtaataataacggaagggcggtcaaaccgctcggagttgatgttccaaggaagccgcgcaagaaagagctcaatggtggaagtattgctgtgattgttttatccgcagctgcttttatcggtttatgtttcgttatcgtttggttcttggttttccggcgacaaagagatcgacgacgtctttcgaaaagaacaccacttgctcgcccttcactgccttccctctcgaaaccatcaggctcggcgagatctttaactggaagccgatttagctcaacttcattgtcatttgaatccagcattgctccgtttactctctctgcaaagactttcaccgcaagtgaaataatgaaagctacaaataactttgatgaatcgagggttcttggtgaaggcggatttggacgagtttacgaaggtgttttcgatgacggaactaaagtagcagttaaggtattgaagagagatgaccagcaaggtagcagggagttcttagccgaagtggaaatgcttagtcgtcttcatcacagaaacctcgtgaatttaattggtatttgtatcgaagatcgtaaccgttccctggtttatgaactcataccaaatggcagcgttgaatctcacctccacgggattgataaagcatcttcgcctttagattgggatgctcggttgaagatagctcttggtgcggcccgtggtttagcgtatttacacgaagactcgagcccgcgagttatacacagagacttcaagtccagcaacatcttgctggaaaacgatttcacacctaaagtatctgactttggattggctcgtaacgcccttgatgatgaagataacagacatatatcgacacgcgttatgggaacgtttgggtatgtggcaccggaatacgcaatgacagggcatcttttggtgaagagtgatgtgtatagttacggagttgtgcttctcgagctacttacagggcggaaaccagtggatatgtctcaaccgcccggacaagagaacttagtttcatggactcggccttttcttacgagtgcagaagggcttgcagctattatagatcagtctttaggacccgagatctcattcgatagcatagctaaagtcgcggcaatagcttctatgtgcgttcaaccagaagtatcacaccgtcctttcatgggagaagtagtgcaagctttgaaacttgtcagcaacgaatgtgatgaagctaaagaactcaattctttaacttctatctctaaagacgattttagagatgacactcaagctgagagctcttgtggtgacagctcagcaaggatggctcggtatccattgctaccaaattacgactctgagcctgatacagagagaggattatctacatcggaaatgtacacggggtcagggaggttcgagagacagtctaactcgggtcccttgacctcgggtcgaggcaagagtttctggcaaaagatgaggagattatcgaccggaagcttgagtgagcatggaacaccaacggtcatgttacgatccggttctcgctaaacaatcttttgcctacagaacactgaagagtttttgattgcccgtttaagttaagagactgaaaggaaagaaggtgccttctcctacaagcaaaactctttgcctcatggaaaccggttaagataaaaccaggagtgatcatttcccggttcaaaatttttagttgaatagatctgtttatctgagaagaagaaacaagagattctgttaaatctaatttgaatgtacatatcacgttttaaagc

SEQ ID NO: 46036 - protein, 688 aa, Arabidopsis thaliana
  peptide (1)..(688): Ceres Seq. ID no. 15168628
  misc_feature (155)..(580): Homolog of NCBI NO: 15240947 NR Description: protein kinase family [Arabidopsis thaliana]
  misc_feature (159)..(578): Homolog of NCBI NO: 15221470 NR Description: protein kinase family [Arabidopsis thaliana]
  misc_feature (271)..(640): Homolog of NCBI NO: 30679031 NR Description: protein kinase family [Arabidopsis thaliana]
  misc_feature (271)..(640): Homolog of NCBI NO: 7488203 NR Description: probable serine/threonine-specific protein kinase
  misc_feature (278)..(610): Homolog of NCBI NO: 34902828 NR Description: unnamed protein product [Oryza sativa (japonica
  misc_feature (185)..(610): Homolog of NCBI NO: 32488293 NR Description: OSJNBb0065L13.2 [Oryza sativa (japonica
  misc_feature (261)..(680): Homolog of NCBI NO: 25287641 NR Description: probable protein kinase [imported] - Arabidopsis
  misc_feature (203)..(680): Homolog of NCBI NO: 30680947 NR Description: protein kinase family [Arabidopsis thaliana]
  misc_feature (76)..(678): Homolog of NCBI NO: 34910468 NR Description: putative protein kinase [Oryza sativa (japonica
  misc_feature (2)..(688): Homolog of NCBI NO: 34903544 NR Description: putative protein kinase APK1AArabidopsis thaliana
FPLRSSSRPSKSRKFPLGPPLQAFPPPPPNSDCSSTICLEPYTNTPPGSPCGCVWPIQVELRLSMALYDFFPMVSEFAREISAGVFMKQSQVRIMGANAASEQPEKSIVLIDLVPLGDKFDNMTAMLTYQRFWSKKVYIDEPIFGGYDVIYVRYPGLPASPPTSGMTIIDQGPYSGNNNGRAVKPLGVDVPRKPRKKELNGGSIAVIVLSAAAFIGLCFVIVWFLVFRRQRDRRRLSKRTPLARPSLPSLSKPSGSARSLTGSRFSSTSLSFESSIAPFTLSAKTFTASEIMKATNNFDESRVLGEGGFGRVYEGVFDDGTKVAVKVLKRDDQQGSREFLAEVEMLSRLHHRNLVNLIGICIEDRNRSLVYELIPNGSVESHLHGIDKASSPLDWDARLKIALGAARGLAYLHEDSSPRVIHRDFKSSNILLENDFTPKVSDFGLARNALDDEDNRHISTRVMGTFGYVAPEYAMTGHLLVKSDVYSYGVVLLELLTGRKPVDMSQPPGQENLVSWTRPFLTSAEGLAAIIDQSLGPEISFDSIAKVAAIASMCVQPEVSHRPFMGEVVQALKLVSNECDEAKELNSLTSISKDDFRDDTQAESSCGDSSARMARYPLLPNYDSEPDTERGLSTSEMYTGSGRFERQSNSGPLTSGRGKSFWQKMRRLSTGSLSEHGTPTVMLRSGSR

SEQ ID NO: 46037 - protein, 624 aa, Arabidopsis thaliana
  peptide (1)..(624): Ceres Seq. ID no. 15168629
  misc_feature (91)..(516): Homolog of NCBI NO: 15240947 NR Description: protein kinase family [Arabidopsis thaliana]
  misc_feature (95)..(514): Homolog of NCBI NO: 15221470 NR Description: protein kinase family [Arabidopsis thaliana]
  misc_feature (207)..(576): Homolog of NCBI NO: 30679031 NR Description: protein kinase family [Arabidopsis thaliana]
  misc_feature (207)..(576): Homolog of NCBI NO: 7488203 NR Description: probable serine/threonine-specific protein kinase
  misc_feature (214)..(546): Homolog of NCBI NO: 34902828 NR Description: unnamed protein product [Oryza sativa (japonica
  misc_feature (121)..(546): Homolog of NCBI NO: 32488293 NR Description: OSJNBb0065L13.2 [Oryza sativa (japonica
  misc_feature (197)..(616): Homolog of NCBI NO: 25287641 NR Description: probable protein kinase [imported] - Arabidopsis
  misc_feature (139)..(616): Homolog of NCBI NO: 30680947 NR Description: protein kinase family [Arabidopsis thaliana]
  misc_feature (12)..(614): Homolog of NCBI NO: 34910468 NR Description: putative protein kinase [Oryza sativa (japonica
  misc_feature (1)..(624): Homolog of NCBI NO: 34903544 NR Description: putative protein kinase APK1AArabidopsis thaliana
MALYDFFPMVSEFAREISAGVFMKQSQVRIMGANAASEQPEKSIVLIDLVPLGDKFDNMTAMLTYQRFWSKKVYIDEPIFGGYDVIYVRYPGLPASPPTSGMTIIDQGPYSGNNNGRAVKPLGVDVPRKPRKKELNGGSIAVIVLSAAAFIGLCFVIVWFLVFRRQRDRRRLSKRTPLARPSLPSLSKPSGSARSLTGSRFSSTSLSFESSIAPFTLSAKTFTASEIMKATNNFDESRVLGEGGFGRVYEGVFDDGTKVAVKVLKRDDQQGSREFLAEVEMLSRLHHRNLVNLIGICIEDRNRSLVYELIPNGSVESHLHGIDKASSPLDWDARLKIALGAARGLAYLHEDSSPRVIHRDFKSSNILLENDFTPKVSDFGLARNALDDEDNRHISTRVMGTFGYVAPEYAMTGHLLVKSDVYSYGVVLLELLTGRKPVDMSQPPGQENLVSWTRPFLTSAEGLAAIIDQSLGPEISFDSIAKVAAIASMCVQPEVSHRPFMGEVVQALKLVSNECDEAKELNSLTSISKDDFRDDTQAESSCGDSSARMARYPLLPNYDSEPDTERGLSTSEMYTGSGRFERQSNSGPLTSGRGKSFWQKMRRLSTGSLSEHGTPTVMLRSGSR

SEQ ID NO: 46038 - protein, 616 aa, Arabidopsis thaliana
  peptide (1)..(616): Ceres Seq. ID no. 15168630
  misc_feature (83)..(508): Homolog of NCBI NO: 15240947 NR Description: protein kinase family [Arabidopsis thaliana]
  misc_feature (87)..(506): Homolog of NCBI NO: 15221470 NR Description: protein kinase family [Arabidopsis thaliana]
  misc_feature (199)..(568): Homolog of NCBI NO: 30679031 NR Description: protein kinase family [Arabidopsis thaliana]
  misc_feature (199)..(568): Homolog of NCBI NO: 7488203 NR Description: probable serine/threonine-specific protein kinase
  misc_feature (206)..(538): Homolog of NCBI NO: 34902828 NR Description: unnamed protein product [Oryza sativa (japonica
  misc_feature (113)..(538): Homolog of NCBI NO: 32488293 NR Description: OSJNBb0065L13.2 [Oryza sativa (japonica
  misc_feature (189)..(608): Homolog of NCBI NO: 25287641 NR Description: probable protein kinase [imported] - Arabidopsis
  misc_feature (131)..(608): Homolog of NCBI NO: 30680947 NR Description: protein kinase family [Arabidopsis thaliana]
  misc_feature (4)..(606): Homolog of NCBI NO: 34910468 NR Description: putative protein kinase [Oryza sativa (japonica
  misc_feature (1)..(616): Homolog of NCBI NO: 34903544 NR Description: putative protein kinase APK1AArabidopsis thaliana
MVSEFAREISAGVFMKQSQVRIMGANAASEQPEKSIVLIDLVPLGDKFDNMTAMLTYQRFWSKKVYIDEPIFGGYDVIYVRYPGLPASPPTSGMTIIDQGPYSGNNNGRAVKPLGVDVPRKPRKKELNGGSIAVIVLSAAAFIGLCFVIVWFLVFRRQRDRRRLSKRTPLARPSLPSLSKPSGSARSLTGSRFSSTSLSFESSIAPFTLSAKTFTASEIMKATNNFDESRVLGEGGFGRVYEGVFDDGTKVAVKVLKRDDQQGSREFLAEVEMLSRLHHRNLVNLIGICIEDRNRSLVYELIPNGSVESHLHGIDKASSPLDWDARLKIALGAARGLAYLHEDSSPRVIHRDFKSSNILLENDFTPKVSDFGLARNALDDEDNRHISTRVMGTFGYVAPEYAMTGHLLVKSDVYSYGVVLLELLTGRKPVDMSQPPGQENLVSWTRPFLTSAEGLAAIIDQSLGPEISFDSIAKVAAIASMCVQPEVSHRPFMGEVVQALKLVSNECDEAKELNSLTSISKDDFRDDTQAESSCGDSSARMARYPLLPNYDSEPDTERGLSTSEMYTGSGRFERQSNSGPLTSGRGKSFWQKMRRLSTGSLSEHGTPTVMLRSGSR

SEQ ID NO: 46039 - DNA, 2074 bp, Arabidopsis thaliana
  misc_feature (1)..(2074): Ceres Seq. ID no. 13591618
  misc_feature: MA Experiment ID: 20000306 Result: Up-regulated in Transcription
  misc_feature: MA Experiment 20000306 PARAMETER Experiment Name: At_Germinating_Seeds_Sub_P Parameter: Age (hr) Value: 6 vs. 0
  misc_feature: MA Experiment 20000306 PARAMETER Experiment Name: At_Germinating_Seeds_Sub_P Parameter: Organism Value: A. thaliana
  misc_feature: MA Experiment 20000306 PARAMETER Experiment Name: At_Germinating_Seeds_Sub_P Parameter: Plant Line Value: WS
  misc_feature: MA Experiment 20000306 PARAMETER Experiment Name: At_Germinating_Seeds_Sub_P Parameter: Tissue Value: Germinating Seeds
  misc_feature: MA Experiment ID: 20000307 Result: Up-regulated in Transcription
  misc_feature: MA Experiment 20000307 PARAMETER Experiment Name: At_Germinating_Seeds_Sub_P Parameter: Age (hr) Value: 24 vs. 0
  misc_feature: MA Experiment 20000307 PARAMETER Experiment Name: At_Germinating_Seeds_Sub_P Parameter: Organism Value: A. thaliana
  misc_feature: MA Experiment 20000307 PARAMETER Experiment Name: At_Germinating_Seeds_Sub_P Parameter: Plant Line Value: WS
  misc_feature: MA Experiment 20000307 PARAMETER Experiment Name: At_Germinating_Seeds_Sub_P Parameter: Tissue Value: Germinating Seeds
  misc_feature: MA Experiment ID: 20000314 Result: Up-regulated in Transcription
  misc_feature: MA Experiment 20000314 PARAMETER Experiment Name: At_14day_Shoots-Roots_Sub_P Parameter: Age (day) Value: 14
  misc_feature: MA Experiment 20000314 PARAMETER Experiment Name: At_14day_Shoots-Roots_Sub_P Parameter: Organism Value: A. thaliana
  misc_feature: MA Experiment 20000314 PARAMETER Experiment Name: At_14day_Shoots-Roots_Sub_P Parameter: Plant Line Value: WS
  misc_feature: MA Experiment 20000314 PARAMETER Experiment Name: At_14day_Shoots-Roots_Sub_P Parameter: Tissue Value: Roots vs. Whole Plant
  misc_feature: MA Experiment ID: 20000355 Result: Up-regulated in Transcription
  misc_feature: MA Experiment 20000355 PARAMETER Experiment Name: At_Siliques_Sub_P Parameter: Age (day) Value: 21
  misc_feature: MA Experiment 20000355 PARAMETER Experiment Name: At_Siliques_Sub_P Parameter: Organism Value: A. thaliana
  misc_feature: MA Experiment 20000355 PARAMETER Experiment Name: At_Siliques_Sub_P Parameter: Plant Line Value: WS
  misc_feature: MA Experiment 20000355 PARAMETER Experiment Name: At_Siliques_Sub_P Parameter: Tissue Value: Less Than 5mm Siliques vs. Whole Plant
gatttaagagctgcttgcttttatcatcatcactctctctgcgtccaaattttgatctttgttcttctcaaagcgaatatggttttcaaggtttctaccgtatccacatctcctattgatggccagaaaccaggaacttctggtcttcgtaagaaggtgaaagtgttcaagcaacccaattatctagagaattttgtccaagcaacattcaatgctcttacggcggagaaagttaaaggtgccacacttgtggtctctggtgatggtcgttattactcaaaggatgctgttcagatcataattaagatggcagcagctaatggtgtacgacgtgtgtgggttggtaaaaacactctgttatcaactcctgctgtatcagctgtgattcgtgaaagatcaggggctgatggatcgaaagcaactggagcatttatcttaacagcaagccacaatcctggtggccctactgaggattttggaatcaaatacaatatggaaaatggaggacctgctcctgaatcaatcactgataaaatttacgagaacactaagacaatcaaggagtacccaatagcacaagatctacccaatgttgatatttctgctgttggtgtaaccagttttgaaggacctgaaggaaaatttgatgttgaagtttttgatcccgcagatgactacgttaaattaatgaagtcaatcttcgattttgaagccatccggaaattgctatcatctccaaagtttacattctgctatgatgcattgcatggagttgctggagcctatgcacatcgcatctttgtcgaagaactcggtgcgcaagaaagcgcattattgaactgcactcccaaggaggactttggaggagggcatccggatcccaatttgacctatgctaaggagcttgtggcacgaatgggattaggtaaatccgacactggaggtgaacctccagagtttggcgccgctgctgatggtgatgcagaccgtaacatgatccttggtaaaaggttctttgtaactccttcggattcagttgccataattgctgcaaatgctattggtgccatcccgtacttcagctctggtttgaaaggtgttgcaaggagcatgccaacctcagctgctcttgatgtcgttgcaaaaagcttgaatttgaagttctttgaggttccaacaggctggaagttttttggtaatctgatggatgctgggatgtgttctgtttgtggagaagaaagttttggaactggctcggatcatatccgtgagaaagacggaatatgggcagttcttgcatggatgtctatacttgctcacaagaacaagggaaatattgacggtaacgctaaactggtgtcagttgaagacattgtccgccagcattgggctacctacggtcgtcactattacactcgttacgactatgagaatgtagacgcaggtaaagctaaggaactgatggagcatttggtcaaattgcaatcttcaattcctgaagttaacaagattgtgaaaggaattcgttcggacgtggcaagcgtcgccagtgctgatgaattcgagtacaaagatccagttgatggatccatttcgaagcaccagggaatccgttacttgtttgaagacggatcacgacttgttttccgtctctctggaactggctcagaaggagcaaccatccggctttacatcgaacagtacgaaaaggatgcttcaaaaaccggccgagaatcccaggaagctttgtctcctctggttgacttagctctaaagctgtcgaagatggaagagttcacaggccgatcagcccccaccgtcataacataagaagggtcaagctcaacgactcaaaccattcaccttttcgtctatatgatgttttcttcttatactatccaagttacattataagaataattagtctcagggagaatttgtatttctcatcagaattctgaacaaccaagactgatttcttgagttgttgtgaggcttatacttgtacggatttggctttctcagttttgttctctcttgtttccgtattttggcgagtatactctcttaacat

SEQ ID NO: 46040 - protein, 609 aa, Arabidopsis thaliana
  peptide (1)..(609): Ceres Seq. ID no. 13591619
  misc_feature (341)..(466): Pfam Name: Phosphoglucomutase/phosphomannomutase, Pfam Description: Phosphoglucomutase/phosphomannomutase,
  misc_feature (29)..(609): Homolog of NCBI NO: 12585308 NR Description: Phosphoglucomutase, cytoplasmic (Glucose
  misc_feature (29)..(609): Homolog of NCBI NO: 12585316 NR Description: Phosphoglucomutase, cytoplasmic (Glucose
  misc_feature (28)..(609): Homolog of NCBI NO: 12585310 NR Description: Phosphoglucomutase, cytoplasmic 2 (Glucose
  misc_feature (27)..(609): Homolog of NCBI NO: 13324798 NR Description: phosphoglucomutase [Oryza sativa]
  misc_feature (109)..(609): Homolog of NCBI NO: 26185954 NR Description: cytosolic phosphoglucomutase [Arabidopsis
  misc_feature (28)..(609): Homolog of NCBI NO: 12585296 NR Description: Phosphoglucomutase, cytoplasmic (Glucose
  misc_feature (27)..(609): Homolog of NCBI NO: 12585330 NR Description: Phosphoglucomutase, cytoplasmic (Glucose
  misc_feature (29)..(609): Homolog of NCBI NO: 15223226 NR Description: phosphoglucomutase -related [Arabidopsis
  misc_feature (27)..(609): Homolog of NCBI NO: 12643355 NR Description: Probable phosphoglucomutase, cytoplasmic 1
  misc_feature (27)..(609): Homolog of NCBI NO: 15220668 NR Description: phosphoglucomutase -related [Arabidopsis
DLRAACFYHHHSLCVQILIFVLLKANMVFKVSTVSTSPIDGQKPGTSGLRKKVKVFKQPNYLENFVQATFNALTAEKVKGATLVVSGDGRYYSKDAVQIIIKMAAANGVRRVWVGKNTLLSTPAVSAVIRERSGADGSKATGAFILTASHNPGGPTEDFGIKYNMENGGPAPESITDKIYENTKTIKEYPIAQDLPNVDISAVGVTSFEGPEGKFDVEVFDPADDYVKLMKSIFDFEAIRKLLSSPKFTFCYDALHGVAGAYAHRIFVEELGAQESALLNCTPKEDFGGGHPDPNLTYAKELVARMGLGKSDTGGEPPEFGAAADGDADRNMILGKRFFVTPSDSVAIIAANAIGAIPYFSSGLKGVARSMPTSAALDVVAKSLNLKFFEVPTGWKFFGNLMDAGMCSVCGEESFGTGSDHIREKDGIWAVLAWMSILAHKNKGNIDGNAKLVSVEDIVRQHWATYGRHYYTRYDYENVDAGKAKELMEHLVKLQSSIPEVNKIVKGIRSDVASVASADEFEYKDPVDGSISKHQGIRYLFEDGSRLVFRLSGTGSEGATIRLYIEQYEKDASKTGRESQEALSPLVDLALKLSKMEEFTGRSAPTVIT

SEQ ID NO: 46041 - protein, 583 aa, Arabidopsis thaliana
  peptide (1)..(583): Ceres Seq. ID no. 13591620
  misc_feature (315)..(440): Pfam Name: Phosphoglucomutase/phosphomannomutase, Pfam Description: Phosphoglucomutase/phosphomannomutase,
  misc_feature (3)..(583): Homolog of NCBI NO: 12585308 NR Description: Phosphoglucomutase, cytoplasmic (Glucose
  misc_feature (3)..(583): Homolog of NCBI NO: 12585316 NR Description: Phosphoglucomutase, cytoplasmic (Glucose
  misc_feature (2)..(583): Homolog of NCBI NO: 12585310 NR Description: Phosphoglucomutase, cytoplasmic 2 (Glucose
  misc_feature (1)..(583): Homolog of NCBI NO: 13324798 NR Description: phosphoglucomutase [Oryza sativa]
  misc_feature (83)..(583): Homolog of NCBI NO: 26185954 NR Description: cytosolic phosphoglucomutase [Arabidopsis
  misc_feature (2)..(583): Homolog of NCBI NO: 12585296 NR Description: Phosphoglucomutase, cytoplasmic (Glucose
  misc_feature (1)..(583): Homolog of NCBI NO: 12585330 NR Description: Phosphoglucomutase, cytoplasmic (Glucose
  misc_feature (3)..(583): Homolog of NCBI NO: 15223226 NR Description: phosphoglucomutase -related [Arabidopsis
  misc_feature (1)..(583): Homolog of NCBI NO: 12643355 NR Description: Probable phosphoglucomutase, cytoplasmic 1
  misc_feature (1)..(583): Homolog of NCBI NO: 15220668 NR Description: phosphoglucomutase -related [Arabidopsis
MVFKVSTVSTSPIDGQKPGTSGLRKKVKVFKQPNYLENFVQATFNALTAEKVKGATLVVSGDGRYYSKDAVQIIIKMAAANGVRRVWVGKNTLLSTPAVSAVIRERSGADGSKATGAFILTASHNPGGPTEDFGIKYNMENGGPAPESITDKIYENTKTIKEYPIAQDLPNVDISAVGVTSFEGPEGKFDVEVFDPADDYVKLMKSIFDFEAIRKLLSSPKFTFCYDALHGVAGAYAHRIFVEELGAQESALLNCTPKEDFGGGHPDPNLTYAKELVARMGLGKSDTGGEPPEFGAAADGDADRNMILGKRFFVTPSDSVAIIAANAIGAIPYFSSGLKGVARSMPTSAALDVVAKSLNLKFFEVPTGWKFFGNLMDAGMCSVCGEESFGTGSDHIREKDGIWAVLAWMSILAHKNKGNIDGNAKLVSVEDIVRQHWATYGRHYYTRYDYENVDAGKAKELMEHLVKLQSSIPEVNKIVKGIRSDVASVASADEFEYKDPVDGSISKHQGIRYLFEDGSRLVFRLSGTGSEGATIRLYIEQYEKDASKTGRESQEALSPLVDLALKLSKMEEFTGRSAPTVIT

SEQ ID NO: 46042 - protein, 507 aa, Arabidopsis thaliana
  peptide (1)..(507): Ceres Seq. ID no. 13591621
  misc_feature (239)..(364): Pfam Name: Phosphoglucomutase/phosphomannomutase, Pfam Description: Phosphoglucomutase/phosphomannomutase,
  misc_feature (1)..(507): Homolog of NCBI NO: 12585308 NR Description: Phosphoglucomutase, cytoplasmic (Glucose
  misc_feature (1)..(507): Homolog of NCBI NO: 12585316 NR Description: Phosphoglucomutase, cytoplasmic (Glucose
  misc_feature (1)..(507): Homolog of NCBI NO: 12585310 NR Description: Phosphoglucomutase, cytoplasmic 2 (Glucose
  misc_feature (1)..(507): Homolog of NCBI NO: 13324798 NR Description: phosphoglucomutase [Oryza sativa]
  misc_feature (7)..(507): Homolog of NCBI NO: 26185954 NR Description: cytosolic phosphoglucomutase [Arabidopsis
  misc_feature (1)..(507): Homolog of NCBI NO: 12585296 NR Description: Phosphoglucomutase, cytoplasmic (Glucose
  misc_feature (1)..(507): Homolog of NCBI NO: 12585330 NR Description: Phosphoglucomutase, cytoplasmic (Glucose
  misc_feature (1)..(507): Homolog of NCBI NO: 15223226 NR Description: phosphoglucomutase -related [Arabidopsis
  misc_feature (1)..(507): Homolog of NCBI NO: 12643355 NR Description: Probable phosphoglucomutase, cytoplasmic 1
  misc_feature (1)..(507): Homolog of NCBI NO: 15220668 NR Description: phosphoglucomutase -related [Arabidopsis
MAAANGVRRVWVGKNTLLSTPAVSAVIRERSGADGSKATGAFILTASHNPGGPTEDFGIKYNMENGGPAPESITDKIYENTKTIKEYPIAQDLPNVDISAVGVTSFEGPEGKFDVEVFDPADDYVKLMKSIFDFEAIRKLLSSPKFTFCYDALHGVAGAYAHRIFVEELGAQESALLNCTPKEDFGGGHPDPNLTYAKELVARMGLGKSDTGGEPPEFGAAADGDADRNMILGKRFFVTPSDSVAIIAANAIGAIPYFSSGLKGVARSMPTSAALDVVAKSLNLKFFEVPTGWKFFGNLMDAGMCSVCGEESFGTGSDHIREKDGIWAVLAWMSILAHKNKGNIDGNAKLVSVEDIVRQHWATYGRHYYTRYDYENVDAGKAKELMEHLVKLQSSIPEVNKIVKGIRSDVASVASADEFEYKDPVDGSISKHQGIRYLFEDGSRLVFRLSGTGSEGATIRLYIEQYEKDASKTGRESQEALSPLVDLALKLSKMEEFTGRSAPTVIT

SEQ ID NO: 46043 - DNA, 1776 bp, Arabidopsis thaliana; identical to SEQ ID NO: 43830
  misc_feature (1)..(1776): Ceres Seq. ID no. 13576533
  misc_feature: MA Experiment ID: 20000184 Result: Down-regulated in Transcription
  misc_feature: MA Experiment 20000184 PARAMETER Experiment Name: At_Shoots__P Parameter: Age (day) Value: 7
  misc_feature: MA Experiment 20000184 PARAMETER Experiment Name: At_Shoots__P Parameter: Tissue Value: Shoots vs. Whole Plant
  misc_feature: MA Experiment ID: 20000495 Result: Up-regulated in Transcription
  misc_feature: MA Experiment 20000495 PARAMETER Experiment Name: At_Guard_Cells_P Parameter: Harvest Date Value: 8/2/2002
  misc_feature: MA Experiment 20000495 PARAMETER Experiment Name: At_Guard_Cells_P Parameter: Organism Value: A. thaliana
  misc_feature: MA Experiment 20000495 PARAMETER Experiment Name: At_Guard_Cells_P Parameter: Tissue Value: Guard Cells vs. Leaves
  misc_feature: MA Experiment ID: 20001451 Result: Up-regulated in Transcription
  misc_feature: MA Experiment 20001451 PARAMETER Experiment Name: At_Far-red-induction_P Parameter: Age (day) Value: 7
  misc_feature: MA Experiment 20001451 PARAMETER Experiment Name: At_Far-red-induction_P Parameter: Light Value: Far-red vs. White
  misc_feature: MA Experiment 20001451 PARAMETER Experiment Name: At_Far-red-induction_P Parameter: Organism Value: A. thaliana
  misc_feature: MA Experiment 20001451 PARAMETER Experiment Name: At_Far-red-induction_P Parameter: Plant Line Value: Columbia
  misc_feature: MA Experiment 20001451 PARAMETER Experiment Name: At_Far-red-induction_P Parameter: Timepoint (hr) Value: 24
  misc_feature: MA Experiment 20001451 PARAMETER Experiment Name: At_Far-red-induction_P Parameter: Tissue Value: Whole Plant

SEQ ID NO: 46044 - protein, 485 aa, Arabidopsis thaliana; identical to SEQ ID NO: 43831
  peptide (1)..(485): Ceres Seq. ID no. 13576534
  misc_feature (60)..(383): Pfam Name: Plant protein of unknown function (DUF827) Pfam Description: Plant protein of unknown function (DUF827)
  misc_feature (60)..(383): Pfam Name: Plant protein of unknown function (DUF827) Pfam Description: Plant protein of unknown function (DUF827)
  misc_feature (104)..(431): Homolog of NCBI NO: 15234171 NR Description: hypothetical protein [Arabidopsis thaliana]
  misc_feature (210)..(485): Homolog of NCBI NO: 21618181 NR Description: unknown [Arabidopsis thaliana]
  misc_feature (210)..(485): Homolog of NCBI NO: 15230567 NR Description: expressed protein [Arabidopsis thaliana]
  misc_feature (79)..(419): Homolog of NCBI NO: 14029007 NR Description: Putative myosin heavy chain-like [Oryza sativa]
  misc_feature (154)..(428): Homolog of NCBI NO: 15225334 NR Description: expressed protein [Arabidopsis thaliana]
  misc_feature (104)..(431): Homolog of NCBI NO: 15234171 NR Description: hypothetical protein [Arabidopsis thaliana]
  misc_feature (210)..(485): Homolog of NCBI NO: 15230567 NR Description: expressed protein [Arabidopsis thaliana]
  misc_feature (154)..(428): Homolog of NCBI NO: 15225334 NR Description: expressed protein [Arabidopsis thaliana]
  misc_feature (21)..(485): Homolog of NCBI NO: 15224495 NR Description: expressed protein [Arabidopsis thaliana]
  misc_feature (138)..(480): Homolog of NCBI NO: 33146426 NR Description: myosin heavy chain-like [Oryza sativa (japonica
  misc_feature (54)..(485): Homolog of NCBI NO: 15226689 NR Description: hypothetical protein [Arabidopsis thaliana]
  misc_feature (56)..(287): Homolog of NCBI NO: 15230567 NR Description: expressed protein [Arabidopsis thaliana]
  misc_feature (56)..(287): Homolog of NCBI NO: 21618181 NR Description: unknown [Arabidopsis thaliana]
  misc_feature (79)..(419): Homolog of NCBI NO: 14029007 NR Description: Putative myosin heavy chain-like [Oryza sativa]
  misc_feature (210)..(485): Homolog of NCBI NO: 21618181 NR Description: unknown [Arabidopsis thaliana]
  misc_feature (56)..(287): Homolog of NCBI NO: 21618181 NR Description: unknown [Arabidopsis thaliana]
  misc_feature (56)..(287): Homolog of NCBI NO: 15230567 NR Description: expressed protein [Arabidopsis thaliana]
  misc_feature (54)..(485): Homolog of NCBI NO: 15226689 NR Description: hypothetical protein [Arabidopsis thaliana]
  misc_feature (138)..(480): Homolog of NCBI NO: 33146426 NR Description: myosin heavy chain-like [Oryza sativa (japonica
  misc_feature (21)..(485): Homolog of NCBI NO: 15224495 NR Description: expressed protein [Arabidopsis thaliana]

SEQ ID NO: 46045 - protein, 454 aa, Arabidopsis thaliana; identical to SEQ ID NO: 43832
  peptide (1)..(454): Ceres Seq. ID no. 13576535
  misc_feature (29)..(352): Pfam Name: Plant protein of unknown function (DUF827) Pfam Description: Plant protein of unknown function (DUF827)
  misc_feature (29)..(352): Pfam Name: Plant protein of unknown function (DUF827) Pfam Description: Plant protein of unknown function (DUF827)
  misc_feature (73)..(400): Homolog of NCBI NO: 15234171 NR Description: hypothetical protein [Arabidopsis thaliana]
  misc_feature (179)..(454): Homolog of NCBI NO: 21618181 NR Description: unknown [Arabidopsis thaliana]
  misc_feature (179)..(454): Homolog of NCBI NO: 15230567 NR Description: expressed protein [Arabidopsis thaliana]
  misc_feature (48)..(388): Homolog of NCBI NO: 14029007 NR Description: Putative myosin heavy chain-like [Oryza sativa]
  misc_feature (123)..(397): Homolog of NCBI NO: 15225334 NR Description: expressed protein [Arabidopsis thaliana]
  misc_feature (73)..(400): Homolog of NCBI NO: 15234171 NR Description: hypothetical protein [Arabidopsis thaliana]
  misc_feature (179)..(454): Homolog of NCBI NO: 15230567 NR Description: expressed protein [Arabidopsis thaliana]
  misc_feature (123)..(397): Homolog of NCBI NO: 15225334 NR Description: expressed protein [Arabidopsis thaliana]
  misc_feature (1)..(454): Homolog of NCBI NO: 15224495 NR Description: expressed protein [Arabidopsis thaliana]
  misc_feature (107)..(449): Homolog of NCBI NO: 33146426 NR Description: myosin heavy chain-like [Oryza sativa (japonica
  misc_feature (23)..(454): Homolog of NCBI NO: 15226689 NR Description: hypothetical protein [Arabidopsis thaliana]
  misc_feature (25)..(256): Homolog of NCBI NO: 15230567 NR Description: expressed protein [Arabidopsis thaliana]
  misc_feature (25)..(256): Homolog of NCBI NO: 21618181 NR Description: unknown [Arabidopsis thaliana]
  misc_feature (48)..(388): Homolog of NCBI NO: 14029007 NR Description: Putative myosin heavy chain-like [Oryza sativa]
  misc_feature (179)..(454): Homolog of NCBI NO: 21618181 NR Description: unknown [Arabidopsis thaliana]
  misc_feature (25)..(256): Homolog of NCBI NO: 21618181 NR Description: unknown [Arabidopsis thaliana]
  misc_feature (25)..(256): Homolog of NCBI NO: 15230567 NR Description: expressed protein [Arabidopsis thaliana]
  misc_feature (23)..(454): Homolog of NCBI NO: 15226689 NR Description: hypothetical protein [Arabidopsis thaliana]
  misc_feature (107)..(449): Homolog of NCBI NO: 33146426 NR Description: myosin heavy chain-like [Oryza sativa (japonica
  misc_feature (1)..(454): Homolog of NCBI NO: 15224495 NR Description: expressed protein [Arabidopsis thaliana]

SEQ ID NO: 46046 - protein, 386 aa, Arabidopsis thaliana; identical to SEQ ID NO: 43833
  peptide (1)..(386): Ceres Seq. ID no. 13576536
  misc_feature (1)..(284): Pfam Name: Plant protein of unknown function (DUF827) Pfam Description: Plant protein of unknown function (DUF827)
  misc_feature (1)..(284): Pfam Name: Plant protein of unknown function (DUF827) Pfam Description: Plant protein of unknown function (DUF827)
  misc_feature (5)..(332): Homolog of NCBI NO: 15234171 NR Description: hypothetical protein [Arabidopsis thaliana]
  misc_feature (111)..(386): Homolog of NCBI NO: 21618181 NR Description: unknown [Arabidopsis thaliana]
  misc_feature (111)..(386): Homolog of NCBI NO: 15230567 NR Description: expressed protein [Arabidopsis thaliana]
  misc_feature (1)..(320): Homolog of NCBI NO: 14029007 NR Description: Putative myosin heavy chain-like [Oryza sativa]
  misc_feature (55)..(329): Homolog of NCBI NO: 15225334 NR Description: expressed protein [Arabidopsis thaliana]
  misc_feature (5)..(332): Homolog of NCBI NO: 15234171 NR Description: hypothetical protein [Arabidopsis thaliana]
  misc_feature (111)..(386): Homolog of NCBI NO: 15230567 NR Description: expressed protein [Arabidopsis thaliana]
  misc_feature (55)..(329): Homolog of NCBI NO: 15225334 NR Description: expressed protein [Arabidopsis thaliana]
  misc_feature (1)..(386): Homolog of NCBI NO: 15224495 NR Description: expressed protein [Arabidopsis thaliana]
  misc_feature (39)..(381): Homolog of NCBI NO: 33146426 NR Description: myosin heavy chain-like [Oryza sativa (japonica
  misc_feature (1)..(386): Homolog of NCBI NO: 15226689 NR Description: hypothetical protein [Arabidopsis thaliana]
  misc_feature (1)..(188): Homolog of NCBI NO: 15230567 NR Description: expressed protein [Arabidopsis thaliana]
  misc_feature (1)..(188): Homolog of NCBI NO: 21618181 NR Description: unknown [Arabidopsis thaliana]
  misc_feature (1)..(320): Homolog of NCBI NO: 14029007 NR Description: Putative myosin heavy chain-like [Oryza sativa]
  misc_feature (111)..(386): Homolog of NCBI NO: 21618181 NR Description: unknown [Arabidopsis thaliana]
  misc_feature (1)..(188): Homolog of NCBI NO: 21618181 NR Description: unknown [Arabidopsis thaliana]
  misc_feature (1)..(188): Homolog of NCBI NO: 15230567 NR Description: expressed protein [Arabidopsis thaliana]
  misc_feature (1)..(386): Homolog of NCBI NO: 15226689 NR Description: hypothetical protein [Arabidopsis thaliana]
  misc_feature (39)..(381): Homolog of NCBI NO: 33146426 NR Description: myosin heavy chain-like [Oryza sativa (japonica
  misc_feature (1)..(386): Homolog of NCBI NO: 15224495 NR Description: expressed protein [Arabidopsis thaliana]

SEQ ID NO: 46047 - DNA, 1640 bp, Arabidopsis thaliana
  misc_feature (1)..(1640): Ceres Seq. ID no. 13575775
  misc_feature: MA Experiment ID: 20000171 Result: Down-regulated in Transcription
  misc_feature: MA Experiment 20000171 PARAMETER Experiment Name: At_42deg_Heat_P Parameter: Age (day) Value: 14
  misc_feature: MA Experiment 20000171 PARAMETER Experiment Name: At_42deg_Heat_P Parameter: Organism Value: A. thaliana
  misc_feature: MA Experiment 20000171 PARAMETER Experiment Name: At_42deg_Heat_P Parameter: Plant Line Value: WS
  misc_feature: MA Experiment 20000171 PARAMETER Experiment Name: At_42deg_Heat_P Parameter: Temperature (deg C) Value: 42 vs. 22
  misc_feature: MA Experiment 20000171 PARAMETER Experiment Name: At_42deg_Heat_P Parameter: Timepoint (hr) Value: 1
  misc_feature: MA Experiment 20000171 PARAMETER Experiment Name: At_42deg_Heat_P Parameter: Tissue Value: Aerial
  misc_feature: MA Experiment ID: 20000173 Result: Down-regulated in Transcription
  misc_feature: MA Experiment 20000173 PARAMETER Experiment Name: At_42deg_Heat_P Parameter: Age (day) Value: 14
  misc_feature: MA Experiment 20000173 PARAMETER Experiment Name: At_42deg_Heat_P Parameter: Organism Value: A. thaliana
  misc_feature: MA Experiment 20000173 PARAMETER Experiment Name: At_42deg_Heat_P Parameter: Plant Line Value: WS
  misc_feature: MA Experiment 20000173 PARAMETER Experiment Name: At_42deg_Heat_P Parameter: Temperature (deg C) Value: 42 vs. 22
  misc_feature: MA Experiment 20000173 PARAMETER Experiment Name: At_42deg_Heat_P Parameter: Timepoint (hr) Value: 6
  misc_feature: MA Experiment 20000173 PARAMETER Experiment Name: At_42deg_Heat_P Parameter: Tissue Value: Aerial
  misc_feature: MA Experiment ID: 20000180 Result: Up-regulated in Transcription
  misc_feature: MA Experiment 20000180 PARAMETER Experiment Name: At_Germinating_Seeds_P Parameter: Age (hr) Value: 24 vs. 0
  misc_feature: MA Experiment 20000180 PARAMETER Experiment Name: At_Germinating_Seeds_P Parameter: Tissue Value: Germinating Seeds
  misc_feature: MA Experiment ID: 20000182 Result: Down-regulated in Transcription
  misc_feature: MA Experiment 20000182 PARAMETER Experiment Name: At_2mM_SA_P Parameter: Age (day) Value: 14
  misc_feature: MA Experiment 20000182 PARAMETER Experiment Name: At_2mM_SA_P Parameter: Organism Value: A. thaliana
  misc_feature: MA Experiment 20000182 PARAMETER Experiment Name: At_2mM_SA_P Parameter: Plant Line Value: WS
  misc_feature: MA Experiment 20000182 PARAMETER Experiment Name: At_2mM_SA_P Parameter: Timepoint (hr) Value: 6
  misc_feature: MA Experiment 20000182 PARAMETER Experiment Name: At_2mM_SA_P Parameter: Tissue Value: Aerial
  misc_feature: MA Experiment 20000182 PARAMETER Experiment Name: At_2mM_SA_P Parameter: Treatment Value: 2mM SA vs. No Treatment
  misc_feature: MA Experiment ID: 20000213 Result: Up-regulated in Transcription
  misc_feature: MA Experiment 20000213 PARAMETER Experiment Name: At_4deg_Cold_P Parameter: Timepoint (hr) Value: 2
  misc_feature: MA Experiment ID: 20000234 Result: Down-regulated in Transcription
  misc_feature: MA Experiment 20000234 PARAMETER Experiment Name: At_Siliques_P Parameter: Age (day) Value: 21
  misc_feature: MA Experiment 20000234 PARAMETER Experiment Name: At_Siliques_P Parameter: Organism Value: A. thaliana
  misc_feature: MA Experiment 20000234 PARAMETER Experiment Name: At_Siliques_P Parameter: Plant Line Value: WS
  misc_feature: MA Experiment 20000234 PARAMETER Experiment Name: At_Siliques_P Parameter: Tissue Value: Less Than 5mm Siliques vs. Whole Plant
  misc_feature: MA Experiment ID: 20000235 Result: Down-regulated in Transcription
  misc_feature: MA Experiment 20000235 PARAMETER Experiment Name: At_Siliques_P Parameter: Age (day) Value: 21
  misc_feature: MA Experiment 20000235 PARAMETER Experiment Name: At_Siliques_P Parameter: Organism Value: A. thaliana
  misc_feature: MA Experiment 20000235 PARAMETER Experiment Name: At_Siliques_P Parameter: Plant Line Value: WS
  misc_feature: MA Experiment 20000235 PARAMETER Experiment Name: At_Siliques_P Parameter: Tissue Value: 5-10mm Siliques vs. Whole Plant
  misc_feature: MA Experiment ID: 20000265 Result: Down-regulated in Transcription
  misc_feature: MA Experiment 20000265 PARAMETER Experiment Name: At_Open_Flower_P Parameter: Age (day) Value: 21
  misc_feature: MA Experiment 20000265 PARAMETER Experiment Name: At_Open_Flower_P Parameter: Plant Line Value: WS
  misc_feature: MA Experiment 20000265 PARAMETER Experiment Name: At_Open_Flower_P Parameter: Tissue Value: Closed Flower vs. Whole Plant
  misc_feature: MA Experiment ID: 20000794 Result: Up-regulated in Transcription
  misc_feature: MA Experiment 20000794 PARAMETER Experiment Name: At_Petals_P Parameter: Age (day) Value: 23-25 days
  misc_feature: MA Experiment 20000794 PARAMETER Experiment Name: At_Petals_P Parameter: Plant Line Value: WS
  misc_feature: MA Experiment 20000794 PARAMETER Experiment Name: At_Petals_P Parameter: Tissue Value: Petals vs. Whole plant
  misc_feature: MA Experiment ID: 20001451 Result: Down-regulated in Transcription
  misc_feature: MA Experiment 20001451 PARAMETER Experiment Name: At_Far-red-induction_P Parameter: Age (day) Value: 7
  misc_feature: MA Experiment 20001451 PARAMETER Experiment Name: At_Far-red-induction_P Parameter: Light Value: Far-red vs. White
  misc_feature: MA Experiment 20001451 PARAMETER Experiment Name: At_Far-red-induction_P Parameter: Organism Value: A. thaliana
  misc_feature: MA Experiment 20001451 PARAMETER Experiment Name: At_Far-red-induction_P Parameter: Plant Line Value: Columbia
  misc_feature: MA Experiment 20001451 PARAMETER Experiment Name: At_Far-red-induction_P Parameter: Timepoint (hr) Value: 24
  misc_feature: MA Experiment 20001451 PARAMETER Experiment Name: At_Far-red-induction_P Parameter: Tissue Value: Whole Plant
  misc_feature: MA Experiment ID: 20001555 Result: Down-regulated in Transcription
  misc_feature: MA Experiment 20001555 PARAMETER Experiment Name: At_Drought_Soil_Dry_P Parameter: Age (day) Value: 24
  misc_feature: MA Experiment 20001555 PARAMETER Experiment Name: At_Drought_Soil_Dry_P Parameter: Organism Value: A. thaliana
  misc_feature: MA Experiment 20001555 PARAMETER Experiment Name: At_Drought_Soil_Dry_P Parameter: Plant Line Value: WS
  misc_feature: MA Experiment 20001555 PARAMETER Experiment Name: At_Drought_Soil_Dry_P Parameter: Post Timepoint (hr) Value: None
  misc_feature: MA Experiment 20001555 PARAMETER Experiment Name: At_Drought_Soil_Dry_P Parameter: Post-Treatment Value: None
  misc_feature: MA Experiment 20001555 PARAMETER Experiment Name: At_Drought_Soil_Dry_P Parameter: Timepoint (day) Value: 10
  misc_feature: MA Experiment 20001555 PARAMETER Experiment Name: At_Drought_Soil_Dry_P Parameter: Treatment Value: Drought vs. No Drought
  misc_feature: MA Experiment ID: 20001556 Result: Down-regulated in Transcription
  misc_feature: MA Experiment 20001556 PARAMETER Experiment Name: At_Drought_Soil_Dry_P Parameter: Age (day) Value: 26
  misc_feature: MA Experiment 20001556 PARAMETER Experiment Name: At_Drought_Soil_Dry_P Parameter: Organism Value: A. thaliana
  misc_feature: MA Experiment 20001556 PARAMETER Experiment Name: At_Drought_Soil_Dry_P Parameter: Plant Line Value: WS
  misc_feature: MA Experiment 20001556 PARAMETER Experiment Name: At_Drought_Soil_Dry_P Parameter: Post Timepoint (hr) Value: None
  misc_feature: MA Experiment 20001556 PARAMETER Experiment Name: At_Drought_Soil_Dry_P Parameter: Post-Treatment Value: None
  misc_feature: MA Experiment 20001556 PARAMETER Experiment Name: At_Drought_Soil_Dry_P Parameter: Timepoint (day) Value: 12
  misc_feature: MA Experiment 20001556 PARAMETER Experiment Name: At_Drought_Soil_Dry_P Parameter: Treatment Value: Drought vs. No Drought
  misc_feature: MA Experiment ID: 20001557 Result: Up-regulated in Transcription
  misc_feature: MA Experiment 20001557 PARAMETER Experiment Name: At_Drought_Soil_Dry_P Parameter: Age (day) Value: 27
  misc_feature: MA Experiment 20001557 PARAMETER Experiment Name: At_Drought_Soil_Dry_P Parameter: Organism Value: A. thaliana
  misc_feature: MA Experiment 20001557 PARAMETER Experiment Name: At_Drought_Soil_Dry_P Parameter: Plant Line Value: WS
  misc_feature: MA Experiment 20001557 PARAMETER Experiment Name: At_Drought_Soil_Dry_P Parameter: Post Timepoint (hr) Value: 3
  misc_feature: MA Experiment 20001557 PARAMETER Experiment Name: At_Drought_Soil_Dry_P Parameter: Post-Treatment Value: Re-Water vs. No Drought
  misc_feature: MA Experiment 20001557 PARAMETER Experiment Name: At_Drought_Soil_Dry_P Parameter: Timepoint (day) Value: 13
  misc_feature: MA Experiment 20001557 PARAMETER Experiment Name: At_Drought_Soil_Dry_P Parameter: Treatment Value: Drought vs. No Drought
  misc_feature: MA Experiment ID: 20001904 Result: Down-regulated in Transcription
  misc_feature: MA Experiment 20001904 PARAMETER Experiment Name: At_Drought_Reproduction_P Parameter: Age (day) Value: 37
  misc_feature: MA Experiment 20001904 PARAMETER Experiment Name: At_Drought_Reproduction_P Parameter: Organism Value: A. thaliana
  misc_feature: MA Experiment 20001904 PARAMETER Experiment Name: At_Drought_Reproduction_P Parameter: Plant Line Value: WS
  misc_feature: MA Experiment 20001904 PARAMETER Experiment Name: At_Drought_Reproduction_P Parameter: Timepoint (day) Value: 7
  misc_feature: MA Experiment 20001904 PARAMETER Experiment Name: At_Drought_Reproduction_P Parameter: Tissue Value: Rosettes
  misc_feature: MA Experiment 20001904 PARAMETER Experiment Name: At_Drought_Reproduction_P Parameter: Treatment Value: Drought vs. No Drought
  misc_feature: MA Experiment ID: 20001905 Result: Down-regulated in Transcription
  misc_feature: MA Experiment 20001905 PARAMETER Experiment Name: At_Drought_Reproduction_P Parameter: Age (day) Value: 40
  misc_feature: MA Experiment 20001905 PARAMETER Experiment Name: At_Drought_Reproduction_P Parameter: Organism Value: A. thaliana
  misc_feature: MA Experiment 20001905 PARAMETER Experiment Name: At_Drought_Reproduction_P Parameter: Plant Line Value: WS
  misc_feature: MA Experiment 20001905 PARAMETER Experiment Name: At_Drought_Reproduction_P Parameter: Timepoint (day) Value: 10
  misc_feature: MA Experiment 20001905 PARAMETER Experiment Name: At_Drought_Reproduction_P Parameter: Tissue Value: Rosettes
  misc_feature: MA Experiment 20001905 PARAMETER Experiment Name: At_Drought_Reproduction_P Parameter: Treatment Value: Drought vs. No Drought
  misc_feature: MA Experiment ID: 20001911 Result: Down-regulated in Transcription
  misc_feature: MA Experiment 20001911 PARAMETER Experiment Name: At_Drought_Reproduction_P Parameter: Age (day) Value: 40
  misc_feature: MA Experiment 20001911 PARAMETER Experiment Name: At_Drought_Reproduction_P Parameter: Organism Value: A. thaliana
  misc_feature: MA Experiment 20001911 PARAMETER Experiment Name: At_Drought_Reproduction_P Parameter: Plant Line Value: WS
  misc_feature: MA Experiment 20001911 PARAMETER Experiment Name: At_Drought_Reproduction_P Parameter: Timepoint (day) Value: 10
  misc_feature: MA Experiment 20001911 PARAMETER Experiment Name: At_Drought_Reproduction_P Parameter: Tissue Value: Flowers
  misc_feature: MA Experiment 20001911 PARAMETER Experiment Name: At_Drought_Reproduction_P Parameter: Treatment Value: Drought vs. No Drought
atgggttcatttgcttcttcttgcacgttatagttttcctaattgggtaagctccaaggtagcttcttcaatattaatttcatttttttcattttctgtagccatatgtttattttcccgagaaatattatccacacccagatctttaaatctcttttaactctgagtctctgatacttaaataccactcatgctgcttattagctccaccaaatctggaaaaccaatagattctttttatttcttctgcaaaaatctcagagctaccctaaaaattctctctttttgactcacttaccagatctccactagattttactcaattctttttcaaaaggtttaaacttttatagattccttgaagtgggtctaagcaatgcttcagagaaattccgatgatttcttctctaaccaaaataaaaatgaagtatcatttgatagtgatttttgtgttcttcttttgattctcttatctcttccttcccatcaataaacccaaaaaaattaatatcatttttgggatcttattgatcccaaaattcgtaaatccgttgacctttgtcggcatgatttgttcttacttaccgtaaaaaaaacagagctaggttttagttttcggacatggaggttatgagaccgtcgacgtcacacgtgtcaggtgggaactggctcatggaggaaactaagagcggcgtcgcagcttctggtgaaggtgccacgtggacggcggcagagaacaaggcattcgagaatgctttggcggtttacgacgacaacactcctgatcggtggcagaaggtggctgcggtgattccggggaagacagtgagtgacgtaattagacagtataacgatttggaagctgatgtcagcagcatcgaggccggtttaatcccggtccccggttacatcacctcgccgcctttcactctagattgggccggcggcggtggcggatgtaacgggtttaaaccgggtcatcaggtttgtaataaacggtcgcaggccggtagatcgccggagctggagcggaagaaaggcgttccttggacggaggaagaacacaagctatttctaatgggtttgaagaaatatgggaaaggagattggagaaacatatctcggaactttgtgataacgcgaacgccaacacaagtagctagccacgcccaaaagtacttcatccggcaactttccggcggcaaggacaagagacgagcaagcattcacgacataaccaccgtaaatctcgaagaggaggcttctttggagaccaataagagctccattgttgttggagatcagcgttcaaggctaaccgcgtttccttggaaccaaacggacaacaatggaacacaggcagacgctttcaatataacgattggaaacgctattagtggcgttcattcatacggccaggttatgattggagggtataacaatgcagattcttgctatgacgcccaaaacacaatgtttcaactatagctaatgaagatccatctctctaattaaaaagtgtaagttaaattcttaatttttcatatggacgaaacaatcatatttggcaattgtataataaacgtccattgttttaattccaaattgaaatagttaataaaagtctcttgacagtgcct

SEQ ID NO: 46048 - protein, 288 aa, Arabidopsis thaliana
  peptide (1)..(288): Ceres Seq. ID no. 13575776
  misc_feature (140)..(187): Pfam Name: Myb-like DNA-binding domain Pfam Description: Myb-like DNA-binding domain
  misc_feature (1)..(210): Homolog of NCBI NO: 15229712 NR Description: MYB-family transcription factor -related
  misc_feature (1)..(272): Homolog of NCBI NO: 15239231 NR Description: hypothetical protein [Arabidopsis thaliana]
  misc_feature (1)..(265): Homolog of NCBI NO: 34895714 NR Description: putative myb-related transcription activator
  misc_feature (31)..(269): Homolog of NCBI NO: 34908386 NR Description: P0529E05.19 [Oryza sativa (japonica
  misc_feature (4)..(212): Homolog of NCBI NO: 7446171 NR Description: probable MYB family transcription factor
  misc_feature (1)..(212): Homolog of NCBI NO: 30687381 NR Description: MYB family transcription factor -related
  misc_feature (1)..(222): Homolog of NCBI NO: 12005328 NR Description: unknown [Hevea brasiliensis]
  misc_feature (1)..(288): Homolog of NCBI NO: 18874265 NR Description: MYB-like transcription factor DVL1 [Antirrhinum
  misc_feature (1)..(270): Homolog of NCBI NO: 18874263 NR Description: MYB-like transcription factor DIVARICATA
  misc_feature (1)..(288): Homolog of NCBI NO: 15237776 NR Description: I-box binding factor - like protein [Arabidopsis
MEVMRPSTSHVSGGNWLMEETKSGVAASGEGATWTAAENKAFENALAVYDDNTPDRWQKVAAVIPGKTVSDVIRQYNDLEADVSSIEAGLIPVPGYITSPPFTLDWAGGGGGCNGFKPGHQVCNKRSQAGRSPELERKKGVPWTEEEHKLFLMGLKKYGKGDWRNISRNFVITRTPTQVASHAQKYFIRQLSGGKDKRRASIHDITTVNLEEEASLETNKSSIVVGDQRSRLTAFPWNQTDNNGTQADAFNITIGNAISGVHSYGQVMIGGYNNADSCYDAQNTMFQL

SEQ ID NO: 46049 - protein, 285 aa, Arabidopsis thaliana
  peptide (1)..(285): Ceres Seq. ID no. 13575777
  misc_feature (137)..(184): Pfam Name: Myb-like DNA-binding domain Pfam Description: Myb-like DNA-binding domain
  misc_feature (1)..(207): Homolog of NCBI NO: 15229712 NR Description: MYB-family transcription factor -related
  misc_feature (1)..(269): Homolog of NCBI NO: 15239231 NR Description: hypothetical protein [Arabidopsis thaliana]
  misc_feature (1)..(262): Homolog of NCBI NO: 34895714 NR Description: putative myb-related transcription activator
  misc_feature (28)..(266): Homolog of NCBI NO: 34908386 NR Description: P0529E05.19 [Oryza sativa (japonica
  misc_feature (1)..(209): Homolog of NCBI NO: 7446171 NR Description: probable MYB family transcription factor
  misc_feature (1)..(209): Homolog of NCBI NO: 30687381 NR Description: MYB family transcription factor -related
  misc_feature (1)..(219): Homolog of NCBI NO: 12005328 NR Description: unknown [Hevea brasiliensis]
  misc_feature (1)..(285): Homolog of NCBI NO: 18874265 NR Description: MYB-like transcription factor DVL1 [Antirrhinum
  misc_feature (1)..(267): Homolog of NCBI NO: 18874263 NR Description: MYB-like transcription factor DIVARICATA
  misc_feature (1)..(285): Homolog of NCBI NO: 15237776 NR Description: I-box binding factor - like protein [Arabidopsis
MRPSTSHVSGGNWLMEETKSGVAASGEGATWTAAENKAFENALAVYDDNTPDRWQKVAAVIPGKTVSDVIRQYNDLEADVSSIEAGLIPVPGYITSPPFTLDWAGGGGGCNGFKPGHQVCNKRSQAGRSPELERKKGVPWTEEEHKLFLMGLKKYGKGDWRNISRNFVITRTPTQVASHAQKYFIRQLSGGKDKRRASIHDITTVNLEEEASLETNKSSIVVGDQRSRLTAFPWNQTDNNGTQADAFNITIGNAISGVHSYGQVMIGGYNNADSCYDAQNTMFQL

SEQ ID NO: 46050 - protein, 271 aa, Arabidopsis thaliana
  peptide (1)..(271): Ceres Seq. ID no. 13575778
  misc_feature (123)..(170): Pfam Name: Myb-like DNA-binding domain Pfam Description: Myb-like DNA-binding domain
  misc_feature (1)..(193): Homolog of NCBI NO: 15229712 NR Description: MYB-family transcription factor -related
  misc_feature (1)..(255): Homolog of NCBI NO: 15239231 NR Description: hypothetical protein [Arabidopsis thaliana]
  misc_feature (1)..(248): Homolog of NCBI NO: 34895714 NR Description: putative myb-related transcription activator
  misc_feature (14)..(252): Homolog of NCBI NO: 34908386 NR Description: P0529E05.19 [Oryza sativa (japonica
  misc_feature (1)..(195): Homolog of NCBI NO: 7446171 NR Description: probable MYB family transcription factor
  misc_feature (1)..(195): Homolog of NCBI NO: 30687381 NR Description: MYB family transcription factor -related
  misc_feature (1)..(205): Homolog of NCBI NO: 12005328 NR Description: unknown [Hevea brasiliensis]
  misc_feature (1)..(271): Homolog of NCBI NO: 18874265 NR Description: MYB-like transcription factor DVL1 [Antirrhinum
  misc_feature (1)..(253): Homolog of NCBI NO: 18874263 NR Description: MYB-like transcription factor DIVARICATA
  misc_feature (1)..(271): Homolog of NCBI NO: 15237776 NR Description: I-box binding factor - like protein [Arabidopsis
MEETKSGVAASGEGATWTAAENKAFENALAVYDDNTPDRWQKVAAVIPGKTVSDVIRQYNDLEADVSSIEAGLIPVPGYITSPPFTLDWAGGGGGCNGFKPGHQVCNKRSQAGRSPELERKKGVPWTEEEHKLFLMGLKKYGKGDWRNISRNFVITRTPTQVASHAQKYFIRQLSGGKDKRRASIHDITTVNLEEEASLETNKSSIVVGDQRSRLTAFPWNQTDNNGTQADAFNITIGNAISGVHSYGQVMIGGYNNADSCYDAQNTMFQL

SEQ ID NO: 46051 - DNA, 2739 bp, Arabidopsis thaliana
  misc_feature (1)..(2739): Ceres Seq. ID no. 13591630
  misc_feature: MA Experiment ID: 20000306 Result: Down-regulated in Transcription
  misc_feature: MA Experiment 20000306 PARAMETER Experiment Name: At_Germinating_Seeds_Sub_P Parameter: Age (hr) Value: 6 vs. 0
  misc_feature: MA Experiment 20000306 PARAMETER Experiment Name: At_Germinating_Seeds_Sub_P Parameter: Organism Value: A. thaliana
  misc_feature: MA Experiment 20000306 PARAMETER Experiment Name: At_Germinating_Seeds_Sub_P Parameter: Plant Line Value: WS
  misc_feature: MA Experiment 20000306 PARAMETER Experiment Name: At_Germinating_Seeds_Sub_P Parameter: Tissue Value: Germinating Seeds
  misc_feature: MA Experiment ID: 20000307 Result: Down-regulated in Transcription
  misc_feature: MA Experiment 20000307 PARAMETER Experiment Name: At_Germinating_Seeds_Sub_P Parameter: Age (hr) Value: 24 vs. 0
  misc_feature: MA Experiment 20000307 PARAMETER Experiment Name: At_Germinating_Seeds_Sub_P Parameter: Organism Value: A. thaliana
  misc_feature: MA Experiment 20000307 PARAMETER Experiment Name: At_Germinating_Seeds_Sub_P Parameter: Plant Line Value: WS
  misc_feature: MA Experiment 20000307 PARAMETER Experiment Name: At_Germinating_Seeds_Sub_P Parameter: Tissue Value: Germinating Seeds
  misc_feature: MA Experiment ID: 20000327 Result: Up-regulated in Transcription
  misc_feature: MA Experiment 20000327 PARAMETER Experiment Name: At_42deg_Heat_Sub_P Parameter: Age (day) Value: 14
  misc_feature: MA Experiment 20000327 PARAMETER Experiment Name: At_42deg_Heat_Sub_P Parameter: Organism Value: A. thaliana
  misc_feature: MA Experiment 20000327 PARAMETER Experiment Name: At_42deg_Heat_Sub_P Parameter: Plant Line Value: WS
  misc_feature: MA Experiment 20000327 PARAMETER Experiment Name: At_42deg_Heat_Sub_P Parameter: Temperature (deg C) Value: 42 vs. 22
  misc_feature: MA Experiment 20000327 PARAMETER Experiment Name: At_42deg_Heat_Sub_P Parameter: Timepoint (hr) Value: 1
  misc_feature: MA Experiment 20000327 PARAMETER Experiment Name: At_42deg_Heat_Sub_P Parameter: Tissue Value: Aerial
  misc_feature: MA Experiment ID: 20000328 Result: Up-regulated in Transcription
  misc_feature: MA Experiment 20000328 PARAMETER Experiment Name: At_42deg_Heat_Sub_P Parameter: Age (day) Value: 14
  misc_feature: MA Experiment 20000328 PARAMETER Experiment Name: At_42deg_Heat_Sub_P Parameter: Organism Value: A. thaliana
  misc_feature: MA Experiment 20000328 PARAMETER Experiment Name: At_42deg_Heat_Sub_P Parameter: Plant Line Value: WS
  misc_feature: MA Experiment 20000328 PARAMETER Experiment Name: At_42deg_Heat_Sub_P Parameter: Temperature (deg C) Value: 42 vs. 22
  misc_feature: MA Experiment 20000328 PARAMETER Experiment Name: At_42deg_Heat_Sub_P Parameter: Timepoint (hr) Value: 6
  misc_feature: MA Experiment 20000328 PARAMETER Experiment Name: At_42deg_Heat_Sub_P Parameter: Tissue Value: Aerial
agagatataattagagaaaatctgtgctctttcagatcccattatcacaaatccatctctctctctctctcagagaagaaaccaaagaagaagaaaaagctctcaactttcttcgatttctcagggaactctttcgttaatctcaaactcaatcatgtctaccccagctgaatcttcagactcgaaatcgaagaaagatttcagtactgctattctcgagaggaagaagtctccgaaccgtctcgtcgtcgatgaggctatcaacgatgataactccgtcgtctctcttcaccctgcaaccatggagaagcttcagctcttccgtggtgataccattctcatcaagggtaagaagaggaaggacactgtctgcattgctcttgctgatgagacatgtgaggagccaaagatcagaatgaataaagtagtcagatctaacttgagggttagactgggagatgttatatctgttcaccaatgcccagacgtcaagtacggaaagcgtgttcacatcctgcctgttgatgatactgttgaaggagtgactggaaacctatttgatgcttacctgaaaccttatttccttgaggcataccgtccagtgaggaagggtgatctcttcctagtcagaggaggaatgaggagtgtggagttcaaagttatagagacagatcctgctgagtactgcgtggttgctccagacacagagattttctgtgagggtgagcctgtgaagagagaggatgaagaaaggctagatgatgtaggttatgatgatgttggtggtgtcaggaaacagatggctcagattagggaacttgttgaacttcccttgaggcatccacagctattcaagtcgattggtgttaagccaccgaagggaattcttctttatggaccacctgggtctggaaagactttgatcgctcgtgctgtggctaatgaaacgggtgcctttttcttctgtatcaacggacctgagatcatgtccaaattggctggtgagagtgagagcaacctcaggaaagcattcgaggaggctgagaaaaatgcgccttcaatcatattcattgatgagatcgactctattgcaccgaaaagagagaagactaatggagaggttgagaggaggattgtctctcagctccttacgctaatggatggactgaaatctcgtgctcatgttatcgtcatgggagcaaccaatcgccccaacagtatcgacccagctttgagaaggtttggaagatttgacagggagatcgatattggagttcctgacgaaattggacgtcttgaagttctgaggatccatacaaagaacatgaagctggctgaagatgtggatctcgaaaggatctcaaaggacacacacggttacgtcggtgctgatcttgcagctttgtgcacagaggccgccctgcaatgcatcagggagaagatggatgtgattgatctggaagatgactccatagacgctgaaatcctcaattccatggcagtcactaatgaacatttccacactgctctcgggaacagcaacccatctgcacttcgtgaaactgttgtggaggttcccaacgtctcttggaatgatattggaggtcttgagaatgtcaagagagagctccaggagactgttcaatacccagtcgagcacccagagaagtttgagaaattcgggatgtctccatcaaagggagtccttttctacggtcctcctggatgtgggaaaacccttttggccaaagctattgccaacgagtgccaagctaatttcatcagtgtcaagggtcccgagcttctgacaatgtggtttggagagagtgaagcaaatgttcgtgaaatcttcgacaaggcccgtcaatccgctccatgtgttcttttctttgatgagctcgactccattgcaactcagagaggaggtggaagtggtggcgatggaggtggtgctgcggacagagtcttgaaccagcttttgactgagatggacggaatgaatgccaagaaaaccgtcttcatcatcggagctaccaacagacctgacattatcgattcagctcttctccgtcctggaaggcttgaccagctcatttacattccactaccagatgaggattcccgtctcaatatcttcaaggccgccttgaggaaatctcctattgctaaagatgtagacatcggtgcacttgctaaatacactcagggtttcagtggtgctgatatcactgagatttgccagagagcttgcaagtacgccatcagagaaaacattgagaaggacattgaaaaggagaagaggaggagcgagaacccagaggcaatggaggaagatggagtggatgaagtatcagagatcaaagctgcacactttgaggagtcgatgaagtatgcgcgtaggagtgtgagtgatgcagacatcaggaagtaccaagcctttgctcagacgttgcagcagtctagagggttcggttctgagttcaggttcgagaattctgctggttcaggtgccaccactggagtcgcagatccgtttgccacgtctgcagccgctgctggggacgatgatgatctctacaattagtgataacttctttatcctttttttttttaagttttaaaactcgaattctctacttttggattactggggaaagtgatactgattctttcctcgtgtttttaagttatccgaatctcttgtgtttgggttttaatcaatgttcttaattttcgttt

SEQ ID NO: 46052 - protein, 809 aa, Arabidopsis thaliana
  peptide (1)..(809): Ceres Seq. ID no. 13591631
  misc_feature (516)..(704): Pfam Name: ATPase family associated with various cellular Pfam Description: ATPase family associated with various cellular
  misc_feature (516)..(704): Pfam Name: ATPase family associated with various cellular Pfam Description: ATPase family associated with various cellular
  misc_feature (161)..(404): Homolog of NCBI NO: 14521559 NR Description: TRANSITIONAL ENDOPLASMIC RETICULUM ATPASE
  misc_feature (392)..(771): Homolog of NCBI NO: 14521559 NR Description: TRANSITIONAL ENDOPLASMIC RETICULUM ATPASE
  misc_feature (161)..(404): Homolog of NCBI NO: 14590568 NR Description: cell division control protein (transitional
  misc_feature (399)..(771): Homolog of NCBI NO: 14590568 NR Description: cell division control protein (transitional
  misc_feature (1)..(768): Homolog of NCBI NO: 30088847 NR Description: AAA family ATPase [Sulfolobus acidocaldarius]
  misc_feature (161)..(404): Homolog of NCBI NO: 14521559 NR Description: TRANSITIONAL ENDOPLASMIC RETICULUM ATPASE
  misc_feature (161)..(404): Homolog of NCBI NO: 14590568 NR Description: cell division control protein (transitional
  misc_feature (1)..(768): Homolog of NCBI NO: 30088847 NR Description: AAA family ATPase [Sulfolobus acidocaldarius]
  misc_feature (1)..(441): Homolog of NCBI NO: 23612492 NR Description: cell division cycle ATPase, putative [Plasmodium
  misc_feature (431)..(766): Homolog of NCBI NO: 23612492 NR Description: cell division cycle ATPase, putative [Plasmodium
  misc_feature (10)..(514): Homolog of NCBI NO: 23481659 NR Description: putative cell division cycle ATPase [Plasmodium
  misc_feature (434)..(766): Homolog of NCBI NO: 23481659 NR Description: putative cell division cycle ATPase [Plasmodium
  misc_feature (30)..(720): Homolog of NCBI NO: 15669345 NR Description: cell division control protein 48 (cdc48), AAA
  misc_feature (399)..(771): Homolog of NCBI NO: 14590568 NR Description: cell division control protein (transitional
  misc_feature (392)..(771): Homolog of NCBI NO: 14521559 NR Description: TRANSITIONAL ENDOPLASMIC RETICULUM ATPASE
  misc_feature (30)..(720): Homolog of NCBI NO: 15669345 NR Description: cell division control protein 48 (cdc48), AAA
  misc_feature (434)..(766): Homolog of NCBI NO: 23481659 NR Description: putative cell division cycle ATPase [Plasmodium
  misc_feature (10)..(514): Homolog of NCBI NO: 23481659 NR Description: putative cell division cycle ATPase [Plasmodium
  misc_feature (431)..(766): Homolog of NCBI NO: 23612492 NR Description: cell division cycle ATPase, putative [Plasmodium
  misc_feature (1)..(441): Homolog of NCBI NO: 23612492 NR Description: cell division cycle ATPase, putative [Plasmodium
MSTPAESSDSKSKKDFSTAILERKKSPNRLVVDEAINDDNSVVSLHPATMEKLQLFRGDTILIKGKKRKDTVCIALADETCEEPKIRMNKVVRSNLRVRLGDVISVHQCPDVKYGKRVHILPVDDTVEGVTGNLFDAYLKPYFLEAYRPVRKGDLFLVRGGMRSVEFKVIETDPAEYCVVAPDTEIFCEGEPVKREDEERLDDVGYDDVGGVRKQMAQIRELVELPLRHPQLFKSIGVKPPKGILLYGPPGSGKTLIARAVANETGAFFFCINGPEIMSKLAGESESNLRKAFEEAEKNAPSIIFIDEIDSIAPKREKTNGEVERRIVSQLLTLMDGLKSRAHVIVMGATNRPNSIDPALRRFGRFDREIDIGVPDEIGRLEVLRIHTKNMKLAEDVDLERISKDTHGYVGADLAALCTEAALQCIREKMDVIDLEDDSIDAEILNSMAVTNEHFHTALGNSNPSALRETVVEVPNVSWNDIGGLENVKRELQETVQYPVEHPEKFEKFGMSPSKGVLFYGPPGCGKTLLAKAIANECQANFISVKGPELLTMWFGESEANVREIFDKARQSAPCVLFFDELDSIATQRGGGSGGDGGGAADRVLNQLLTEMDGMNAKKTVFIIGATNRPDIIDSALLRPGRLDQLIYIPLPDEDSRLNIFKAALRKSPIAKDVDIGALAKYTQGFSGADITEICQRACKYAIRENIEKDIEKEKRRSENPEAMEEDGVDEVSEIKAAHFEESMKYARRSVSDADIRKYQAFAQTLQQSRGFGSEFRFENSAGSGATTGVADPFATSAAAAGDDDDLYN

SEQ ID NO: 46053 - protein, 760 aa, Arabidopsis thaliana
  peptide (1)..(760): Ceres Seq. ID no. 13591632
  misc_feature (467)..(655): Pfam Name: ATPase family associated with various cellular Pfam Description: ATPase family associated with various cellular
  misc_feature (467)..(655): Pfam Name: ATPase family associated with various cellular Pfam Description: ATPase family associated with various cellular
  misc_feature (112)..(355): Homolog of NCBI NO: 14521559 NR Description: TRANSITIONAL ENDOPLASMIC RETICULUM ATPASE
  misc_feature (343)..(722): Homolog of NCBI NO: 14521559 NR Description: TRANSITIONAL ENDOPLASMIC RETICULUM ATPASE
  misc_feature (112)..(355): Homolog of NCBI NO: 14590568 NR Description: cell division control protein (transitional
  misc_feature (350)..(722): Homolog of NCBI NO: 14590568 NR Description: cell division control protein (transitional
  misc_feature (1)..(719): Homolog of NCBI NO: 30088847 NR Description: AAA family ATPase [Sulfolobus acidocaldarius]
  misc_feature (112)..(355): Homolog of NCBI NO: 14521559 NR Description: TRANSITIONAL ENDOPLASMIC RETICULUM ATPASE
  misc_feature (112)..(355): Homolog of NCBI NO: 14590568 NR Description: cell division control protein (transitional
  misc_feature (1)..(719): Homolog of NCBI NO: 30088847 NR Description: AAA family ATPase [Sulfolobus acidocaldarius]
  misc_feature (1)..(392): Homolog of NCBI NO: 23612492 NR Description: cell division cycle ATPase, putative [Plasmodium
  misc_feature (382)..(717): Homolog of NCBI NO: 23612492 NR Description: cell division cycle ATPase, putative [Plasmodium
  misc_feature (1)..(465): Homolog of NCBI NO: 23481659 NR Description: putative cell division cycle ATPase [Plasmodium
  misc_feature (385)..(717): Homolog of NCBI NO: 23481659 NR Description: putative cell division cycle ATPase [Plasmodium
  misc_feature (1)..(671): Homolog of NCBI NO: 15669345 NR Description: cell division control protein 48 (cdc48), AAA
  misc_feature (350)..(722): Homolog of NCBI NO: 14590568 NR Description: cell division control protein (transitional
  misc_feature (343)..(722): Homolog of NCBI NO: 14521559 NR Description: TRANSITIONAL ENDOPLASMIC RETICULUM ATPASE
  misc_feature (1)..(671): Homolog of NCBI NO: 15669345 NR Description: cell division control protein 48 (cdc48), AAA
  misc_feature (385)..(717): Homolog of NCBI NO: 23481659 NR Description: putative cell division cycle ATPase [Plasmodium
  misc_feature (1)..(465): Homolog of NCBI NO: 23481659 NR Description: putative cell division cycle ATPase [Plasmodium
  misc_feature (382)..(717): Homolog of NCBI NO: 23612492 NR Description: cell division cycle ATPase, putative [Plasmodium
  misc_feature (1)..(392): Homolog of NCBI NO: 23612492 NR Description: cell division cycle ATPase, putative [Plasmodium
MEKLQLFRGDTILIKGKKRKDTVCIALADETCEEPKIRMNKVVRSNLRVRLGDVISVHQCPDVKYGKRVHILPVDDTVEGVTGNLFDAYLKPYFLEAYRPVRKGDLFLVRGGMRSVEFKVIETDPAEYCVVAPDTEIFCEGEPVKREDEERLDDVGYDDVGGVRKQMAQIRELVELPLRHPQLFKSIGVKPPKGILLYGPPGSGKTLIARAVANETGAFFFCINGPEIMSKLAGESESNLRKAFEEAEKNAPSIIFIDEIDSIAPKREKTNGEVERRIVSQLLTLMDGLKSRAHVIVMGATNRPNSIDPALRRFGRFDREIDIGVPDEIGRLEVLRIHTKNMKLAEDVDLERISKDTHGYVGADLAALCTEAALQCIREKMDVIDLEDDSIDAEILNSMAVTNEHFHTALGNSNPSALRETVVEVPNVSWNDIGGLENVKRELQETVQYPVEHPEKFEKFGMSPSKGVLFYGPPGCGKTLLAKAIANECQANFISVKGPELLTMWFGESEANVREIFDKARQSAPCVLFFDELDSIATQRGGGSGGDGGGAADRVLNQLLTEMDGMNAKKTVFIIGATNRPDIIDSALLRPGRLDQLIYIPLPDEDSRLNIFKAALRKSPIAKDVDIGALAKYTQGFSGADITEICQRACKYAIRENIEKDIEKEKRRSENPEAMEEDGVDEVSEIKAAHFEESMKYARRSVSDADIRKYQAFAQTLQQSRGFGSEFRFENSAGSGATTGVADPFATSAAAAGDDDDLYN

SEQ ID NO: 46054 - protein, 722 aa, Arabidopsis thaliana
  peptide (1)..(722): Ceres Seq. ID no. 13591633
  misc_feature (429)..(617): Pfam Name: ATPase family associated with various cellular Pfam Description: ATPase family associated with various cellular
  misc_feature (429)..(617): Pfam Name: ATPase family associated with various cellular Pfam Description: ATPase family associated with various cellular
  misc_feature (74)..(317): Homolog of NCBI NO: 14521559 NR Description: TRANSITIONAL ENDOPLASMIC RETICULUM ATPASE
  misc_feature (305)..(684): Homolog of NCBI NO: 14521559 NR Description: TRANSITIONAL ENDOPLASMIC RETICULUM ATPASE
  misc_feature (74)..(317): Homolog of NCBI NO: 14590568 NR Description: cell division control protein (transitional
  misc_feature (312)..(684): Homolog of NCBI NO: 14590568 NR Description: cell division control protein (transitional
  misc_feature (1)..(681): Homolog of NCBI NO: 30088847 NR Description: AAA family ATPase [Sulfolobus acidocaldarius]
  misc_feature (74)..(317): Homolog of NCBI NO: 14521559 NR Description: TRANSITIONAL ENDOPLASMIC RETICULUM ATPASE
  misc_feature (74)..(317): Homolog of NCBI NO: 14590568 NR Description: cell division control protein (transitional
  misc_feature (1)..(681): Homolog of NCBI NO: 30088847 NR Description: AAA family ATPase [Sulfolobus acidocaldarius]
  misc_feature (1)..(354): Homolog of NCBI NO: 23612492 NR Description: cell division cycle ATPase, putative [Plasmodium
  misc_feature (344)..(679): Homolog of NCBI NO: 23612492 NR Description: cell division cycle ATPase, putative [Plasmodium
  misc_feature (1)..(427): Homolog of NCBI NO: 23481659 NR Description: putative cell division cycle ATPase [Plasmodium
  misc_feature (347)..(679): Homolog of NCBI NO: 23481659 NR Description: putative cell division cycle ATPase [Plasmodium
  misc_feature (1)..(633): Homolog of NCBI NO: 15669345 NR Description: cell division control protein 48 (cdc48), AAA
  misc_feature (312)..(684): Homolog of NCBI NO: 14590568 NR Description: cell division control protein (transitional
  misc_feature (305)..(684): Homolog of NCBI NO: 14521559 NR Description: TRANSITIONAL ENDOPLASMIC RETICULUM ATPASE
  misc_feature (1)..(633): Homolog of NCBI NO: 15669345 NR Description: cell division control protein 48 (cdc48), AAA
  misc_feature (347)..(679): Homolog of NCBI NO: 23481659 NR Description: putative cell division cycle ATPase [Plasmodium
  misc_feature (1)..(427): Homolog of NCBI NO: 23481659 NR Description: putative cell division cycle ATPase [Plasmodium
  misc_feature (344)..(679): Homolog of NCBI NO: 23612492 NR Description: cell division cycle ATPase, putative [Plasmodium
  misc_feature (1)..(354): Homolog of NCBI NO: 23612492 NR Description: cell division cycle ATPase, putative [Plasmodium
MNKVVRSNLRVRLGDVISVHQCPDVKYGKRVHILPVDDTVEGVTGNLFDAYLKPYFLEAYRPVRKGDLFLVRGGMRSVEFKVIETDPAEYCVVAPDTEIFCEGEPVKREDEERLDDVGYDDVGGVRKQMAQIRELVELPLRHPQLFKSIGVKPPKGILLYGPPGSGKTLIARAVANETGAFFFCINGPEIMSKLAGESESNLRKAFEEAEKNAPSIIFIDEIDSIAPKREKTNGEVERRIVSQLLTLMDGLKSRAHVIVMGATNRPNSIDPALRRFGRFDREIDIGVPDEIGRLEVLRIHTKNMKLAEDVDLERISKDTHGYVGADLAALCTEAALQCIREKMDVIDLEDDSIDAEILNSMAVTNEHFHTALGNSNPSALRETVVEVPNVSWNDIGGLENVKRELQETVQYPVEHPEKFEKFGMSPSKGVLFYGPPGCGKTLLAKAIANECQANFISVKGPELLTMWFGESEANVREIFDKARQSAPCVLFFDELDSIATQRGGGSGGDGGGAADRVLNQLLTEMDGMNAKKTVFIIGATNRPDIIDSALLRPGRLDQLIYIPLPDEDSRLNIFKAALRKSPIAKDVDIGALAKYTQGFSGADITEICQRACKYAIRENIEKDIEKEKRRSENPEAMEEDGVDEVSEIKAAHFEESMKYARRSVSDADIRKYQAFAQTLQQSRGFGSEFRFENSAGSGATTGVADPFATSAAAAGDDDDLYN

SEQ ID NO: 46055 - DNA, 1167 bp, Arabidopsis thaliana
  misc_feature (1)..(1167): Ceres Seq. ID no. 15172395
  misc_feature: MA Experiment ID: 20000315 Result: Down-regulated in Transcription
  misc_feature: MA Experiment 20000315 PARAMETER Experiment Name: At_14day_Shoots-Roots_Sub_P Parameter: Age (day) Value: 14
  misc_feature: MA Experiment 20000315 PARAMETER Experiment Name: At_14day_Shoots-Roots_Sub_P Parameter: Organism Value: A. thaliana
  misc_feature: MA Experiment 20000315 PARAMETER Experiment Name: At_14day_Shoots-Roots_Sub_P Parameter: Plant Line Value: WS
  misc_feature: MA Experiment 20000315 PARAMETER Experiment Name: At_14day_Shoots-Roots_Sub_P Parameter: Tissue Value: Shoots vs. Whole Plant
  misc_feature: MA Experiment ID: 20000329 Result: Up-regulated in Transcription
  misc_feature: MA Experiment 20000329 PARAMETER Experiment Name: At_4deg_Cold_Sub_P Parameter: Age (day) Value: 14
  misc_feature: MA Experiment 20000329 PARAMETER Experiment Name: At_4deg_Cold_Sub_P Parameter: Organism Value: A. thaliana
  misc_feature: MA Experiment 20000329 PARAMETER Experiment Name: At_4deg_Cold_Sub_P Parameter: Plant Line Value: WS
  misc_feature: MA Experiment 20000329 PARAMETER Experiment Name: At_4deg_Cold_Sub_P Parameter: Temperature (deg C) Value: 4 vs. 22
  misc_feature: MA Experiment 20000329 PARAMETER Experiment Name: At_4deg_Cold_Sub_P Parameter: Timepoint (hr) Value: 6
  misc_feature: MA Experiment 20000329 PARAMETER Experiment Name: At_4deg_Cold_Sub_P Parameter: Tissue Value: Aerial
  misc_feature: MA Experiment ID: 20000355 Result: Down-regulated in Transcription
  misc_feature: MA Experiment 20000355 PARAMETER Experiment Name: At_Siliques_Sub_P Parameter: Age (day) Value: 21
  misc_feature: MA Experiment 20000355 PARAMETER Experiment Name: At_Siliques_Sub_P Parameter: Organism Value: A. thaliana
  misc_feature: MA Experiment 20000355 PARAMETER Experiment Name: At_Siliques_Sub_P Parameter: Plant Line Value: WS
  misc_feature: MA Experiment 20000355 PARAMETER Experiment Name: At_Siliques_Sub_P Parameter: Tissue Value: Less Than 5mm Siliques vs. Whole Plant
gtttttctgaagatccaaggcacacaaaaaaacagctttttttgtttcttcaatcaaggattttccagggttttgataaccccatgggttcagggttctctctgtttcaaaagaatctatcgtcttgttatggagatcgagatctgttgcagcctggtttaggagatttgcctgaaagttgtgtggctttgattctccagaatttggatcccgttgagatctgtagattctccaagctaaacacggcttttcatggcgcttcttgggctgatttcgtttgggaatcgaaacttcctccagattataaattgattctcgagaaaatccttggtagtttccctgataatttgcgtaaaagagacatctttacttttctctctcgagttaattccttcgacgagggcaacaagaaagcttgggtagataaacgaacaggtgggctctgtttatgcacatcagccaagggcttatccataaccggaattgatgatcggagatactggagtcatattccgtctgatgattctcgattttcttcagtagcttatgttcaacagatctggtagtttcaagttgatggagaaattgatttcccatttcccgctggaacctacagtgtttacttcaggcttcagctaggcaaaccaggcaagcggtttggttggaaggttgttgacaccgaacaggttcatggctggaacattaaacctgtgcggtttcaactctcgactgaagatggtcaacattcttcatctcaatgcatgttaaccgaagcaggaaactggagtcattaccatgctggagactttgtggtcggtaaatcgaaaagttcatcgacgaagattaagttctcgatgactcagattgattgcacgcatactaaaggcgggctatgtgtagattctgtagttgtgtatccgagctcgtgtaaggaccggttgatgcagatttaagttgcaaaccggagtttgggtgtagtttagaggtttaaaaaagctgtttttttttttaagtggttttaaaaccttttgtagaatctttgagggggtaattagaaaactcagtgtaaagagaaaaagagggtaattactaattagggttgttgttttattgtttaggtcaaatgtaaactttaagtttgaagttattaaagagttcttgagttac

SEQ ID NO: 46056 - protein, 187 aa, Arabidopsis thaliana
  peptide (1)..(187): Ceres Seq. ID no. 15172396
  misc_feature (53)..(98): Pfam Name: F-box domain Pfam Description: F-box domain
  misc_feature (56)..(187): Homolog of NCBI NO: 38454184 NR Description: At2g02230 [Arabidopsis thaliana]
  misc_feature (56)..(187): Homolog of NCBI NO: 15226908 NR Description: F-box protein (SKP1 interacting partner
  misc_feature (56)..(104): Homolog of NCBI NO: 38567911 NR Description: OSJNBa0088I22.7 [Oryza sativa (japonica
  misc_feature (118)..(187): Homolog of NCBI NO: 38567911 NR Description: OSJNBa0088I22.7 [Oryza sativa (japonica
  misc_feature (52)..(187): Homolog of NCBI NO: 37536186 NR Description: unknown protein [Oryza sativa (japonica
  misc_feature (53)..(187): Homolog of NCBI NO: 23397334 NR Description: unknown protein [Arabidopsis thaliana]
  misc_feature (53)..(187): Homolog of NCBI NO: 30695337 NR Description: F-box protein (lectin-related) [Arabidopsis
  misc_feature (129)..(187): Homolog of NCBI NO: 27754673 NR Description: unknown protein [Arabidopsis thaliana]
  misc_feature (28)..(187): Homolog of NCBI NO: 15222051 NR Description: F-box protein (SKP1 interacting partner
  misc_feature (28)..(187): Homolog of NCBI NO: 15221677 NR Description: F-box protein (SKP1 interacting partner
FSEDPRHTKKQLFLFLQSRIFQGFDNPMGSGFSLFQKNLSSCYGDRDLLQPGLGDLPESCVALILQNLDPVEICRFSKLNTAFHGASWADFVWESKLPPDYKLILEKILGSFPDNLRKRDIFTFLSRVNSFDEGNKKAWVDKRTGGLCLCTSAKGLSITGIDDRRYWSHIPSDDSRFSSVAYVQQIW

SEQ ID NO: 46057 - protein, 160 aa, Arabidopsis thaliana
  peptide (1)..(160): Ceres Seq. ID no. 15172397
  misc_feature (26)..(71): Pfam Name: F-box domain Pfam Description: F-box domain
  misc_feature (29)..(160): Homolog of NCBI NO: 38454184 NR Description: At2g02230 [Arabidopsis thaliana]
  misc_feature (29)..(160): Homolog of NCBI NO: 15226908 NR Description: F-box protein (SKP1 interacting partner
  misc_feature (29)..(77): Homolog of NCBI NO: 38567911 NR Description: OSJNBa0088I22.7 [Oryza sativa (japonica
  misc_feature (91)..(160): Homolog of NCBI NO: 38567911 NR Description: OSJNBa0088I22.7 [Oryza sativa (japonica
  misc_feature (25)..(160): Homolog of NCBI NO: 37536186 NR Description: unknown protein [Oryza sativa (japonica
  misc_feature (26)..(160): Homolog of NCBI NO: 23397334 NR Description: unknown protein [Arabidopsis thaliana]
  misc_feature (26)..(160): Homolog of NCBI NO: 30695337 NR Description: F-box protein (lectin-related) [Arabidopsis
  misc_feature (102)..(160): Homolog of NCBI NO: 27754673 NR Description: unknown protein [Arabidopsis thaliana]
  misc_feature (1)..(160): Homolog of NCBI NO: 15222051 NR Description: F-box protein (SKP1 interacting partner
  misc_feature (1)..(160): Homolog of NCBI NO: 15221677 NR Description: F-box protein (SKP1 interacting partner
MGSGFSLFQKNLSSCYGDRDLLQPGLGDLPESCVALILQNLDPVEICRFSKLNTAFHGASWADFVWESKLPPDYKLILEKILGSFPDNLRKRDIFTFLSRVNSFDEGNKKAWVDKRTGGLCLCTSAKGLSITGIDDRRYWSHIPSDDSRFSSVAYVQQIW

SEQ ID NO: 46058 - DNA, 2941 bp, Arabidopsis thaliana; identical to SEQ ID NO: 45965
  misc_feature (1)..(2941): Ceres Seq. ID no. 12600180
  misc_feature: MA Experiment ID: 20000171 Result: Up-regulated in Transcription
  misc_feature: MA Experiment 20000171 PARAMETER Experiment Name: At_42deg_Heat_P Parameter: Age (day) Value: 14
  misc_feature: MA Experiment 20000171 PARAMETER Experiment Name: At_42deg_Heat_P Parameter: Organism Value: A. thaliana
  misc_feature: MA Experiment 20000171 PARAMETER Experiment Name: At_42deg_Heat_P Parameter: Plant Line Value: WS
  misc_feature: MA Experiment 20000171 PARAMETER Experiment Name: At_42deg_Heat_P Parameter: Temperature (deg C) Value: 42 vs. 22
  misc_feature: MA Experiment 20000171 PARAMETER Experiment Name: At_42deg_Heat_P Parameter: Timepoint (hr) Value: 1
  misc_feature: MA Experiment 20000171 PARAMETER Experiment Name: At_42deg_Heat_P Parameter: Tissue Value: Aerial
  misc_feature: MA Experiment ID: 20000173 Result: Up-regulated in Transcription
  misc_feature: MA Experiment 20000173 PARAMETER Experiment Name: At_42deg_Heat_P Parameter: Age (day) Value: 14
  misc_feature: MA Experiment 20000173 PARAMETER Experiment Name: At_42deg_Heat_P Parameter: Organism Value: A. thaliana
  misc_feature: MA Experiment 20000173 PARAMETER Experiment Name: At_42deg_Heat_P Parameter: Plant Line Value: WS
  misc_feature: MA Experiment 20000173 PARAMETER Experiment Name: At_42deg_Heat_P Parameter: Temperature (deg C) Value: 42 vs. 22
  misc_feature: MA Experiment 20000173 PARAMETER Experiment Name: At_42deg_Heat_P Parameter: Timepoint (hr) Value: 6
  misc_feature: MA Experiment 20000173 PARAMETER Experiment Name: At_42deg_Heat_P Parameter: Tissue Value: Aerial
  misc_feature: MA Experiment ID: 20000495 Result: Down-regulated in Transcription
  misc_feature: MA Experiment 20000495 PARAMETER Experiment Name: At_Guard_Cells_P Parameter: Harvest Date Value: 8/2/2002
  misc_feature: MA Experiment 20000495 PARAMETER Experiment Name: At_Guard_Cells_P Parameter: Organism Value: A. thaliana
  misc_feature: MA Experiment 20000495 PARAMETER Experiment Name: At_Guard_Cells_P Parameter: Tissue Value: Guard Cells vs. Leaves
  misc_feature: MA Experiment ID: 20001451 Result: Down-regulated in Transcription
  misc_feature: MA Experiment 20001451 PARAMETER Experiment Name: At_Far-red-induction_P Parameter: Age (day) Value: 7
  misc_feature: MA Experiment 20001451 PARAMETER Experiment Name: At_Far-red-induction_P Parameter: Light Value: Far-red vs. White
  misc_feature: MA Experiment 20001451 PARAMETER Experiment Name: At_Far-red-induction_P Parameter: Organism Value: A. thaliana
  misc_feature: MA Experiment 20001451 PARAMETER Experiment Name: At_Far-red-induction_P Parameter: Plant Line Value: Columbia
  misc_feature: MA Experiment 20001451 PARAMETER Experiment Name: At_Far-red-induction_P Parameter: Timepoint (hr) Value: 24
  misc_feature: MA Experiment 20001451 PARAMETER Experiment Name: At_Far-red-induction_P Parameter: Tissue Value: Whole Plant
  misc_feature: MA Experiment ID: 20001557 Result: Up-regulated in Transcription
  misc_feature: MA Experiment 20001557 PARAMETER Experiment Name: At_Drought_Soil_Dry_P Parameter: Age (day) Value: 27
  misc_feature: MA Experiment 20001557 PARAMETER Experiment Name: At_Drought_Soil_Dry_P Parameter: Organism Value: A. thaliana
  misc_feature: MA Experiment 20001557 PARAMETER Experiment Name: At_Drought_Soil_Dry_P Parameter: Plant Line Value: WS
  misc_feature: MA Experiment 20001557 PARAMETER Experiment Name: At_Drought_Soil_Dry_P Parameter: Post Timepoint (hr) Value: 3
  misc_feature: MA Experiment 20001557 PARAMETER Experiment Name: At_Drought_Soil_Dry_P Parameter: Post-Treatment Value: Re-Water vs. No Drought
  misc_feature: MA Experiment 20001557 PARAMETER Experiment Name: At_Drought_Soil_Dry_P Parameter: Timepoint (day) Value: 13
  misc_feature: MA Experiment 20001557 PARAMETER Experiment Name: At_Drought_Soil_Dry_P Parameter: Treatment Value: Drought vs. No Drought

SEQ ID NO: 46059 - protein, 736 aa, Arabidopsis thaliana; identical to SEQ ID NO: 45966
  peptide (1)..(736): Ceres Seq. ID no. 12600181
  misc_feature (105)..(626): Homolog of NCBI NO: 19114449 NR Description: heat shock protein 70-like protein Ssp1p
  misc_feature (2)..(626): Homolog of NCBI NO: 12230134 NR Description: HEAT SHOCK PROTEIN HOMOLOG PSS1
  misc_feature (2)..(626): Homolog of NCBI NO: 7441858 NR Description: heat shock protein 70 - fission yeast
  misc_feature (1)..(634): Homolog of NCBI NO: 39591675 NR Description: Hypothetical protein CBG18133 [Caenorhabditis
  misc_feature (1)..(642): Homolog of NCBI NO: 3170190 NR Description: antigen NY-CO-25 [Homo sapiens]
  misc_feature (1)..(642): Homolog of NCBI NO: 39645395 NR Description: Unknown (protein for MGC:76295) [Silurana
  misc_feature (1)..(642): Homolog of NCBI NO: 40254361 NR Description: osmotic stress protein; osmotic stress protein 94
  misc_feature (1)..(642): Homolog of NCBI NO: 34856875 NR Description: similar to osmotic stress protein [Rattus
  misc_feature (1)..(621): Homolog of NCBI NO: 15221072 NR Description: putative heat-shock protein; protein id:
  misc_feature (1)..(643): Homolog of NCBI NO: 25326732 NR Description: hypothetical protein [imported] - Arabidopsis
  misc_feature (105)..(626): Homolog of NCBI NO: 19114449 NR Description: heat shock protein 70-like protein Ssp1p
  misc_feature (2)..(626): Homolog of NCBI NO: 12230134 NR Description: HEAT SHOCK PROTEIN HOMOLOG PSS1
  misc_feature (2)..(626): Homolog of NCBI NO: 7441858 NR Description: heat shock protein 70 - fission yeast
  misc_feature (1)..(634): Homolog of NCBI NO: 39591675 NR Description: Hypothetical protein CBG18133 [Caenorhabditis
  misc_feature (1)..(642): Homolog of NCBI NO: 3170190 NR Description: antigen NY-CO-25 [Homo sapiens]
  misc_feature (1)..(642): Homolog of NCBI NO: 39645395 NR Description: Unknown (protein for MGC:76295) [Silurana
  misc_feature (1)..(642): Homolog of NCBI NO: 40254361 NR Description: osmotic stress protein; osmotic stress protein 94
  misc_feature (1)..(642): Homolog of NCBI NO: 34856875 NR Description: similar to osmotic stress protein [Rattus
  misc_feature (1)..(621): Homolog of NCBI NO: 15221072 NR Description: putative heat-shock protein; protein id:
  misc_feature (1)..(643): Homolog of NCBI NO: 25326732 NR Description: hypothetical protein [imported] - Arabidopsis
  misc_feature (105)..(626): Homolog of NCBI NO: 19114449 NR Description: heat shock protein 70-like protein Ssp1p
  misc_feature (2)..(626): Homolog of NCBI NO: 12230134 NR Description: HEAT SHOCK PROTEIN HOMOLOG PSS1
  misc_feature (2)..(626): Homolog of NCBI NO: 7441858 NR Description: heat shock protein 70 - fission yeast
  misc_feature (1)..(634): Homolog of NCBI NO: 39591675 NR Description: Hypothetical protein CBG18133 [Caenorhabditis
  misc_feature (1)..(642): Homolog of NCBI NO: 3170190 NR Description: antigen NY-CO-25 [Homo sapiens]
  misc_feature (1)..(642): Homolog of NCBI NO: 39645395 NR Description: Unknown (protein for MGC:76295) [Silurana
  misc_feature (1)..(642): Homolog of NCBI NO: 40254361 NR Description: osmotic stress protein; osmotic stress protein 94
  misc_feature (1)..(642): Homolog of NCBI NO: 34856875 NR Description: similar to osmotic stress protein [Rattus
  misc_feature (1)..(621): Homolog of NCBI NO: 15221072 NR Description: putative heat-shock protein; protein id:
  misc_feature (1)..(643): Homolog of NCBI NO: 25326732 NR Description: hypothetical protein [imported] - Arabidopsis

SEQ ID NO: 46060 - protein, 680 aa, Arabidopsis thaliana; identical to SEQ ID NO: 45967
  peptide (1)..(680): Ceres Seq. ID no. 12600182
  misc_feature (49)..(570): Homolog of NCBI NO: 19114449 NR Description: heat shock protein 70-like protein Ssp1p
  misc_feature (1)..(570): Homolog of NCBI NO: 12230134 NR Description: HEAT SHOCK PROTEIN HOMOLOG PSS1
  misc_feature (1)..(570): Homolog of NCBI NO: 7441858 NR Description: heat shock protein 70 - fission yeast
  misc_feature (1)..(578): Homolog of NCBI NO: 39591675 NR Description: Hypothetical protein CBG18133 [Caenorhabditis
  misc_feature (1)..(586): Homolog of NCBI NO: 3170190 NR Description: antigen NY-CO-25 [Homo sapiens]
  misc_feature (1)..(586): Homolog of NCBI NO: 39645395 NR Description: Unknown (protein for MGC:76295) [Silurana
  misc_feature (1)..(586): Homolog of NCBI NO: 40254361 NR Description: osmotic stress protein; osmotic stress protein 94
  misc_feature (1)..(586): Homolog of NCBI NO: 34856875 NR Description: similar to osmotic stress protein [Rattus
  misc_feature (1)..(565): Homolog of NCBI NO: 15221072 NR Description: putative heat-shock protein; protein id:
  misc_feature (1)..(587): Homolog of NCBI NO: 25326732 NR Description: hypothetical protein [imported] - Arabidopsis
  misc_feature (49)..(570): Homolog of NCBI NO: 19114449 NR Description: heat shock protein 70-like protein Ssp1p
  misc_feature (1)..(570): Homolog of NCBI NO: 12230134 NR Description: HEAT SHOCK PROTEIN HOMOLOG PSS1
  misc_feature (1)..(570): Homolog of NCBI NO: 7441858 NR Description: heat shock protein 70 - fission yeast
  misc_feature (1)..(578): Homolog of NCBI NO: 39591675 NR Description: Hypothetical protein CBG18133 [Caenorhabditis
  misc_feature (1)..(586): Homolog of NCBI NO: 3170190 NR Description: antigen NY-CO-25 [Homo sapiens]
  misc_feature (1)..(586): Homolog of NCBI NO: 39645395 NR Description: Unknown (protein for MGC:76295) [Silurana
  misc_feature (1)..(586): Homolog of NCBI NO: 40254361 NR Description: osmotic stress protein; osmotic stress protein 94
  misc_feature (1)..(586): Homolog of NCBI NO: 34856875 NR Description: similar to osmotic stress protein [Rattus
  misc_feature (1)..(565): Homolog of NCBI NO: 15221072 NR Description: putative heat-shock protein; protein id:
  misc_feature (1)..(587): Homolog of NCBI NO: 25326732 NR Description: hypothetical protein [imported] - Arabidopsis
  misc_feature (49)..(570): Homolog of NCBI NO: 19114449 NR Description: heat shock protein 70-like protein Ssp1p
  misc_feature (1)..(570): Homolog of NCBI NO: 12230134 NR Description: HEAT SHOCK PROTEIN HOMOLOG PSS1
  misc_feature (1)..(570): Homolog of NCBI NO: 7441858 NR Description: heat shock protein 70 - fission yeast
  misc_feature (1)..(578): Homolog of NCBI NO: 39591675 NR Description: Hypothetical protein CBG18133 [Caenorhabditis
  misc_feature (1)..(586): Homolog of NCBI NO: 3170190 NR Description: antigen NY-CO-25 [Homo sapiens]
  misc_feature (1)..(586): Homolog of NCBI NO: 39645395 NR Description: Unknown (protein for MGC:76295) [Silurana
  misc_feature (1)..(586): Homolog of NCBI NO: 40254361 NR Description: osmotic stress protein; osmotic stress protein 94
  misc_feature (1)..(586): Homolog of NCBI NO: 34856875 NR Description: similar to osmotic stress protein [Rattus
  misc_feature (1)..(565): Homolog of NCBI NO: 15221072 NR Description: putative heat-shock protein; protein id:
  misc_feature (1)..(587): Homolog of NCBI NO: 25326732 NR Description: hypothetical protein [imported] - Arabidopsis

SEQ ID NO: 46061 - protein, 679 aa, Arabidopsis thaliana; identical to SEQ ID NO: 45968
  peptide (1)..(679): Ceres Seq. ID no. 12600183
  misc_feature (48)..(569): Homolog of NCBI NO: 19114449 NR Description: heat shock protein 70-like protein Ssp1p
  misc_feature (1)..(569): Homolog of NCBI NO: 12230134 NR Description: HEAT SHOCK PROTEIN HOMOLOG PSS1
  misc_feature (1)..(569): Homolog of NCBI NO: 7441858 NR Description: heat shock protein 70 - fission yeast
  misc_feature (1)..(577): Homolog of NCBI NO: 39591675 NR Description: Hypothetical protein CBG18133 [Caenorhabditis
  misc_feature (1)..(585): Homolog of NCBI NO: 3170190 NR Description: antigen NY-CO-25 [Homo sapiens]
  misc_feature (1)..(585): Homolog of NCBI NO: 39645395 NR Description: Unknown (protein for MGC:76295) [Silurana
  misc_feature (1)..(585): Homolog of NCBI NO: 40254361 NR Description: osmotic stress protein; osmotic stress protein 94
  misc_feature (1)..(585): Homolog of NCBI NO: 34856875 NR Description: similar to osmotic stress protein [Rattus
  misc_feature (1)..(564): Homolog of NCBI NO: 15221072 NR Description: putative heat-shock protein; protein id:
  misc_feature (1)..(586): Homolog of NCBI NO: 25326732 NR Description: hypothetical protein [imported] - Arabidopsis
  misc_feature (48)..(569): Homolog of NCBI NO: 19114449 NR Description: heat shock protein 70-like protein Ssp1p
  misc_feature (1)..(569): Homolog of NCBI NO: 12230134 NR Description: HEAT SHOCK PROTEIN HOMOLOG PSS1
  misc_feature (1)..(569): Homolog of NCBI NO: 7441858 NR Description: heat shock protein 70 - fission yeast
  misc_feature (1)..(577): Homolog of NCBI NO: 39591675 NR Description: Hypothetical protein CBG18133 [Caenorhabditis
  misc_feature (1)..(585): Homolog of NCBI NO: 3170190 NR Description: antigen NY-CO-25 [Homo sapiens]
  misc_feature (1)..(585): Homolog of NCBI NO: 39645395 NR Description: Unknown (protein for MGC:76295) [Silurana
  misc_feature (1)..(585): Homolog of NCBI NO: 40254361 NR Description: osmotic stress protein; osmotic stress protein 94
  misc_feature (1)..(585): Homolog of NCBI NO: 34856875 NR Description: similar to osmotic stress protein [Rattus
  misc_feature (1)..(564): Homolog of NCBI NO: 15221072 NR Description: putative heat-shock protein; protein id:
  misc_feature (1)..(586): Homolog of NCBI NO: 25326732 NR Description: hypothetical protein [imported] - Arabidopsis
  misc_feature (48)..(569): Homolog of NCBI NO: 19114449 NR Description: heat shock protein 70-like protein Ssp1p
  misc_feature (1)..(569): Homolog of NCBI NO: 12230134 NR Description: HEAT SHOCK PROTEIN HOMOLOG PSS1
  misc_feature (1)..(569): Homolog of NCBI NO: 7441858 NR Description: heat shock protein 70 - fission yeast
  misc_feature (1)..(577): Homolog of NCBI NO: 39591675 NR Description: Hypothetical protein CBG18133 [Caenorhabditis
  misc_feature (1)..(585): Homolog of NCBI NO: 3170190 NR Description: antigen NY-CO-25 [Homo sapiens]
  misc_feature (1)..(585): Homolog of NCBI NO: 39645395 NR Description: Unknown (protein for MGC:76295) [Silurana
  misc_feature (1)..(585): Homolog of NCBI NO: 40254361 NR Description: osmotic stress protein; osmotic stress protein 94
  misc_feature (1)..(585): Homolog of NCBI NO: 34856875 NR Description: similar to osmotic stress protein [Rattus
  misc_feature (1)..(564): Homolog of NCBI NO: 15221072 NR Description: putative heat-shock protein; protein id:
  misc_feature (1)..(586): Homolog of NCBI NO: 25326732 NR Description: hypothetical protein [imported] - Arabidopsis

SEQ ID NO: 46062 - DNA, 1005 bp, Arabidopsis thaliana; identical to SEQ ID NO: 35525
  misc_feature (1)..(1005): Ceres Seq. ID no. 12562843
  misc_feature: MA Experiment ID: 108434 Result: Down-regulated in Transcription
  misc_feature: MA Experiment 108434 PARAMETER Experiment Name: At_Root_Tips_cDNA_P Parameter: Tissue Value: Root Tips
  misc_feature: MA Experiment ID: 108461 Result: Up-regulated in Transcription
  misc_feature: MA Experiment 108461 PARAMETER Experiment Name: At_Germinating_Seeds_cDNA_P Parameter: Age (day) Value: 1 vs. 0
  misc_feature: MA Experiment 108461 PARAMETER Experiment Name: At_Germinating_Seeds_cDNA_P Parameter: Tissue Value: Germinating Seeds
  misc_feature: MA Experiment ID: 108462 Result: Up-regulated in Transcription
  misc_feature: MA Experiment 108462 PARAMETER Experiment Name: At_Germinating_Seeds_cDNA_P Parameter: Age (day) Value: 2 vs. 0
  misc_feature: MA Experiment 108462 PARAMETER Experiment Name: At_Germinating_Seeds_cDNA_P Parameter: Tissue Value: Germinating Seeds
  misc_feature: MA Experiment ID: 108464 Result: Up-regulated in Transcription
  misc_feature: MA Experiment 108464 PARAMETER Experiment Name: At_Germinating_Seeds_cDNA_P Parameter: Age (day) Value: 4 vs. 0
  misc_feature: MA Experiment 108464 PARAMETER Experiment Name: At_Germinating_Seeds_cDNA_P Parameter: Tissue Value: Germinating Seeds
  misc_feature: MA Experiment ID: 108488 Result: Up-regulated in Transcription
  misc_feature: MA Experiment ID: 108489 Result: Down-regulated in Transcription
  misc_feature: MA Experiment ID: 108594 Result: Down-regulated in Transcription
  misc_feature: MA Experiment 108594 PARAMETER Experiment Name: At_Ler-rhl_Root_cDNA_P Parameter: Plant Line Value: null
  misc_feature: MA Experiment ID: 108595 Result: Down-regulated in Transcription
  misc_feature: MA Experiment 108595 PARAMETER Experiment Name: At_Ler-pi_Ovule_cDNA_P Parameter: Plant Line Value: null
  misc_feature: MA Experiment ID: 20000180 Result: Up-regulated in Transcription
  misc_feature: MA Experiment 20000180 PARAMETER Experiment Name: At_Germinating_Seeds_P Parameter: Age (hr) Value: 24 vs. 0
  misc_feature: MA Experiment 20000180 PARAMETER Experiment Name: At_Germinating_Seeds_P Parameter: Tissue Value: Germinating Seeds
  misc_feature: MA Experiment ID: 20000185 Result: Down-regulated in Transcription
  misc_feature: MA Experiment 20000185 PARAMETER Experiment Name: At_Roots__P Parameter: Age (day) Value: 7 vs. 21
  misc_feature: MA Experiment 20000185 PARAMETER Experiment Name: At_Roots__P Parameter: Organism Value: A. thaliana
  misc_feature: MA Experiment 20000185 PARAMETER Experiment Name: At_Roots__P Parameter: Tissue Value: Roots vs. Whole Plant
  misc_feature: MA Experiment ID: 20000234 Result: Down-regulated in Transcription
  misc_feature: MA Experiment 20000234 PARAMETER Experiment Name: At_Siliques_P Parameter: Age (day) Value: 21
  misc_feature: MA Experiment 20000234 PARAMETER Experiment Name: At_Siliques_P Parameter: Organism Value: A. thaliana
  misc_feature: MA Experiment 20000234 PARAMETER Experiment Name: At_Siliques_P Parameter: Plant Line Value: WS
  misc_feature: MA Experiment 20000234 PARAMETER Experiment Name: At_Siliques_P Parameter: Tissue Value: Less Than 5mm Siliques vs. Whole Plant
  misc_feature: MA Experiment ID: 20000235 Result: Down-regulated in Transcription
  misc_feature: MA Experiment 20000235 PARAMETER Experiment Name: At_Siliques_P Parameter: Age (day) Value: 21
  misc_feature: MA Experiment 20000235 PARAMETER Experiment Name: At_Siliques_P Parameter: Organism Value: A. thaliana
  misc_feature: MA Experiment 20000235 PARAMETER Experiment Name: At_Siliques_P Parameter: Plant Line Value: WS
  misc_feature: MA Experiment 20000235 PARAMETER Experiment Name: At_Siliques_P Parameter: Tissue Value: 5-10mm Siliques vs. Whole Plant
  misc_feature: MA Experiment ID: 20000264 Result: Down-regulated in Transcription
  misc_feature: MA Experiment 20000264 PARAMETER Experiment Name: At_Open_Flower_P Parameter: Age (day) Value: 21
  misc_feature: MA Experiment 20000264 PARAMETER Experiment Name: At_Open_Flower_P Parameter: Plant Line Value: WS
  misc_feature: MA Experiment 20000264 PARAMETER Experiment Name: At_Open_Flower_P Parameter: Tissue Value: Open Flower vs. Whole Plant
  misc_feature: MA Experiment ID: 20000265 Result: Down-regulated in Transcription
  misc_feature: MA Experiment 20000265 PARAMETER Experiment Name: At_Open_Flower_P Parameter: Age (day) Value: 21
  misc_feature: MA Experiment 20000265 PARAMETER Experiment Name: At_Open_Flower_P Parameter: Plant Line Value: WS
  misc_feature: MA Experiment 20000265 PARAMETER Experiment Name: At_Open_Flower_P Parameter: Tissue Value: Closed Flower vs. Whole Plant
  misc_feature: MA Experiment ID: 20000286 Result: Down-regulated in Transcription
  misc_feature: MA Experiment 20000286 PARAMETER Experiment Name: At_Open_Flower_P Parameter: Age (day) Value: 21
  misc_feature: MA Experiment 20000286 PARAMETER Experiment Name: At_Open_Flower_P Parameter: Plant Line Value: WS
  misc_feature: MA Experiment 20000286 PARAMETER Experiment Name: At_Open_Flower_P Parameter: Tissue Value: Half Open vs. Whole Plant
  misc_feature: MA Experiment ID: 20000436 Result: Up-regulated in Transcription
  misc_feature: MA Experiment 20000436 PARAMETER Experiment Name: At_Drought_P Parameter: Age (day) Value: 7
  misc_feature: MA Experiment 20000436 PARAMETER Experiment Name: At_Drought_P Parameter: Organism Value: A. thaliana
  misc_feature: MA Experiment 20000436 PARAMETER Experiment Name: At_Drought_P Parameter: Plant Line Value: WS
  misc_feature: MA Experiment 20000436 PARAMETER Experiment Name: At_Drought_P Parameter: Timepoint (hr) Value: 12
  misc_feature: MA Experiment 20000436 PARAMETER Experiment Name: At_Drought_P Parameter: Tissue Value: Whole Plant
  misc_feature: MA Experiment 20000436 PARAMETER Experiment Name: At_Drought_P Parameter: Treatment Value: Drought vs. No Drought
  misc_feature: MA Experiment ID: 20000439 Result: Down-regulated in Transcription
  misc_feature: MA Experiment 20000439 PARAMETER Experiment Name: At_Roots__P Parameter: Age (day) Value: 14 vs. 21
  misc_feature: MA Experiment 20000439 PARAMETER Experiment Name: At_Roots__P Parameter: Organism Value: A. thaliana
  misc_feature: MA Experiment 20000439 PARAMETER Experiment Name: At_Roots__P Parameter: Tissue Value: Roots vs. Whole Plant
  misc_feature: MA Experiment ID: 20000441 Result: Up-regulated in Transcription
  misc_feature: MA Experiment 20000441 PARAMETER Experiment Name: At_1uM_BR-BRZ__P Parameter: Tissue Value: Shoot Apices
  misc_feature: MA Experiment 20000441 PARAMETER Experiment Name: At_1uM_BR-BRZ__P Parameter: Treatment Value: 1uM BR vs. No Treatment
  misc_feature: MA Experiment ID: 20000443 Result: Up-regulated in Transcription
  misc_feature: MA Experiment 20000443 PARAMETER Experiment Name: At_1uM_BR-BRZ__P Parameter: Tissue Value: Shoot Apices
  misc_feature: MA Experiment 20000443 PARAMETER Experiment Name: At_1uM_BR-BRZ__P Parameter: Treatment Value: 1uM BRZ vs. No Treatment
  misc_feature: MA Experiment ID: 20000794 Result: Down-regulated in Transcription
  misc_feature: MA Experiment 20000794 PARAMETER Experiment Name: At_Petals_P Parameter: Age (day) Value: 23-25 days
  misc_feature: MA Experiment 20000794 PARAMETER Experiment Name: At_Petals_P Parameter: Plant Line Value: WS
  misc_feature: MA Experiment 20000794 PARAMETER Experiment Name: At_Petals_P Parameter: Tissue Value: Petals vs. Whole plant
  misc_feature: MA Experiment ID: 20001450 Result: Up-regulated in Transcription
  misc_feature: MA Experiment 20001450 PARAMETER Experiment Name: At_Far-red-induction_P Parameter: Age (day) Value: 7
  misc_feature: MA Experiment 20001450 PARAMETER Experiment Name: At_Far-red-induction_P Parameter: Light Value: Far-red vs. White
  misc_feature: MA Experiment 20001450 PARAMETER Experiment Name: At_Far-red-induction_P Parameter: Organism Value: A. thaliana
  misc_feature: MA Experiment 20001450 PARAMETER Experiment Name: At_Far-red-induction_P Parameter: Plant Line Value: Columbia
  misc_feature: MA Experiment 20001450 PARAMETER Experiment Name: At_Far-red-induction_P Parameter: Timepoint (hr) Value: 8
  misc_feature: MA Experiment 20001450 PARAMETER Experiment Name: At_Far-red-induction_P Parameter: Tissue Value: Whole Plant
  misc_feature: MA Experiment ID: 20001451 Result: Up-regulated in Transcription
  misc_feature: MA Experiment 20001451 PARAMETER Experiment Name: At_Far-red-induction_P Parameter: Age (day) Value: 7
  misc_feature: MA Experiment 20001451 PARAMETER Experiment Name: At_Far-red-induction_P Parameter: Light Value: Far-red vs. White
  misc_feature: MA Experiment 20001451 PARAMETER Experiment Name: At_Far-red-induction_P Parameter: Organism Value: A. thaliana
  misc_feature: MA Experiment 20001451 PARAMETER Experiment Name: At_Far-red-induction_P Parameter: Plant Line Value: Columbia
  misc_feature: MA Experiment 20001451 PARAMETER Experiment Name: At_Far-red-induction_P Parameter: Timepoint (hr) Value: 24
  misc_feature: MA Experiment 20001451 PARAMETER Experiment Name: At_Far-red-induction_P Parameter: Tissue Value: Whole Plant
  misc_feature: MA Experiment ID: 20001459 Result: Down-regulated in Transcription
  misc_feature: MA Experiment 20001459 PARAMETER Experiment Name: At_50mM_NH4NO3_L-to-H_P Parameter: Age (day) Value: Undefined
  misc_feature: MA Experiment 20001459 PARAMETER Experiment Name: At_50mM_NH4NO3_L-to-H_P Parameter: Organism Value: Undefined
  misc_feature: MA Experiment 20001459 PARAMETER Experiment Name: At_50mM_NH4NO3_L-to-H_P Parameter: Plant Line Value: Undefined
  misc_feature: MA Experiment 20001459 PARAMETER Experiment Name: At_50mM_NH4NO3_L-to-H_P Parameter: Timepoint (hr) Value: 4
  misc_feature: MA Experiment 20001459 PARAMETER Experiment Name: At_50mM_NH4NO3_L-to-H_P Parameter: Tissue Value: Siliques
  misc_feature: MA Experiment 20001459 PARAMETER Experiment Name: At_50mM_NH4NO3_L-to-H_P Parameter: Treatment Value: 50mM NH4NO3 vs. 100mM Manitol
  misc_feature: MA Experiment ID: 20001556 Result: Down-regulated in Transcription
  misc_feature: MA Experiment 20001556 PARAMETER Experiment Name: At_Drought_Soil_Dry_P Parameter: Age (day) Value: 26
  misc_feature: MA Experiment 20001556 PARAMETER Experiment Name: At_Drought_Soil_Dry_P Parameter: Organism Value: A. thaliana
  misc_feature: MA Experiment 20001556 PARAMETER Experiment Name: At_Drought_Soil_Dry_P Parameter: Plant Line Value: WS
  misc_feature: MA Experiment 20001556 PARAMETER Experiment Name: At_Drought_Soil_Dry_P Parameter: Post Timepoint (hr) Value: None
  misc_feature: MA Experiment 20001556 PARAMETER Experiment Name: At_Drought_Soil_Dry_P Parameter: Post-Treatment Value: None
  misc_feature: MA Experiment 20001556 PARAMETER Experiment Name: At_Drought_Soil_Dry_P Parameter: Timepoint (day) Value: 12
  misc_feature: MA Experiment 20001556 PARAMETER Experiment Name: At_Drought_Soil_Dry_P Parameter: Treatment Value: Drought vs. No Drought
  misc_feature: MA Experiment ID: 20001557 Result: Down-regulated in Transcription
  misc_feature: MA Experiment 20001557 PARAMETER Experiment Name: At_Drought_Soil_Dry_P Parameter: Age (day) Value: 27
  misc_feature: MA Experiment 20001557 PARAMETER Experiment Name: At_Drought_Soil_Dry_P Parameter: Organism Value: A. thaliana
  misc_feature: MA Experiment 20001557 PARAMETER Experiment Name: At_Drought_Soil_Dry_P Parameter: Plant Line Value: WS
  misc_feature: MA Experiment 20001557 PARAMETER Experiment Name: At_Drought_Soil_Dry_P Parameter: Post Timepoint (hr) Value: 3
  misc_feature: MA Experiment 20001557 PARAMETER Experiment Name: At_Drought_Soil_Dry_P Parameter: Post-Treatment Value: Re-Water vs. No Drought
  misc_feature: MA Experiment 20001557 PARAMETER Experiment Name: At_Drought_Soil_Dry_P Parameter: Timepoint (day) Value: 13
  misc_feature: MA Experiment 20001557 PARAMETER Experiment Name: At_Drought_Soil_Dry_P Parameter: Treatment Value: Drought vs. No Drought
  misc_feature: MA Experiment ID: 20001558 Result: Down-regulated in Transcription
  misc_feature: MA Experiment 20001558 PARAMETER Experiment Name: At_Drought_Soil_Dry_P Parameter: Age (day) Value: 27
  misc_feature: MA Experiment 20001558 PARAMETER Experiment Name: At_Drought_Soil_Dry_P Parameter: Organism Value: A. thaliana
  misc_feature: MA Experiment 20001558 PARAMETER Experiment Name: At_Drought_Soil_Dry_P Parameter: Plant Line Value: WS
  misc_feature: MA Experiment 20001558 PARAMETER Experiment Name: At_Drought_Soil_Dry_P Parameter: Post Timepoint (hr) Value: 6
  misc_feature: MA Experiment 20001558 PARAMETER Experiment Name: At_Drought_Soil_Dry_P Parameter: Post-Treatment Value: Re-Water vs. No Drought
  misc_feature: MA Experiment 20001558 PARAMETER Experiment Name: At_Drought_Soil_Dry_P Parameter: Timepoint (day) Value: 13
  misc_feature: MA Experiment 20001558 PARAMETER Experiment Name: At_Drought_Soil_Dry_P Parameter: Treatment Value: Drought vs. No Drought
  misc_feature: MA Experiment ID: 20001559 Result: Down-regulated in Transcription
  misc_feature: MA Experiment 20001559 PARAMETER Experiment Name: At_Drought_Soil_Dry_P Parameter: Age (day) Value: 28
  misc_feature: MA Experiment 20001559 PARAMETER Experiment Name: At_Drought_Soil_Dry_P Parameter: Organism Value: A. thaliana
  misc_feature: MA Experiment 20001559 PARAMETER Experiment Name: At_Drought_Soil_Dry_P Parameter: Plant Line Value: WS
  misc_feature: MA Experiment 20001559 PARAMETER Experiment Name: At_Drought_Soil_Dry_P Parameter: Post Timepoint (hr) Value: 29
  misc_feature: MA Experiment 20001559 PARAMETER Experiment Name: At_Drought_Soil_Dry_P Parameter: Post-Treatment Value: Re-Water vs. No Drought
  misc_feature: MA Experiment 20001559 PARAMETER Experiment Name: At_Drought_Soil_Dry_P Parameter: Timepoint (day) Value: 14
  misc_feature: MA Experiment 20001559 PARAMETER Experiment Name: At_Drought_Soil_Dry_P Parameter: Treatment Value: Drought vs. No Drought
  misc_feature: MA Experiment ID: 20001755 Result: Down-regulated in Transcription
  misc_feature: MA Experiment 20001755 PARAMETER Experiment Name: At_50mM_NH4NO3_L-to-H_P Parameter: Timepoint (hr) Value: 2
  misc_feature: MA Experiment 20001755 PARAMETER Experiment Name: At_50mM_NH4NO3_L-to-H_P Parameter: Tissue Value: Leaf
  misc_feature: MA Experiment 20001755 PARAMETER Experiment Name: At_50mM_NH4NO3_L-to-H_P Parameter: Treatment Value: 50mM NH4NO3 vs 100mM Mannitol
  misc_feature: MA Experiment ID: 20001762 Result: Down-regulated in Transcription
  misc_feature: MA Experiment 20001762 PARAMETER Experiment Name: At_50mM_NH4NO3_L-to-H_P Parameter: Timepoint (hr) Value: 6
  misc_feature: MA Experiment 20001762 PARAMETER Experiment Name: At_50mM_NH4NO3_L-to-H_P Parameter: Tissue Value: Siliques
  misc_feature: MA Experiment 20001762 PARAMETER Experiment Name: At_50mM_NH4NO3_L-to-H_P Parameter: Treatment Value: 50mM NH4NO3 vs 100mM Mannitol
  misc_feature: MA Experiment ID: 20001772 Result: Down-regulated in Transcription
  misc_feature: MA Experiment 20001772 PARAMETER Experiment Name: At_Far-red-enriched-adult_P Parameter: Age (day) Value: 29
  misc_feature: MA Experiment 20001772 PARAMETER Experiment Name: At_Far-red-enriched-adult_P Parameter: Light Value: Far-red enriched vs. White
  misc_feature: MA Experiment 20001772 PARAMETER Experiment Name: At_Far-red-enriched-adult_P Parameter: Organism Value: A. thaliana
  misc_feature: MA Experiment 20001772 PARAMETER Experiment Name: At_Far-red-enriched-adult_P Parameter: Plant Line Value: Columbia
  misc_feature: MA Experiment 20001772 PARAMETER Experiment Name: At_Far-red-enriched-adult_P Parameter: Timepoint (hr) Value: 24
  misc_feature: MA Experiment 20001772 PARAMETER Experiment Name: At_Far-red-enriched-adult_P Parameter: Tissue Value: Aerial
  misc_feature: MA Experiment ID: 20001773 Result: Down-regulated in Transcription
  misc_feature: MA Experiment 20001773 PARAMETER Experiment Name: At_Far-red-enriched-adult_P Parameter: Age (day) Value: 30
  misc_feature: MA Experiment 20001773 PARAMETER Experiment Name: At_Far-red-enriched-adult_P Parameter: Light Value: Far-red enriched vs. White
  misc_feature: MA Experiment 20001773 PARAMETER Experiment Name: At_Far-red-enriched-adult_P Parameter: Organism Value: A. thaliana
  misc_feature: MA Experiment 20001773 PARAMETER Experiment Name: At_Far-red-enriched-adult_P Parameter: Plant Line Value: Columbia
  misc_feature: MA Experiment 20001773 PARAMETER Experiment Name: At_Far-red-enriched-adult_P Parameter: Timepoint (hr) Value: 48
  misc_feature: MA Experiment 20001773 PARAMETER Experiment Name: At_Far-red-enriched-adult_P Parameter: Tissue Value: Aerial
  misc_feature: MA Experiment ID: 20001774 Result: Down-regulated in Transcription
  misc_feature: MA Experiment 20001774 PARAMETER Experiment Name: At_Far-red-enriched-adult_P Parameter: Age (day) Value: 31
  misc_feature: MA Experiment 20001774 PARAMETER Experiment Name: At_Far-red-enriched-adult_P Parameter: Light Value: Far-red enriched vs. White
  misc_feature: MA Experiment 20001774 PARAMETER Experiment Name: At_Far-red-enriched-adult_P Parameter: Organism Value: A. thaliana
  misc_feature: MA Experiment 20001774 PARAMETER Experiment Name: At_Far-red-enriched-adult_P Parameter: Plant Line Value: Columbia
  misc_feature: MA Experiment 20001774 PARAMETER Experiment Name: At_Far-red-enriched-adult_P Parameter: Timepoint (hr) Value: 72
  misc_feature: MA Experiment 20001774 PARAMETER Experiment Name: At_Far-red-enriched-adult_P Parameter: Tissue Value: Aerial
  misc_feature: MA Experiment ID: 20001905 Result: Down-regulated in Transcription
  misc_feature: MA Experiment 20001905 PARAMETER Experiment Name: At_Drought_Reproduction_P Parameter: Age (day) Value: 40
  misc_feature: MA Experiment 20001905 PARAMETER Experiment Name: At_Drought_Reproduction_P Parameter: Organism Value: A. thaliana
  misc_feature: MA Experiment 20001905 PARAMETER Experiment Name: At_Drought_Reproduction_P Parameter: Plant Line Value: WS
  misc_feature: MA Experiment 20001905 PARAMETER Experiment Name: At_Drought_Reproduction_P Parameter: Timepoint (day) Value: 10
  misc_feature: MA Experiment 20001905 PARAMETER Experiment Name: At_Drought_Reproduction_P Parameter: Tissue Value: Rosettes
  misc_feature: MA Experiment 20001905 PARAMETER Experiment Name: At_Drought_Reproduction_P Parameter: Treatment Value: Drought vs. No Drought

SEQ ID NO: 46063 - protein, 171 aa, Arabidopsis thaliana; identical to SEQ ID NO: 35526
  peptide (1)..(171): Ceres Seq. ID no. 12562844
  misc_feature (64)..(151): Pfam Name: Chlorophyll A-B binding protein Pfam Description: Chlorophyll A-B binding protein
  misc_feature (64)..(151): Pfam Name: Chlorophyll A-B binding protein Pfam Description: Chlorophyll A-B binding protein
  misc_feature (1)..(151): Homolog of NCBI NO: 693922 NR Description: chlorophyll a/b binding protein
  misc_feature (1)..(151): Homolog of NCBI NO: 482445 NR Description: chlorophyll a/b-binding protein precursor -
  misc_feature (1)..(151): Homolog of NCBI NO: 693920 NR Description: chlorophyll a/b binding protein
  misc_feature (1)..(151): Homolog of NCBI NO: 2645999 NR Description: chlorophyll a/b binding protein of LHCII type I
  misc_feature (1)..(151): Homolog of NCBI NO: 693916 NR Description: chlorophyll a/b binding protein
  misc_feature (1)..(151): Homolog of NCBI NO: 693922 NR Description: chlorophyll a/b binding protein
  misc_feature (1)..(151): Homolog of NCBI NO: 693920 NR Description: chlorophyll a/b binding protein
  misc_feature (1)..(151): Homolog of NCBI NO: 693916 NR Description: chlorophyll a/b binding protein
  misc_feature (1)..(151): Homolog of NCBI NO: 18403549 NR Description: photosystem II type I chlorophyll a /b binding
  misc_feature (1)..(151): Homolog of NCBI NO: 21592428 NR Description: putative photosystem II type I chlorophyll a b
  misc_feature (1)..(151): Homolog of NCBI NO: 115819 NR Description: Chlorophyll A-B binding protein 1B, chloroplast
  misc_feature (1)..(151): Homolog of NCBI NO: 693914 NR Description: chlorophyll a/b binding protein
  misc_feature (1)..(151): Homolog of NCBI NO: 224927 NR Description: protein 1B,chlorophyll binding
  misc_feature (1)..(151): Homolog of NCBI NO: 2645999 NR Description: chlorophyll a/b binding protein of LHCII type I
  misc_feature (1)..(151): Homolog of NCBI NO: 482445 NR Description: chlorophyll a/b-binding protein precursor -
  misc_feature (1)..(151): Homolog of NCBI NO: 224927 NR Description: protein 1B,chlorophyll binding
  misc_feature (1)..(151): Homolog of NCBI NO: 693914 NR Description: chlorophyll a/b binding protein
  misc_feature (1)..(151): Homolog of NCBI NO: 115819 NR Description: Chlorophyll A-B binding protein 1B, chloroplast
  misc_feature (1)..(151): Homolog of NCBI NO: 21592428 NR Description: putative photosystem II type I chlorophyll a b
  misc_feature (1)..(151): Homolog of NCBI NO: 18403549 NR Description: photosystem II type I chlorophyll a /b binding

SEQ ID NO: 46064 - protein, 166 aa, Arabidopsis thaliana; identical to SEQ ID NO: 35527
  peptide (1)..(166): Ceres Seq. ID no. 12562845
  misc_feature (59)..(146): Pfam Name: Chlorophyll A-B binding protein Pfam Description: Chlorophyll A-B binding protein
  misc_feature (59)..(146): Pfam Name: Chlorophyll A-B binding protein Pfam Description: Chlorophyll A-B binding protein
  misc_feature (1)..(146): Homolog of NCBI NO: 693922 NR Description: chlorophyll a/b binding protein
  misc_feature (1)..(146): Homolog of NCBI NO: 482445 NR Description: chlorophyll a/b-binding protein precursor -
  misc_feature (1)..(146): Homolog of NCBI NO: 693920 NR Description: chlorophyll a/b binding protein
  misc_feature (1)..(146): Homolog of NCBI NO: 2645999 NR Description: chlorophyll a/b binding protein of LHCII type I
  misc_feature (1)..(146): Homolog of NCBI NO: 693916 NR Description: chlorophyll a/b binding protein
  misc_feature (1)..(146): Homolog of NCBI NO: 693922 NR Description: chlorophyll a/b binding protein
  misc_feature (1)..(146): Homolog of NCBI NO: 693920 NR Description: chlorophyll a/b binding protein
  misc_feature (1)..(146): Homolog of NCBI NO: 693916 NR Description: chlorophyll a/b binding protein
  misc_feature (1)..(146): Homolog of NCBI NO: 18403549 NR Description: photosystem II type I chlorophyll a /b binding
  misc_feature (1)..(146): Homolog of NCBI NO: 21592428 NR Description: putative photosystem II type I chlorophyll a b
  misc_feature (1)..(146): Homolog of NCBI NO: 115819 NR Description: Chlorophyll A-B binding protein 1B, chloroplast
  misc_feature (1)..(146): Homolog of NCBI NO: 693914 NR Description: chlorophyll a/b binding protein
  misc_feature (1)..(146): Homolog of NCBI NO: 224927 NR Description: protein 1B,chlorophyll binding
  misc_feature (1)..(146): Homolog of NCBI NO: 2645999 NR Description: chlorophyll a/b binding protein of LHCII type I
  misc_feature (1)..(146): Homolog of NCBI NO: 482445 NR Description: chlorophyll a/b-binding protein precursor -
  misc_feature (1)..(146): Homolog of NCBI NO: 224927 NR Description: protein 1B,chlorophyll binding
  misc_feature (1)..(146): Homolog of NCBI NO: 693914 NR Description: chlorophyll a/b binding protein
  misc_feature (1)..(146): Homolog of NCBI NO: 115819 NR Description: Chlorophyll A-B binding protein 1B, chloroplast
  misc_feature (1)..(146): Homolog of NCBI NO: 21592428 NR Description: putative photosystem II type I chlorophyll a b
  misc_feature (1)..(146): Homolog of NCBI NO: 18403549 NR Description: photosystem II type I chlorophyll a /b binding

SEQ ID NO: 46065 - protein, 137 aa, Arabidopsis thaliana; identical to SEQ ID NO: 35528
  peptide (1)..(137): Ceres Seq. ID no. 12562846
  misc_feature (30)..(117): Pfam Name: Chlorophyll A-B binding protein Pfam Description: Chlorophyll A-B binding protein
  misc_feature (30)..(117): Pfam Name: Chlorophyll A-B binding protein Pfam Description: Chlorophyll A-B binding protein
  misc_feature (1)..(117): Homolog of NCBI NO: 693922 NR Description: chlorophyll a/b binding protein
  misc_feature (1)..(117): Homolog of NCBI NO: 482445 NR Description: chlorophyll a/b-binding protein precursor -
  misc_feature (1)..(117): Homolog of NCBI NO: 693920 NR Description: chlorophyll a/b binding protein
  misc_feature (1)..(117): Homolog of NCBI NO: 2645999 NR Description: chlorophyll a/b binding protein of LHCII type I
  misc_feature (1)..(117): Homolog of NCBI NO: 693916 NR Description: chlorophyll a/b binding protein
  misc_feature (1)..(117): Homolog of NCBI NO: 693922 NR Description: chlorophyll a/b binding protein
  misc_feature (1)..(117): Homolog of NCBI NO: 693920 NR Description: chlorophyll a/b binding protein
  misc_feature (1)..(117): Homolog of NCBI NO: 693916 NR Description: chlorophyll a/b binding protein
  misc_feature (1)..(117): Homolog of NCBI NO: 18403549 NR Description: photosystem II type I chlorophyll a /b binding
  misc_feature (1)..(117): Homolog of NCBI NO: 21592428 NR Description: putative photosystem II type I chlorophyll a b
  misc_feature (1)..(117): Homolog of NCBI NO: 115819 NR Description: Chlorophyll A-B binding protein 1B, chloroplast
  misc_feature (1)..(117): Homolog of NCBI NO: 693914 NR Description: chlorophyll a/b binding protein
  misc_feature (1)..(117): Homolog of NCBI NO: 224927 NR Description: protein 1B,chlorophyll binding
  misc_feature (1)..(117): Homolog of NCBI NO: 2645999 NR Description: chlorophyll a/b binding protein of LHCII type I
  misc_feature (1)..(117): Homolog of NCBI NO: 482445 NR Description: chlorophyll a/b-binding protein precursor -
  misc_feature (1)..(117): Homolog of NCBI NO: 224927 NR Description: protein 1B,chlorophyll binding
  misc_feature (1)..(117): Homolog of NCBI NO: 693914 NR Description: chlorophyll a/b binding protein
  misc_feature (1)..(117): Homolog of NCBI NO: 115819 NR Description: Chlorophyll A-B binding protein 1B, chloroplast
  misc_feature (1)..(117): Homolog of NCBI NO: 21592428 NR Description: putative photosystem II type I chlorophyll a b
  misc_feature (1)..(117): Homolog of NCBI NO: 18403549 NR Description: photosystem II type I chlorophyll a /b binding

SEQ ID NO: 46066 - DNA, 1111 bp, Arabidopsis thaliana; identical to SEQ ID NO: 41575
  misc_feature (1)..(1111): Ceres Seq. ID no. 13591787
  misc_feature: MA Experiment ID: 20001450 Result: Down-regulated in Transcription
  misc_feature: MA Experiment 20001450 PARAMETER Experiment Name: At_Far-red-induction_P Parameter: Age (day) Value: 7
  misc_feature: MA Experiment 20001450 PARAMETER Experiment Name: At_Far-red-induction_P Parameter: Light Value: Far-red vs. White
  misc_feature: MA Experiment 20001450 PARAMETER Experiment Name: At_Far-red-induction_P Parameter: Organism Value: A. thaliana
  misc_feature: MA Experiment 20001450 PARAMETER Experiment Name: At_Far-red-induction_P Parameter: Plant Line Value: Columbia
  misc_feature: MA Experiment 20001450 PARAMETER Experiment Name: At_Far-red-induction_P Parameter: Timepoint (hr) Value: 8
  misc_feature: MA Experiment 20001450 PARAMETER Experiment Name: At_Far-red-induction_P Parameter: Tissue Value: Whole Plant
  misc_feature: MA Experiment ID: 20001451 Result: Down-regulated in Transcription
  misc_feature: MA Experiment 20001451 PARAMETER Experiment Name: At_Far-red-induction_P Parameter: Age (day) Value: 7
  misc_feature: MA Experiment 20001451 PARAMETER Experiment Name: At_Far-red-induction_P Parameter: Light Value: Far-red vs. White
  misc_feature: MA Experiment 20001451 PARAMETER Experiment Name: At_Far-red-induction_P Parameter: Organism Value: A. thaliana
  misc_feature: MA Experiment 20001451 PARAMETER Experiment Name: At_Far-red-induction_P Parameter: Plant Line Value: Columbia
  misc_feature: MA Experiment 20001451 PARAMETER Experiment Name: At_Far-red-induction_P Parameter: Timepoint (hr) Value: 24
  misc_feature: MA Experiment 20001451 PARAMETER Experiment Name: At_Far-red-induction_P Parameter: Tissue Value: Whole Plant

SEQ ID NO: 46067 - protein, 255 aa, Arabidopsis thaliana; identical to SEQ ID NO: 41576
  peptide (1)..(255): Ceres Seq. ID no. 13591788
  misc_feature (13)..(251): Homolog of NCBI NO: 34897094 NR Description: unknown protein [Oryza sativa (japonica
  misc_feature (3)..(244): Homolog of NCBI NO: 15234108 NR Description: hypothetical protein [Arabidopsis thaliana]
  misc_feature (31)..(251): Homolog of NCBI NO: 34904202 NR Description: P0492F05.25 [Oryza sativa (japonica
  misc_feature (1)..(251): Homolog of NCBI NO: 15233147 NR Description: hypothetical protein [Arabidopsis thaliana]
  misc_feature (12)..(251): Homolog of NCBI NO: 34909318 NR Description: OSJNBb0021A09.5 [Oryza sativa (japonica
  misc_feature (1)..(243): Homolog of NCBI NO: 15222616 NR Description: expressed protein [Arabidopsis thaliana]
  misc_feature (12)..(251): Homolog of NCBI NO: 15238125 NR Description: expressed protein [Arabidopsis thaliana]
  misc_feature (9)..(253): Homolog of NCBI NO: 15237093 NR Description: expressed protein [Arabidopsis thaliana]
  misc_feature (1)..(253): Homolog of NCBI NO: 15236556 NR Description: expressed protein [Arabidopsis thaliana]
  misc_feature (1)..(255): Homolog of NCBI NO: 18406991 NR Description: expressed protein [Arabidopsis thaliana]
  misc_feature (13)..(251): Homolog of NCBI NO: 34897094 NR Description: unknown protein [Oryza sativa (japonica
  misc_feature (3)..(244): Homolog of NCBI NO: 15234108 NR Description: hypothetical protein [Arabidopsis thaliana]
  misc_feature (31)..(251): Homolog of NCBI NO: 34904202 NR Description: P0492F05.25 [Oryza sativa (japonica
  misc_feature (1)..(251): Homolog of NCBI NO: 15233147 NR Description: hypothetical protein [Arabidopsis thaliana]
  misc_feature (12)..(251): Homolog of NCBI NO: 34909318 NR Description: OSJNBb0021A09.5 [Oryza sativa (japonica
  misc_feature (1)..(243): Homolog of NCBI NO: 15222616 NR Description: expressed protein [Arabidopsis thaliana]
  misc_feature (12)..(251): Homolog of NCBI NO: 15238125 NR Description: expressed protein [Arabidopsis thaliana]
  misc_feature (9)..(253): Homolog of NCBI NO: 15237093 NR Description: expressed protein [Arabidopsis thaliana]
  misc_feature (1)..(253): Homolog of NCBI NO: 15236556 NR Description: expressed protein [Arabidopsis thaliana]
  misc_feature (1)..(255): Homolog of NCBI NO: 18406991 NR Description: expressed protein [Arabidopsis thaliana]

SEQ ID NO: 46068 - protein, 240 aa, Arabidopsis thaliana; identical to SEQ ID NO: 41577
  peptide (1)..(240): Ceres Seq. ID no. 13591789
  misc_feature (1)..(236): Homolog of NCBI NO: 34897094 NR Description: unknown protein [Oryza sativa (japonica
  misc_feature (1)..(229): Homolog of NCBI NO: 15234108 NR Description: hypothetical protein [Arabidopsis thaliana]
  misc_feature (16)..(236): Homolog of NCBI NO: 34904202 NR Description: P0492F05.25 [Oryza sativa (japonica
  misc_feature (1)..(236): Homolog of NCBI NO: 15233147 NR Description: hypothetical protein [Arabidopsis thaliana]
  misc_feature (1)..(236): Homolog of NCBI NO: 34909318 NR Description: OSJNBb0021A09.5 [Oryza sativa (japonica
  misc_feature (1)..(228): Homolog of NCBI NO: 15222616 NR Description: expressed protein [Arabidopsis thaliana]
  misc_feature (1)..(236): Homolog of NCBI NO: 15238125 NR Description: expressed protein [Arabidopsis thaliana]
  misc_feature (1)..(238): Homolog of NCBI NO: 15237093 NR Description: expressed protein [Arabidopsis thaliana]
  misc_feature (1)..(238): Homolog of NCBI NO: 15236556 NR Description: expressed protein [Arabidopsis thaliana]
  misc_feature (1)..(240): Homolog of NCBI NO: 18406991 NR Description: expressed protein [Arabidopsis thaliana]
  misc_feature (1)..(236): Homolog of NCBI NO: 34897094 NR Description: unknown protein [Oryza sativa (japonica
  misc_feature (1)..(229): Homolog of NCBI NO: 15234108 NR Description: hypothetical protein [Arabidopsis thaliana]
  misc_feature (16)..(236): Homolog of NCBI NO: 34904202 NR Description: P0492F05.25 [Oryza sativa (japonica
  misc_feature (1)..(236): Homolog of NCBI NO: 15233147 NR Description: hypothetical protein [Arabidopsis thaliana]
  misc_feature (1)..(236): Homolog of NCBI NO: 34909318 NR Description: OSJNBb0021A09.5 [Oryza sativa (japonica
  misc_feature (1)..(228): Homolog of NCBI NO: 15222616 NR Description: expressed protein [Arabidopsis thaliana]
  misc_feature (1)..(236): Homolog of NCBI NO: 15238125 NR Description: expressed protein [Arabidopsis thaliana]
  misc_feature (1)..(238): Homolog of NCBI NO: 15237093 NR Description: expressed protein [Arabidopsis thaliana]
  misc_feature (1)..(238): Homolog of NCBI NO: 15236556 NR Description: expressed protein [Arabidopsis thaliana]
  misc_feature (1)..(240): Homolog of NCBI NO: 18406991 NR Description: expressed protein [Arabidopsis thaliana]

SEQ ID NO: 46069 - protein, 204 aa, Arabidopsis thaliana; identical to SEQ ID NO: 41578
  peptide (1)..(204): Ceres Seq. ID no. 13591790
  misc_feature (1)..(200): Homolog of NCBI NO: 34897094 NR Description: unknown protein [Oryza sativa (japonica
  misc_feature (1)..(193): Homolog of NCBI NO: 15234108 NR Description: hypothetical protein [Arabidopsis thaliana]
  misc_feature (1)..(200): Homolog of NCBI NO: 34904202 NR Description: P0492F05.25 [Oryza sativa (japonica
  misc_feature (1)..(200): Homolog of NCBI NO: 15233147 NR Description: hypothetical protein [Arabidopsis thaliana]
  misc_feature (1)..(200): Homolog of NCBI NO: 34909318 NR Description: OSJNBb0021A09.5 [Oryza sativa (japonica
  misc_feature (1)..(192): Homolog of NCBI NO: 15222616 NR Description: expressed protein [Arabidopsis thaliana]
  misc_feature (1)..(200): Homolog of NCBI NO: 15238125 NR Description: expressed protein [Arabidopsis thaliana]
  misc_feature (1)..(202): Homolog of NCBI NO: 15237093 NR Description: expressed protein [Arabidopsis thaliana]
  misc_feature (1)..(202): Homolog of NCBI NO: 15236556 NR Description: expressed protein [Arabidopsis thaliana]
  misc_feature (1)..(204): Homolog of NCBI NO: 18406991 NR Description: expressed protein [Arabidopsis thaliana]
  misc_feature (1)..(200): Homolog of NCBI NO: 34897094 NR Description: unknown protein [Oryza sativa (japonica
  misc_feature (1)..(193): Homolog of NCBI NO: 15234108 NR Description: hypothetical protein [Arabidopsis thaliana]
  misc_feature (1)..(200): Homolog of NCBI NO: 34904202 NR Description: P0492F05.25 [Oryza sativa (japonica
  misc_feature (1)..(200): Homolog of NCBI NO: 15233147 NR Description: hypothetical protein [Arabidopsis thaliana]
  misc_feature (1)..(200): Homolog of NCBI NO: 34909318 NR Description: OSJNBb0021A09.5 [Oryza sativa (japonica
  misc_feature (1)..(192): Homolog of NCBI NO: 15222616 NR Description: expressed protein [Arabidopsis thaliana]
  misc_feature (1)..(200): Homolog of NCBI NO: 15238125 NR Description: expressed protein [Arabidopsis thaliana]
  misc_feature (1)..(202): Homolog of NCBI NO: 15237093 NR Description: expressed protein [Arabidopsis thaliana]
  misc_feature (1)..(202): Homolog of NCBI NO: 15236556 NR Description: expressed protein [Arabidopsis thaliana]
  misc_feature (1)..(204): Homolog of NCBI NO: 18406991 NR Description: expressed protein [Arabidopsis thaliana]

SEQ ID NO: 46070 - DNA, 2250 bp, Arabidopsis thaliana
  misc_feature (1)..(2250): Ceres Seq. ID no. 12576055
  misc_feature: MA Experiment ID: 20000495 Result: Up-regulated in Transcription
  misc_feature: MA Experiment 20000495 PARAMETER Experiment Name: At_Guard_Cells_P Parameter: Harvest Date Value: 8/2/2002
  misc_feature: MA Experiment 20000495 PARAMETER Experiment Name: At_Guard_Cells_P Parameter: Organism Value: A. thaliana
  misc_feature: MA Experiment 20000495 PARAMETER Experiment Name: At_Guard_Cells_P Parameter: Tissue Value: Guard Cells vs. Leaves
  misc_feature: MA Experiment ID: 20001557 Result: Up-regulated in Transcription
  misc_feature: MA Experiment 20001557 PARAMETER Experiment Name: At_Drought_Soil_Dry_P Parameter: Age (day) Value: 27
  misc_feature: MA Experiment 20001557 PARAMETER Experiment Name: At_Drought_Soil_Dry_P Parameter: Organism Value: A. thaliana
  misc_feature: MA Experiment 20001557 PARAMETER Experiment Name: At_Drought_Soil_Dry_P Parameter: Plant Line Value: WS
  misc_feature: MA Experiment 20001557 PARAMETER Experiment Name: At_Drought_Soil_Dry_P Parameter: Post Timepoint (hr) Value: 3
  misc_feature: MA Experiment 20001557 PARAMETER Experiment Name: At_Drought_Soil_Dry_P Parameter: Post-Treatment Value: Re-Water vs. No Drought
  misc_feature: MA Experiment 20001557 PARAMETER Experiment Name: At_Drought_Soil_Dry_P Parameter: Timepoint (day) Value: 13
  misc_feature: MA Experiment 20001557 PARAMETER Experiment Name: At_Drought_Soil_Dry_P Parameter: Treatment Value: Drought vs. No Drought
gttggctgtgactggatcctccccctttcttccgggttcttgtcgtgcgtatccggcgaaatgagaagtgtgtagagcaaacagaggtgaagctgagaagttgatcactcactcaatctaagagtgcatgtaattgaagcagcaaccatttctacttttcgaatcttctctgcttcaatccacacccaagggtttcaaggaatatgggtctttcccgttagctaaagataattaattttgtgtccgatggcgtccactcgtaaacccagtggtcatggagctgaagtcgaagctcagaagcgctcctcttcgaatagtagtactaagtcagccaaagccgagacttttgagccgatgcaattacaaagatcagtaacaaacccaagagctgttggaattccggagagtaaacggttgccagagtcttttaggaagcgatctagcgacccggctgtttgtaaacccgatttcagctccctatccactgttcttgagcatgtagattcattgaccattgatgaaaagaaaacatctggctttggcagcgtcaagaccagctctgcttcagccaaattgagtgatggtacgagcagtcttggcaagactagtggaagtgccaagctaagtggccgccttgatttcatggagagtggcaagagcagtatctgcagaggaagcacaagcagtgatgtgagtgacgagagtagctgcagcagctttagtagcactgtcaacaaaccccacaaggccaatgacttaagatgggaagcaatccaggctgttagggttcgtgatgggcttttaggtcttagtcatttcaggctccttaagcggttaggctgcggggacatcgggagtgtttatctctctgagctgagcgggactaagtgttactttgctatgaaggttatggacaagacatcccttgccagtcgcaagaagcttctccgagctcagactgaaagagagattctccagtctttggatcatccatttctccctaccctctacactcactttgagactgagaaattctcatgcctggtgatggaattctgtcccggaggagatttgcatactctcaggcaacgccagccggggaaacatttttctgagcaagcggtaaaattttacatagcagagtcattgttagctttggaatacctgcacatgcttgggattgtgtatcgagatcttaagcctgaaaacgttctagttcgagaagacggacatataatgctctctgattttgacctttctctccgatgtcttgtcagcccgactctagtgaaatctgccgccatcgagtcagatcctttacggaaaaacgtttactgtgtgcagcccgcttgcattgagccctcctgcattcaaccgtcttgcaccgtccccaccacttgcttctccccacgtttgttctcaagcaaatctaagaaggaccgtaaacccaagaatgacaccgcaaatcaagttaggccattgccagagctggtagccgagccaaccgatgcacgttccatgtcatttgtgggcacacacgagtacttggccccagagatcatcaaaggcgaagggcatggcagtgcagtggattggtggacttttgggatattcctttacgagcttctctttgggagaacgcccttcaagggctcaggaaaccgacaaacactgttcaatgtggtgggtcagcctctgcggttcccagaaacgcctgtggtgagttttgcagcgagagacctcatccggggcttgctcatgaaggagccgcagcagcggctggggttcaaacggggagccactgaggttaagcagcaccctttcttcgaaggtgtgaactgggctttgattcggtgtgcgactcccccggaaataccaaagccggttgagctggaaaaaggagctgtgagtgttgcagaggcaccatcaagccagaagacagcagcgggtttggttctgaatgctcagaaagggtctgataactatttggaatttgatttcttctagcgttacggttagacatatggtactctattcttccttagaagactatgtgataaaagatgatcaggtgttgatgtttcgctctttatagattgccatgaattgtaagcttgtttgtatgcataagctgctgtagtttataaaaatgttgtaactgtttctcgtaaccttattagttgttatcagagttcctttttactcgctctatccaaacacaaaacattacatcaaatgtattgtctctgc

SEQ ID NO: 46071 - protein, 586 aa, Arabidopsis thaliana
  peptide (1)..(586): Ceres Seq. ID no. 12576056
  misc_feature (191)..(527): Pfam Name: Protein kinase domain Pfam Description: Protein kinase domain
  misc_feature (1)..(586): Homolog of NCBI NO: 7488270 NR Description: protein kinase homolog T13E15.16 - Arabidopsis
  misc_feature (98)..(586): Homolog of NCBI NO: 7446383 NR Description: probable protein kinase PK1 - potato
  misc_feature (10)..(586): Homolog of NCBI NO: 125568 NR Description: Protein kinase PVPK-1
  misc_feature (164)..(586): Homolog of NCBI NO: 320622 NR Description: probable protein kinase - maize (fragment)
  misc_feature (105)..(586): Homolog of NCBI NO: 99749 NR Description: probable serine/threonine-specific protein kinase
  misc_feature (105)..(586): Homolog of NCBI NO: 15241076 NR Description: serine threonine-specific protein kinase ATPK64
  misc_feature (83)..(586): Homolog of NCBI NO: 15236802 NR Description: putative protein kinase
  misc_feature (65)..(581): Homolog of NCBI NO: 1346057 NR Description: Protein kinase G11A
  misc_feature (1)..(586): Homolog of NCBI NO: 17064850 NR Description: protein kinase 5 [Arabidopsis thaliana]
  misc_feature (1)..(586): Homolog of NCBI NO: 15238798 NR Description: protein kinase (EC 2.7.1.37) 5 (pir||JN0505)
MASTRKPSGHGAEVEAQKRSSSNSSTKSAKAETFEPMQLQRSVTNPRAVGIPESKRLPESFRKRSSDPAVCKPDFSSLSTVLEHVDSLTIDEKKTSGFGSVKTSSASAKLSDGTSSLGKTSGSAKLSGRLDFMESGKSSICRGSTSSDVSDESSCSSFSSTVNKPHKANDLRWEAIQAVRVRDGLLGLSHFRLLKRLGCGDIGSVYLSELSGTKCYFAMKVMDKTSLASRKKLLRAQTEREILQSLDHPFLPTLYTHFETEKFSCLVMEFCPGGDLHTLRQRQPGKHFSEQAVKFYIAESLLALEYLHMLGIVYRDLKPENVLVREDGHIMLSDFDLSLRCLVSPTLVKSAAIESDPLRKNVYCVQPACIEPSCIQPSCTVPTTCFSPRLFSSKSKKDRKPKNDTANQVRPLPELVAEPTDARSMSFVGTHEYLAPEIIKGEGHGSAVDWWTFGIFLYELLFGRTPFKGSGNRQTLFNVVGQPLRFPETPVVSFAARDLIRGLLMKEPQQRLGFKRGATEVKQHPFFEGVNWALIRCATPPEIPKPVELEKGAVSVAEAPSSQKTAAGLVLNAQKGSDNYLEFDFF

SEQ ID NO: 46072 - protein, 550 aa, Arabidopsis thaliana
  peptide (1)..(550): Ceres Seq. ID no. 12576057
  misc_feature (155)..(491): Pfam Name: Protein kinase domain Pfam Description: Protein kinase domain
  misc_feature (1)..(550): Homolog of NCBI NO: 7488270 NR Description: protein kinase homolog T13E15.16 - Arabidopsis
  misc_feature (62)..(550): Homolog of NCBI NO: 7446383 NR Description: probable protein kinase PK1 - potato
  misc_feature (1)..(550): Homolog of NCBI NO: 125568 NR Description: Protein kinase PVPK-1
  misc_feature (128)..(550): Homolog of NCBI NO: 320622 NR Description: probable protein kinase - maize (fragment)
  misc_feature (69)..(550): Homolog of NCBI NO: 99749 NR Description: probable serine/threonine-specific protein kinase
  misc_feature (69)..(550): Homolog of NCBI NO: 15241076 NR Description: serine threonine-specific protein kinase ATPK64
  misc_feature (47)..(550): Homolog of NCBI NO: 15236802 NR Description: putative protein kinase
  misc_feature (29)..(545): Homolog of NCBI NO: 1346057 NR Description: Protein kinase G11A
  misc_feature (1)..(550): Homolog of NCBI NO: 17064850 NR Description: protein kinase 5 [Arabidopsis thaliana]
  misc_feature (1)..(550): Homolog of NCBI NO: 15238798 NR Description: protein kinase (EC 2.7.1.37) 5 (pir||JN0505)
MQLQRSVTNPRAVGIPESKRLPESFRKRSSDPAVCKPDFSSLSTVLEHVDSLTIDEKKTSGFGSVKTSSASAKLSDGTSSLGKTSGSAKLSGRLDFMESGKSSICRGSTSSDVSDESSCSSFSSTVNKPHKANDLRWEAIQAVRVRDGLLGLSHFRLLKRLGCGDIGSVYLSELSGTKCYFAMKVMDKTSLASRKKLLRAQTEREILQSLDHPFLPTLYTHFETEKFSCLVMEFCPGGDLHTLRQRQPGKHFSEQAVKFYIAESLLALEYLHMLGIVYRDLKPENVLVREDGHIMLSDFDLSLRCLVSPTLVKSAAIESDPLRKNVYCVQPACIEPSCIQPSCTVPTTCFSPRLFSSKSKKDRKPKNDTANQVRPLPELVAEPTDARSMSFVGTHEYLAPEIIKGEGHGSAVDWWTFGIFLYELLFGRTPFKGSGNRQTLFNVVGQPLRFPETPVVSFAARDLIRGLLMKEPQQRLGFKRGATEVKQHPFFEGVNWALIRCATPPEIPKPVELEKGAVSVAEAPSSQKTAAGLVLNAQKGSDNYLEFDFF

SEQ ID NO: 46073 - protein, 454 aa, Arabidopsis thaliana
  peptide (1)..(454): Ceres Seq. ID no. 12576058
  misc_feature (59)..(395): Pfam Name: Protein kinase domain Pfam Description: Protein kinase domain
  misc_feature (1)..(454): Homolog of NCBI NO: 7488270 NR Description: protein kinase homolog T13E15.16 - Arabidopsis
  misc_feature (1)..(454): Homolog of NCBI NO: 7446383 NR Description: probable protein kinase PK1 - potato
  misc_feature (1)..(454): Homolog of NCBI NO: 125568 NR Description: Protein kinase PVPK-1
  misc_feature (32)..(454): Homolog of NCBI NO: 320622 NR Description: probable protein kinase - maize (fragment)
  misc_feature (1)..(454): Homolog of NCBI NO: 99749 NR Description: probable serine/threonine-specific protein kinase
  misc_feature (1)..(454): Homolog of NCBI NO: 15241076 NR Description: serine threonine-specific protein kinase ATPK64
  misc_feature (1)..(454): Homolog of NCBI NO: 15236802 NR Description: putative protein kinase
  misc_feature (1)..(449): Homolog of NCBI NO: 1346057 NR Description: Protein kinase G11A
  misc_feature (1)..(454): Homolog of NCBI NO: 17064850 NR Description: protein kinase 5 [Arabidopsis thaliana]
  misc_feature (1)..(454): Homolog of NCBI NO: 15238798 NR Description: protein kinase (EC 2.7.1.37) 5 (pir||JN0505)
MESGKSSICRGSTSSDVSDESSCSSFSSTVNKPHKANDLRWEAIQAVRVRDGLLGLSHFRLLKRLGCGDIGSVYLSELSGTKCYFAMKVMDKTSLASRKKLLRAQTEREILQSLDHPFLPTLYTHFETEKFSCLVMEFCPGGDLHTLRQRQPGKHFSEQAVKFYIAESLLALEYLHMLGIVYRDLKPENVLVREDGHIMLSDFDLSLRCLVSPTLVKSAAIESDPLRKNVYCVQPACIEPSCIQPSCTVPTTCFSPRLFSSKSKKDRKPKNDTANQVRPLPELVAEPTDARSMSFVGTHEYLAPEIIKGEGHGSAVDWWTFGIFLYELLFGRTPFKGSGNRQTLFNVVGQPLRFPETPVVSFAARDLIRGLLMKEPQQRLGFKRGATEVKQHPFFEGVNWALIRCATPPEIPKPVELEKGAVSVAEAPSSQKTAAGLVLNAQKGSDNYLEFDFF

SEQ ID NO: 46074 - DNA, 1822 bp, Arabidopsis thaliana
  misc_feature (1)..(1822): Ceres Seq. ID no. 12574917
  misc_feature: MA Experiment ID: 20000113 Result: Up-regulated in Transcription
  misc_feature: MA Experiment 20000113 PARAMETER Experiment Name: At_42deg_Heat_cDNA_P Parameter: Temperature (deg C) Value: 42 vs. 22
  misc_feature: MA Experiment 20000113 PARAMETER Experiment Name: At_42deg_Heat_cDNA_P Parameter: Timepoint (hr) Value: 8
  misc_feature: MA Experiment 20000113 PARAMETER Experiment Name: At_42deg_Heat_cDNA_P Parameter: Tissue Value: Aerial
  misc_feature: MA Experiment ID: 20000179 Result: Up-regulated in Transcription
  misc_feature: MA Experiment 20000179 PARAMETER Experiment Name: At_Germinating_Seeds_P Parameter: Age (hr) Value: 6 vs. 0
  misc_feature: MA Experiment 20000179 PARAMETER Experiment Name: At_Germinating_Seeds_P Parameter: Tissue Value: Germinating Seeds
  misc_feature: MA Experiment ID: 20000180 Result: Up-regulated in Transcription
  misc_feature: MA Experiment 20000180 PARAMETER Experiment Name: At_Germinating_Seeds_P Parameter: Age (hr) Value: 24 vs. 0
  misc_feature: MA Experiment 20000180 PARAMETER Experiment Name: At_Germinating_Seeds_P Parameter: Tissue Value: Germinating Seeds
  misc_feature: MA Experiment ID: 20000224 Result: Up-regulated in Transcription
  misc_feature: MA Experiment ID: 20001911 Result: Up-regulated in Transcription
  misc_feature: MA Experiment 20001911 PARAMETER Experiment Name: At_Drought_Reproduction_P Parameter: Age (day) Value: 40
  misc_feature: MA Experiment 20001911 PARAMETER Experiment Name: At_Drought_Reproduction_P Parameter: Organism Value: A. thaliana
  misc_feature: MA Experiment 20001911 PARAMETER Experiment Name: At_Drought_Reproduction_P Parameter: Plant Line Value: WS
  misc_feature: MA Experiment 20001911 PARAMETER Experiment Name: At_Drought_Reproduction_P Parameter: Timepoint (day) Value: 10
  misc_feature: MA Experiment 20001911 PARAMETER Experiment Name: At_Drought_Reproduction_P Parameter: Tissue Value: Flowers
  misc_feature: MA Experiment 20001911 PARAMETER Experiment Name: At_Drought_Reproduction_P Parameter: Treatment Value: Drought vs. No Drought
aaaaaaaggaccagctcagatgagtctggagtttccaagtttaaaacctctctacctcgatttgagcaaatcctgatttactctcatcctcatcatctctcatcatcgagattcatagtctcttttgccgcttggattcttccaaggttagtgagctgctatggcaactcatcagcaaacgcaacctccttccgattttcccgctcttgccgatgaaaattcccagattccagaggctactaagcctgctaatgaggttcagcaagctaccatagctcaggatcctccaacatctgtgtttaagaattctgaaccaatacgggaggatcaaattcagaacgctatcaaattcctttcgcacccgagggttagaggctctcctgttatacatagaagatcttttcttgagaggaaaggtctcactaaagaagagattgacgaagctttccgccgtgttcctgatccaccaccaagttcgcagacaactgttacaacaagtcaagatggacagcaagcagtgtcaactgttcagccacaagctatgcagcctgtagtagctgctcctgctccactcattgtgactccacaggcagcttttctctctcggtttcgctggtaccatgctattcttgctgttggagtacttgcagcctctggtgccggtacagctgtttttattaagagatctctcatacccagatttaaatcctgggtccaaagaattatgttggaagaagaaactgaccctctgaagaaagctgatgctaaacctagcttagctgaagaagctgtagctgcagccaaagctgcttctgcggctgcttctgatgtagccagggttagtcaggaaatgatgataacaaagaatgaagagaggaaatattttgaggacttaacgcacctgttaggtgtccaagtacaagaaatgaagtccttgagcaataatatccgtaagcttgaagggcaatccaacaacatcccaaagatttattcagctgatcaagaggtttataatggttcggtcactacagcaaggaaaccctatacaaatggcagcaatgttgattatgacacacgttcagcacgatctgcatctcctcctgcggcaccagctgattcgtcggcgccccctcatccaaagtcatacatggatataatgtctatgatccagagaggagagaagccttcaaacattcgggagattaacgacatgccgcccaatccaaaccaaccactatcagatccacgcattgctcccaaatcaaagccatgggactatggtcaagcgccgcaagacgagagttccaatggtcaatggtggcaacagaaaaaccctagatccacggatttcggatacgagacaacaacagcggcgcgtttcactgctaaccaaaatgaaacaagtacaatggaaccagcagctttccagaggcaacgatcatgggtacctccacaaccacctccagttgccatggcagaagcagtcgaggccattcgccgtcctaagccacaagctaagatagaccaagaagcagctgctagtgatggccagtcaggtgtgagcgatgagttacagaagatcactaaattctccgaatctggtggtgatgggtcaggaggaattaagatcgcagagatacaagaagaaacagaacagcaacatatcagccaggaagggaactaaaaacaataataattaggggttattgatactttatgaggtttgcctgtaagaaaacatgcatttaggtcttgggatttatcaccacctaccttcatttaataaaatatgtcttgctacacaagtaaactcagtcatttg

SEQ ID NO: 46075 - protein, 507 aa, Arabidopsis thaliana
  peptide (1)..(507): Ceres Seq. ID no. 12574918
  misc_feature (53)..(181): Pfam Name: Peroxisomal membrane anchor protein (Pex14p) Pfam Description: Peroxisomal membrane anchor protein (Pex14p)
  misc_feature (28)..(62): Homolog of NCBI NO: 10177458 NR Description: contains similarity to S-locus protein
  misc_feature (34)..(100): Homolog of NCBI NO: 9945056 NR Description: rice EST D22333 corresponds to a region of the
  misc_feature (256)..(507): Homolog of NCBI NO: 21593914 NR Description: unknown [Arabidopsis thaliana]
  misc_feature (128)..(507): Homolog of NCBI NO: 20466350 NR Description: putative protein [Arabidopsis thaliana]
  misc_feature (1)..(507): Homolog of NCBI NO: 11121113 NR Description: peroxin Pex14 [Arabidopsis thaliana]
  misc_feature (1)..(507): Homolog of NCBI NO: 11094252 NR Description: PEX14 [Arabidopsis thaliana]
  misc_feature (1)..(507): Homolog of NCBI NO: 30697742 NR Description: (PEX14) protein [Arabidopsis thaliana]
MATHQQTQPPSDFPALADENSQIPEATKPANEVQQATIAQDPPTSVFKNSEPIREDQIQNAIKFLSHPRVRGSPVIHRRSFLERKGLTKEEIDEAFRRVPDPPPSSQTTVTTSQDGQQAVSTVQPQAMQPVVAAPAPLIVTPQAAFLSRFRWYHAILAVGVLAASGAGTAVFIKRSLIPRFKSWVQRIMLEEETDPLKKADAKPSLAEEAVAAAKAASAAASDVARVSQEMMITKNEERKYFEDLTHLLGVQVQEMKSLSNNIRKLEGQSNNIPKIYSADQEVYNGSVTTARKPYTNGSNVDYDTRSARSASPPAAPADSSAPPHPKSYMDIMSMIQRGEKPSNIREINDMPPNPNQPLSDPRIAPKSKPWDYGQAPQDESSNGQWWQQKNPRSTDFGYETTTAARFTANQNETSTMEPAAFQRQRSWVPPQPPPVAMAEAVEAIRRPKPQAKIDQEAAASDGQSGVSDELQKITKFSESGGDGSGGIKIAEIQEETEQQHISQEGN

SEQ ID NO: 46076 - protein, 380 aa, Arabidopsis thaliana
  peptide (1)..(380): Ceres Seq. ID no. 12574919
  misc_feature (1)..(54): Pfam Name: Peroxisomal membrane anchor protein (Pex14p) Pfam Description: Peroxisomal membrane anchor protein (Pex14p)
  misc_feature (129)..(380): Homolog of NCBI NO: 21593914 NR Description: unknown [Arabidopsis thaliana]
  misc_feature (1)..(380): Homolog of NCBI NO: 20466350 NR Description: putative protein [Arabidopsis thaliana]
  misc_feature (1)..(380): Homolog of NCBI NO: 11121113 NR Description: peroxin Pex14 [Arabidopsis thaliana]
  misc_feature (1)..(380): Homolog of NCBI NO: 11094252 NR Description: PEX14 [Arabidopsis thaliana]
  misc_feature (1)..(380): Homolog of NCBI NO: 30697742 NR Description: (PEX14) protein [Arabidopsis thaliana]
MQPVVAAPAPLIVTPQAAFLSRFRWYHAILAVGVLAASGAGTAVFIKRSLIPRFKSWVQRIMLEEETDPLKKADAKPSLAEEAVAAAKAASAAASDVARVSQEMMITKNEERKYFEDLTHLLGVQVQEMKSLSNNIRKLEGQSNNIPKIYSADQEVYNGSVTTARKPYTNGSNVDYDTRSARSASPPAAPADSSAPPHPKSYMDIMSMIQRGEKPSNIREINDMPPNPNQPLSDPRIAPKSKPWDYGQAPQDESSNGQWWQQKNPRSTDFGYETTTAARFTANQNETSTMEPAAFQRQRSWVPPQPPPVAMAEAVEAIRRPKPQAKIDQEAAASDGQSGVSDELQKITKFSESGGDGSGGIKIAEIQEETEQQHISQEGN

SEQ ID NO: 46077 - protein, 319 aa, Arabidopsis thaliana
  peptide (1)..(319): Ceres Seq. ID no. 12574920
  misc_feature (68)..(319): Homolog of NCBI NO: 21593914 NR Description: unknown [Arabidopsis thaliana]
  misc_feature (1)..(319): Homolog of NCBI NO: 20466350 NR Description: putative protein [Arabidopsis thaliana]
  misc_feature (1)..(319): Homolog of NCBI NO: 11121113 NR Description: peroxin Pex14 [Arabidopsis thaliana]
  misc_feature (1)..(319): Homolog of NCBI NO: 11094252 NR Description: PEX14 [Arabidopsis thaliana]
  misc_feature (1)..(319): Homolog of NCBI NO: 30697742 NR Description: (PEX14) protein [Arabidopsis thaliana]
MLEEETDPLKKADAKPSLAEEAVAAAKAASAAASDVARVSQEMMITKNEERKYFEDLTHLLGVQVQEMKSLSNNIRKLEGQSNNIPKIYSADQEVYNGSVTTARKPYTNGSNVDYDTRSARSASPPAAPADSSAPPHPKSYMDIMSMIQRGEKPSNIREINDMPPNPNQPLSDPRIAPKSKPWDYGQAPQDESSNGQWWQQKNPRSTDFGYETTTAARFTANQNETSTMEPAAFQRQRSWVPPQPPPVAMAEAVEAIRRPKPQAKIDQEAAASDGQSGVSDELQKITKFSESGGDGSGGIKIAEIQEETEQQHISQEGN

SEQ ID NO: 46078 - DNA, 1262 bp, Arabidopsis thaliana
  misc_feature (1)..(1262): Ceres Seq. ID no. 13578513
  misc_feature: MA Experiment ID: 20000173 Result: Up-regulated in Transcription
  misc_feature: MA Experiment 20000173 PARAMETER Experiment Name: At_42deg_Heat_P Parameter: Age (day) Value: 14
  misc_feature: MA Experiment 20000173 PARAMETER Experiment Name: At_42deg_Heat_P Parameter: Organism Value: A. thaliana
  misc_feature: MA Experiment 20000173 PARAMETER Experiment Name: At_42deg_Heat_P Parameter: Plant Line Value: WS
  misc_feature: MA Experiment 20000173 PARAMETER Experiment Name: At_42deg_Heat_P Parameter: Temperature (deg C) Value: 42 vs. 22
  misc_feature: MA Experiment 20000173 PARAMETER Experiment Name: At_42deg_Heat_P Parameter: Timepoint (hr) Value: 6
  misc_feature: MA Experiment 20000173 PARAMETER Experiment Name: At_42deg_Heat_P Parameter: Tissue Value: Aerial
  misc_feature: MA Experiment ID: 20000234 Result: Down-regulated in Transcription
  misc_feature: MA Experiment 20000234 PARAMETER Experiment Name: At_Siliques_P Parameter: Age (day) Value: 21
  misc_feature: MA Experiment 20000234 PARAMETER Experiment Name: At_Siliques_P Parameter: Organism Value: A. thaliana
  misc_feature: MA Experiment 20000234 PARAMETER Experiment Name: At_Siliques_P Parameter: Plant Line Value: WS
  misc_feature: MA Experiment 20000234 PARAMETER Experiment Name: At_Siliques_P Parameter: Tissue Value: Less Than 5mm Siliques vs. Whole Plant
  misc_feature: MA Experiment ID: 20000264 Result: Down-regulated in Transcription
  misc_feature: MA Experiment 20000264 PARAMETER Experiment Name: At_Open_Flower_P Parameter: Age (day) Value: 21
  misc_feature: MA Experiment 20000264 PARAMETER Experiment Name: At_Open_Flower_P Parameter: Plant Line Value: WS
  misc_feature: MA Experiment 20000264 PARAMETER Experiment Name: At_Open_Flower_P Parameter: Tissue Value: Open Flower vs. Whole Plant
  misc_feature: MA Experiment ID: 20000265 Result: Down-regulated in Transcription
  misc_feature: MA Experiment 20000265 PARAMETER Experiment Name: At_Open_Flower_P Parameter: Age (day) Value: 21
  misc_feature: MA Experiment 20000265 PARAMETER Experiment Name: At_Open_Flower_P Parameter: Plant Line Value: WS
  misc_feature: MA Experiment 20000265 PARAMETER Experiment Name: At_Open_Flower_P Parameter: Tissue Value: Closed Flower vs. Whole Plant
  misc_feature: MA Experiment ID: 20000455 Result: Up-regulated in Transcription
  misc_feature: MA Experiment 20000455 PARAMETER Experiment Name: At_100uM_ABA_P Parameter: Age (day) Value: 16
  misc_feature: MA Experiment 20000455 PARAMETER Experiment Name: At_100uM_ABA_P Parameter: Organism Value: A. thaliana
  misc_feature: MA Experiment 20000455 PARAMETER Experiment Name: At_100uM_ABA_P Parameter: Plant Line Value: WS
  misc_feature: MA Experiment 20000455 PARAMETER Experiment Name: At_100uM_ABA_P Parameter: Timepoint (hr) Value: 48
  misc_feature: MA Experiment 20000455 PARAMETER Experiment Name: At_100uM_ABA_P Parameter: Tissue Value: Aerial
  misc_feature: MA Experiment 20000455 PARAMETER Experiment Name: At_100uM_ABA_P Parameter: Treatment Value: 100uM ABA vs. No Treatment
  misc_feature: MA Experiment ID: 20000495 Result: Down-regulated in Transcription
  misc_feature: MA Experiment 20000495 PARAMETER Experiment Name: At_Guard_Cells_P Parameter: Harvest Date Value: 8/2/2002
  misc_feature: MA Experiment 20000495 PARAMETER Experiment Name: At_Guard_Cells_P Parameter: Organism Value: A. thaliana
  misc_feature: MA Experiment 20000495 PARAMETER Experiment Name: At_Guard_Cells_P Parameter: Tissue Value: Guard Cells vs. Leaves
  misc_feature: MA Experiment ID: 20000496 Result: Down-regulated in Transcription
  misc_feature: MA Experiment 20000496 PARAMETER Experiment Name: At_Guard_Cells_P Parameter: Harvest Date Value: 7/19/2002
  misc_feature: MA Experiment 20000496 PARAMETER Experiment Name: At_Guard_Cells_P Parameter: Organism Value: Canola
  misc_feature: MA Experiment 20000496 PARAMETER Experiment Name: At_Guard_Cells_P Parameter: Tissue Value: Guard Cells vs. Leaves
  misc_feature: MA Experiment ID: 20001450 Result: Up-regulated in Transcription
  misc_feature: MA Experiment 20001450 PARAMETER Experiment Name: At_Far-red-induction_P Parameter: Age (day) Value: 7
  misc_feature: MA Experiment 20001450 PARAMETER Experiment Name: At_Far-red-induction_P Parameter: Light Value: Far-red vs. White
  misc_feature: MA Experiment 20001450 PARAMETER Experiment Name: At_Far-red-induction_P Parameter: Organism Value: A. thaliana
  misc_feature: MA Experiment 20001450 PARAMETER Experiment Name: At_Far-red-induction_P Parameter: Plant Line Value: Columbia
  misc_feature: MA Experiment 20001450 PARAMETER Experiment Name: At_Far-red-induction_P Parameter: Timepoint (hr) Value: 8
  misc_feature: MA Experiment 20001450 PARAMETER Experiment Name: At_Far-red-induction_P Parameter: Tissue Value: Whole Plant
  misc_feature: MA Experiment ID: 20001560 Result: Down-regulated in Transcription
  misc_feature: MA Experiment 20001560 PARAMETER Experiment Name: At_Drought_Soil_Dry_P Parameter: Age (day) Value: 28
  misc_feature: MA Experiment 20001560 PARAMETER Experiment Name: At_Drought_Soil_Dry_P Parameter: Organism Value: A. thaliana
  misc_feature: MA Experiment 20001560 PARAMETER Experiment Name: At_Drought_Soil_Dry_P Parameter: Plant Line Value: WS
  misc_feature: MA Experiment 20001560 PARAMETER Experiment Name: At_Drought_Soil_Dry_P Parameter: Post Timepoint (hr) Value: None
  misc_feature: MA Experiment 20001560 PARAMETER Experiment Name: At_Drought_Soil_Dry_P Parameter: Post-Treatment Value: None
  misc_feature: MA Experiment 20001560 PARAMETER Experiment Name: At_Drought_Soil_Dry_P Parameter: Timepoint (day) Value: 14
  misc_feature: MA Experiment 20001560 PARAMETER Experiment Name: At_Drought_Soil_Dry_P Parameter: Treatment Value: Drought vs. No Drought
  misc_feature: MA Experiment ID: 20001761 Result: Down-regulated in Transcription
  misc_feature: MA Experiment 20001761 PARAMETER Experiment Name: At_50mM_NH4NO3_L-to-H_P Parameter: Timepoint (hr) Value: 4
  misc_feature: MA Experiment 20001761 PARAMETER Experiment Name: At_50mM_NH4NO3_L-to-H_P Parameter: Tissue Value: Siliques
  misc_feature: MA Experiment 20001761 PARAMETER Experiment Name: At_50mM_NH4NO3_L-to-H_P Parameter: Treatment Value: 50mM NH4NO3 vs 100mM Mannitol
gatcccacctctcttgtctctctatctctctctctccgcgcttgaggttggcgtcggagattaccaacaagagctctctccaatcgtcgtctctttgatatatggcgtctcagcctgcaggtggcagtcctcctaaaccttgggaaaaagaaggaaatacatctggtcctaatcctttcaggcctccttctaatactagcacggctggttcagttgaggcttctggcacagctaatcctggtgaagtagttcctccgcccgtgaacaggcctaatacagctgctaatatgaattcactcagtaggcctgtaccggctagaccttgggaacagcagaattatgggagcactatggggggaggttatggttcaaatctaggtatgacctctgggtatgggtcaggtacatatggttcagcattaggtgggtatggttcatcatatggtggtgggatgtatggaggtagtagcatgtatagaggaggttatggtggtggtgggctctatggaagttcaggcatgtatggtggtggtgcgatgggtggttatggtggcacgatgggtggttatggtatgggtatgggaacgggaatgggaatggggatgggaatgggaatgggtggtccttatggtagtcaagatccaaatgacccttttaatcaacctccatctccaccaggcttctggatatcatttctccgtgtgatgcaaggtgctgtgaatttctttggccgtgtagcgatgcttatagatcaaaacacacaggcctttcacatgttcatgtctgcccttcttcagctatttgatcgtggtggtatgttatatggagaattagcaagatttgtactgcgtatgcttggggtgagaacaaggcctagaaagatgcagcagccaccacaagggcctaatgggctacctttaccacaccagccacatggaaaccagaactacctcgaggggcctaaaactgctgcaccaggtggtggcggtggttgggacaatgtatggggcaactaagttacttctttcattacccaaatccttcaacattgctttaaaacaccatgacaaccagttggttaccgatagaagataaaccgtgtagcagcctgcaacacagattgggatgtacgaaaaccagatgtttgtttgcaaattgagtctcttcttctcttctctctatctctcagtattctctgattgtgtggtaaaggatagatgtcgtactctacaaaatggaaagtgaagttttaagtgtttgtt

SEQ ID NO: 46079 - protein, 304 aa, Arabidopsis thaliana
  peptide (1)..(304): Ceres Seq. ID no. 13578514
  misc_feature (93)..(163): Pfam Name: Keratin Pfam Description: Keratin
  misc_feature (93)..(163): Pfam Name: Keratin Pfam Description: Keratin
  misc_feature (79)..(177): Homolog of NCBI NO: 15221187 NR Description: glycine-rich RNA-binding protein [Arabidopsis
  misc_feature (36)..(180): Homolog of NCBI NO: 14140115 NR Description: putative protein [Oryza sativa]
  misc_feature (80)..(174): Homolog of NCBI NO: 17555156 NR Description: Predicted CDS, putative protein, nematode
  misc_feature (81)..(177): Homolog of NCBI NO: 37534900 NR Description: putative glycine-rich protein
  misc_feature (80)..(177): Homolog of NCBI NO: 39588898 NR Description: Hypothetical protein CBG15737 [Caenorhabditis
  misc_feature (79)..(177): Homolog of NCBI NO: 15221187 NR Description: glycine-rich RNA-binding protein [Arabidopsis
  misc_feature (80)..(174): Homolog of NCBI NO: 17555156 NR Description: Predicted CDS, putative protein, nematode
  misc_feature (80)..(177): Homolog of NCBI NO: 39588898 NR Description: Hypothetical protein CBG15737 [Caenorhabditis
  misc_feature (1)..(304): Homolog of NCBI NO: 15231481 NR Description: glycine-rich protein [Arabidopsis thaliana]
  misc_feature (8)..(304): Homolog of NCBI NO: 34395055 NR Description: putative glycine-rich protein
  misc_feature (80)..(193): Homolog of NCBI NO: 17555156 NR Description: Predicted CDS, putative protein, nematode
  misc_feature (80)..(177): Homolog of NCBI NO: 39588898 NR Description: Hypothetical protein CBG15737 [Caenorhabditis
  misc_feature (63)..(257): Homolog of NCBI NO: 2498763 NR Description: Peroxisomal membrane protein PEX13 (Peroxin-13)
  misc_feature (81)..(177): Homolog of NCBI NO: 37534900 NR Description: putative glycine-rich protein
  misc_feature (36)..(180): Homolog of NCBI NO: 14140115 NR Description: putative protein [Oryza sativa]
  misc_feature (63)..(257): Homolog of NCBI NO: 2498763 NR Description: Peroxisomal membrane protein PEX13 (Peroxin-13)
  misc_feature (80)..(177): Homolog of NCBI NO: 39588898 NR Description: Hypothetical protein CBG15737 [Caenorhabditis
  misc_feature (80)..(193): Homolog of NCBI NO: 17555156 NR Description: Predicted CDS, putative protein, nematode
  misc_feature (8)..(304): Homolog of NCBI NO: 34395055 NR Description: putative glycine-rich protein
  misc_feature (1)..(304): Homolog of NCBI NO: 15231481 NR Description: glycine-rich protein [Arabidopsis thaliana]
MASQPAGGSPPKPWEKEGNTSGPNPFRPPSNTSTAGSVEASGTANPGEVVPPPVNRPNTAANMNSLSRPVPARPWEQQNYGSTMGGGYGSNLGMTSGYGSGTYGSALGGYGSSYGGGMYGGSSMYRGGYGGGGLYGSSGMYGGGAMGGYGGTMGGYGMGMGTGMGMGMGMGMGGPYGSQDPNDPFNQPPSPPGFWISFLRVMQGAVNFFGRVAMLIDQNTQAFHMFMSALLQLFDRGGMLYGELARFVLRMLGVRTRPRKMQQPPQGPNGLPLPHQPHGNQNYLEGPKTAAPGGGGGWDNVWGN

SEQ ID NO: 46080 - protein, 242 aa, Arabidopsis thaliana
  peptide (1)..(242): Ceres Seq. ID no. 13578515
  misc_feature (31)..(101): Pfam Name: Keratin Pfam Description: Keratin
  misc_feature (31)..(101): Pfam Name: Keratin Pfam Description: Keratin
  misc_feature (17)..(115): Homolog of NCBI NO: 15221187 NR Description: glycine-rich RNA-binding protein [Arabidopsis
  misc_feature (1)..(118): Homolog of NCBI NO: 14140115 NR Description: putative protein [Oryza sativa]
  misc_feature (18)..(112): Homolog of NCBI NO: 17555156 NR Description: Predicted CDS, putative protein, nematode
  misc_feature (19)..(115): Homolog of NCBI NO: 37534900 NR Description: putative glycine-rich protein
  misc_feature (18)..(115): Homolog of NCBI NO: 39588898 NR Description: Hypothetical protein CBG15737 [Caenorhabditis
  misc_feature (17)..(115): Homolog of NCBI NO: 15221187 NR Description: glycine-rich RNA-binding protein [Arabidopsis
  misc_feature (18)..(112): Homolog of NCBI NO: 17555156 NR Description: Predicted CDS, putative protein, nematode
  misc_feature (18)..(115): Homolog of NCBI NO: 39588898 NR Description: Hypothetical protein CBG15737 [Caenorhabditis
  misc_feature (1)..(242): Homolog of NCBI NO: 15231481 NR Description: glycine-rich protein [Arabidopsis thaliana]
  misc_feature (1)..(242): Homolog of NCBI NO: 34395055 NR Description: putative glycine-rich protein
  misc_feature (18)..(131): Homolog of NCBI NO: 17555156 NR Description: Predicted CDS, putative protein, nematode
  misc_feature (18)..(115): Homolog of NCBI NO: 39588898 NR Description: Hypothetical protein CBG15737 [Caenorhabditis
  misc_feature (1)..(195): Homolog of NCBI NO: 2498763 NR Description: Peroxisomal membrane protein PEX13 (Peroxin-13)
  misc_feature (19)..(115): Homolog of NCBI NO: 37534900 NR Description: putative glycine-rich protein
  misc_feature (1)..(118): Homolog of NCBI NO: 14140115 NR Description: putative protein [Oryza sativa]
  misc_feature (1)..(195): Homolog of NCBI NO: 2498763 NR Description: Peroxisomal membrane protein PEX13 (Peroxin-13)
  misc_feature (18)..(115): Homolog of NCBI NO: 39588898 NR Description: Hypothetical protein CBG15737 [Caenorhabditis
  misc_feature (18)..(131): Homolog of NCBI NO: 17555156 NR Description: Predicted CDS, putative protein, nematode
  misc_feature (1)..(242): Homolog of NCBI NO: 34395055 NR Description: putative glycine-rich protein
  misc_feature (1)..(242): Homolog of NCBI NO: 15231481 NR Description: glycine-rich protein [Arabidopsis thaliana]
MNSLSRPVPARPWEQQNYGSTMGGGYGSNLGMTSGYGSGTYGSALGGYGSSYGGGMYGGSSMYRGGYGGGGLYGSSGMYGGGAMGGYGGTMGGYGMGMGTGMGMGMGMGMGGPYGSQDPNDPFNQPPSPPGFWISFLRVMQGAVNFFGRVAMLIDQNTQAFHMFMSALLQLFDRGGMLYGELARFVLRMLGVRTRPRKMQQPPQGPNGLPLPHQPHGNQNYLEGPKTAAPGGGGGWDNVWGN

SEQ ID NO: 46081 - protein, 221 aa, Arabidopsis thaliana
  peptide (1)..(221): Ceres Seq. ID no. 13578516
  misc_feature (10)..(80): Pfam Name: Keratin Pfam Description: Keratin
  misc_feature (10)..(80): Pfam Name: Keratin Pfam Description: Keratin
  misc_feature (1)..(94): Homolog of NCBI NO: 15221187 NR Description: glycine-rich RNA-binding protein [Arabidopsis
  misc_feature (1)..(97): Homolog of NCBI NO: 14140115 NR Description: putative protein [Oryza sativa]
  misc_feature (1)..(91): Homolog of NCBI NO: 17555156 NR Description: Predicted CDS, putative protein, nematode
  misc_feature (1)..(94): Homolog of NCBI NO: 37534900 NR Description: putative glycine-rich protein
  misc_feature (1)..(94): Homolog of NCBI NO: 39588898 NR Description: Hypothetical protein CBG15737 [Caenorhabditis
  misc_feature (1)..(94): Homolog of NCBI NO: 15221187 NR Description: glycine-rich RNA-binding protein [Arabidopsis
  misc_feature (1)..(91): Homolog of NCBI NO: 17555156 NR Description: Predicted CDS, putative protein, nematode
  misc_feature (1)..(94): Homolog of NCBI NO: 39588898 NR Description: Hypothetical protein CBG15737 [Caenorhabditis
  misc_feature (1)..(221): Homolog of NCBI NO: 15231481 NR Description: glycine-rich protein [Arabidopsis thaliana]
  misc_feature (1)..(221): Homolog of NCBI NO: 34395055 NR Description: putative glycine-rich protein
  misc_feature (1)..(110): Homolog of NCBI NO: 17555156 NR Description: Predicted CDS, putative protein, nematode
  misc_feature (1)..(94): Homolog of NCBI NO: 39588898 NR Description: Hypothetical protein CBG15737 [Caenorhabditis
  misc_feature (1)..(174): Homolog of NCBI NO: 2498763 NR Description: Peroxisomal membrane protein PEX13 (Peroxin-13)
  misc_feature (1)..(94): Homolog of NCBI NO: 37534900 NR Description: putative glycine-rich protein
  misc_feature (1)..(97): Homolog of NCBI NO: 14140115 NR Description: putative protein [Oryza sativa]
  misc_feature (1)..(174): Homolog of NCBI NO: 2498763 NR Description: Peroxisomal membrane protein PEX13 (Peroxin-13)
  misc_feature (1)..(94): Homolog of NCBI NO: 39588898 NR Description: Hypothetical protein CBG15737 [Caenorhabditis
  misc_feature (1)..(110): Homolog of NCBI NO: 17555156 NR Description: Predicted CDS, putative protein, nematode
  misc_feature (1)..(221): Homolog of NCBI NO: 34395055 NR Description: putative glycine-rich protein
  misc_feature (1)..(221): Homolog of NCBI NO: 15231481 NR Description: glycine-rich protein [Arabidopsis thaliana]
MGGGYGSNLGMTSGYGSGTYGSALGGYGSSYGGGMYGGSSMYRGGYGGGGLYGSSGMYGGGAMGGYGGTMGGYGMGMGTGMGMGMGMGMGGPYGSQDPNDPFNQPPSPPGFWISFLRVMQGAVNFFGRVAMLIDQNTQAFHMFMSALLQLFDRGGMLYGELARFVLRMLGVRTRPRKMQQPPQGPNGLPLPHQPHGNQNYLEGPKTAAPGGGGGWDNVWGN

SEQ ID NO: 46082 - DNA, 2263 bp, Arabidopsis thaliana; identical to SEQ ID NO: 44996
  misc_feature (1)..(2263): Ceres Seq. ID no. 13591573
  misc_feature: MA Experiment ID: 20000180 Result: Up-regulated in Transcription
  misc_feature: MA Experiment 20000180 PARAMETER Experiment Name: At_Germinating_Seeds_P Parameter: Age (hr) Value: 24 vs. 0
  misc_feature: MA Experiment 20000180 PARAMETER Experiment Name: At_Germinating_Seeds_P Parameter: Tissue Value: Germinating Seeds
  misc_feature: MA Experiment ID: 20000185 Result: Down-regulated in Transcription
  misc_feature: MA Experiment 20000185 PARAMETER Experiment Name: At_Roots__P Parameter: Age (day) Value: 7 vs. 21
  misc_feature: MA Experiment 20000185 PARAMETER Experiment Name: At_Roots__P Parameter: Organism Value: A. thaliana
  misc_feature: MA Experiment 20000185 PARAMETER Experiment Name: At_Roots__P Parameter: Tissue Value: Roots vs. Whole Plant
  misc_feature: MA Experiment ID: 20000438 Result: Up-regulated in Transcription
  misc_feature: MA Experiment 20000438 PARAMETER Experiment Name: At_Shoots__P Parameter: Age (day) Value: 14
  misc_feature: MA Experiment 20000438 PARAMETER Experiment Name: At_Shoots__P Parameter: Tissue Value: Shoots vs. Whole Plant
  misc_feature: MA Experiment ID: 20000439 Result: Down-regulated in Transcription
  misc_feature: MA Experiment 20000439 PARAMETER Experiment Name: At_Roots__P Parameter: Age (day) Value: 14 vs. 21
  misc_feature: MA Experiment 20000439 PARAMETER Experiment Name: At_Roots__P Parameter: Organism Value: A. thaliana
  misc_feature: MA Experiment 20000439 PARAMETER Experiment Name: At_Roots__P Parameter: Tissue Value: Roots vs. Whole Plant

SEQ ID NO: 46083 - protein, 695 aa, Arabidopsis thaliana; identical to SEQ ID NO: 44997
  peptide (1)..(695): Ceres Seq. ID no. 13591574
  misc_feature (455)..(665): Pfam Name: Peptidase family M41 Pfam Description: Peptidase family M41
  misc_feature (455)..(665): Pfam Name: Peptidase family M41 Pfam Description: Peptidase family M41
  misc_feature (455)..(665): Pfam Name: Peptidase family M41 Pfam Description: Peptidase family M41
  misc_feature (81)..(671): Homolog of NCBI NO: 16329797 NR Description: cell division protein; FtsH [Synechocystis sp.
  misc_feature (85)..(668): Homolog of NCBI NO: 17232268 NR Description: cell division protein [Nostoc sp. PCC 7120]
  misc_feature (88)..(679): Homolog of NCBI NO: 22298276 NR Description: cell division protein [Thermosynechococcus
  misc_feature (85)..(685): Homolog of NCBI NO: 11467752 NR Description: hypothetical chloroplast RF25 [Guillardia theta]
  misc_feature (87)..(676): Homolog of NCBI NO: 11465793 NR Description: ORF25 [Porphyra purpurea]
  misc_feature (81)..(671): Homolog of NCBI NO: 16329797 NR Description: cell division protein; FtsH [Synechocystis sp.
  misc_feature (88)..(679): Homolog of NCBI NO: 22298276 NR Description: cell division protein [Thermosynechococcus
  misc_feature (87)..(676): Homolog of NCBI NO: 11465793 NR Description: ORF25 [Porphyra purpurea]
  misc_feature (85)..(685): Homolog of NCBI NO: 11467752 NR Description: hypothetical chloroplast RF25 [Guillardia theta]
  misc_feature (88)..(679): Homolog of NCBI NO: 22298276 NR Description: cell division protein [Thermosynechococcus
  misc_feature (85)..(668): Homolog of NCBI NO: 17232268 NR Description: cell division protein [Nostoc sp. PCC 7120]
  misc_feature (81)..(671): Homolog of NCBI NO: 16329797 NR Description: cell division protein; FtsH [Synechocystis sp.
  misc_feature (1)..(669): Homolog of NCBI NO: 6692685 NR Description: F12K11.22 [Arabidopsis thaliana]
  misc_feature (1)..(688): Homolog of NCBI NO: 4325041 NR Description: FtsH-like protein Pftf precursor [Nicotiana
  misc_feature (1)..(695): Homolog of NCBI NO: 3808101 NR Description: chloroplast protease [Capsicum annuum]
  misc_feature (192)..(695): Homolog of NCBI NO: 21954076 NR Description: putative FtsH protease [Arabidopsis thaliana]
  misc_feature (1)..(673): Homolog of NCBI NO: 18417611 NR Description: FtsH protease, putative [Arabidopsis thaliana]
  misc_feature (1)..(669): Homolog of NCBI NO: 6692685 NR Description: F12K11.22 [Arabidopsis thaliana]
  misc_feature (1)..(688): Homolog of NCBI NO: 4325041 NR Description: FtsH-like protein Pftf precursor [Nicotiana
  misc_feature (1)..(695): Homolog of NCBI NO: 3808101 NR Description: chloroplast protease [Capsicum annuum]
  misc_feature (192)..(695): Homolog of NCBI NO: 21954076 NR Description: putative FtsH protease [Arabidopsis thaliana]
  misc_feature (1)..(673): Homolog of NCBI NO: 18417611 NR Description: FtsH protease, putative [Arabidopsis thaliana]
  misc_feature (87)..(676): Homolog of NCBI NO: 11465793 NR Description: ORF25 [Porphyra purpurea]
  misc_feature (85)..(685): Homolog of NCBI NO: 11467752 NR Description: hypothetical chloroplast RF25 [Guillardia theta]
  misc_feature (85)..(668): Homolog of NCBI NO: 17232268 NR Description: cell division protein [Nostoc sp. PCC 7120]
  misc_feature (1)..(673): Homolog of NCBI NO: 18417611 NR Description: FtsH protease, putative [Arabidopsis thaliana]
  misc_feature (192)..(695): Homolog of NCBI NO: 21954076 NR Description: putative FtsH protease [Arabidopsis thaliana]
  misc_feature (1)..(695): Homolog of NCBI NO: 3808101 NR Description: chloroplast protease [Capsicum annuum]
  misc_feature (1)..(688): Homolog of NCBI NO: 4325041 NR Description: FtsH-like protein Pftf precursor [Nicotiana
  misc_feature (1)..(669): Homolog of NCBI NO: 6692685 NR Description: F12K11.22 [Arabidopsis thaliana]

SEQ ID NO: 46084 - protein, 604 aa, Arabidopsis thaliana; identical to SEQ ID NO: 44998
  peptide (1)..(604): Ceres Seq. ID no. 13591575
  misc_feature (364)..(574): Pfam Name: Peptidase family M41 Pfam Description: Peptidase family M41
  misc_feature (364)..(574): Pfam Name: Peptidase family M41 Pfam Description: Peptidase family M41
  misc_feature (364)..(574): Pfam Name: Peptidase family M41 Pfam Description: Peptidase family M41
  misc_feature (1)..(580): Homolog of NCBI NO: 16329797 NR Description: cell division protein; FtsH [Synechocystis sp.
  misc_feature (1)..(577): Homolog of NCBI NO: 17232268 NR Description: cell division protein [Nostoc sp. PCC 7120]
  misc_feature (1)..(588): Homolog of NCBI NO: 22298276 NR Description: cell division protein [Thermosynechococcus
  misc_feature (1)..(594): Homolog of NCBI NO: 11467752 NR Description: hypothetical chloroplast RF25 [Guillardia theta]
  misc_feature (1)..(585): Homolog of NCBI NO: 11465793 NR Description: ORF25 [Porphyra purpurea]
  misc_feature (1)..(580): Homolog of NCBI NO: 16329797 NR Description: cell division protein; FtsH [Synechocystis sp.
  misc_feature (1)..(588): Homolog of NCBI NO: 22298276 NR Description: cell division protein [Thermosynechococcus
  misc_feature (1)..(585): Homolog of NCBI NO: 11465793 NR Description: ORF25 [Porphyra purpurea]
  misc_feature (1)..(594): Homolog of NCBI NO: 11467752 NR Description: hypothetical chloroplast RF25 [Guillardia theta]
  misc_feature (1)..(588): Homolog of NCBI NO: 22298276 NR Description: cell division protein [Thermosynechococcus
  misc_feature (1)..(577): Homolog of NCBI NO: 17232268 NR Description: cell division protein [Nostoc sp. PCC 7120]
  misc_feature (1)..(580): Homolog of NCBI NO: 16329797 NR Description: cell division protein; FtsH [Synechocystis sp.
  misc_feature (1)..(578): Homolog of NCBI NO: 6692685 NR Description: F12K11.22 [Arabidopsis thaliana]
  misc_feature (1)..(597): Homolog of NCBI NO: 4325041 NR Description: FtsH-like protein Pftf precursor [Nicotiana
  misc_feature (1)..(604): Homolog of NCBI NO: 3808101 NR Description: chloroplast protease [Capsicum annuum]
  misc_feature (101)..(604): Homolog of NCBI NO: 21954076 NR Description: putative FtsH protease [Arabidopsis thaliana]
  misc_feature (1)..(582): Homolog of NCBI NO: 18417611 NR Description: FtsH protease, putative [Arabidopsis thaliana]
  misc_feature (1)..(578): Homolog of NCBI NO: 6692685 NR Description: F12K11.22 [Arabidopsis thaliana]
  misc_feature (1)..(597): Homolog of NCBI NO: 4325041 NR Description: FtsH-like protein Pftf precursor [Nicotiana
  misc_feature (1)..(604): Homolog of NCBI NO: 3808101 NR Description: chloroplast protease [Capsicum annuum]
  misc_feature (101)..(604): Homolog of NCBI NO: 21954076 NR Description: putative FtsH protease [Arabidopsis thaliana]
  misc_feature (1)..(582): Homolog of NCBI NO: 18417611 NR Description: FtsH protease, putative [Arabidopsis thaliana]
  misc_feature (1)..(585): Homolog of NCBI NO: 11465793 NR Description: ORF25 [Porphyra purpurea]
  misc_feature (1)..(594): Homolog of NCBI NO: 11467752 NR Description: hypothetical chloroplast RF25 [Guillardia theta]
  misc_feature (1)..(577): Homolog of NCBI NO: 17232268 NR Description: cell division protein [Nostoc sp. PCC 7120]
  misc_feature (1)..(582): Homolog of NCBI NO: 18417611 NR Description: FtsH protease, putative [Arabidopsis thaliana]
  misc_feature (101)..(604): Homolog of NCBI NO: 21954076 NR Description: putative FtsH protease [Arabidopsis thaliana]
  misc_feature (1)..(604): Homolog of NCBI NO: 3808101 NR Description: chloroplast protease [Capsicum annuum]
  misc_feature (1)..(597): Homolog of NCBI NO: 4325041 NR Description: FtsH-like protein Pftf precursor [Nicotiana
  misc_feature (1)..(578): Homolog of NCBI NO: 6692685 NR Description: F12K11.22 [Arabidopsis thaliana]

SEQ ID NO: 46085 - protein, 499 aa, Arabidopsis thaliana; identical to SEQ ID NO: 44999
  peptide (1)..(499): Ceres Seq. ID no. 13591576
  misc_feature (259)..(469): Pfam Name: Peptidase family M41 Pfam Description: Peptidase family M41
  misc_feature (259)..(469): Pfam Name: Peptidase family M41 Pfam Description: Peptidase family M41
  misc_feature (259)..(469): Pfam Name: Peptidase family M41 Pfam Description: Peptidase family M41
  misc_feature (1)..(475): Homolog of NCBI NO: 16329797 NR Description: cell division protein; FtsH [Synechocystis sp.
  misc_feature (1)..(472): Homolog of NCBI NO: 17232268 NR Description: cell division protein [Nostoc sp. PCC 7120]
  misc_feature (1)..(483): Homolog of NCBI NO: 22298276 NR Description: cell division protein [Thermosynechococcus
  misc_feature (1)..(489): Homolog of NCBI NO: 11467752 NR Description: hypothetical chloroplast RF25 [Guillardia theta]
  misc_feature (1)..(480): Homolog of NCBI NO: 11465793 NR Description: ORF25 [Porphyra purpurea]
  misc_feature (1)..(475): Homolog of NCBI NO: 16329797 NR Description: cell division protein; FtsH [Synechocystis sp.
  misc_feature (1)..(483): Homolog of NCBI NO: 22298276 NR Description: cell division protein [Thermosynechococcus
  misc_feature (1)..(480): Homolog of NCBI NO: 11465793 NR Description: ORF25 [Porphyra purpurea]
  misc_feature (1)..(489): Homolog of NCBI NO: 11467752 NR Description: hypothetical chloroplast RF25 [Guillardia theta]
  misc_feature (1)..(483): Homolog of NCBI NO: 22298276 NR Description: cell division protein [Thermosynechococcus
  misc_feature (1)..(472): Homolog of NCBI NO: 17232268 NR Description: cell division protein [Nostoc sp. PCC 7120]
  misc_feature (1)..(475): Homolog of NCBI NO: 16329797 NR Description: cell division protein; FtsH [Synechocystis sp.
  misc_feature (1)..(473): Homolog of NCBI NO: 6692685 NR Description: F12K11.22 [Arabidopsis thaliana]
  misc_feature (1)..(492): Homolog of NCBI NO: 4325041 NR Description: FtsH-like protein Pftf precursor [Nicotiana
  misc_feature (1)..(499): Homolog of NCBI NO: 3808101 NR Description: chloroplast protease [Capsicum annuum]
  misc_feature (1)..(499): Homolog of NCBI NO: 21954076 NR Description: putative FtsH protease [Arabidopsis thaliana]
  misc_feature (1)..(477): Homolog of NCBI NO: 18417611 NR Description: FtsH protease, putative [Arabidopsis thaliana]
  misc_feature (1)..(473): Homolog of NCBI NO: 6692685 NR Description: F12K11.22 [Arabidopsis thaliana]
  misc_feature (1)..(492): Homolog of NCBI NO: 4325041 NR Description: FtsH-like protein Pftf precursor [Nicotiana
  misc_feature (1)..(499): Homolog of NCBI NO: 3808101 NR Description: chloroplast protease [Capsicum annuum]
  misc_feature (1)..(499): Homolog of NCBI NO: 21954076 NR Description: putative FtsH protease [Arabidopsis thaliana]
  misc_feature (1)..(477): Homolog of NCBI NO: 18417611 NR Description: FtsH protease, putative [Arabidopsis thaliana]
  misc_feature (1)..(480): Homolog of NCBI NO: 11465793 NR Description: ORF25 [Porphyra purpurea]
  misc_feature (1)..(489): Homolog of NCBI NO: 11467752 NR Description: hypothetical chloroplast RF25 [Guillardia theta]
  misc_feature (1)..(472): Homolog of NCBI NO: 17232268 NR Description: cell division protein [Nostoc sp. PCC 7120]
  misc_feature (1)..(477): Homolog of NCBI NO: 18417611 NR Description: FtsH protease, putative [Arabidopsis thaliana]
  misc_feature (1)..(499): Homolog of NCBI NO: 21954076 NR Description: putative FtsH protease [Arabidopsis thaliana]
  misc_feature (1)..(499): Homolog of NCBI NO: 3808101 NR Description: chloroplast protease [Capsicum annuum]
  misc_feature (1)..(492): Homolog of NCBI NO: 4325041 NR Description: FtsH-like protein Pftf precursor [Nicotiana
  misc_feature (1)..(473): Homolog of NCBI NO: 6692685 NR Description: F12K11.22 [Arabidopsis thaliana]

SEQ ID NO: 46086 - DNA, 1584 bp, Arabidopsis thaliana
  misc_feature (1)..(1584): Ceres Seq. ID no. 13578637
  misc_feature: MA Experiment ID: 20000184 Result: Up-regulated in Transcription
  misc_feature: MA Experiment 20000184 PARAMETER Experiment Name: At_Shoots__P Parameter: Age (day) Value: 7
  misc_feature: MA Experiment 20000184 PARAMETER Experiment Name: At_Shoots__P Parameter: Tissue Value: Shoots vs. Whole Plant
  misc_feature: MA Experiment ID: 20000185 Result: Up-regulated in Transcription
  misc_feature: MA Experiment 20000185 PARAMETER Experiment Name: At_Roots__P Parameter: Age (day) Value: 7 vs. 21
  misc_feature: MA Experiment 20000185 PARAMETER Experiment Name: At_Roots__P Parameter: Organism Value: A. thaliana
  misc_feature: MA Experiment 20000185 PARAMETER Experiment Name: At_Roots__P Parameter: Tissue Value: Roots vs. Whole Plant
  misc_feature: MA Experiment ID: 20000437 Result: Down-regulated in Transcription
  misc_feature: MA Experiment 20000437 PARAMETER Experiment Name: At_Drought_P Parameter: Age (day) Value: 8
  misc_feature: MA Experiment 20000437 PARAMETER Experiment Name: At_Drought_P Parameter: Organism Value: A. thaliana
  misc_feature: MA Experiment 20000437 PARAMETER Experiment Name: At_Drought_P Parameter: Plant Line Value: WS
  misc_feature: MA Experiment 20000437 PARAMETER Experiment Name: At_Drought_P Parameter: Timepoint (hr) Value: 24
  misc_feature: MA Experiment 20000437 PARAMETER Experiment Name: At_Drought_P Parameter: Tissue Value: Whole Plant
  misc_feature: MA Experiment 20000437 PARAMETER Experiment Name: At_Drought_P Parameter: Treatment Value: Drought vs. No Drought
  misc_feature: MA Experiment ID: 20000439 Result: Up-regulated in Transcription
  misc_feature: MA Experiment 20000439 PARAMETER Experiment Name: At_Roots__P Parameter: Age (day) Value: 14 vs. 21
  misc_feature: MA Experiment 20000439 PARAMETER Experiment Name: At_Roots__P Parameter: Organism Value: A. thaliana
  misc_feature: MA Experiment 20000439 PARAMETER Experiment Name: At_Roots__P Parameter: Tissue Value: Roots vs. Whole Plant
  misc_feature: MA Experiment ID: 20000451 Result: Up-regulated in Transcription
  misc_feature: MA Experiment 20000451 PARAMETER Experiment Name: At_CS6879_Shoots-Roots_P Parameter: Age (day) Value: 14
  misc_feature: MA Experiment 20000451 PARAMETER Experiment Name: At_CS6879_Shoots-Roots_P Parameter: Organism Value: A. thaliana
  misc_feature: MA Experiment 20000451 PARAMETER Experiment Name: At_CS6879_Shoots-Roots_P Parameter: Plant Line Value: CS6879 vs. WS
  misc_feature: MA Experiment 20000451 PARAMETER Experiment Name: At_CS6879_Shoots-Roots_P Parameter: Tissue Value: Roots
gatctgcctcttctttgcttttcagcaacaatggatgcaatcgtcgttgactctcaaaactgcttcatcatcattcttctatgttccttctcactcatctcctactttgtcttcttcaaaaaaccaaaggttaactttgatttgcttccgagccctccttcacttccaatcattggtcatcttcacctcttgctctctactcttatccacaagtctcttcagaaactctcctccaagtatggacctcttctccatctccgcatctttaacatccccttcatcctcgtctcctcggactcactggcctatgagatcttcagggatcacgacgtgaacgtctcctctcgcggtgttggagcgatcgacgagtccctggcgtatggatcttctggtttcatacaggctccctatggagattactggaaattcatgaagaagctcatcgcaactaagttgctgggaccccaaccactggtgcggtcacaggattttcgttctgaagagctagagaggttctacaaaaggctgttcgataaggccatgaagaaggaaagcgttatgattcataaggaagcgtccagattcgttaacaatagcctttacaagatgtgcacgggaaggagcttttcagtggagaataatgaagtggagagaataatggaacttactgccgacttaggtgccttgtcacagaagtttttcgtgtcaaagatgtttcgtaagctgcttgagaagctcggtatctcacttttcaaaacggagataatggttgtttcacgtagatttagtgagctggttgaaaggattcttattgaatatgaagagaaaatggacgggcatcaaggcacacagtttatggatgccttgttggcagcttatcgagatgaaaatacagaatataaaatcactaggagccatatcaagtcgcttctcacggtaaatgtacatgagtttttcattggagccgctgacgcctcatcaatagcaatacagtgggcaatggcagatatcataaacaaccgtgagattcttgagaaattgagagaagaaattgattcggttgtaggaaaaacaagattggttcaagaaacagatttaccaaaccttccttatttgcaagctgtagttaaggaagggctaagattgcacccgcctacacctctggttgtaagggagttccaagaagggtgtgagattggagggttctttgtaccaaagaacacaacacttattgttaattcttatgctatgatgagagatcctgattcatggcaagatcctgatgagtttaaaccagagaggtttctagcttccttaagtagagaggaggataaaaaagagaaaatccttaacttccttccttttgggagcggaaggagaatgtgtcctggatcaaatcttggttatatatttgtaggaaccgcgattgggatgatggtccagtgctttgactgggaaatcaatggagacaagattaatatggaagaggctactggagggtttctcatcaccatggctcatccccttacatgcactcctattcctcttccccgaacccaaaactctttaatttcccatctttaa

SEQ ID NO: 46087 - protein, 527 aa, Arabidopsis thaliana
  peptide (1)..(527): Ceres Seq. ID no. 13578638
  misc_feature (11)..(513): Homolog of NCBI NO: 15233794 NR Description: cytochrome P450 family [Arabidopsis thaliana]
  misc_feature (19)..(514): Homolog of NCBI NO: 21553521 NR Description: cytochrome P450, putative [Arabidopsis thaliana]
  misc_feature (23)..(523): Homolog of NCBI NO: 15233774 NR Description: cytochrome P450 family [Arabidopsis thaliana]
  misc_feature (23)..(523): Homolog of NCBI NO: 7430617 NR Description: cytochrome P450 - Arabidopsis thaliana
  misc_feature (19)..(514): Homolog of NCBI NO: 15231049 NR Description: cytochrome P450 family [Arabidopsis thaliana]
  misc_feature (11)..(518): Homolog of NCBI NO: 9293969 NR Description: cytochrome P450-like protein [Arabidopsis
  misc_feature (14)..(525): Homolog of NCBI NO: 9294003 NR Description: cytochrome P450-like protein [Arabidopsis
  misc_feature (11)..(514): Homolog of NCBI NO: 15231052 NR Description: cytochrome P450 family [Arabidopsis thaliana]
  misc_feature (14)..(527): Homolog of NCBI NO: 15231047 NR Description: cytochrome P450 family [Arabidopsis thaliana]
  misc_feature (11)..(527): Homolog of NCBI NO: 15233772 NR Description: cytochrome P450 family [Arabidopsis thaliana]
DLPLLCFSATMDAIVVDSQNCFIIILLCSFSLISYFVFFKKPKVNFDLLPSPPSLPIIGHLHLLLSTLIHKSLQKLSSKYGPLLHLRIFNIPFILVSSDSLAYEIFRDHDVNVSSRGVGAIDESLAYGSSGFIQAPYGDYWKFMKKLIATKLLGPQPLVRSQDFRSEELERFYKRLFDKAMKKESVMIHKEASRFVNNSLYKMCTGRSFSVENNEVERIMELTADLGALSQKFFVSKMFRKLLEKLGISLFKTEIMVVSRRFSELVERILIEYEEKMDGHQGTQFMDALLAAYRDENTEYKITRSHIKSLLTVNVHEFFIGAADASSIAIQWAMADIINNREILEKLREEIDSVVGKTRLVQETDLPNLPYLQAVVKEGLRLHPPTPLVVREFQEGCEIGGFFVPKNTTLIVNSYAMMRDPDSWQDPDEFKPERFLASLSREEDKKEKILNFLPFGSGRRMCPGSNLGYIFVGTAIGMMVQCFDWEINGDKINMEEATGGFLITMAHPLTCTPIPLPRTQNSLISHL

SEQ ID NO: 46088 - protein, 517 aa, Arabidopsis thaliana
  peptide (1)..(517): Ceres Seq. ID no. 13578639
  misc_feature (1)..(503): Homolog of NCBI NO: 15233794 NR Description: cytochrome P450 family [Arabidopsis thaliana]
  misc_feature (9)..(504): Homolog of NCBI NO: 21553521 NR Description: cytochrome P450, putative [Arabidopsis thaliana]
  misc_feature (13)..(513): Homolog of NCBI NO: 15233774 NR Description: cytochrome P450 family [Arabidopsis thaliana]
  misc_feature (13)..(513): Homolog of NCBI NO: 7430617 NR Description: cytochrome P450 - Arabidopsis thaliana
  misc_feature (9)..(504): Homolog of NCBI NO: 15231049 NR Description: cytochrome P450 family [Arabidopsis thaliana]
  misc_feature (1)..(508): Homolog of NCBI NO: 9293969 NR Description: cytochrome P450-like protein [Arabidopsis
  misc_feature (4)..(515): Homolog of NCBI NO: 9294003 NR Description: cytochrome P450-like protein [Arabidopsis
  misc_feature (1)..(504): Homolog of NCBI NO: 15231052 NR Description: cytochrome P450 family [Arabidopsis thaliana]
  misc_feature (4)..(517): Homolog of NCBI NO: 15231047 NR Description: cytochrome P450 family [Arabidopsis thaliana]
  misc_feature (1)..(517): Homolog of NCBI NO: 15233772 NR Description: cytochrome P450 family [Arabidopsis thaliana]
MDAIVVDSQNCFIIILLCSFSLISYFVFFKKPKVNFDLLPSPPSLPIIGHLHLLLSTLIHKSLQKLSSKYGPLLHLRIFNIPFILVSSDSLAYEIFRDHDVNVSSRGVGAIDESLAYGSSGFIQAPYGDYWKFMKKLIATKLLGPQPLVRSQDFRSEELERFYKRLFDKAMKKESVMIHKEASRFVNNSLYKMCTGRSFSVENNEVERIMELTADLGALSQKFFVSKMFRKLLEKLGISLFKTEIMVVSRRFSELVERILIEYEEKMDGHQGTQFMDALLAAYRDENTEYKITRSHIKSLLTVNVHEFFIGAADASSIAIQWAMADIINNREILEKLREEIDSVVGKTRLVQETDLPNLPYLQAVVKEGLRLHPPTPLVVREFQEGCEIGGFFVPKNTTLIVNSYAMMRDPDSWQDPDEFKPERFLASLSREEDKKEKILNFLPFGSGRRMCPGSNLGYIFVGTAIGMMVQCFDWEINGDKINMEEATGGFLITMAHPLTCTPIPLPRTQNSLISHL

SEQ ID NO: 46089 - protein, 384 aa, Arabidopsis thaliana
  peptide (1)..(384): Ceres Seq. ID no. 13578640
  misc_feature (1)..(370): Homolog of NCBI NO: 15233794 NR Description: cytochrome P450 family [Arabidopsis thaliana]
  misc_feature (1)..(371): Homolog of NCBI NO: 21553521 NR Description: cytochrome P450, putative [Arabidopsis thaliana]
  misc_feature (1)..(380): Homolog of NCBI NO: 15233774 NR Description: cytochrome P450 family [Arabidopsis thaliana]
  misc_feature (1)..(380): Homolog of NCBI NO: 7430617 NR Description: cytochrome P450 - Arabidopsis thaliana
  misc_feature (1)..(371): Homolog of NCBI NO: 15231049 NR Description: cytochrome P450 family [Arabidopsis thaliana]
  misc_feature (1)..(375): Homolog of NCBI NO: 9293969 NR Description: cytochrome P450-like protein [Arabidopsis
  misc_feature (1)..(382): Homolog of NCBI NO: 9294003 NR Description: cytochrome P450-like protein [Arabidopsis
  misc_feature (1)..(371): Homolog of NCBI NO: 15231052 NR Description: cytochrome P450 family [Arabidopsis thaliana]
  misc_feature (1)..(384): Homolog of NCBI NO: 15231047 NR Description: cytochrome P450 family [Arabidopsis thaliana]
  misc_feature (1)..(384): Homolog of NCBI NO: 15233772 NR Description: cytochrome P450 family [Arabidopsis thaliana]
MKKLIATKLLGPQPLVRSQDFRSEELERFYKRLFDKAMKKESVMIHKEASRFVNNSLYKMCTGRSFSVENNEVERIMELTADLGALSQKFFVSKMFRKLLEKLGISLFKTEIMVVSRRFSELVERILIEYEEKMDGHQGTQFMDALLAAYRDENTEYKITRSHIKSLLTVNVHEFFIGAADASSIAIQWAMADIINNREILEKLREEIDSVVGKTRLVQETDLPNLPYLQAVVKEGLRLHPPTPLVVREFQEGCEIGGFFVPKNTTLIVNSYAMMRDPDSWQDPDEFKPERFLASLSREEDKKEKILNFLPFGSGRRMCPGSNLGYIFVGTAIGMMVQCFDWEINGDKINMEEATGGFLITMAHPLTCTPIPLPRTQNSLISHL

SEQ ID NO: 46090 - DNA, 1307 bp, Arabidopsis thaliana
  misc_feature (1)..(1307): Ceres Seq. ID no. 12600806
  misc_feature: MA Experiment ID: 20000185 Result: Down-regulated in Transcription
  misc_feature: MA Experiment 20000185 PARAMETER Experiment Name: At_Roots__P Parameter: Age (day) Value: 7 vs. 21
  misc_feature: MA Experiment 20000185 PARAMETER Experiment Name: At_Roots__P Parameter: Organism Value: A. thaliana
  misc_feature: MA Experiment 20000185 PARAMETER Experiment Name: At_Roots__P Parameter: Tissue Value: Roots vs. Whole Plant
  misc_feature: MA Experiment ID: 20000265 Result: Down-regulated in Transcription
  misc_feature: MA Experiment 20000265 PARAMETER Experiment Name: At_Open_Flower_P Parameter: Age (day) Value: 21
  misc_feature: MA Experiment 20000265 PARAMETER Experiment Name: At_Open_Flower_P Parameter: Plant Line Value: WS
  misc_feature: MA Experiment 20000265 PARAMETER Experiment Name: At_Open_Flower_P Parameter: Tissue Value: Closed Flower vs. Whole Plant
  misc_feature: MA Experiment ID: 20000267 Result: Up-regulated in Transcription
  misc_feature: MA Experiment 20000267 PARAMETER Experiment Name: At_Drought_P Parameter: Age (day) Value: 7
  misc_feature: MA Experiment 20000267 PARAMETER Experiment Name: At_Drought_P Parameter: Organism Value: A. thaliana
  misc_feature: MA Experiment 20000267 PARAMETER Experiment Name: At_Drought_P Parameter: Plant Line Value: WS
  misc_feature: MA Experiment 20000267 PARAMETER Experiment Name: At_Drought_P Parameter: Timepoint (hr) Value: 6
  misc_feature: MA Experiment 20000267 PARAMETER Experiment Name: At_Drought_P Parameter: Tissue Value: Whole Plant
  misc_feature: MA Experiment 20000267 PARAMETER Experiment Name: At_Drought_P Parameter: Treatment Value: Drought vs. No Drought
  misc_feature: MA Experiment ID: 20000269 Result: Up-regulated in Transcription
  misc_feature: MA Experiment 20000269 PARAMETER Experiment Name: At_1mM_KNO3_L-vs-H_Roots_P Parameter: Age (day) Value: 7,10,12
  misc_feature: MA Experiment 20000269 PARAMETER Experiment Name: At_1mM_KNO3_L-vs-H_Roots_P Parameter: Organism Value: A. thaliana
  misc_feature: MA Experiment 20000269 PARAMETER Experiment Name: At_1mM_KNO3_L-vs-H_Roots_P Parameter: Plant Line Value: WS
  misc_feature: MA Experiment 20000269 PARAMETER Experiment Name: At_1mM_KNO3_L-vs-H_Roots_P Parameter: Timepoint (day) Value: 7,10,12
  misc_feature: MA Experiment 20000269 PARAMETER Experiment Name: At_1mM_KNO3_L-vs-H_Roots_P Parameter: Tissue Value: Roots
  misc_feature: MA Experiment 20000269 PARAMETER Experiment Name: At_1mM_KNO3_L-vs-H_Roots_P Parameter: Treatment Value: 1mM KNO3 vs. 50mM KNO3
  misc_feature: MA Experiment ID: 20000436 Result: Up-regulated in Transcription
  misc_feature: MA Experiment 20000436 PARAMETER Experiment Name: At_Drought_P Parameter: Age (day) Value: 7
  misc_feature: MA Experiment 20000436 PARAMETER Experiment Name: At_Drought_P Parameter: Organism Value: A. thaliana
  misc_feature: MA Experiment 20000436 PARAMETER Experiment Name: At_Drought_P Parameter: Plant Line Value: WS
  misc_feature: MA Experiment 20000436 PARAMETER Experiment Name: At_Drought_P Parameter: Timepoint (hr) Value: 12
  misc_feature: MA Experiment 20000436 PARAMETER Experiment Name: At_Drought_P Parameter: Tissue Value: Whole Plant
  misc_feature: MA Experiment 20000436 PARAMETER Experiment Name: At_Drought_P Parameter: Treatment Value: Drought vs. No Drought
  misc_feature: MA Experiment ID: 20000437 Result: Up-regulated in Transcription
  misc_feature: MA Experiment 20000437 PARAMETER Experiment Name: At_Drought_P Parameter: Age (day) Value: 8
  misc_feature: MA Experiment 20000437 PARAMETER Experiment Name: At_Drought_P Parameter: Organism Value: A. thaliana
  misc_feature: MA Experiment 20000437 PARAMETER Experiment Name: At_Drought_P Parameter: Plant Line Value: WS
  misc_feature: MA Experiment 20000437 PARAMETER Experiment Name: At_Drought_P Parameter: Timepoint (hr) Value: 24
  misc_feature: MA Experiment 20000437 PARAMETER Experiment Name: At_Drought_P Parameter: Tissue Value: Whole Plant
  misc_feature: MA Experiment 20000437 PARAMETER Experiment Name: At_Drought_P Parameter: Treatment Value: Drought vs. No Drought
  misc_feature: MA Experiment ID: 20000438 Result: Down-regulated in Transcription
  misc_feature: MA Experiment 20000438 PARAMETER Experiment Name: At_Shoots__P Parameter: Age (day) Value: 14
  misc_feature: MA Experiment 20000438 PARAMETER Experiment Name: At_Shoots__P Parameter: Tissue Value: Shoots vs. Whole Plant
  misc_feature: MA Experiment ID: 20000794 Result: Up-regulated in Transcription
  misc_feature: MA Experiment 20000794 PARAMETER Experiment Name: At_Petals_P Parameter: Age (day) Value: 23-25 days
  misc_feature: MA Experiment 20000794 PARAMETER Experiment Name: At_Petals_P Parameter: Plant Line Value: WS
  misc_feature: MA Experiment 20000794 PARAMETER Experiment Name: At_Petals_P Parameter: Tissue Value: Petals vs. Whole plant
  misc_feature: MA Experiment ID: 20001555 Result: Up-regulated in Transcription
  misc_feature: MA Experiment 20001555 PARAMETER Experiment Name: At_Drought_Soil_Dry_P Parameter: Age (day) Value: 24
  misc_feature: MA Experiment 20001555 PARAMETER Experiment Name: At_Drought_Soil_Dry_P Parameter: Organism Value: A. thaliana
  misc_feature: MA Experiment 20001555 PARAMETER Experiment Name: At_Drought_Soil_Dry_P Parameter: Plant Line Value: WS
  misc_feature: MA Experiment 20001555 PARAMETER Experiment Name: At_Drought_Soil_Dry_P Parameter: Post Timepoint (hr) Value: None
  misc_feature: MA Experiment 20001555 PARAMETER Experiment Name: At_Drought_Soil_Dry_P Parameter: Post-Treatment Value: None
  misc_feature: MA Experiment 20001555 PARAMETER Experiment Name: At_Drought_Soil_Dry_P Parameter: Timepoint (day) Value: 10
  misc_feature: MA Experiment 20001555 PARAMETER Experiment Name: At_Drought_Soil_Dry_P Parameter: Treatment Value: Drought vs. No Drought
  misc_feature: MA Experiment ID: 20001556 Result: Up-regulated in Transcription
  misc_feature: MA Experiment 20001556 PARAMETER Experiment Name: At_Drought_Soil_Dry_P Parameter: Age (day) Value: 26
  misc_feature: MA Experiment 20001556 PARAMETER Experiment Name: At_Drought_Soil_Dry_P Parameter: Organism Value: A. thaliana
  misc_feature: MA Experiment 20001556 PARAMETER Experiment Name: At_Drought_Soil_Dry_P Parameter: Plant Line Value: WS
  misc_feature: MA Experiment 20001556 PARAMETER Experiment Name: At_Drought_Soil_Dry_P Parameter: Post Timepoint (hr) Value: None
  misc_feature: MA Experiment 20001556 PARAMETER Experiment Name: At_Drought_Soil_Dry_P Parameter: Post-Treatment Value: None
  misc_feature: MA Experiment 20001556 PARAMETER Experiment Name: At_Drought_Soil_Dry_P Parameter: Timepoint (day) Value: 12
  misc_feature: MA Experiment 20001556 PARAMETER Experiment Name: At_Drought_Soil_Dry_P Parameter: Treatment Value: Drought vs. No Drought
  misc_feature: MA Experiment ID: 20001757 Result: Down-regulated in Transcription
  misc_feature: MA Experiment 20001757 PARAMETER Experiment Name: At_50mM_NH4NO3_L-to-H_P Parameter: Timepoint (hr) Value: 6
  misc_feature: MA Experiment 20001757 PARAMETER Experiment Name: At_50mM_NH4NO3_L-to-H_P Parameter: Tissue Value: Leaf
  misc_feature: MA Experiment 20001757 PARAMETER Experiment Name: At_50mM_NH4NO3_L-to-H_P Parameter: Treatment Value: 50mM NH4NO3 vs 100mM Mannitol
  misc_feature: MA Experiment ID: 20001904 Result: Up-regulated in Transcription
  misc_feature: MA Experiment 20001904 PARAMETER Experiment Name: At_Drought_Reproduction_P Parameter: Age (day) Value: 37
  misc_feature: MA Experiment 20001904 PARAMETER Experiment Name: At_Drought_Reproduction_P Parameter: Organism Value: A. thaliana
  misc_feature: MA Experiment 20001904 PARAMETER Experiment Name: At_Drought_Reproduction_P Parameter: Plant Line Value: WS
  misc_feature: MA Experiment 20001904 PARAMETER Experiment Name: At_Drought_Reproduction_P Parameter: Timepoint (day) Value: 7
  misc_feature: MA Experiment 20001904 PARAMETER Experiment Name: At_Drought_Reproduction_P Parameter: Tissue Value: Rosettes
  misc_feature: MA Experiment 20001904 PARAMETER Experiment Name: At_Drought_Reproduction_P Parameter: Treatment Value: Drought vs. No Drought
  misc_feature: MA Experiment ID: 20001905 Result: Up-regulated in Transcription
  misc_feature: MA Experiment 20001905 PARAMETER Experiment Name: At_Drought_Reproduction_P Parameter: Age (day) Value: 40
  misc_feature: MA Experiment 20001905 PARAMETER Experiment Name: At_Drought_Reproduction_P Parameter: Organism Value: A. thaliana
  misc_feature: MA Experiment 20001905 PARAMETER Experiment Name: At_Drought_Reproduction_P Parameter: Plant Line Value: WS
  misc_feature: MA Experiment 20001905 PARAMETER Experiment Name: At_Drought_Reproduction_P Parameter: Timepoint (day) Value: 10
  misc_feature: MA Experiment 20001905 PARAMETER Experiment Name: At_Drought_Reproduction_P Parameter: Tissue Value: Rosettes
  misc_feature: MA Experiment 20001905 PARAMETER Experiment Name: At_Drought_Reproduction_P Parameter: Treatment Value: Drought vs. No Drought
  misc_feature: MA Experiment ID: 20001906 Result: Up-regulated in Transcription
  misc_feature: MA Experiment 20001906 PARAMETER Experiment Name: At_Drought_Reproduction_P Parameter: Age (day) Value: 35
  misc_feature: MA Experiment 20001906 PARAMETER Experiment Name: At_Drought_Reproduction_P Parameter: Organism Value: A. thaliana
  misc_feature: MA Experiment 20001906 PARAMETER Experiment Name: At_Drought_Reproduction_P Parameter: Plant Line Value: WS
  misc_feature: MA Experiment 20001906 PARAMETER Experiment Name: At_Drought_Reproduction_P Parameter: Timepoint (day) Value: 5
  misc_feature: MA Experiment 20001906 PARAMETER Experiment Name: At_Drought_Reproduction_P Parameter: Tissue Value: Siliques
  misc_feature: MA Experiment 20001906 PARAMETER Experiment Name: At_Drought_Reproduction_P Parameter: Treatment Value: Drought vs. No Drought
  misc_feature: MA Experiment ID: 20001908 Result: Up-regulated in Transcription
  misc_feature: MA Experiment 20001908 PARAMETER Experiment Name: At_Drought_Reproduction_P Parameter: Age (day) Value: 40
  misc_feature: MA Experiment 20001908 PARAMETER Experiment Name: At_Drought_Reproduction_P Parameter: Organism Value: A. thaliana
  misc_feature: MA Experiment 20001908 PARAMETER Experiment Name: At_Drought_Reproduction_P Parameter: Plant Line Value: WS
  misc_feature: MA Experiment 20001908 PARAMETER Experiment Name: At_Drought_Reproduction_P Parameter: Timepoint (day) Value: 10
  misc_feature: MA Experiment 20001908 PARAMETER Experiment Name: At_Drought_Reproduction_P Parameter: Tissue Value: Siliques
  misc_feature: MA Experiment 20001908 PARAMETER Experiment Name: At_Drought_Reproduction_P Parameter: Treatment Value: Drought vs. No Drought
atcaacaaactcaatcacaatcacaagtaaatacaaaaatcaccatagaaaaatatgaagcgatttattgttcttgcgctttgcatgcttatggttcttgaaaccacaaagggtttagatttccataacaaagatgtggaatcagagaatagcttgtgggagctatacgaacggtggaggagtcaccacactgttgctaggagccttgaagagaaagctaagaggttcaacgtgttcaagcacaacgtgaagcacatccatgagaccaacaagaaggataaatcttacaagctcaagctaaacaagtttggtgacatgactagtgaagaatttaggagaacatacgctggttcaaacatcaaacatcataggatgtttcaaggcgaaaaaaaggccacaaagagcttcatgtatgcaaatgtaaatactctcccaacctccgttgattggagaaagaatggagccgtcactcctgtcaaaaaccaaggccaatgcgggagttgttgggcgttttcaacagttgttgcggtggaagggatcaaccaaataagaactaaaaagctgacatcactctcagagcaagagctagtagattgtgatacaaaccagaaccaaggatgcaatggaggtctaatggaccttgcttttgagttcatcaaggagaaaggaggactcacaagtgagctagtgtacccttacaaggcttctgatgaaacttgtgacacaaacaaagaaaatgctccggtagtttcaatcgatggacacgaagatgttcctaagaacagcgaggatgatctaatgaaagctgttgctaatcagcctgtttctgttgctattgatgctggaggctcagactttcaattctactccgagggagtgtttaccgggagatgcggaacagagctaaaccatggagttgcggtagtagggtatggaacaacgatagacggaacaaagtattggattgttaagaattcatggggagaggaatggggagagaaaggatacataagaatgcagagagggattcgtcataaagaaggactttgtggtattgcaatggaagcttcttatcctctcaagaactccaacactaacccttctagactttccttggactcgcttaaggatgaactctaaattaaatctctttatattaagattaaatagacattgacaagtttgtttatgatgattgttttttttttaaatatatttctttttcattaataggttatggttttcaatgtatgaagttgatgggaatcgtttgaattcgttaaatgaataaataaatggttttatgt

SEQ ID NO: 46091 - protein, 361 aa, Arabidopsis thaliana
  peptide (1)..(361): Ceres Seq. ID no. 12600807
  misc_feature (126)..(342): Pfam Name: Papain family cysteine protease Pfam Description: Papain family cysteine protease
  misc_feature (1)..(361): Homolog of NCBI NO: 3688528 NR Description: pre-pro-TPE4A protein [Pisum sativum]
  misc_feature (2)..(361): Homolog of NCBI NO: 544129 NR Description: Vignain precursor (Bean endopeptidase) (Cysteine
  misc_feature (2)..(361): Homolog of NCBI NO: 7435774 NR Description: cysteine proteinase (EC 3.4.22.-) - kidney bean
  misc_feature (2)..(361): Homolog of NCBI NO: 1345573 NR Description: endopeptidase (EP-C1) [Phaseolus vulgaris]
  misc_feature (1)..(361): Homolog of NCBI NO: 1223922 NR Description: cysteinyl endopeptidase [Vigna radiata]
  misc_feature (1)..(361): Homolog of NCBI NO: 118158 NR Description: Vignain precursor (Bean endopeptidase) (Cysteine
  misc_feature (1)..(361): Homolog of NCBI NO: 30141021 NR Description: cysteine protease-2 [Helianthus annuus]
  misc_feature (1)..(361): Homolog of NCBI NO: 445927 NR Description: Cys endopeptidase
  misc_feature (1)..(361): Homolog of NCBI NO: 7435817 NR Description: cysteine endopeptidase (EC 3.4.22.-) precursor -
  misc_feature (1)..(361): Homolog of NCBI NO: 18423124 NR Description: cysteine proteinase
MKRFIVLALCMLMVLETTKGLDFHNKDVESENSLWELYERWRSHHTVARSLEEKAKRFNVFKHNVKHIHETNKKDKSYKLKLNKFGDMTSEEFRRTYAGSNIKHHRMFQGEKKATKSFMYANVNTLPTSVDWRKNGAVTPVKNQGQCGSCWAFSTVVAVEGINQIRTKKLTSLSEQELVDCDTNQNQGCNGGLMDLAFEFIKEKGGLTSELVYPYKASDETCDTNKENAPVVSIDGHEDVPKNSEDDLMKAVANQPVSVAIDAGGSDFQFYSEGVFTGRCGTELNHGVAVVGYGTTIDGTKYWIVKNSWGEEWGEKGYIRMQRGIRHKEGLCGIAMEASYPLKNSNTNPSRLSLDSLKDEL

SEQ ID NO: 46092 - protein, 351 aa, Arabidopsis thaliana
  peptide (1)..(351): Ceres Seq. ID no. 12600808
  misc_feature (116)..(332): Pfam Name: Papain family cysteine protease Pfam Description: Papain family cysteine protease
  misc_feature (1)..(351): Homolog of NCBI NO: 3688528 NR Description: pre-pro-TPE4A protein [Pisum sativum]
  misc_feature (1)..(351): Homolog of NCBI NO: 544129 NR Description: Vignain precursor (Bean endopeptidase) (Cysteine
  misc_feature (1)..(351): Homolog of NCBI NO: 7435774 NR Description: cysteine proteinase (EC 3.4.22.-) - kidney bean
  misc_feature (1)..(351): Homolog of NCBI NO: 1345573 NR Description: endopeptidase (EP-C1) [Phaseolus vulgaris]
  misc_feature (1)..(351): Homolog of NCBI NO: 1223922 NR Description: cysteinyl endopeptidase [Vigna radiata]
  misc_feature (1)..(351): Homolog of NCBI NO: 118158 NR Description: Vignain precursor (Bean endopeptidase) (Cysteine
  misc_feature (1)..(351): Homolog of NCBI NO: 30141021 NR Description: cysteine protease-2 [Helianthus annuus]
  misc_feature (1)..(351): Homolog of NCBI NO: 445927 NR Description: Cys endopeptidase
  misc_feature (1)..(351): Homolog of NCBI NO: 7435817 NR Description: cysteine endopeptidase (EC 3.4.22.-) precursor -
  misc_feature (1)..(351): Homolog of NCBI NO: 18423124 NR Description: cysteine proteinase
MLMVLETTKGLDFHNKDVESENSLWELYERWRSHHTVARSLEEKAKRFNVFKHNVKHIHETNKKDKSYKLKLNKFGDMTSEEFRRTYAGSNIKHHRMFQGEKKATKSFMYANVNTLPTSVDWRKNGAVTPVKNQGQCGSCWAFSTVVAVEGINQIRTKKLTSLSEQELVDCDTNQNQGCNGGLMDLAFEFIKEKGGLTSELVYPYKASDETCDTNKENAPVVSIDGHEDVPKNSEDDLMKAVANQPVSVAIDAGGSDFQFYSEGVFTGRCGTELNHGVAVVGYGTTIDGTKYWIVKNSWGEEWGEKGYIRMQRGIRHKEGLCGIAMEASYPLKNSNTNPSRLSLDSLKDEL

SEQ ID NO: 46093 - protein, 349 aa, Arabidopsis thaliana
  peptide (1)..(349): Ceres Seq. ID no. 12600809
  misc_feature (114)..(330): Pfam Name: Papain family cysteine protease Pfam Description: Papain family cysteine protease
  misc_feature (1)..(349): Homolog of NCBI NO: 3688528 NR Description: pre-pro-TPE4A protein [Pisum sativum]
  misc_feature (1)..(349): Homolog of NCBI NO: 544129 NR Description: Vignain precursor (Bean endopeptidase) (Cysteine
  misc_feature (1)..(349): Homolog of NCBI NO: 7435774 NR Description: cysteine proteinase (EC 3.4.22.-) - kidney bean
  misc_feature (1)..(349): Homolog of NCBI NO: 1345573 NR Description: endopeptidase (EP-C1) [Phaseolus vulgaris]
  misc_feature (1)..(349): Homolog of NCBI NO: 1223922 NR Description: cysteinyl endopeptidase [Vigna radiata]
  misc_feature (1)..(349): Homolog of NCBI NO: 118158 NR Description: Vignain precursor (Bean endopeptidase) (Cysteine
  misc_feature (1)..(349): Homolog of NCBI NO: 30141021 NR Description: cysteine protease-2 [Helianthus annuus]
  misc_feature (1)..(349): Homolog of NCBI NO: 445927 NR Description: Cys endopeptidase
  misc_feature (1)..(349): Homolog of NCBI NO: 7435817 NR Description: cysteine endopeptidase (EC 3.4.22.-) precursor -
  misc_feature (1)..(349): Homolog of NCBI NO: 18423124 NR Description: cysteine proteinase
MVLETTKGLDFHNKDVESENSLWELYERWRSHHTVARSLEEKAKRFNVFKHNVKHIHETNKKDKSYKLKLNKFGDMTSEEFRRTYAGSNIKHHRMFQGEKKATKSFMYANVNTLPTSVDWRKNGAVTPVKNQGQCGSCWAFSTVVAVEGINQIRTKKLTSLSEQELVDCDTNQNQGCNGGLMDLAFEFIKEKGGLTSELVYPYKASDETCDTNKENAPVVSIDGHEDVPKNSEDDLMKAVANQPVSVAIDAGGSDFQFYSEGVFTGRCGTELNHGVAVVGYGTTIDGTKYWIVKNSWGEEWGEKGYIRMQRGIRHKEGLCGIAMEASYPLKNSNTNPSRLSLDSLKDEL

SEQ ID NO: 46094 - DNA, 682 bp, Arabidopsis thaliana
  misc_feature (1)..(682): Ceres Seq. ID no. 13578591
  misc_feature: MA Experiment ID: 108434 Result: Up-regulated in Transcription
  misc_feature: MA Experiment 108434 PARAMETER Experiment Name: At_Root_Tips_cDNA_P Parameter: Tissue Value: Root Tips
  misc_feature: MA Experiment ID: 108462 Result: Down-regulated in Transcription
  misc_feature: MA Experiment 108462 PARAMETER Experiment Name: At_Germinating_Seeds_cDNA_P Parameter: Age (day) Value: 2 vs. 0
  misc_feature: MA Experiment 108462 PARAMETER Experiment Name: At_Germinating_Seeds_cDNA_P Parameter: Tissue Value: Germinating Seeds
  misc_feature: MA Experiment ID: 108463 Result: Down-regulated in Transcription
  misc_feature: MA Experiment 108463 PARAMETER Experiment Name: At_Germinating_Seeds_cDNA_P Parameter: Age (day) Value: 3 vs. 0
  misc_feature: MA Experiment 108463 PARAMETER Experiment Name: At_Germinating_Seeds_cDNA_P Parameter: Tissue Value: Germinating Seeds
  misc_feature: MA Experiment ID: 108464 Result: Down-regulated in Transcription
  misc_feature: MA Experiment 108464 PARAMETER Experiment Name: At_Germinating_Seeds_cDNA_P Parameter: Age (day) Value: 4 vs. 0
  misc_feature: MA Experiment 108464 PARAMETER Experiment Name: At_Germinating_Seeds_cDNA_P Parameter: Tissue Value: Germinating Seeds
  misc_feature: MA Experiment ID: 108573 Result: Down-regulated in Transcription
  misc_feature: MA Experiment 108573 PARAMETER Experiment Name: At_Drought_cDNA_P Parameter: Timepoint (hr) Value: 6
  misc_feature: MA Experiment 108573 PARAMETER Experiment Name: At_Drought_cDNA_P Parameter: Tissue Value: Aerial
  misc_feature: MA Experiment 108573 PARAMETER Experiment Name: At_Drought_cDNA_P Parameter: Treatment Value: Drought vs. No Drought
  misc_feature: MA Experiment ID: 108605 Result: Down-regulated in Transcription
  misc_feature: MA Experiment 108605 PARAMETER Experiment Name: At_100uM_ABA_cDNA_P Parameter: Timepoint (hr) Value: 6
  misc_feature: MA Experiment 108605 PARAMETER Experiment Name: At_100uM_ABA_cDNA_P Parameter: Tissue Value: Aerial
  misc_feature: MA Experiment 108605 PARAMETER Experiment Name: At_100uM_ABA_cDNA_P Parameter: Treatment Value: 100uM ABA vs. No Treatment
  misc_feature: MA Experiment ID: 20000070 Result: Down-regulated in Transcription
  misc_feature: MA Experiment 20000070 PARAMETER Experiment Name: At_100uM_ABA_Mutants_cDNA_P Parameter: Plant Line Value: CS24
  misc_feature: MA Experiment 20000070 PARAMETER Experiment Name: At_100uM_ABA_Mutants_cDNA_P Parameter: Timepoint (hr) Value: 6
  misc_feature: MA Experiment 20000070 PARAMETER Experiment Name: At_100uM_ABA_Mutants_cDNA_P Parameter: Tissue Value: Aerial
  misc_feature: MA Experiment 20000070 PARAMETER Experiment Name: At_100uM_ABA_Mutants_cDNA_P Parameter: Treatment Value: 100uM ABA vs. No Treatment
  misc_feature: MA Experiment ID: 20000329 Result: Up-regulated in Transcription
  misc_feature: MA Experiment 20000329 PARAMETER Experiment Name: At_4deg_Cold_Sub_P Parameter: Age (day) Value: 14
  misc_feature: MA Experiment 20000329 PARAMETER Experiment Name: At_4deg_Cold_Sub_P Parameter: Organism Value: A. thaliana
  misc_feature: MA Experiment 20000329 PARAMETER Experiment Name: At_4deg_Cold_Sub_P Parameter: Plant Line Value: WS
  misc_feature: MA Experiment 20000329 PARAMETER Experiment Name: At_4deg_Cold_Sub_P Parameter: Temperature (deg C) Value: 4 vs. 22
  misc_feature: MA Experiment 20000329 PARAMETER Experiment Name: At_4deg_Cold_Sub_P Parameter: Timepoint (hr) Value: 6
  misc_feature: MA Experiment 20000329 PARAMETER Experiment Name: At_4deg_Cold_Sub_P Parameter: Tissue Value: Aerial
  misc_feature: MA Experiment ID: 20000355 Result: Up-regulated in Transcription
  misc_feature: MA Experiment 20000355 PARAMETER Experiment Name: At_Siliques_Sub_P Parameter: Age (day) Value: 21
  misc_feature: MA Experiment 20000355 PARAMETER Experiment Name: At_Siliques_Sub_P Parameter: Organism Value: A. thaliana
  misc_feature: MA Experiment 20000355 PARAMETER Experiment Name: At_Siliques_Sub_P Parameter: Plant Line Value: WS
  misc_feature: MA Experiment 20000355 PARAMETER Experiment Name: At_Siliques_Sub_P Parameter: Tissue Value: Less Than 5mm Siliques vs. Whole Plant
  misc_feature: MA Experiment ID: 20000440 Result: Up-regulated in Transcription
  misc_feature: MA Experiment 20000440 PARAMETER Experiment Name: At_Closed-Flower__Sub_P Parameter: Tissue Value: Closed Flower vs. Whole Plant
  misc_feature: MA Experiment ID: 20001807 Result: Up-regulated in Transcription
  misc_feature: MA Experiment 20001807 PARAMETER Experiment Name: At_50mM_NH4NO3_L-to-H_Sub_P Parameter: Timepoint (hr) Value: 6
  misc_feature: MA Experiment 20001807 PARAMETER Experiment Name: At_50mM_NH4NO3_L-to-H_Sub_P Parameter: Tissue Value: Leaf
  misc_feature: MA Experiment 20001807 PARAMETER Experiment Name: At_50mM_NH4NO3_L-to-H_Sub_P Parameter: Treatment Value: 50mM NH4NO3 vs 100mM Mannitol
gattttttagggtttcaagtgaaaagagtaatagcgcggcggagccatggttctcaagactgagctttgccgattcagtggccagaaaatttaccctggtagagggatcagatttatccgatcggactctcaggtgtttttgtttctcaactccaaatgtaagaggtatttccacaacaagttgaagccatctaagctttgctggactgctatgtaccgaaagcagcacaagaaggacgcagcacaagaggctgtgaagagaaggagacgtgcaactaagaagccttactcaaggtcgattgtcggtgctactttggaggttattcagaagaagcgagcagagaagcctgaagttcgtgatgccgctagagaagctgccctacgtgagatcaaggagagaatcaagaagaccaaggacgagaagaaggcaaagaaggtcgagtatgcatcaaagcaacagaagtcacaagtgaagggaaatatccccaagagtgctgcacccaaggctgctaagatgggtggtggtggaggcagacgttgaatggagctatagagtagcccactcttctctcttcacttatctttctttcttgttttgacattgttttgttttgtcagccattttttagttttgcaccagatctaatatattcagtttatgaaaactttttgtttggtatca

SEQ ID NO: 46095 - protein, 164 aa, Arabidopsis thaliana; identical to SEQ ID NO: 29606
  peptide (1)..(164): Ceres Seq. ID no. 13578592
  misc_feature (3)..(73): Pfam Name: Ribosomal protein L24e Pfam Description: Ribosomal protein L24e
  misc_feature (3)..(159): Homolog of NCBI NO: 4506619 NR Description: ribosomal protein L24
  misc_feature (3)..(151): Homolog of NCBI NO: 19115030 NR Description: 60S ribosomal protein L24 [Schizosaccharomyces
  misc_feature (1)..(159): Homolog of NCBI NO: 28174943 NR Description: Similar to ribosomal protein L24 [Mus musculus]
  misc_feature (4)..(164): Homolog of NCBI NO: 34900364 NR Description: putative 60S ribosomal protein L24
  misc_feature (1)..(159): Homolog of NCBI NO: 10180025 NR Description: 60S ribosomal protein L24 [Prunus avium]
  misc_feature (1)..(164): Homolog of NCBI NO: 1710521 NR Description: 60S RIBOSOMAL PROTEIN L24
  misc_feature (1)..(163): Homolog of NCBI NO: 6094040 NR Description: 60S ribosomal protein L24
  misc_feature (1)..(164): Homolog of NCBI NO: 15231730 NR Description: 60S ribosomal protein L24 (RPL24B) [Arabidopsis
  misc_feature (5)..(164): Homolog of NCBI NO: 25295112 NR Description: 60S ribosomal protein L24 [imported] -
  misc_feature (1)..(164): Homolog of NCBI NO: 18404176 NR Description: 60S ribosomal protein L24 (RPL24A) [Arabidopsis

SEQ ID NO: 46096 - protein, 109 aa, Arabidopsis thaliana; identical to SEQ ID NO: 29607
  peptide (1)..(109): Ceres Seq. ID no. 13578593
  misc_feature (1)..(104): Homolog of NCBI NO: 4506619 NR Description: ribosomal protein L24
  misc_feature (1)..(96): Homolog of NCBI NO: 19115030 NR Description: 60S ribosomal protein L24 [Schizosaccharomyces
  misc_feature (1)..(104): Homolog of NCBI NO: 28174943 NR Description: Similar to ribosomal protein L24 [Mus musculus]
  misc_feature (1)..(109): Homolog of NCBI NO: 34900364 NR Description: putative 60S ribosomal protein L24
  misc_feature (1)..(104): Homolog of NCBI NO: 10180025 NR Description: 60S ribosomal protein L24 [Prunus avium]
  misc_feature (1)..(109): Homolog of NCBI NO: 1710521 NR Description: 60S RIBOSOMAL PROTEIN L24
  misc_feature (1)..(108): Homolog of NCBI NO: 6094040 NR Description: 60S ribosomal protein L24
  misc_feature (1)..(109): Homolog of NCBI NO: 15231730 NR Description: 60S ribosomal protein L24 (RPL24B) [Arabidopsis
  misc_feature (1)..(109): Homolog of NCBI NO: 25295112 NR Description: 60S ribosomal protein L24 [imported] -
  misc_feature (1)..(109): Homolog of NCBI NO: 18404176 NR Description: 60S ribosomal protein L24 (RPL24A) [Arabidopsis

SEQ ID NO: 46097 - DNA, 1675 bp, Arabidopsis thaliana
  misc_feature (1)..(1675): Ceres Seq. ID no. 12488947
  misc_feature: MA Experiment ID: 20000180 Result: Down-regulated in Transcription
  misc_feature: MA Experiment 20000180 PARAMETER Experiment Name: At_Germinating_Seeds_P Parameter: Age (hr) Value: 24 vs. 0
  misc_feature: MA Experiment 20000180 PARAMETER Experiment Name: At_Germinating_Seeds_P Parameter: Tissue Value: Germinating Seeds
  misc_feature: MA Experiment ID: 20000709 Result: Up-regulated in Transcription
  misc_feature: MA Experiment 20000709 PARAMETER Experiment Name: At_15mM_NH4NO3_L-to-H_P Parameter: Age (hr) Value: 14
  misc_feature: MA Experiment 20000709 PARAMETER Experiment Name: At_15mM_NH4NO3_L-to-H_P Parameter: Organism Value: A. thaliana
  misc_feature: MA Experiment 20000709 PARAMETER Experiment Name: At_15mM_NH4NO3_L-to-H_P Parameter: Plant Line Value: WS
  misc_feature: MA Experiment 20000709 PARAMETER Experiment Name: At_15mM_NH4NO3_L-to-H_P Parameter: Timepoint (hr) Value: 4
  misc_feature: MA Experiment 20000709 PARAMETER Experiment Name: At_15mM_NH4NO3_L-to-H_P Parameter: Tissue Value: Aerial
  misc_feature: MA Experiment 20000709 PARAMETER Experiment Name: At_15mM_NH4NO3_L-to-H_P Parameter: Treatment Value: 15mM NH4NO3 vs. 30mM Mannitol
acctctatctctctcttctctgggaggaaaaatggagatatcggttgcatcggtaacaatatcagtagttctagctgttgtgtcatggtggatatggagaactttacagtgggtttggtttaagccaaagatgcttgagcattacctgagaagacaaggtcttgccggaacaccttacacgcctctagtcggcgatttgaagaagaatttcaccatgttgtcggaggcaaggtccaaacccctcaaactaacggatgacatctcacctcgtgtcgtgccttatcccttgcaaatgttcaagacttacggaaggacttactttacatggtttggacctatcccaaccatcacaataatggatcctgagcaaatcaaggaagtgttcaacaaagtttatgatttccaaaagccgcatacatttcctttggccacaattatagctaaaggactcgctaattatgatggtgataaatgggcaaaacaccgaagaatcatcaacccggcttttcatatagagaagatcaagaatatggtacctgcgttccaccagagctgtagggaagttgttggcgaatgggatcagttagtatcggataaagggtcgtcatgtgaggtagacgtttggcctgggcttgtgagtatgactgcagatgtgatctctcgtactgcatttggcagcagctacaaagaagggcagaggatatttgagctccaagcagaactagcacagctcatcattcaagcttttaggaaagctttcatccctggatatagttatctcccaacaaaaagtaacagaagaatgaaagcagcagccagagaaatccaagttatactaagagggatcgtaaacaaaaggttaagggccagagaagctggtgaagcaccaagcgacgatttgctgggaatacttcttgaatcgaatttgaggcaaacggaaggaaacggaatgagtaccgaggatctgatggaggagtgcaagttgttctatttcgccgggcaagagacaacatcagtacttctggtttggacaatggtgctgttaagccaacaccaagattggcaggctcgtgcacgagaagaagtgaagcaagtgtttggcgataaagaacctgatgcagaaggactcaaccagctcaaagttatgacgatgatattatatgaggtccttaggctatatcctccagtaacccagctgactcgagccattcacaaagagctgaagctaggcgatctgaccctaccaggcggtgttcagatcagtctacctattctgctagtccaacacgacatcgagctgtggggaaacgacgcagcagagttcaatcctgacagatttaaagatggtctttcaaaggcaacaaagagccaagtctccttctttccctttgcgtggggaccgaggatatgcataggccagaactttgccctgttagaggcaaaaatggcaatggcattgattctgcggaggttctcgtttgagatttctccttcctatgttcacgcaccatacacagtcatcaccattcacccacagttcggtgctcagcttatcatgcacaagctctaatcagacaacacatttgtgttgttgtcaaatatacaataaacttgttatacagagatgaatcgagatagatcataatacaaaactcaaatctttccttttatgttc

SEQ ID NO: 46098 - protein, 522 aa, Arabidopsis thaliana
  peptide (1)..(522): Ceres Seq. ID no. 12488948
  misc_feature (97)..(497): Pfam Name: Cytochrome P450 Pfam Description: Cytochrome P450
  misc_feature (10)..(88): Homolog of NCBI NO: 9294385 NR Description: cytochrome P450-like protein [Arabidopsis
  misc_feature (124)..(522): Homolog of NCBI NO: 9294385 NR Description: cytochrome P450-like protein [Arabidopsis
  misc_feature (11)..(522): Homolog of NCBI NO: 15231889 NR Description: cytochrome P450, putative
  misc_feature (11)..(522): Homolog of NCBI NO: 15231897 NR Description: cytochrome P450, putative; protein id:
  misc_feature (11)..(522): Homolog of NCBI NO: 9294386 NR Description: cytochrome P450 [Arabidopsis thaliana]
  misc_feature (11)..(522): Homolog of NCBI NO: 15231899 NR Description: cytochrome P450, putative; protein id:
  misc_feature (11)..(522): Homolog of NCBI NO: 15231906 NR Description: cytochrome P450, putative
  misc_feature (11)..(522): Homolog of NCBI NO: 15231901 NR Description: cytochrome P450, putative; protein id:
  misc_feature (11)..(522): Homolog of NCBI NO: 15231903 NR Description: cytochrome P450, putative
  misc_feature (11)..(522): Homolog of NCBI NO: 15231907 NR Description: cytochrome P450, putative
PLSLSSLGGKMEISVASVTISVVLAVVSWWIWRTLQWVWFKPKMLEHYLRRQGLAGTPYTPLVGDLKKNFTMLSEARSKPLKLTDDISPRVVPYPLQMFKTYGRTYFTWFGPIPTITIMDPEQIKEVFNKVYDFQKPHTFPLATIIAKGLANYDGDKWAKHRRIINPAFHIEKIKNMVPAFHQSCREVVGEWDQLVSDKGSSCEVDVWPGLVSMTADVISRTAFGSSYKEGQRIFELQAELAQLIIQAFRKAFIPGYSYLPTKSNRRMKAAAREIQVILRGIVNKRLRAREAGEAPSDDLLGILLESNLRQTEGNGMSTEDLMEECKLFYFAGQETTSVLLVWTMVLLSQHQDWQARAREEVKQVFGDKEPDAEGLNQLKVMTMILYEVLRLYPPVTQLTRAIHKELKLGDLTLPGGVQISLPILLVQHDIELWGNDAAEFNPDRFKDGLSKATKSQVSFFPFAWGPRICIGQNFALLEAKMAMALILRRFSFEISPSYVHAPYTVITIHPQFGAQLIMHKL

SEQ ID NO: 46099 - protein, 512 aa, Arabidopsis thaliana
  peptide (1)..(512): Ceres Seq. ID no. 12488949
  misc_feature (87)..(487): Pfam Name: Cytochrome P450 Pfam Description: Cytochrome P450
  misc_feature (1)..(78): Homolog of NCBI NO: 9294385 NR Description: cytochrome P450-like protein [Arabidopsis
  misc_feature (114)..(512): Homolog of NCBI NO: 9294385 NR Description: cytochrome P450-like protein [Arabidopsis
  misc_feature (1)..(512): Homolog of NCBI NO: 15231889 NR Description: cytochrome P450, putative
  misc_feature (1)..(512): Homolog of NCBI NO: 15231897 NR Description: cytochrome P450, putative; protein id:
  misc_feature (1)..(512): Homolog of NCBI NO: 9294386 NR Description: cytochrome P450 [Arabidopsis thaliana]
  misc_feature (1)..(512): Homolog of NCBI NO: 15231899 NR Description: cytochrome P450, putative; protein id:
  misc_feature (1)..(512): Homolog of NCBI NO: 15231906 NR Description: cytochrome P450, putative
  misc_feature (1)..(512): Homolog of NCBI NO: 15231901 NR Description: cytochrome P450, putative; protein id:
  misc_feature (1)..(512): Homolog of NCBI NO: 15231903 NR Description: cytochrome P450, putative
  misc_feature (1)..(512): Homolog of NCBI NO: 15231907 NR Description: cytochrome P450, putative
MEISVASVTISVVLAVVSWWIWRTLQWVWFKPKMLEHYLRRQGLAGTPYTPLVGDLKKNFTMLSEARSKPLKLTDDISPRVVPYPLQMFKTYGRTYFTWFGPIPTITIMDPEQIKEVFNKVYDFQKPHTFPLATIIAKGLANYDGDKWAKHRRIINPAFHIEKIKNMVPAFHQSCREVVGEWDQLVSDKGSSCEVDVWPGLVSMTADVISRTAFGSSYKEGQRIFELQAELAQLIIQAFRKAFIPGYSYLPTKSNRRMKAAAREIQVILRGIVNKRLRAREAGEAPSDDLLGILLESNLRQTEGNGMSTEDLMEECKLFYFAGQETTSVLLVWTMVLLSQHQDWQARAREEVKQVFGDKEPDAEGLNQLKVMTMILYEVLRLYPPVTQLTRAIHKELKLGDLTLPGGVQISLPILLVQHDIELWGNDAAEFNPDRFKDGLSKATKSQVSFFPFAWGPRICIGQNFALLEAKMAMALILRRFSFEISPSYVHAPYTVITIHPQFGAQLIMHKL

SEQ ID NO: 46100 - protein, 479 aa, Arabidopsis thaliana
  peptide (1)..(479): Ceres Seq. ID no. 12488950
  misc_feature (54)..(454): Pfam Name: Cytochrome P450 Pfam Description: Cytochrome P450
  misc_feature (1)..(45): Homolog of NCBI NO: 9294385 NR Description: cytochrome P450-like protein [Arabidopsis
  misc_feature (81)..(479): Homolog of NCBI NO: 9294385 NR Description: cytochrome P450-like protein [Arabidopsis
  misc_feature (1)..(479): Homolog of NCBI NO: 15231889 NR Description: cytochrome P450, putative
  misc_feature (1)..(479): Homolog of NCBI NO: 15231897 NR Description: cytochrome P450, putative; protein id:
  misc_feature (1)..(479): Homolog of NCBI NO: 9294386 NR Description: cytochrome P450 [Arabidopsis thaliana]
  misc_feature (1)..(479): Homolog of NCBI NO: 15231899 NR Description: cytochrome P450, putative; protein id:
  misc_feature (1)..(479): Homolog of NCBI NO: 15231906 NR Description: cytochrome P450, putative
  misc_feature (1)..(479): Homolog of NCBI NO: 15231901 NR Description: cytochrome P450, putative; protein id:
  misc_feature (1)..(479): Homolog of NCBI NO: 15231903 NR Description: cytochrome P450, putative
  misc_feature (1)..(479): Homolog of NCBI NO: 15231907 NR Description: cytochrome P450, putative
MLEHYLRRQGLAGTPYTPLVGDLKKNFTMLSEARSKPLKLTDDISPRVVPYPLQMFKTYGRTYFTWFGPIPTITIMDPEQIKEVFNKVYDFQKPHTFPLATIIAKGLANYDGDKWAKHRRIINPAFHIEKIKNMVPAFHQSCREVVGEWDQLVSDKGSSCEVDVWPGLVSMTADVISRTAFGSSYKEGQRIFELQAELAQLIIQAFRKAFIPGYSYLPTKSNRRMKAAAREIQVILRGIVNKRLRAREAGEAPSDDLLGILLESNLRQTEGNGMSTEDLMEECKLFYFAGQETTSVLLVWTMVLLSQHQDWQARAREEVKQVFGDKEPDAEGLNQLKVMTMILYEVLRLYPPVTQLTRAIHKELKLGDLTLPGGVQISLPILLVQHDIELWGNDAAEFNPDRFKDGLSKATKSQVSFFPFAWGPRICIGQNFALLEAKMAMALILRRFSFEISPSYVHAPYTVITIHPQFGAQLIMHKL

SEQ ID NO: 46101 - DNA, 792 bp, Arabidopsis thaliana
  misc_feature (1)..(792): Ceres Seq. ID no. 13579765
  misc_feature: MA Experiment ID: 20000184 Result: Up-regulated in Transcription
  misc_feature: MA Experiment 20000184 PARAMETER Experiment Name: At_Shoots__P Parameter: Age (day) Value: 7
  misc_feature: MA Experiment 20000184 PARAMETER Experiment Name: At_Shoots__P Parameter: Tissue Value: Shoots vs. Whole Plant
  misc_feature: MA Experiment ID: 20000185 Result: Up-regulated in Transcription
  misc_feature: MA Experiment 20000185 PARAMETER Experiment Name: At_Roots__P Parameter: Age (day) Value: 7 vs. 21
  misc_feature: MA Experiment 20000185 PARAMETER Experiment Name: At_Roots__P Parameter: Organism Value: A. thaliana
  misc_feature: MA Experiment 20000185 PARAMETER Experiment Name: At_Roots__P Parameter: Tissue Value: Roots vs. Whole Plant
  misc_feature: MA Experiment ID: 20000269 Result: Down-regulated in Transcription
  misc_feature: MA Experiment 20000269 PARAMETER Experiment Name: At_1mM_KNO3_L-vs-H_Roots_P Parameter: Age (day) Value: 7,10,12
  misc_feature: MA Experiment 20000269 PARAMETER Experiment Name: At_1mM_KNO3_L-vs-H_Roots_P Parameter: Organism Value: A. thaliana
  misc_feature: MA Experiment 20000269 PARAMETER Experiment Name: At_1mM_KNO3_L-vs-H_Roots_P Parameter: Plant Line Value: WS
  misc_feature: MA Experiment 20000269 PARAMETER Experiment Name: At_1mM_KNO3_L-vs-H_Roots_P Parameter: Timepoint (day) Value: 7,10,12
  misc_feature: MA Experiment 20000269 PARAMETER Experiment Name: At_1mM_KNO3_L-vs-H_Roots_P Parameter: Tissue Value: Roots
  misc_feature: MA Experiment 20000269 PARAMETER Experiment Name: At_1mM_KNO3_L-vs-H_Roots_P Parameter: Treatment Value: 1mM KNO3 vs. 50mM KNO3
  misc_feature: MA Experiment ID: 20000439 Result: Up-regulated in Transcription
  misc_feature: MA Experiment 20000439 PARAMETER Experiment Name: At_Roots__P Parameter: Age (day) Value: 14 vs. 21
  misc_feature: MA Experiment 20000439 PARAMETER Experiment Name: At_Roots__P Parameter: Organism Value: A. thaliana
  misc_feature: MA Experiment 20000439 PARAMETER Experiment Name: At_Roots__P Parameter: Tissue Value: Roots vs. Whole Plant
  misc_feature: MA Experiment ID: 20000575 Result: Up-regulated in Transcription
  misc_feature: MA Experiment 20000575 PARAMETER Experiment Name: At_100uM_ABA_Mutants__P Parameter: Organism Value: A. thaliana
  misc_feature: MA Experiment 20000575 PARAMETER Experiment Name: At_100uM_ABA_Mutants__P Parameter: Plant Line Value: CS22
  misc_feature: MA Experiment 20000575 PARAMETER Experiment Name: At_100uM_ABA_Mutants__P Parameter: Timepoint (hr) Value: 6
  misc_feature: MA Experiment 20000575 PARAMETER Experiment Name: At_100uM_ABA_Mutants__P Parameter: Tissue Value: Whole Plant
  misc_feature: MA Experiment 20000575 PARAMETER Experiment Name: At_100uM_ABA_Mutants__P Parameter: Treatment Value: 1uM ABA vs. No Treatment
  misc_feature: MA Experiment ID: 20000576 Result: Up-regulated in Transcription
  misc_feature: MA Experiment 20000576 PARAMETER Experiment Name: At_100uM_ABA_Mutants__P Parameter: Organism Value: A. thaliana
  misc_feature: MA Experiment 20000576 PARAMETER Experiment Name: At_100uM_ABA_Mutants__P Parameter: Plant Line Value: CS23
  misc_feature: MA Experiment 20000576 PARAMETER Experiment Name: At_100uM_ABA_Mutants__P Parameter: Timepoint (hr) Value: 6
  misc_feature: MA Experiment 20000576 PARAMETER Experiment Name: At_100uM_ABA_Mutants__P Parameter: Tissue Value: Whole Plant
  misc_feature: MA Experiment 20000576 PARAMETER Experiment Name: At_100uM_ABA_Mutants__P Parameter: Treatment Value: 1uM ABA vs. No Treatment
  misc_feature: MA Experiment ID: 20001451 Result: Up-regulated in Transcription
  misc_feature: MA Experiment 20001451 PARAMETER Experiment Name: At_Far-red-induction_P Parameter: Age (day) Value: 7
  misc_feature: MA Experiment 20001451 PARAMETER Experiment Name: At_Far-red-induction_P Parameter: Light Value: Far-red vs. White
  misc_feature: MA Experiment 20001451 PARAMETER Experiment Name: At_Far-red-induction_P Parameter: Organism Value: A. thaliana
  misc_feature: MA Experiment 20001451 PARAMETER Experiment Name: At_Far-red-induction_P Parameter: Plant Line Value: Columbia
  misc_feature: MA Experiment 20001451 PARAMETER Experiment Name: At_Far-red-induction_P Parameter: Timepoint (hr) Value: 24
  misc_feature: MA Experiment 20001451 PARAMETER Experiment Name: At_Far-red-induction_P Parameter: Tissue Value: Whole Plant
aacagaaaatagaaagaagtaacaaaaccaaagcaaaaaatggtgaagatcgaagttggaagtgtgggagactcattcagtgtatcatctcttaaagcttacttgtctgagttcatcgcaactcttctcttcgtattcgcaggcgttggctctgctgttgcgtttgccaaactaacctctgatggagccttggacccagctggtcttgtagcaattgcaattgctcacgcgtttgctcttttcgttggagtttccattgcggctaacatttctggtggtcaccttaacccagccgtgactcttggccttgccatcggcggaaacataacactcatcacaggtttcttctattggattgctcagtgtcttggctccatcgtcgcttgtcttctcctcgtctttgttactaatggcaagagcgtaccgacccacggggtctcagccggtctaggagcggtcgaaggtgtcgtcatggagatcgttgtgacctttgcattggtctacaccgtttacgccacagcagctgatccaaagaaaggatcgctagggaccatcgctccaatcgccatcggcttcatagttggtgccaacatcctcgctgctggtccattcagtggtggctccatgaatccagcaaggtcgttcggaccagctgttgtcagtggtgacttgtcccaaatctggatctattgggtgggaccacttgtgggtggtgcactcgcgggacttatctacggtgatgtgttcatcggttcttatgaagcggtagaaacccgtgagatccgagtgtaa

SEQ ID NO: 46102 - protein, 250 aa, Arabidopsis thaliana
  peptide (1)..(250): Ceres Seq. ID no. 13579766
  misc_feature (11)..(232): Pfam Name: Major intrinsic protein Pfam Description: Major intrinsic protein
  misc_feature (7)..(233): Homolog of NCBI NO: 1076687 NR Description: integral membrane protein - garden snapdragon
  misc_feature (1)..(247): Homolog of NCBI NO: 2058706 NR Description: Rb7 [Lycopersicon esculentum]
  misc_feature (1)..(247): Homolog of NCBI NO: 267135 NR Description: TONOPLAST INTRINSIC PROTEIN, ROOT-SPECIFIC
  misc_feature (1)..(243): Homolog of NCBI NO: 7441272 NR Description: aquaporin TIP7 - common sunflower
  misc_feature (1)..(247): Homolog of NCBI NO: 11276918 NR Description: membrane channel protein [imported] - potato
  misc_feature (1)..(243): Homolog of NCBI NO: 7441268 NR Description: probable membrane protein - carrot
  misc_feature (1)..(247): Homolog of NCBI NO: 126959 NR Description: Tonoplast intrinsic protein, root-specific RB7-5A
  misc_feature (1)..(247): Homolog of NCBI NO: 461929 NR Description: PROBABLE TONOPLAST INTRINSIC PROTEIN DIP
  misc_feature (1)..(247): Homolog of NCBI NO: 15236043 NR Description: major intrinsic protein (MIP) family [Arabidopsis
  misc_feature (1)..(250): Homolog of NCBI NO: 15238100 NR Description: major intrinsic protein (MIP) family [Arabidopsis
MVKIEVGSVGDSFSVSSLKAYLSEFIATLLFVFAGVGSAVAFAKLTSDGALDPAGLVAIAIAHAFALFVGVSIAANISGGHLNPAVTLGLAIGGNITLITGFFYWIAQCLGSIVACLLLVFVTNGKSVPTHGVSAGLGAVEGVVMEIVVTFALVYTVYATAADPKKGSLGTIAPIAIGFIVGANILAAGPFSGGSMNPARSFGPAVVSGDLSQIWIYWVGPLVGGALAGLIYGDVFIGSYEAVETREIRV

SEQ ID NO: 46103 - DNA, 933 bp, Arabidopsis thaliana; identical to SEQ ID NO: 37998
  misc_feature (1)..(933): Ceres Seq. ID no. 12601209
  misc_feature: MA Experiment ID: 108435 Result: Down-regulated in Transcription
  misc_feature: MA Experiment 108435 PARAMETER Experiment Name: At_stm_Mutants_cDNA_P Parameter: Plant Line Value: wt Landsburg vs stm
  misc_feature: MA Experiment 108435 PARAMETER Experiment Name: At_stm_Mutants_cDNA_P Parameter: Tissue Value: Shoot Apical Meristem Region
  misc_feature: MA Experiment ID: 108461 Result: Up-regulated in Transcription
  misc_feature: MA Experiment 108461 PARAMETER Experiment Name: At_Germinating_Seeds_cDNA_P Parameter: Age (day) Value: 1 vs. 0
  misc_feature: MA Experiment 108461 PARAMETER Experiment Name: At_Germinating_Seeds_cDNA_P Parameter: Tissue Value: Germinating Seeds
  misc_feature: MA Experiment ID: 108462 Result: Up-regulated in Transcription
  misc_feature: MA Experiment 108462 PARAMETER Experiment Name: At_Germinating_Seeds_cDNA_P Parameter: Age (day) Value: 2 vs. 0
  misc_feature: MA Experiment 108462 PARAMETER Experiment Name: At_Germinating_Seeds_cDNA_P Parameter: Tissue Value: Germinating Seeds
  misc_feature: MA Experiment ID: 108463 Result: Up-regulated in Transcription
  misc_feature: MA Experiment 108463 PARAMETER Experiment Name: At_Germinating_Seeds_cDNA_P Parameter: Age (day) Value: 3 vs. 0
  misc_feature: MA Experiment 108463 PARAMETER Experiment Name: At_Germinating_Seeds_cDNA_P Parameter: Tissue Value: Germinating Seeds
  misc_feature: MA Experiment ID: 108464 Result: Up-regulated in Transcription
  misc_feature: MA Experiment 108464 PARAMETER Experiment Name: At_Germinating_Seeds_cDNA_P Parameter: Age (day) Value: 4 vs. 0
  misc_feature: MA Experiment 108464 PARAMETER Experiment Name: At_Germinating_Seeds_cDNA_P Parameter: Tissue Value: Germinating Seeds
  misc_feature: MA Experiment ID: 108488 Result: Up-regulated in Transcription
  misc_feature: MA Experiment ID: 108595 Result: Down-regulated in Transcription
  misc_feature: MA Experiment 108595 PARAMETER Experiment Name: At_Ler-pi_Ovule_cDNA_P Parameter: Plant Line Value: null
  misc_feature: MA Experiment ID: 20000071 Result: Down-regulated in Transcription
  misc_feature: MA Experiment 20000071 PARAMETER Experiment Name: At_100uM_ABA_Mutants_cDNA_P Parameter: Plant Line Value: CS8104
  misc_feature: MA Experiment 20000071 PARAMETER Experiment Name: At_100uM_ABA_Mutants_cDNA_P Parameter: Timepoint (hr) Value: 6
  misc_feature: MA Experiment 20000071 PARAMETER Experiment Name: At_100uM_ABA_Mutants_cDNA_P Parameter: Tissue Value: Aerial
  misc_feature: MA Experiment 20000071 PARAMETER Experiment Name: At_100uM_ABA_Mutants_cDNA_P Parameter: Treatment Value: 100uM ABA vs. No Treatment
  misc_feature: MA Experiment ID: 20000086 Result: Down-regulated in Transcription
  misc_feature: MA Experiment 20000086 PARAMETER Experiment Name: At_100uM_ABA_Mutants_cDNA_P Parameter: Plant Line Value: CS22
  misc_feature: MA Experiment 20000086 PARAMETER Experiment Name: At_100uM_ABA_Mutants_cDNA_P Parameter: Timepoint (hr) Value: 6
  misc_feature: MA Experiment 20000086 PARAMETER Experiment Name: At_100uM_ABA_Mutants_cDNA_P Parameter: Tissue Value: Aerial
  misc_feature: MA Experiment 20000086 PARAMETER Experiment Name: At_100uM_ABA_Mutants_cDNA_P Parameter: Treatment Value: 100uM ABA vs. No Treatment
  misc_feature: MA Experiment ID: 20000087 Result: Down-regulated in Transcription
  misc_feature: MA Experiment 20000087 PARAMETER Experiment Name: At_100uM_ABA_Mutants_cDNA_P Parameter: Plant Line Value: WS
  misc_feature: MA Experiment 20000087 PARAMETER Experiment Name: At_100uM_ABA_Mutants_cDNA_P Parameter: Timepoint (hr) Value: 6
  misc_feature: MA Experiment 20000087 PARAMETER Experiment Name: At_100uM_ABA_Mutants_cDNA_P Parameter: Tissue Value: Aerial
  misc_feature: MA Experiment 20000087 PARAMETER Experiment Name: At_100uM_ABA_Mutants_cDNA_P Parameter: Treatment Value: 100uM ABA vs. No Treatment
  misc_feature: MA Experiment ID: 20000088 Result: Down-regulated in Transcription
  misc_feature: MA Experiment 20000088 PARAMETER Experiment Name: At_100uM_ABA_Mutants_cDNA_P Parameter: Plant Line Value: Landsberg
  misc_feature: MA Experiment 20000088 PARAMETER Experiment Name: At_100uM_ABA_Mutants_cDNA_P Parameter: Timepoint (hr) Value: 6
  misc_feature: MA Experiment 20000088 PARAMETER Experiment Name: At_100uM_ABA_Mutants_cDNA_P Parameter: Tissue Value: Aerial
  misc_feature: MA Experiment 20000088 PARAMETER Experiment Name: At_100uM_ABA_Mutants_cDNA_P Parameter: Treatment Value: 100uM ABA vs. No Treatment
  misc_feature: MA Experiment ID: 20000117 Result: Down-regulated in Transcription
  misc_feature: MA Experiment 20000117 PARAMETER Experiment Name: At_100uM_ABA_Mutants_cDNA_P Parameter: Plant Line Value: Columbia
  misc_feature: MA Experiment 20000117 PARAMETER Experiment Name: At_100uM_ABA_Mutants_cDNA_P Parameter: Timepoint (hr) Value: 6
  misc_feature: MA Experiment 20000117 PARAMETER Experiment Name: At_100uM_ABA_Mutants_cDNA_P Parameter: Tissue Value: Aerial
  misc_feature: MA Experiment 20000117 PARAMETER Experiment Name: At_100uM_ABA_Mutants_cDNA_P Parameter: Treatment Value: 100uM ABA vs. No Treatment
  misc_feature: MA Experiment ID: 20000180 Result: Up-regulated in Transcription
  misc_feature: MA Experiment 20000180 PARAMETER Experiment Name: At_Germinating_Seeds_P Parameter: Age (hr) Value: 24 vs. 0
  misc_feature: MA Experiment 20000180 PARAMETER Experiment Name: At_Germinating_Seeds_P Parameter: Tissue Value: Germinating Seeds
  misc_feature: MA Experiment ID: 20000185 Result: Down-regulated in Transcription
  misc_feature: MA Experiment 20000185 PARAMETER Experiment Name: At_Roots__P Parameter: Age (day) Value: 7 vs. 21
  misc_feature: MA Experiment 20000185 PARAMETER Experiment Name: At_Roots__P Parameter: Organism Value: A. thaliana
  misc_feature: MA Experiment 20000185 PARAMETER Experiment Name: At_Roots__P Parameter: Tissue Value: Roots vs. Whole Plant
  misc_feature: MA Experiment ID: 20000438 Result: Up-regulated in Transcription
  misc_feature: MA Experiment 20000438 PARAMETER Experiment Name: At_Shoots__P Parameter: Age (day) Value: 14
  misc_feature: MA Experiment 20000438 PARAMETER Experiment Name: At_Shoots__P Parameter: Tissue Value: Shoots vs. Whole Plant
  misc_feature: MA Experiment ID: 20000439 Result: Down-regulated in Transcription
  misc_feature: MA Experiment 20000439 PARAMETER Experiment Name: At_Roots__P Parameter: Age (day) Value: 14 vs. 21
  misc_feature: MA Experiment 20000439 PARAMETER Experiment Name: At_Roots__P Parameter: Organism Value: A. thaliana
  misc_feature: MA Experiment 20000439 PARAMETER Experiment Name: At_Roots__P Parameter: Tissue Value: Roots vs. Whole Plant
  misc_feature: MA Experiment ID: 20000495 Result: Down-regulated in Transcription
  misc_feature: MA Experiment 20000495 PARAMETER Experiment Name: At_Guard_Cells_P Parameter: Harvest Date Value: 8/2/2002
  misc_feature: MA Experiment 20000495 PARAMETER Experiment Name: At_Guard_Cells_P Parameter: Organism Value: A. thaliana
  misc_feature: MA Experiment 20000495 PARAMETER Experiment Name: At_Guard_Cells_P Parameter: Tissue Value: Guard Cells vs. Leaves
  misc_feature: MA Experiment ID: 20000496 Result: Down-regulated in Transcription
  misc_feature: MA Experiment 20000496 PARAMETER Experiment Name: At_Guard_Cells_P Parameter: Harvest Date Value: 7/19/2002
  misc_feature: MA Experiment 20000496 PARAMETER Experiment Name: At_Guard_Cells_P Parameter: Organism Value: Canola
  misc_feature: MA Experiment 20000496 PARAMETER Experiment Name: At_Guard_Cells_P Parameter: Tissue Value: Guard Cells vs. Leaves
  misc_feature: MA Experiment ID: 20000794 Result: Down-regulated in Transcription
  misc_feature: MA Experiment 20000794 PARAMETER Experiment Name: At_Petals_P Parameter: Age (day) Value: 23-25 days
  misc_feature: MA Experiment 20000794 PARAMETER Experiment Name: At_Petals_P Parameter: Plant Line Value: WS
  misc_feature: MA Experiment 20000794 PARAMETER Experiment Name: At_Petals_P Parameter: Tissue Value: Petals vs. Whole plant
  misc_feature: MA Experiment ID: 20001451 Result: Down-regulated in Transcription
  misc_feature: MA Experiment 20001451 PARAMETER Experiment Name: At_Far-red-induction_P Parameter: Age (day) Value: 7
  misc_feature: MA Experiment 20001451 PARAMETER Experiment Name: At_Far-red-induction_P Parameter: Light Value: Far-red vs. White
  misc_feature: MA Experiment 20001451 PARAMETER Experiment Name: At_Far-red-induction_P Parameter: Organism Value: A. thaliana
  misc_feature: MA Experiment 20001451 PARAMETER Experiment Name: At_Far-red-induction_P Parameter: Plant Line Value: Columbia
  misc_feature: MA Experiment 20001451 PARAMETER Experiment Name: At_Far-red-induction_P Parameter: Timepoint (hr) Value: 24
  misc_feature: MA Experiment 20001451 PARAMETER Experiment Name: At_Far-red-induction_P Parameter: Tissue Value: Whole Plant
  misc_feature: MA Experiment ID: 20001557 Result: Down-regulated in Transcription
  misc_feature: MA Experiment 20001557 PARAMETER Experiment Name: At_Drought_Soil_Dry_P Parameter: Age (day) Value: 27
  misc_feature: MA Experiment 20001557 PARAMETER Experiment Name: At_Drought_Soil_Dry_P Parameter: Organism Value: A. thaliana
  misc_feature: MA Experiment 20001557 PARAMETER Experiment Name: At_Drought_Soil_Dry_P Parameter: Plant Line Value: WS
  misc_feature: MA Experiment 20001557 PARAMETER Experiment Name: At_Drought_Soil_Dry_P Parameter: Post Timepoint (hr) Value: 3
  misc_feature: MA Experiment 20001557 PARAMETER Experiment Name: At_Drought_Soil_Dry_P Parameter: Post-Treatment Value: Re-Water vs. No Drought
  misc_feature: MA Experiment 20001557 PARAMETER Experiment Name: At_Drought_Soil_Dry_P Parameter: Timepoint (day) Value: 13
  misc_feature: MA Experiment 20001557 PARAMETER Experiment Name: At_Drought_Soil_Dry_P Parameter: Treatment Value: Drought vs. No Drought
  misc_feature: MA Experiment ID: 20001757 Result: Up-regulated in Transcription
  misc_feature: MA Experiment 20001757 PARAMETER Experiment Name: At_50mM_NH4NO3_L-to-H_P Parameter: Timepoint (hr) Value: 6
  misc_feature: MA Experiment 20001757 PARAMETER Experiment Name: At_50mM_NH4NO3_L-to-H_P Parameter: Tissue Value: Leaf
  misc_feature: MA Experiment 20001757 PARAMETER Experiment Name: At_50mM_NH4NO3_L-to-H_P Parameter: Treatment Value: 50mM NH4NO3 vs 100mM Mannitol
  misc_feature: MA Experiment ID: 20001905 Result: Down-regulated in Transcription
  misc_feature: MA Experiment 20001905 PARAMETER Experiment Name: At_Drought_Reproduction_P Parameter: Age (day) Value: 40
  misc_feature: MA Experiment 20001905 PARAMETER Experiment Name: At_Drought_Reproduction_P Parameter: Organism Value: A. thaliana
  misc_feature: MA Experiment 20001905 PARAMETER Experiment Name: At_Drought_Reproduction_P Parameter: Plant Line Value: WS
  misc_feature: MA Experiment 20001905 PARAMETER Experiment Name: At_Drought_Reproduction_P Parameter: Timepoint (day) Value: 10
  misc_feature: MA Experiment 20001905 PARAMETER Experiment Name: At_Drought_Reproduction_P Parameter: Tissue Value: Rosettes
  misc_feature: MA Experiment 20001905 PARAMETER Experiment Name: At_Drought_Reproduction_P Parameter: Treatment Value: Drought vs. No Drought

SEQ ID NO: 46104 - protein, 229 aa, Arabidopsis thaliana; identical to SEQ ID NO: 37999
  peptide (1)..(229): Ceres Seq. ID no. 12601210
  misc_feature (113)..(205): Pfam Name: Rieske [2Fe-2S] domain Pfam Description: Rieske [2Fe-2S] domain
  misc_feature (113)..(205): Pfam Name: Rieske [2Fe-2S] domain Pfam Description: Rieske [2Fe-2S] domain
  misc_feature (113)..(205): Pfam Name: Rieske [2Fe-2S] domain Pfam Description: Rieske [2Fe-2S] domain
  misc_feature (1)..(229): Homolog of NCBI NO: 3885886 NR Description: Rieske Fe-S precursor protein [Oryza sativa]
  misc_feature (1)..(229): Homolog of NCBI NO: 2921504 NR Description: cytochrome B6-F complex iron-sulfur subunit
  misc_feature (1)..(229): Homolog of NCBI NO: 136707 NR Description: Cytochrome B6-F complex iron-sulfur subunit,
  misc_feature (1)..(229): Homolog of NCBI NO: 136712 NR Description: Cytochrome B6-F complex iron-sulfur subunit,
  misc_feature (1)..(229): Homolog of NCBI NO: 19999 NR Description: Rieske Fe/S protein of cytochrome b6/f complex
  misc_feature (1)..(229): Homolog of NCBI NO: 3885886 NR Description: Rieske Fe-S precursor protein [Oryza sativa]
  misc_feature (1)..(229): Homolog of NCBI NO: 136707 NR Description: Cytochrome B6-F complex iron-sulfur subunit,
  misc_feature (1)..(229): Homolog of NCBI NO: 19999 NR Description: Rieske Fe/S protein of cytochrome b6/f complex
  misc_feature (1)..(229): Homolog of NCBI NO: 136712 NR Description: Cytochrome B6-F complex iron-sulfur subunit,
  misc_feature (1)..(229): Homolog of NCBI NO: 136707 NR Description: Cytochrome B6-F complex iron-sulfur subunit,
  misc_feature (1)..(229): Homolog of NCBI NO: 2921504 NR Description: cytochrome B6-F complex iron-sulfur subunit
  misc_feature (1)..(229): Homolog of NCBI NO: 3885886 NR Description: Rieske Fe-S precursor protein [Oryza sativa]
  misc_feature (1)..(229): Homolog of NCBI NO: 15236275 NR Description: putative component of cytochrome B6-F complex
  misc_feature (1)..(229): Homolog of NCBI NO: 9843639 NR Description: Rieske FeS protein [Arabidopsis thaliana]
  misc_feature (20)..(229): Homolog of NCBI NO: 30679426 NR Description: Rieske FeS protein (component of cytochrome B6-F
  misc_feature (1)..(229): Homolog of NCBI NO: 401249 NR Description: Cytochrome B6-F complex iron-sulfur subunit 2,
  misc_feature (1)..(229): Homolog of NCBI NO: 401247 NR Description: Cytochrome B6-F complex iron-sulfur subunit 1,
  misc_feature (1)..(229): Homolog of NCBI NO: 15236275 NR Description: putative component of cytochrome B6-F complex
  misc_feature (1)..(229): Homolog of NCBI NO: 9843639 NR Description: Rieske FeS protein [Arabidopsis thaliana]
  misc_feature (20)..(229): Homolog of NCBI NO: 30679426 NR Description: Rieske FeS protein (component of cytochrome B6-F
  misc_feature (1)..(229): Homolog of NCBI NO: 401249 NR Description: Cytochrome B6-F complex iron-sulfur subunit 2,
  misc_feature (1)..(229): Homolog of NCBI NO: 401247 NR Description: Cytochrome B6-F complex iron-sulfur subunit 1,
  misc_feature (1)..(229): Homolog of NCBI NO: 19999 NR Description: Rieske Fe/S protein of cytochrome b6/f complex
  misc_feature (1)..(229): Homolog of NCBI NO: 136712 NR Description: Cytochrome B6-F complex iron-sulfur subunit,
  misc_feature (1)..(229): Homolog of NCBI NO: 2921504 NR Description: cytochrome B6-F complex iron-sulfur subunit
  misc_feature (1)..(229): Homolog of NCBI NO: 401247 NR Description: Cytochrome B6-F complex iron-sulfur subunit 1,
  misc_feature (1)..(229): Homolog of NCBI NO: 401249 NR Description: Cytochrome B6-F complex iron-sulfur subunit 2,
  misc_feature (20)..(229): Homolog of NCBI NO: 30679426 NR Description: Rieske FeS protein (component of cytochrome B6-F
  misc_feature (1)..(229): Homolog of NCBI NO: 9843639 NR Description: Rieske FeS protein [Arabidopsis thaliana]
  misc_feature (1)..(229): Homolog of NCBI NO: 15236275 NR Description: putative component of cytochrome B6-F complex

SEQ ID NO: 46105 - protein, 210 aa, Arabidopsis thaliana; identical to SEQ ID NO: 38000
  peptide (1)..(210): Ceres Seq. ID no. 12601211
  misc_feature (94)..(186): Pfam Name: Rieske [2Fe-2S] domain Pfam Description: Rieske [2Fe-2S] domain
  misc_feature (94)..(186): Pfam Name: Rieske [2Fe-2S] domain Pfam Description: Rieske [2Fe-2S] domain
  misc_feature (94)..(186): Pfam Name: Rieske [2Fe-2S] domain Pfam Description: Rieske [2Fe-2S] domain
  misc_feature (1)..(210): Homolog of NCBI NO: 3885886 NR Description: Rieske Fe-S precursor protein [Oryza sativa]
  misc_feature (1)..(210): Homolog of NCBI NO: 2921504 NR Description: cytochrome B6-F complex iron-sulfur subunit
  misc_feature (1)..(210): Homolog of NCBI NO: 136707 NR Description: Cytochrome B6-F complex iron-sulfur subunit,
  misc_feature (1)..(210): Homolog of NCBI NO: 136712 NR Description: Cytochrome B6-F complex iron-sulfur subunit,
  misc_feature (1)..(210): Homolog of NCBI NO: 19999 NR Description: Rieske Fe/S protein of cytochrome b6/f complex
  misc_feature (1)..(210): Homolog of NCBI NO: 3885886 NR Description: Rieske Fe-S precursor protein [Oryza sativa]
  misc_feature (1)..(210): Homolog of NCBI NO: 136707 NR Description: Cytochrome B6-F complex iron-sulfur subunit,
  misc_feature (1)..(210): Homolog of NCBI NO: 19999 NR Description: Rieske Fe/S protein of cytochrome b6/f complex
  misc_feature (1)..(210): Homolog of NCBI NO: 136712 NR Description: Cytochrome B6-F complex iron-sulfur subunit,
  misc_feature (1)..(210): Homolog of NCBI NO: 136707 NR Description: Cytochrome B6-F complex iron-sulfur subunit,
  misc_feature (1)..(210): Homolog of NCBI NO: 2921504 NR Description: cytochrome B6-F complex iron-sulfur subunit
  misc_feature (1)..(210): Homolog of NCBI NO: 3885886 NR Description: Rieske Fe-S precursor protein [Oryza sativa]
  misc_feature (1)..(210): Homolog of NCBI NO: 15236275 NR Description: putative component of cytochrome B6-F complex
  misc_feature (1)..(210): Homolog of NCBI NO: 9843639 NR Description: Rieske FeS protein [Arabidopsis thaliana]
  misc_feature (1)..(210): Homolog of NCBI NO: 30679426 NR Description: Rieske FeS protein (component of cytochrome B6-F
  misc_feature (1)..(210): Homolog of NCBI NO: 401249 NR Description: Cytochrome B6-F complex iron-sulfur subunit 2,
  misc_feature (1)..(210): Homolog of NCBI NO: 401247 NR Description: Cytochrome B6-F complex iron-sulfur subunit 1,
  misc_feature (1)..(210): Homolog of NCBI NO: 15236275 NR Description: putative component of cytochrome B6-F complex
  misc_feature (1)..(210): Homolog of NCBI NO: 9843639 NR Description: Rieske FeS protein [Arabidopsis thaliana]
  misc_feature (1)..(210): Homolog of NCBI NO: 30679426 NR Description: Rieske FeS protein (component of cytochrome B6-F
  misc_feature (1)..(210): Homolog of NCBI NO: 401249 NR Description: Cytochrome B6-F complex iron-sulfur subunit 2,
  misc_feature (1)..(210): Homolog of NCBI NO: 401247 NR Description: Cytochrome B6-F complex iron-sulfur subunit 1,
  misc_feature (1)..(210): Homolog of NCBI NO: 19999 NR Description: Rieske Fe/S protein of cytochrome b6/f complex
  misc_feature (1)..(210): Homolog of NCBI NO: 136712 NR Description: Cytochrome B6-F complex iron-sulfur subunit,
  misc_feature (1)..(210): Homolog of NCBI NO: 2921504 NR Description: cytochrome B6-F complex iron-sulfur subunit
  misc_feature (1)..(210): Homolog of NCBI NO: 401247 NR Description: Cytochrome B6-F complex iron-sulfur subunit 1,
  misc_feature (1)..(210): Homolog of NCBI NO: 401249 NR Description: Cytochrome B6-F complex iron-sulfur subunit 2,
  misc_feature (1)..(210): Homolog of NCBI NO: 30679426 NR Description: Rieske FeS protein (component of cytochrome B6-F
  misc_feature (1)..(210): Homolog of NCBI NO: 9843639 NR Description: Rieske FeS protein [Arabidopsis thaliana]
  misc_feature (1)..(210): Homolog of NCBI NO: 15236275 NR Description: putative component of cytochrome B6-F complex

SEQ ID NO: 46106 - protein, 208 aa, Arabidopsis thaliana; identical to SEQ ID NO: 38001
  peptide (1)..(208): Ceres Seq. ID no. 12601212
  misc_feature (92)..(184): Pfam Name: Rieske [2Fe-2S] domain Pfam Description: Rieske [2Fe-2S] domain
  misc_feature (92)..(184): Pfam Name: Rieske [2Fe-2S] domain Pfam Description: Rieske [2Fe-2S] domain
  misc_feature (92)..(184): Pfam Name: Rieske [2Fe-2S] domain Pfam Description: Rieske [2Fe-2S] domain
  misc_feature (1)..(208): Homolog of NCBI NO: 3885886 NR Description: Rieske Fe-S precursor protein [Oryza sativa]
  misc_feature (1)..(208): Homolog of NCBI NO: 2921504 NR Description: cytochrome B6-F complex iron-sulfur subunit
  misc_feature (1)..(208): Homolog of NCBI NO: 136707 NR Description: Cytochrome B6-F complex iron-sulfur subunit,
  misc_feature (1)..(208): Homolog of NCBI NO: 136712 NR Description: Cytochrome B6-F complex iron-sulfur subunit,
  misc_feature (1)..(208): Homolog of NCBI NO: 19999 NR Description: Rieske Fe/S protein of cytochrome b6/f complex
  misc_feature (1)..(208): Homolog of NCBI NO: 3885886 NR Description: Rieske Fe-S precursor protein [Oryza sativa]
  misc_feature (1)..(208): Homolog of NCBI NO: 136707 NR Description: Cytochrome B6-F complex iron-sulfur subunit,
  misc_feature (1)..(208): Homolog of NCBI NO: 19999 NR Description: Rieske Fe/S protein of cytochrome b6/f complex
  misc_feature (1)..(208): Homolog of NCBI NO: 136712 NR Description: Cytochrome B6-F complex iron-sulfur subunit,
  misc_feature (1)..(208): Homolog of NCBI NO: 136707 NR Description: Cytochrome B6-F complex iron-sulfur subunit,
  misc_feature (1)..(208): Homolog of NCBI NO: 2921504 NR Description: cytochrome B6-F complex iron-sulfur subunit
  misc_feature (1)..(208): Homolog of NCBI NO: 3885886 NR Description: Rieske Fe-S precursor protein [Oryza sativa]
  misc_feature (1)..(208): Homolog of NCBI NO: 15236275 NR Description: putative component of cytochrome B6-F complex
  misc_feature (1)..(208): Homolog of NCBI NO: 9843639 NR Description: Rieske FeS protein [Arabidopsis thaliana]
  misc_feature (1)..(208): Homolog of NCBI NO: 30679426 NR Description: Rieske FeS protein (component of cytochrome B6-F
  misc_feature (1)..(208): Homolog of NCBI NO: 401249 NR Description: Cytochrome B6-F complex iron-sulfur subunit 2,
  misc_feature (1)..(208): Homolog of NCBI NO: 401247 NR Description: Cytochrome B6-F complex iron-sulfur subunit 1,
  misc_feature (1)..(208): Homolog of NCBI NO: 15236275 NR Description: putative component of cytochrome B6-F complex
  misc_feature (1)..(208): Homolog of NCBI NO: 9843639 NR Description: Rieske FeS protein [Arabidopsis thaliana]
  misc_feature (1)..(208): Homolog of NCBI NO: 30679426 NR Description: Rieske FeS protein (component of cytochrome B6-F
  misc_feature (1)..(208): Homolog of NCBI NO: 401249 NR Description: Cytochrome B6-F complex iron-sulfur subunit 2,
  misc_feature (1)..(208): Homolog of NCBI NO: 401247 NR Description: Cytochrome B6-F complex iron-sulfur subunit 1,
  misc_feature (1)..(208): Homolog of NCBI NO: 19999 NR Description: Rieske Fe/S protein of cytochrome b6/f complex
  misc_feature (1)..(208): Homolog of NCBI NO: 136712 NR Description: Cytochrome B6-F complex iron-sulfur subunit,
  misc_feature (1)..(208): Homolog of NCBI NO: 2921504 NR Description: cytochrome B6-F complex iron-sulfur subunit
  misc_feature (1)..(208): Homolog of NCBI NO: 401247 NR Description: Cytochrome B6-F complex iron-sulfur subunit 1,
  misc_feature (1)..(208): Homolog of NCBI NO: 401249 NR Description: Cytochrome B6-F complex iron-sulfur subunit 2,
  misc_feature (1)..(208): Homolog of NCBI NO: 30679426 NR Description: Rieske FeS protein (component of cytochrome B6-F
  misc_feature (1)..(208): Homolog of NCBI NO: 9843639 NR Description: Rieske FeS protein [Arabidopsis thaliana]
  misc_feature (1)..(208): Homolog of NCBI NO: 15236275 NR Description: putative component of cytochrome B6-F complex

SEQ ID NO: 46107 - DNA, 1996 bp, Arabidopsis thaliana; identical to SEQ ID NO: 41756
  misc_feature (1)..(1996): Ceres Seq. ID no. 12639081
  misc_feature: MA Experiment ID: 108433 Result: Up-regulated in Transcription
  misc_feature: MA Experiment 108433 PARAMETER Experiment Name: At_rhl_Mutant2_cDNA_P Parameter: Age (day) Value: 7
  misc_feature: MA Experiment 108433 PARAMETER Experiment Name: At_rhl_Mutant2_cDNA_P Parameter: Organism Value: A. thaliana
  misc_feature: MA Experiment 108433 PARAMETER Experiment Name: At_rhl_Mutant2_cDNA_P Parameter: Plant Line Value: rhl Mutant vs. wt landsburg
  misc_feature: MA Experiment 108433 PARAMETER Experiment Name: At_rhl_Mutant2_cDNA_P Parameter: Tissue Value: Roots
  misc_feature: MA Experiment ID: 108462 Result: Up-regulated in Transcription
  misc_feature: MA Experiment 108462 PARAMETER Experiment Name: At_Germinating_Seeds_cDNA_P Parameter: Age (day) Value: 2 vs. 0
  misc_feature: MA Experiment 108462 PARAMETER Experiment Name: At_Germinating_Seeds_cDNA_P Parameter: Tissue Value: Germinating Seeds
  misc_feature: MA Experiment ID: 108464 Result: Up-regulated in Transcription
  misc_feature: MA Experiment 108464 PARAMETER Experiment Name: At_Germinating_Seeds_cDNA_P Parameter: Age (day) Value: 4 vs. 0
  misc_feature: MA Experiment 108464 PARAMETER Experiment Name: At_Germinating_Seeds_cDNA_P Parameter: Tissue Value: Germinating Seeds
  misc_feature: MA Experiment ID: 108585 Result: Up-regulated in Transcription
  misc_feature: MA Experiment 108585 PARAMETER Experiment Name: At_5mM_NaNP_cDNA_P Parameter: Timepoint (hr) Value: 6
  misc_feature: MA Experiment 108585 PARAMETER Experiment Name: At_5mM_NaNP_cDNA_P Parameter: Tissue Value: Aerial
  misc_feature: MA Experiment 108585 PARAMETER Experiment Name: At_5mM_NaNP_cDNA_P Parameter: Treatment Value: null
  misc_feature: MA Experiment ID: 108668 Result: Up-regulated in Transcription
  misc_feature: MA Experiment 108668 PARAMETER Experiment Name: At_2mM_SA_cDNA_P Parameter: Plant Line Value: WS
  misc_feature: MA Experiment 108668 PARAMETER Experiment Name: At_2mM_SA_cDNA_P Parameter: Timepoint (hr) Value: 6
  misc_feature: MA Experiment 108668 PARAMETER Experiment Name: At_2mM_SA_cDNA_P Parameter: Treatment Value: 2mM SA vs. No Treatment
  misc_feature: MA Experiment ID: 20000173 Result: Down-regulated in Transcription
  misc_feature: MA Experiment 20000173 PARAMETER Experiment Name: At_42deg_Heat_P Parameter: Age (day) Value: 14
  misc_feature: MA Experiment 20000173 PARAMETER Experiment Name: At_42deg_Heat_P Parameter: Organism Value: A. thaliana
  misc_feature: MA Experiment 20000173 PARAMETER Experiment Name: At_42deg_Heat_P Parameter: Plant Line Value: WS
  misc_feature: MA Experiment 20000173 PARAMETER Experiment Name: At_42deg_Heat_P Parameter: Temperature (deg C) Value: 42 vs. 22
  misc_feature: MA Experiment 20000173 PARAMETER Experiment Name: At_42deg_Heat_P Parameter: Timepoint (hr) Value: 6
  misc_feature: MA Experiment 20000173 PARAMETER Experiment Name: At_42deg_Heat_P Parameter: Tissue Value: Aerial
  misc_feature: MA Experiment ID: 20000182 Result: Up-regulated in Transcription
  misc_feature: MA Experiment 20000182 PARAMETER Experiment Name: At_2mM_SA_P Parameter: Age (day) Value: 14
  misc_feature: MA Experiment 20000182 PARAMETER Experiment Name: At_2mM_SA_P Parameter: Organism Value: A. thaliana
  misc_feature: MA Experiment 20000182 PARAMETER Experiment Name: At_2mM_SA_P Parameter: Plant Line Value: WS
  misc_feature: MA Experiment 20000182 PARAMETER Experiment Name: At_2mM_SA_P Parameter: Timepoint (hr) Value: 6
  misc_feature: MA Experiment 20000182 PARAMETER Experiment Name: At_2mM_SA_P Parameter: Tissue Value: Aerial
  misc_feature: MA Experiment 20000182 PARAMETER Experiment Name: At_2mM_SA_P Parameter: Treatment Value: 2mM SA vs. No Treatment
  misc_feature: MA Experiment ID: 20000184 Result: Down-regulated in Transcription
  misc_feature: MA Experiment 20000184 PARAMETER Experiment Name: At_Shoots__P Parameter: Age (day) Value: 7
  misc_feature: MA Experiment 20000184 PARAMETER Experiment Name: At_Shoots__P Parameter: Tissue Value: Shoots vs. Whole Plant
  misc_feature: MA Experiment ID: 20000234 Result: Down-regulated in Transcription
  misc_feature: MA Experiment 20000234 PARAMETER Experiment Name: At_Siliques_P Parameter: Age (day) Value: 21
  misc_feature: MA Experiment 20000234 PARAMETER Experiment Name: At_Siliques_P Parameter: Organism Value: A. thaliana
  misc_feature: MA Experiment 20000234 PARAMETER Experiment Name: At_Siliques_P Parameter: Plant Line Value: WS
  misc_feature: MA Experiment 20000234 PARAMETER Experiment Name: At_Siliques_P Parameter: Tissue Value: Less Than 5mm Siliques vs. Whole Plant
  misc_feature: MA Experiment ID: 20000264 Result: Down-regulated in Transcription
  misc_feature: MA Experiment 20000264 PARAMETER Experiment Name: At_Open_Flower_P Parameter: Age (day) Value: 21
  misc_feature: MA Experiment 20000264 PARAMETER Experiment Name: At_Open_Flower_P Parameter: Plant Line Value: WS
  misc_feature: MA Experiment 20000264 PARAMETER Experiment Name: At_Open_Flower_P Parameter: Tissue Value: Open Flower vs. Whole Plant
  misc_feature: MA Experiment ID: 20000265 Result: Down-regulated in Transcription
  misc_feature: MA Experiment 20000265 PARAMETER Experiment Name: At_Open_Flower_P Parameter: Age (day) Value: 21
  misc_feature: MA Experiment 20000265 PARAMETER Experiment Name: At_Open_Flower_P Parameter: Plant Line Value: WS
  misc_feature: MA Experiment 20000265 PARAMETER Experiment Name: At_Open_Flower_P Parameter: Tissue Value: Closed Flower vs. Whole Plant
  misc_feature: MA Experiment ID: 20000286 Result: Down-regulated in Transcription
  misc_feature: MA Experiment 20000286 PARAMETER Experiment Name: At_Open_Flower_P Parameter: Age (day) Value: 21
  misc_feature: MA Experiment 20000286 PARAMETER Experiment Name: At_Open_Flower_P Parameter: Plant Line Value: WS
  misc_feature: MA Experiment 20000286 PARAMETER Experiment Name: At_Open_Flower_P Parameter: Tissue Value: Half Open vs. Whole Plant
  misc_feature: MA Experiment ID: 20000438 Result: Down-regulated in Transcription
  misc_feature: MA Experiment 20000438 PARAMETER Experiment Name: At_Shoots__P Parameter: Age (day) Value: 14
  misc_feature: MA Experiment 20000438 PARAMETER Experiment Name: At_Shoots__P Parameter: Tissue Value: Shoots vs. Whole Plant
  misc_feature: MA Experiment ID: 20000445 Result: Up-regulated in Transcription
  misc_feature: MA Experiment 20000445 PARAMETER Experiment Name: At_100uM_NAA__P Parameter: Age (day) Value: 14
  misc_feature: MA Experiment 20000445 PARAMETER Experiment Name: At_100uM_NAA__P Parameter: Organism Value: A. thaliana
  misc_feature: MA Experiment 20000445 PARAMETER Experiment Name: At_100uM_NAA__P Parameter: Plant Line Value: WS
  misc_feature: MA Experiment 20000445 PARAMETER Experiment Name: At_100uM_NAA__P Parameter: Timepoint (hr) Value: 6
  misc_feature: MA Experiment 20000445 PARAMETER Experiment Name: At_100uM_NAA__P Parameter: Tissue Value: Aerial
  misc_feature: MA Experiment 20000445 PARAMETER Experiment Name: At_100uM_NAA__P Parameter: Treatment Value: 100uM NAA vs. No Treatment
  misc_feature: MA Experiment ID: 20001557 Result: Down-regulated in Transcription
  misc_feature: MA Experiment 20001557 PARAMETER Experiment Name: At_Drought_Soil_Dry_P Parameter: Age (day) Value: 27
  misc_feature: MA Experiment 20001557 PARAMETER Experiment Name: At_Drought_Soil_Dry_P Parameter: Organism Value: A. thaliana
  misc_feature: MA Experiment 20001557 PARAMETER Experiment Name: At_Drought_Soil_Dry_P Parameter: Plant Line Value: WS
  misc_feature: MA Experiment 20001557 PARAMETER Experiment Name: At_Drought_Soil_Dry_P Parameter: Post Timepoint (hr) Value: 3
  misc_feature: MA Experiment 20001557 PARAMETER Experiment Name: At_Drought_Soil_Dry_P Parameter: Post-Treatment Value: Re-Water vs. No Drought
  misc_feature: MA Experiment 20001557 PARAMETER Experiment Name: At_Drought_Soil_Dry_P Parameter: Timepoint (day) Value: 13
  misc_feature: MA Experiment 20001557 PARAMETER Experiment Name: At_Drought_Soil_Dry_P Parameter: Treatment Value: Drought vs. No Drought
  misc_feature: MA Experiment ID: 20001560 Result: Down-regulated in Transcription
  misc_feature: MA Experiment 20001560 PARAMETER Experiment Name: At_Drought_Soil_Dry_P Parameter: Age (day) Value: 28
  misc_feature: MA Experiment 20001560 PARAMETER Experiment Name: At_Drought_Soil_Dry_P Parameter: Organism Value: A. thaliana
  misc_feature: MA Experiment 20001560 PARAMETER Experiment Name: At_Drought_Soil_Dry_P Parameter: Plant Line Value: WS
  misc_feature: MA Experiment 20001560 PARAMETER Experiment Name: At_Drought_Soil_Dry_P Parameter: Post Timepoint (hr) Value: None
  misc_feature: MA Experiment 20001560 PARAMETER Experiment Name: At_Drought_Soil_Dry_P Parameter: Post-Treatment Value: None
  misc_feature: MA Experiment 20001560 PARAMETER Experiment Name: At_Drought_Soil_Dry_P Parameter: Timepoint (day) Value: 14
  misc_feature: MA Experiment 20001560 PARAMETER Experiment Name: At_Drought_Soil_Dry_P Parameter: Treatment Value: Drought vs. No Drought

SEQ ID NO: 46108 - protein, 610 aa, Arabidopsis thaliana; identical to SEQ ID NO: 41757
  peptide (1)..(610): Ceres Seq. ID no. 12639082
  misc_feature (213)..(602): Homolog of NCBI NO: 7489412 NR Description: probable aspartic proteinase (EC 3.4.23.-) -
  misc_feature (213)..(599): Homolog of NCBI NO: 33340111 NR Description: nucellin-like protein [Oryza sativa]
  misc_feature (236)..(597): Homolog of NCBI NO: 21805926 NR Description: nucellin-like aspartic protease [Zea mays]
  misc_feature (192)..(595): Homolog of NCBI NO: 7484812 NR Description: aspartic proteinase homolog F17M5.250 -
  misc_feature (214)..(595): Homolog of NCBI NO: 26452545 NR Description: putative nucellin [Arabidopsis thaliana]
  misc_feature (214)..(595): Homolog of NCBI NO: 18418224 NR Description: nucellin -like protein
  misc_feature (213)..(595): Homolog of NCBI NO: 25350204 NR Description: nucellin-like protein, 27671-25467
  misc_feature (194)..(595): Homolog of NCBI NO: 15219354 NR Description: nucellin, putative; protein id: At1g44130.1
  misc_feature (213)..(595): Homolog of NCBI NO: 30699263 NR Description: nucellin protein, putative [Arabidopsis thaliana]
  misc_feature (213)..(604): Homolog of NCBI NO: 30699261 NR Description: nucellin protein, putative [Arabidopsis thaliana]
  misc_feature (213)..(602): Homolog of NCBI NO: 7489412 NR Description: probable aspartic proteinase (EC 3.4.23.-) -
  misc_feature (213)..(599): Homolog of NCBI NO: 33340111 NR Description: nucellin-like protein [Oryza sativa]
  misc_feature (236)..(597): Homolog of NCBI NO: 21805926 NR Description: nucellin-like aspartic protease [Zea mays]
  misc_feature (192)..(595): Homolog of NCBI NO: 7484812 NR Description: aspartic proteinase homolog F17M5.250 -
  misc_feature (214)..(595): Homolog of NCBI NO: 26452545 NR Description: putative nucellin [Arabidopsis thaliana]
  misc_feature (214)..(595): Homolog of NCBI NO: 18418224 NR Description: nucellin -like protein
  misc_feature (213)..(595): Homolog of NCBI NO: 25350204 NR Description: nucellin-like protein, 27671-25467
  misc_feature (194)..(595): Homolog of NCBI NO: 15219354 NR Description: nucellin, putative; protein id: At1g44130.1
  misc_feature (213)..(595): Homolog of NCBI NO: 30699263 NR Description: nucellin protein, putative [Arabidopsis thaliana]
  misc_feature (213)..(604): Homolog of NCBI NO: 30699261 NR Description: nucellin protein, putative [Arabidopsis thaliana]
  misc_feature (213)..(602): Homolog of NCBI NO: 7489412 NR Description: probable aspartic proteinase (EC 3.4.23.-) -
  misc_feature (213)..(599): Homolog of NCBI NO: 33340111 NR Description: nucellin-like protein [Oryza sativa]
  misc_feature (236)..(597): Homolog of NCBI NO: 21805926 NR Description: nucellin-like aspartic protease [Zea mays]
  misc_feature (192)..(595): Homolog of NCBI NO: 7484812 NR Description: aspartic proteinase homolog F17M5.250 -
  misc_feature (214)..(595): Homolog of NCBI NO: 26452545 NR Description: putative nucellin [Arabidopsis thaliana]
  misc_feature (214)..(595): Homolog of NCBI NO: 18418224 NR Description: nucellin -like protein
  misc_feature (213)..(595): Homolog of NCBI NO: 25350204 NR Description: nucellin-like protein, 27671-25467
  misc_feature (194)..(595): Homolog of NCBI NO: 15219354 NR Description: nucellin, putative; protein id: At1g44130.1
  misc_feature (213)..(595): Homolog of NCBI NO: 30699263 NR Description: nucellin protein, putative [Arabidopsis thaliana]
  misc_feature (213)..(604): Homolog of NCBI NO: 30699261 NR Description: nucellin protein, putative [Arabidopsis thaliana]

SEQ ID NO: 46109 - protein, 583 aa, Arabidopsis thaliana [sequence omitted]

SEQ ID NO: 46110 - protein, 506 aa, Arabidopsis thaliana; identical to SEQ ID NO: 41759
  peptide (1)..(506): Ceres Seq. ID no. 12639084
  misc_feature (109)..(498): Homolog of NCBI NO: 7489412 NR Description: probable aspartic proteinase (EC 3.4.23.-) -
  misc_feature (109)..(495): Homolog of NCBI NO: 33340111 NR Description: nucellin-like protein [Oryza sativa]
  misc_feature (132)..(493): Homolog of NCBI NO: 21805926 NR Description: nucellin-like aspartic protease [Zea mays]
  misc_feature (88)..(491): Homolog of NCBI NO: 7484812 NR Description: aspartic proteinase homolog F17M5.250 -
  misc_feature (110)..(491): Homolog of NCBI NO: 26452545 NR Description: putative nucellin [Arabidopsis thaliana]
  misc_feature (110)..(491): Homolog of NCBI NO: 18418224 NR Description: nucellin -like protein
  misc_feature (109)..(491): Homolog of NCBI NO: 25350204 NR Description: nucellin-like protein, 27671-25467
  misc_feature (90)..(491): Homolog of NCBI NO: 15219354 NR Description: nucellin, putative; protein id: At1g44130.1
  misc_feature (109)..(491): Homolog of NCBI NO: 30699263 NR Description: nucellin protein, putative [Arabidopsis thaliana]
  misc_feature (109)..(500): Homolog of NCBI NO: 30699261 NR Description: nucellin protein, putative [Arabidopsis thaliana]
  misc_feature (109)..(498): Homolog of NCBI NO: 7489412 NR Description: probable aspartic proteinase (EC 3.4.23.-) -
  misc_feature (109)..(495): Homolog of NCBI NO: 33340111 NR Description: nucellin-like protein [Oryza sativa]
  misc_feature (132)..(493): Homolog of NCBI NO: 21805926 NR Description: nucellin-like aspartic protease [Zea mays]
  misc_feature (88)..(491): Homolog of NCBI NO: 7484812 NR Description: aspartic proteinase homolog F17M5.250 -
  misc_feature (110)..(491): Homolog of NCBI NO: 26452545 NR Description: putative nucellin [Arabidopsis thaliana]
  misc_feature (110)..(491): Homolog of NCBI NO: 18418224 NR Description: nucellin -like protein
  misc_feature (109)..(491): Homolog of NCBI NO: 25350204 NR Description: nucellin-like protein, 27671-25467
  misc_feature (90)..(491): Homolog of NCBI NO: 15219354 NR Description: nucellin, putative; protein id: At1g44130.1
  misc_feature (109)..(491): Homolog of NCBI NO: 30699263 NR Description: nucellin protein, putative [Arabidopsis thaliana]
  misc_feature (109)..(500): Homolog of NCBI NO: 30699261 NR Description: nucellin protein, putative [Arabidopsis thaliana]
  misc_feature (109)..(498): Homolog of NCBI NO: 7489412 NR Description: probable aspartic proteinase (EC 3.4.23.-) -
  misc_feature (109)..(495): Homolog of NCBI NO: 33340111 NR Description: nucellin-like protein [Oryza sativa]
  misc_feature (132)..(493): Homolog of NCBI NO: 21805926 NR Description: nucellin-like aspartic protease [Zea mays]
  misc_feature (88)..(491): Homolog of NCBI NO: 7484812 NR Description: aspartic proteinase homolog F17M5.250 -
  misc_feature (110)..(491): Homolog of NCBI NO: 26452545 NR Description: putative nucellin [Arabidopsis thaliana]
  misc_feature (110)..(491): Homolog of NCBI NO: 18418224 NR Description: nucellin -like protein
  misc_feature (109)..(491): Homolog of NCBI NO: 25350204 NR Description: nucellin-like protein, 27671-25467
  misc_feature (90)..(491): Homolog of NCBI NO: 15219354 NR Description: nucellin, putative; protein id: At1g44130.1
  misc_feature (109)..(491): Homolog of NCBI NO: 30699263 NR Description: nucellin protein, putative [Arabidopsis thaliana]
  misc_feature (109)..(500): Homolog of NCBI NO: 30699261 NR Description: nucellin protein, putative [Arabidopsis thaliana]

SEQ ID NO: 46111 - DNA, 1166 bp, Arabidopsis thaliana; identical to SEQ ID NO: 40143
  misc_feature (1)..(1166): Ceres Seq. ID no. 13645869
  misc_feature: MA Experiment ID: 108595 Result: Down-regulated in Transcription
  misc_feature: MA Experiment 108595 PARAMETER Experiment Name: At_Ler-pi_Ovule_cDNA_P Parameter: Plant Line Value: null
  misc_feature: MA Experiment ID: 20000069 Result: Down-regulated in Transcription
  misc_feature: MA Experiment 20000069 PARAMETER Experiment Name: At_100uM_ABA_Mutants_cDNA_P Parameter: Plant Line Value: CS23
  misc_feature: MA Experiment 20000069 PARAMETER Experiment Name: At_100uM_ABA_Mutants_cDNA_P Parameter: Timepoint (hr) Value: 6
  misc_feature: MA Experiment 20000069 PARAMETER Experiment Name: At_100uM_ABA_Mutants_cDNA_P Parameter: Tissue Value: Aerial
  misc_feature: MA Experiment 20000069 PARAMETER Experiment Name: At_100uM_ABA_Mutants_cDNA_P Parameter: Treatment Value: 100uM ABA vs. No Treatment
  misc_feature: MA Experiment ID: 20000089 Result: Down-regulated in Transcription
  misc_feature: MA Experiment ID: 20000113 Result: Up-regulated in Transcription
  misc_feature: MA Experiment 20000113 PARAMETER Experiment Name: At_42deg_Heat_cDNA_P Parameter: Temperature (deg C) Value: 42 vs. 22
  misc_feature: MA Experiment 20000113 PARAMETER Experiment Name: At_42deg_Heat_cDNA_P Parameter: Timepoint (hr) Value: 8
  misc_feature: MA Experiment 20000113 PARAMETER Experiment Name: At_42deg_Heat_cDNA_P Parameter: Tissue Value: Aerial
  misc_feature: MA Experiment ID: 20000315 Result: Up-regulated in Transcription
  misc_feature: MA Experiment 20000315 PARAMETER Experiment Name: At_14day_Shoots-Roots_Sub_P Parameter: Age (day) Value: 14
  misc_feature: MA Experiment 20000315 PARAMETER Experiment Name: At_14day_Shoots-Roots_Sub_P Parameter: Organism Value: A. thaliana
  misc_feature: MA Experiment 20000315 PARAMETER Experiment Name: At_14day_Shoots-Roots_Sub_P Parameter: Plant Line Value: WS
  misc_feature: MA Experiment 20000315 PARAMETER Experiment Name: At_14day_Shoots-Roots_Sub_P Parameter: Tissue Value: Shoots vs. Whole Plant

SEQ ID NO: 46112 - protein, 344 aa, Arabidopsis thaliana; identical to SEQ ID NO: 40144
  peptide (1)..(344): Ceres Seq. ID no. 13645870
  misc_feature (68)..(330): Pfam Name: Uncharacterised protein family (Hly-III / UPF0073) Pfam Description: Uncharacterised protein family (Hly-III /
  misc_feature (68)..(330): Pfam Name: Uncharacterised protein family (Hly-III / UPF0073) Pfam Description: Uncharacterised protein family (Hly-III /
  misc_feature (29)..(101): Homolog of NCBI NO: 15233813 NR Description: expressed protein [Arabidopsis thaliana]
  misc_feature (143)..(325): Homolog of NCBI NO: 15233813 NR Description: expressed protein [Arabidopsis thaliana]
  misc_feature (29)..(101): Homolog of NCBI NO: 15235657 NR Description: expressed protein [Arabidopsis thaliana]
  misc_feature (143)..(325): Homolog of NCBI NO: 15235657 NR Description: expressed protein [Arabidopsis thaliana]
  misc_feature (115)..(344): Homolog of NCBI NO: 30688829 NR Description: expressed protein [Arabidopsis thaliana]
  misc_feature (29)..(101): Homolog of NCBI NO: 15233813 NR Description: expressed protein [Arabidopsis thaliana]
  misc_feature (29)..(101): Homolog of NCBI NO: 15235657 NR Description: expressed protein [Arabidopsis thaliana]
  misc_feature (115)..(344): Homolog of NCBI NO: 30688829 NR Description: expressed protein [Arabidopsis thaliana]
  misc_feature (1)..(344): Homolog of NCBI NO: 18400468 NR Description: expressed protein [Arabidopsis thaliana]
  misc_feature (13)..(344): Homolog of NCBI NO: 13272399 NR Description: hypothetical protein [Arabidopsis thaliana]
  misc_feature (1)..(341): Homolog of NCBI NO: 25407688 NR Description: hypothetical protein AT4g30850 [imported] -
  misc_feature (162)..(344): Homolog of NCBI NO: 25309925 NR Description: hypothetical protein At2g24150 [imported] -
  misc_feature (115)..(344): Homolog of NCBI NO: 18377749 NR Description: unknown protein [Arabidopsis thaliana]
  misc_feature (143)..(325): Homolog of NCBI NO: 15235657 NR Description: expressed protein [Arabidopsis thaliana]
  misc_feature (143)..(325): Homolog of NCBI NO: 15233813 NR Description: expressed protein [Arabidopsis thaliana]
  misc_feature (115)..(344): Homolog of NCBI NO: 18377749 NR Description: unknown protein [Arabidopsis thaliana]
  misc_feature (162)..(344): Homolog of NCBI NO: 25309925 NR Description: hypothetical protein At2g24150 [imported] -
  misc_feature (1)..(341): Homolog of NCBI NO: 25407688 NR Description: hypothetical protein AT4g30850 [imported] -
  misc_feature (13)..(344): Homolog of NCBI NO: 13272399 NR Description: hypothetical protein [Arabidopsis thaliana]
  misc_feature (1)..(344): Homolog of NCBI NO: 18400468 NR Description: expressed protein [Arabidopsis thaliana]

SEQ ID NO: 46113 - protein, 332 aa, Arabidopsis thaliana; identical to SEQ ID NO: 40145
  peptide (1)..(332): Ceres Seq. ID no. 13645871
  misc_feature (56)..(318): Pfam Name: Uncharacterised protein family (Hly-III / UPF0073) Pfam Description: Uncharacterised protein family (Hly-III /
  misc_feature (56)..(318): Pfam Name: Uncharacterised protein family (Hly-III / UPF0073) Pfam Description: Uncharacterised protein family (Hly-III /
  misc_feature (17)..(89): Homolog of NCBI NO: 15233813 NR Description: expressed protein [Arabidopsis thaliana]
  misc_feature (131)..(313): Homolog of NCBI NO: 15233813 NR Description: expressed protein [Arabidopsis thaliana]
  misc_feature (17)..(89): Homolog of NCBI NO: 15235657 NR Description: expressed protein [Arabidopsis thaliana]
  misc_feature (131)..(313): Homolog of NCBI NO: 15235657 NR Description: expressed protein [Arabidopsis thaliana]
  misc_feature (103)..(332): Homolog of NCBI NO: 30688829 NR Description: expressed protein [Arabidopsis thaliana]
  misc_feature (17)..(89): Homolog of NCBI NO: 15233813 NR Description: expressed protein [Arabidopsis thaliana]
  misc_feature (17)..(89): Homolog of NCBI NO: 15235657 NR Description: expressed protein [Arabidopsis thaliana]
  misc_feature (103)..(332): Homolog of NCBI NO: 30688829 NR Description: expressed protein [Arabidopsis thaliana]
  misc_feature (1)..(332): Homolog of NCBI NO: 18400468 NR Description: expressed protein [Arabidopsis thaliana]
  misc_feature (1)..(332): Homolog of NCBI NO: 13272399 NR Description: hypothetical protein [Arabidopsis thaliana]
  misc_feature (1)..(329): Homolog of NCBI NO: 25407688 NR Description: hypothetical protein AT4g30850 [imported] -
  misc_feature (150)..(332): Homolog of NCBI NO: 25309925 NR Description: hypothetical protein At2g24150 [imported] -
  misc_feature (103)..(332): Homolog of NCBI NO: 18377749 NR Description: unknown protein [Arabidopsis thaliana]
  misc_feature (131)..(313): Homolog of NCBI NO: 15235657 NR Description: expressed protein [Arabidopsis thaliana]
  misc_feature (131)..(313): Homolog of NCBI NO: 15233813 NR Description: expressed protein [Arabidopsis thaliana]
  misc_feature (103)..(332): Homolog of NCBI NO: 18377749 NR Description: unknown protein [Arabidopsis thaliana]
  misc_feature (150)..(332): Homolog of NCBI NO: 25309925 NR Description: hypothetical protein At2g24150 [imported] -
  misc_feature (1)..(329): Homolog of NCBI NO: 25407688 NR Description: hypothetical protein AT4g30850 [imported] -
  misc_feature (1)..(332): Homolog of NCBI NO: 13272399 NR Description: hypothetical protein [Arabidopsis thaliana]
  misc_feature (1)..(332): Homolog of NCBI NO: 18400468 NR Description: expressed protein [Arabidopsis thaliana]

SEQ ID NO: 46114 - protein, 310 aa, Arabidopsis thaliana; identical to SEQ ID NO: 40146
  peptide (1)..(310): Ceres Seq. ID no. 13645872
  misc_feature (34)..(296): Pfam Name: Uncharacterised protein family (Hly-III / UPF0073) Pfam Description: Uncharacterised protein family (Hly-III /
  misc_feature (34)..(296): Pfam Name: Uncharacterised protein family (Hly-III / UPF0073) Pfam Description: Uncharacterised protein family (Hly-III /
  misc_feature (1)..(67): Homolog of NCBI NO: 15233813 NR Description: expressed protein [Arabidopsis thaliana]
  misc_feature (109)..(291): Homolog of NCBI NO: 15233813 NR Description: expressed protein [Arabidopsis thaliana]
  misc_feature (1)..(67): Homolog of NCBI NO: 15235657 NR Description: expressed protein [Arabidopsis thaliana]
  misc_feature (109)..(291): Homolog of NCBI NO: 15235657 NR Description: expressed protein [Arabidopsis thaliana]
  misc_feature (81)..(310): Homolog of NCBI NO: 30688829 NR Description: expressed protein [Arabidopsis thaliana]
  misc_feature (1)..(67): Homolog of NCBI NO: 15233813 NR Description: expressed protein [Arabidopsis thaliana]
  misc_feature (1)..(67): Homolog of NCBI NO: 15235657 NR Description: expressed protein [Arabidopsis thaliana]
  misc_feature (81)..(310): Homolog of NCBI NO: 30688829 NR Description: expressed protein [Arabidopsis thaliana]
  misc_feature (1)..(310): Homolog of NCBI NO: 18400468 NR Description: expressed protein [Arabidopsis thaliana]
  misc_feature (1)..(310): Homolog of NCBI NO: 13272399 NR Description: hypothetical protein [Arabidopsis thaliana]
  misc_feature (1)..(307): Homolog of NCBI NO: 25407688 NR Description: hypothetical protein AT4g30850 [imported] -
  misc_feature (128)..(310): Homolog of NCBI NO: 25309925 NR Description: hypothetical protein At2g24150 [imported] -
  misc_feature (81)..(310): Homolog of NCBI NO: 18377749 NR Description: unknown protein [Arabidopsis thaliana]
  misc_feature (109)..(291): Homolog of NCBI NO: 15235657 NR Description: expressed protein [Arabidopsis thaliana]
  misc_feature (109)..(291): Homolog of NCBI NO: 15233813 NR Description: expressed protein [Arabidopsis thaliana]
  misc_feature (81)..(310): Homolog of NCBI NO: 18377749 NR Description: unknown protein [Arabidopsis thaliana]
  misc_feature (128)..(310): Homolog of NCBI NO: 25309925 NR Description: hypothetical protein At2g24150 [imported] -
  misc_feature (1)..(307): Homolog of NCBI NO: 25407688 NR Description: hypothetical protein AT4g30850 [imported] -
  misc_feature (1)..(310): Homolog of NCBI NO: 13272399 NR Description: hypothetical protein [Arabidopsis thaliana]
  misc_feature (1)..(310): Homolog of NCBI NO: 18400468 NR Description: expressed protein [Arabidopsis thaliana]

SEQ ID NO: 46115 - DNA, 2886 bp, Arabidopsis thaliana
  misc_feature (1)..(2886): Ceres Seq. ID no. 12576059
  misc_feature: MA Experiment ID: 20000437 Result: Down-regulated in Transcription
  misc_feature: MA Experiment 20000437 PARAMETER Experiment Name: At_Drought_P Parameter: Age (day) Value: 8
  misc_feature: MA Experiment 20000437 PARAMETER Experiment Name: At_Drought_P Parameter: Organism Value: A. thaliana
  misc_feature: MA Experiment 20000437 PARAMETER Experiment Name: At_Drought_P Parameter: Plant Line Value: WS
  misc_feature: MA Experiment 20000437 PARAMETER Experiment Name: At_Drought_P Parameter: Timepoint (hr) Value: 24
  misc_feature: MA Experiment 20000437 PARAMETER Experiment Name: At_Drought_P Parameter: Tissue Value: Whole Plant
  misc_feature: MA Experiment 20000437 PARAMETER Experiment Name: At_Drought_P Parameter: Treatment Value: Drought vs. No Drought
atgacaccgtttcgctggagactgcttggtggtggaattcactacaacacgttaaaggtggaacacaacgaatctggaccattgagtttaaagggtctgtttggttctgtttctggaaatttcacttttttcacttttttgggatcacatttaatggtgagaatctcactgcttttgttgtgtttactggtttcaacttgtctcttcacttcttcatcagcacaagcaggttttgtgagcttggattgtggaggtgcagagccattcactgatgaacttggactcaaatggtcacctgataatcatctcatttatggagaaaccgctaatatatcgtccgttaacgaaacaagaactcagtacacgactttaaggcatttccctgctgattcaagaaagtattgctacactctcaatgtcacgagtaggaatagatatctcattagagctactttcttgtatggtaatttcgacaacagcaacaatgtgtatcccaaattcgatatctccctcggggcgactcattgggcgaccattgttatctctgaaacctatataatcgaaactgcagaactggtgtttctggcttcttctcctactgttagtgtttgtttgtcaaatgccacaactggacagccgtttatatctactcttgagcttaggcagttgagtggttcgatgtatggttcgatgctatctgaagaccggttttacctgagtgttgcagcacggataaatttcggggctgaaagtgaagcttctgtgaggtacccggatgatccgtatgatagaatatgggaatctgatttgcaaaagaagcctaattatcttgtggatgttgctgctgggactgtgcgagtgtcgactacattgccaatcgaaagcagggtcgatgacagaccgcctcagaaggttatgcagacggctgtggttggaacaaacgggtccttaacttacagaatgaacctagatggcttccctggttttggttgggcattcacatactttgctgaaatcgaggatttggctgaggatgagtcaaggaagtttagattagttctacctgagcagcctgagtatagcaaatcggttgttaacatcaaggaaaatacacagagaccgtatcgcgtttatgcacctggctatcctaacataacacttccatttgtgctaaactttcgatttgccaaaacggctgattcttctaggggacctattctgaatgccatggagatcagcaaatatttgcggaaaagcgatggttcagtagatgcaactgttatggctaatgtggcatcgctatattcttccactgaatgggctcaagaaggcggtgacccttgttcaccctcaccgtggtcatgggtgcaatgcaattcggatccacaaccaagggttgttgctatcaagctgtcgagtatgaacttgacgggaaatataccttctgacctggtgaaattgactggtttggttgagttacacctcgagaacaaccgactaaccggaaagatcccttcctcgttgacgaaactcccaaacctgaaagaactgtacctgcagaacaatgtgttaacaggaacaataccatcagacctggccaaagatgtgatctcaaacttctctgggaaccttaaccttgaaaaaagtggagataaaggcaagaagctcggtgtcatcatcggtgcatcagttggtgcttttgttctgctaattgcaaccatcatttcttgcatcgtcatgtgcaaaagcaagaagaataacaagttgggaaaaacttcggcagagttaacgaatcgtcccttaccgattcagagagtttcgtctaccttgagtgaagctcatggagacgctgcacattgcttcacactttatgagatcgaggaagccacaaaaaaattcgaaaagagaattgggtcgggaggttttggaatcgtatactatggtaaaacaagggaggggaaagagattgctgtaaaggttcttgcaaataattcatatcagggaaagagagagtttgcaaacgaggttacattactctcaaggatacatcatcggaaccttgtgcagtttcttggttattgccaagaagagggaaaaaacatgcttgtgtatgagttcatgcacaatgggactttgaaggagcatctttatggcgtggtaccacgtgaccggagaatcagttggattaaaaggcttgagatagctgaagatgcagcccgagggatcgagtatcttcacacagggtgtgttccagcaatcatacatagagatctcaagactagtaacatcctacttgacaaacacatgagggcaaaggtttcagatttcggtttgtcgaaattcgcagttgacgggacctcacatgtctccagcattgtccgtggcacagttggatatcttgaccccgagtactatatatcgcagcagttaacagagaagagtgatgtatatagcttcggagtcattcttcttgagctaatgtctggccaagaagccatatcgaatgaaagctttggtgtcaactgccggaacatagtccaatgggctaagatgcatatagacaacggggacatccgagggatcatcgatccagcgctagcggaagatgattacagtctccaatcaatgtggaagattgcggagaaagcgttgctgtgtgtgaaaccgcacgggaacatgagaccttcgatgtccgaggtgcaaaaagatatccaagacgcgattaggatcgagaaggaagcgttggctgcaagaggcggtatatcagacgagttttccaggagctcggctcattcgtcttcgctcaacatgggaatgcttgacctggctggatcacagagttatgtatccattgatgaatcagtattgcagccaacagctcggtag

SEQ ID NO: 46116 - protein, 961 aa, Arabidopsis thaliana
  peptide (1)..(961): Ceres Seq. ID no. 12576060
  misc_feature (75)..(908): Homolog of NCBI NO: 9758831 NR Description: receptor-like protein kinase [Arabidopsis
  misc_feature (52)..(908): Homolog of NCBI NO: 15233796 NR Description: serine threonine-specific receptor protein kinase
  misc_feature (75)..(934): Homolog of NCBI NO: 25387121 NR Description: probable protein kinase [imported] - Arabidopsis
  misc_feature (52)..(908): Homolog of NCBI NO: 2129635 NR Description: serine/threonine-specific receptor protein kinase
  misc_feature (57)..(933): Homolog of NCBI NO: 15218052 NR Description: receptor-like protein kinase, putative; protein
  misc_feature (78)..(961): Homolog of NCBI NO: 11072027 NR Description: F12A21.14 [Arabidopsis thaliana]
  misc_feature (466)..(911): Homolog of NCBI NO: 34906098 NR Description: putative receptor-like protein kinase
  misc_feature (64)..(533): Homolog of NCBI NO: 34906098 NR Description: putative receptor-like protein kinase
  misc_feature (471)..(961): Homolog of NCBI NO: 18408845 NR Description: F12A21.14; protein id: At1g67720.1 [Arabidopsis
  misc_feature (60)..(554): Homolog of NCBI NO: 18408845 NR Description: F12A21.14; protein id: At1g67720.1 [Arabidopsis
MTPFRWRLLGGGIHYNTLKVEHNESGPLSLKGLFGSVSGNFTFFTFLGSHLMVRISLLLLCLLVSTCLFTSSSAQAGFVSLDCGGAEPFTDELGLKWSPDNHLIYGETANISSVNETRTQYTTLRHFPADSRKYCYTLNVTSRNRYLIRATFLYGNFDNSNNVYPKFDISLGATHWATIVISETYIIETAELVFLASSPTVSVCLSNATTGQPFISTLELRQLSGSMYGSMLSEDRFYLSVAARINFGAESEASVRYPDDPYDRIWESDLQKKPNYLVDVAAGTVRVSTTLPIESRVDDRPPQKVMQTAVVGTNGSLTYRMNLDGFPGFGWAFTYFAEIEDLAEDESRKFRLVLPEQPEYSKSVVNIKENTQRPYRVYAPGYPNITLPFVLNFRFAKTADSSRGPILNAMEISKYLRKSDGSVDATVMANVASLYSSTEWAQEGGDPCSPSPWSWVQCNSDPQPRVVAIKLSSMNLTGNIPSDLVKLTGLVELHLENNRLTGKIPSSLTKLPNLKELYLQNNVLTGTIPSDLAKDVISNFSGNLNLEKSGDKGKKLGVIIGASVGAFVLLIATIISCIVMCKSKKNNKLGKTSAELTNRPLPIQRVSSTLSEAHGDAAHCFTLYEIEEATKKFEKRIGSGGFGIVYYGKTREGKEIAVKVLANNSYQGKREFANEVTLLSRIHHRNLVQFLGYCQEEGKNMLVYEFMHNGTLKEHLYGVVPRDRRISWIKRLEIAEDAARGIEYLHTGCVPAIIHRDLKTSNILLDKHMRAKVSDFGLSKFAVDGTSHVSSIVRGTVGYLDPEYYISQQLTEKSDVYSFGVILLELMSGQEAISNESFGVNCRNIVQWAKMHIDNGDIRGIIDPALAEDDYSLQSMWKIAEKALLCVKPHGNMRPSMSEVQKDIQDAIRIEKEALAARGGISDEFSRSSAHSSSLNMGMLDLAGSQSYVSIDESVLQPTAR

SEQ ID NO: 46117 - protein, 910 aa, Arabidopsis thaliana
  peptide (1)..(910): Ceres Seq. ID no. 12576061
  misc_feature (24)..(857): Homolog of NCBI NO: 9758831 NR Description: receptor-like protein kinase [Arabidopsis
  misc_feature (1)..(857): Homolog of NCBI NO: 15233796 NR Description: serine threonine-specific receptor protein kinase
  misc_feature (24)..(883): Homolog of NCBI NO: 25387121 NR Description: probable protein kinase [imported] - Arabidopsis
  misc_feature (1)..(857): Homolog of NCBI NO: 2129635 NR Description: serine/threonine-specific receptor protein kinase
  misc_feature (6)..(882): Homolog of NCBI NO: 15218052 NR Description: receptor-like protein kinase, putative; protein
  misc_feature (27)..(910): Homolog of NCBI NO: 11072027 NR Description: F12A21.14 [Arabidopsis thaliana]
  misc_feature (415)..(860): Homolog of NCBI NO: 34906098 NR Description: putative receptor-like protein kinase
  misc_feature (13)..(482): Homolog of NCBI NO: 34906098 NR Description: putative receptor-like protein kinase
  misc_feature (420)..(910): Homolog of NCBI NO: 18408845 NR Description: F12A21.14; protein id: At1g67720.1 [Arabidopsis
  misc_feature (9)..(503): Homolog of NCBI NO: 18408845 NR Description: F12A21.14; protein id: At1g67720.1 [Arabidopsis
MVRISLLLLCLLVSTCLFTSSSAQAGFVSLDCGGAEPFTDELGLKWSPDNHLIYGETANISSVNETRTQYTTLRHFPADSRKYCYTLNVTSRNRYLIRATFLYGNFDNSNNVYPKFDISLGATHWATIVISETYIIETAELVFLASSPTVSVCLSNATTGQPFISTLELRQLSGSMYGSMLSEDRFYLSVAARINFGAESEASVRYPDDPYDRIWESDLQKKPNYLVDVAAGTVRVSTTLPIESRVDDRPPQKVMQTAVVGTNGSLTYRMNLDGFPGFGWAFTYFAEIEDLAEDESRKFRLVLPEQPEYSKSVVNIKENTQRPYRVYAPGYPNITLPFVLNFRFAKTADSSRGPILNAMEISKYLRKSDGSVDATVMANVASLYSSTEWAQEGGDPCSPSPWSWVQCNSDPQPRVVAIKLSSMNLTGNIPSDLVKLTGLVELHLENNRLTGKIPSSLTKLPNLKELYLQNNVLTGTIPSDLAKDVISNFSGNLNLEKSGDKGKKLGVIIGASVGAFVLLIATIISCIVMCKSKKNNKLGKTSAELTNRPLPIQRVSSTLSEAHGDAAHCFTLYEIEEATKKFEKRIGSGGFGIVYYGKTREGKEIAVKVLANNSYQGKREFANEVTLLSRIHHRNLVQFLGYCQEEGKNMLVYEFMHNGTLKEHLYGVVPRDRRISWIKRLEIAEDAARGIEYLHTGCVPAIIHRDLKTSNILLDKHMRAKVSDFGLSKFAVDGTSHVSSIVRGTVGYLDPEYYISQQLTEKSDVYSFGVILLELMSGQEAISNESFGVNCRNIVQWAKMHIDNGDIRGIIDPALAEDDYSLQSMWKIAEKALLCVKPHGNMRPSMSEVQKDIQDAIRIEKEALAARGGISDEFSRSSAHSSSLNMGMLDLAGSQSYVSIDESVLQPTAR

SEQ ID NO: 46118 - protein, 735 aa, Arabidopsis thaliana
  peptide (1)..(735): Ceres Seq. ID no. 12576062
  misc_feature (1)..(682): Homolog of NCBI NO: 9758831 NR Description: receptor-like protein kinase [Arabidopsis
  misc_feature (1)..(682): Homolog of NCBI NO: 15233796 NR Description: serine threonine-specific receptor protein kinase
  misc_feature (1)..(708): Homolog of NCBI NO: 25387121 NR Description: probable protein kinase [imported] - Arabidopsis
  misc_feature (1)..(682): Homolog of NCBI NO: 2129635 NR Description: serine/threonine-specific receptor protein kinase
  misc_feature (1)..(707): Homolog of NCBI NO: 15218052 NR Description: receptor-like protein kinase, putative; protein
  misc_feature (1)..(735): Homolog of NCBI NO: 11072027 NR Description: F12A21.14 [Arabidopsis thaliana]
  misc_feature (240)..(685): Homolog of NCBI NO: 34906098 NR Description: putative receptor-like protein kinase
  misc_feature (1)..(307): Homolog of NCBI NO: 34906098 NR Description: putative receptor-like protein kinase
  misc_feature (245)..(735): Homolog of NCBI NO: 18408845 NR Description: F12A21.14; protein id: At1g67720.1 [Arabidopsis
  misc_feature (1)..(328): Homolog of NCBI NO: 18408845 NR Description: F12A21.14; protein id: At1g67720.1 [Arabidopsis
MYGSMLSEDRFYLSVAARINFGAESEASVRYPDDPYDRIWESDLQKKPNYLVDVAAGTVRVSTTLPIESRVDDRPPQKVMQTAVVGTNGSLTYRMNLDGFPGFGWAFTYFAEIEDLAEDESRKFRLVLPEQPEYSKSVVNIKENTQRPYRVYAPGYPNITLPFVLNFRFAKTADSSRGPILNAMEISKYLRKSDGSVDATVMANVASLYSSTEWAQEGGDPCSPSPWSWVQCNSDPQPRVVAIKLSSMNLTGNIPSDLVKLTGLVELHLENNRLTGKIPSSLTKLPNLKELYLQNNVLTGTIPSDLAKDVISNFSGNLNLEKSGDKGKKLGVIIGASVGAFVLLIATIISCIVMCKSKKNNKLGKTSAELTNRPLPIQRVSSTLSEAHGDAAHCFTLYEIEEATKKFEKRIGSGGFGIVYYGKTREGKEIAVKVLANNSYQGKREFANEVTLLSRIHHRNLVQFLGYCQEEGKNMLVYEFMHNGTLKEHLYGVVPRDRRISWIKRLEIAEDAARGIEYLHTGCVPAIIHRDLKTSNILLDKHMRAKVSDFGLSKFAVDGTSHVSSIVRGTVGYLDPEYYISQQLTEKSDVYSFGVILLELMSGQEAISNESFGVNCRNIVQWAKMHIDNGDIRGIIDPALAEDDYSLQSMWKIAEKALLCVKPHGNMRPSMSEVQKDIQDAIRIEKEALAARGGISDEFSRSSAHSSSLNMGMLDLAGSQSYVSIDESVLQPTAR

SEQ ID NO: 46119 - DNA, 2024 bp, Arabidopsis thaliana; identical to SEQ ID NO: 44984
  misc_feature (1)..(2024): Ceres Seq. ID no. 12600277
  misc_feature: MA Experiment ID: 20000794 Result: Down-regulated in Transcription
  misc_feature: MA Experiment 20000794 PARAMETER Experiment Name: At_Petals_P Parameter: Age (day) Value: 23-25 days
  misc_feature: MA Experiment 20000794 PARAMETER Experiment Name: At_Petals_P Parameter: Plant Line Value: WS
  misc_feature: MA Experiment 20000794 PARAMETER Experiment Name: At_Petals_P Parameter: Tissue Value: Petals vs. Whole plant
  misc_feature: MA Experiment ID: 20001557 Result: Up-regulated in Transcription
  misc_feature: MA Experiment 20001557 PARAMETER Experiment Name: At_Drought_Soil_Dry_P Parameter: Age (day) Value: 27
  misc_feature: MA Experiment 20001557 PARAMETER Experiment Name: At_Drought_Soil_Dry_P Parameter: Organism Value: A. thaliana
  misc_feature: MA Experiment 20001557 PARAMETER Experiment Name: At_Drought_Soil_Dry_P Parameter: Plant Line Value: WS
  misc_feature: MA Experiment 20001557 PARAMETER Experiment Name: At_Drought_Soil_Dry_P Parameter: Post Timepoint (hr) Value: 3
  misc_feature: MA Experiment 20001557 PARAMETER Experiment Name: At_Drought_Soil_Dry_P Parameter: Post-Treatment Value: Re-Water vs. No Drought
  misc_feature: MA Experiment 20001557 PARAMETER Experiment Name: At_Drought_Soil_Dry_P Parameter: Timepoint (day) Value: 13
  misc_feature: MA Experiment 20001557 PARAMETER Experiment Name: At_Drought_Soil_Dry_P Parameter: Treatment Value: Drought vs. No Drought

SEQ ID NO: 46120 - protein, 545 aa, Arabidopsis thaliana; identical to SEQ ID NO: 44985
  peptide (1)..(545): Ceres Seq. ID no. 12600278
  misc_feature (31)..(538): Pfam Name: TCP-1/cpn60 chaperonin family Pfam Description: TCP-1/cpn60 chaperonin family
  misc_feature (31)..(538): Pfam Name: TCP-1/cpn60 chaperonin family Pfam Description: TCP-1/cpn60 chaperonin family
  misc_feature (31)..(538): Pfam Name: TCP-1/cpn60 chaperonin family Pfam Description: TCP-1/cpn60 chaperonin family
  misc_feature (10)..(543): Homolog of NCBI NO: 13959583 NR Description: T-complex protein 1, alpha subunit (TCP-1-alpha)
  misc_feature (10)..(545): Homolog of NCBI NO: 135538 NR Description: T-complex protein 1, alpha subunit (TCP-1-alpha)
  misc_feature (10)..(543): Homolog of NCBI NO: 135536 NR Description: T-COMPLEX PROTEIN 1, ALPHA SUBUNIT (TCP-1-ALPHA)
  misc_feature (10)..(543): Homolog of NCBI NO: 18859465 NR Description: t-complex polypeptide 1 [Danio rerio]
  misc_feature (1)..(543): Homolog of NCBI NO: 27881870 NR Description: Unknown (protein for MGC:55424) [Danio rerio]
  misc_feature (10)..(543): Homolog of NCBI NO: 13959583 NR Description: T-complex protein 1, alpha subunit (TCP-1-alpha)
  misc_feature (10)..(543): Homolog of NCBI NO: 135536 NR Description: T-COMPLEX PROTEIN 1, ALPHA SUBUNIT (TCP-1-ALPHA)
  misc_feature (1)..(543): Homolog of NCBI NO: 27881870 NR Description: Unknown (protein for MGC:55424) [Danio rerio]
  misc_feature (10)..(543): Homolog of NCBI NO: 18859465 NR Description: t-complex polypeptide 1 [Danio rerio]
  misc_feature (10)..(543): Homolog of NCBI NO: 135536 NR Description: T-COMPLEX PROTEIN 1, ALPHA SUBUNIT (TCP-1-ALPHA)
  misc_feature (10)..(545): Homolog of NCBI NO: 135538 NR Description: T-complex protein 1, alpha subunit (TCP-1-alpha)
  misc_feature (10)..(543): Homolog of NCBI NO: 13959583 NR Description: T-complex protein 1, alpha subunit (TCP-1-alpha)
  misc_feature (1)..(545): Homolog of NCBI NO: 15231024 NR Description: t-complex polypeptide 1 homologue
  misc_feature (1)..(545): Homolog of NCBI NO: 25083339 NR Description: t-complex polypeptide 1 homologue [Arabidopsis
  misc_feature (1)..(545): Homolog of NCBI NO: 9293959 NR Description: chaperonin, t-complex protein alpha subunit
  misc_feature (1)..(545): Homolog of NCBI NO: 24371053 NR Description: t-complex polypeptide 1 [Bruguiera sexangula]
  misc_feature (1)..(543): Homolog of NCBI NO: 17066720 NR Description: CCT chaperonin alpha subunit [Physarum
  misc_feature (1)..(545): Homolog of NCBI NO: 15231024 NR Description: t-complex polypeptide 1 homologue
  misc_feature (1)..(545): Homolog of NCBI NO: 25083339 NR Description: t-complex polypeptide 1 homologue [Arabidopsis
  misc_feature (1)..(545): Homolog of NCBI NO: 9293959 NR Description: chaperonin, t-complex protein alpha subunit
  misc_feature (1)..(545): Homolog of NCBI NO: 24371053 NR Description: t-complex polypeptide 1 [Bruguiera sexangula]
  misc_feature (1)..(543): Homolog of NCBI NO: 17066720 NR Description: CCT chaperonin alpha subunit [Physarum
  misc_feature (1)..(543): Homolog of NCBI NO: 27881870 NR Description: Unknown (protein for MGC:55424) [Danio rerio]
  misc_feature (10)..(543): Homolog of NCBI NO: 18859465 NR Description: t-complex polypeptide 1 [Danio rerio]
  misc_feature (10)..(545): Homolog of NCBI NO: 135538 NR Description: T-complex protein 1, alpha subunit (TCP-1-alpha)
  misc_feature (1)..(543): Homolog of NCBI NO: 17066720 NR Description: CCT chaperonin alpha subunit [Physarum
  misc_feature (1)..(545): Homolog of NCBI NO: 24371053 NR Description: t-complex polypeptide 1 [Bruguiera sexangula]
  misc_feature (1)..(545): Homolog of NCBI NO: 9293959 NR Description: chaperonin, t-complex protein alpha subunit
  misc_feature (1)..(545): Homolog of NCBI NO: 25083339 NR Description: t-complex polypeptide 1 homologue [Arabidopsis
  misc_feature (1)..(545): Homolog of NCBI NO: 15231024 NR Description: t-complex polypeptide 1 homologue

SEQ ID NO: 46121 - protein, 520 aa, Arabidopsis thaliana; identical to SEQ ID NO: 44986
  peptide (1)..(520): Ceres Seq. ID no. 12600279
  misc_feature (6)..(513): Pfam Name: TCP-1/cpn60 chaperonin family Pfam Description: TCP-1/cpn60 chaperonin family
  misc_feature (6)..(513): Pfam Name: TCP-1/cpn60 chaperonin family Pfam Description: TCP-1/cpn60 chaperonin family
  misc_feature (6)..(513): Pfam Name: TCP-1/cpn60 chaperonin family Pfam Description: TCP-1/cpn60 chaperonin family
  misc_feature (1)..(518): Homolog of NCBI NO: 13959583 NR Description: T-complex protein 1, alpha subunit (TCP-1-alpha)
  misc_feature (1)..(520): Homolog of NCBI NO: 135538 NR Description: T-complex protein 1, alpha subunit (TCP-1-alpha)
  misc_feature (1)..(518): Homolog of NCBI NO: 135536 NR Description: T-COMPLEX PROTEIN 1, ALPHA SUBUNIT (TCP-1-ALPHA)
  misc_feature (1)..(518): Homolog of NCBI NO: 18859465 NR Description: t-complex polypeptide 1 [Danio rerio]
  misc_feature (1)..(518): Homolog of NCBI NO: 27881870 NR Description: Unknown (protein for MGC:55424) [Danio rerio]
  misc_feature (1)..(518): Homolog of NCBI NO: 13959583 NR Description: T-complex protein 1, alpha subunit (TCP-1-alpha)
  misc_feature (1)..(518): Homolog of NCBI NO: 135536 NR Description: T-COMPLEX PROTEIN 1, ALPHA SUBUNIT (TCP-1-ALPHA)
  misc_feature (1)..(518): Homolog of NCBI NO: 27881870 NR Description: Unknown (protein for MGC:55424) [Danio rerio]
  misc_feature (1)..(518): Homolog of NCBI NO: 18859465 NR Description: t-complex polypeptide 1 [Danio rerio]
  misc_feature (1)..(518): Homolog of NCBI NO: 135536 NR Description: T-COMPLEX PROTEIN 1, ALPHA SUBUNIT (TCP-1-ALPHA)
  misc_feature (1)..(520): Homolog of NCBI NO: 135538 NR Description: T-complex protein 1, alpha subunit (TCP-1-alpha)
  misc_feature (1)..(518): Homolog of NCBI NO: 13959583 NR Description: T-complex protein 1, alpha subunit (TCP-1-alpha)
  misc_feature (1)..(520): Homolog of NCBI NO: 15231024 NR Description: t-complex polypeptide 1 homologue
  misc_feature (1)..(520): Homolog of NCBI NO: 25083339 NR Description: t-complex polypeptide 1 homologue [Arabidopsis
  misc_feature (1)..(520): Homolog of NCBI NO: 9293959 NR Description: chaperonin, t-complex protein alpha subunit
  misc_feature (1)..(520): Homolog of NCBI NO: 24371053 NR Description: t-complex polypeptide 1 [Bruguiera sexangula]
  misc_feature (1)..(518): Homolog of NCBI NO: 17066720 NR Description: CCT chaperonin alpha subunit [Physarum
  misc_feature (1)..(520): Homolog of NCBI NO: 15231024 NR Description: t-complex polypeptide 1 homologue
  misc_feature (1)..(520): Homolog of NCBI NO: 25083339 NR Description: t-complex polypeptide 1 homologue [Arabidopsis
  misc_feature (1)..(520): Homolog of NCBI NO: 9293959 NR Description: chaperonin, t-complex protein alpha subunit
  misc_feature (1)..(520): Homolog of NCBI NO: 24371053 NR Description: t-complex polypeptide 1 [Bruguiera sexangula]
  misc_feature (1)..(518): Homolog of NCBI NO: 17066720 NR Description: CCT chaperonin alpha subunit [Physarum
  misc_feature (1)..(518): Homolog of NCBI NO: 27881870 NR Description: Unknown (protein for MGC:55424) [Danio rerio]
  misc_feature (1)..(518): Homolog of NCBI NO: 18859465 NR Description: t-complex polypeptide 1 [Danio rerio]
  misc_feature (1)..(520): Homolog of NCBI NO: 135538 NR Description: T-complex protein 1, alpha subunit (TCP-1-alpha)
  misc_feature (1)..(518): Homolog of NCBI NO: 17066720 NR Description: CCT chaperonin alpha subunit [Physarum
  misc_feature (1)..(520): Homolog of NCBI NO: 24371053 NR Description: t-complex polypeptide 1 [Bruguiera sexangula]
  misc_feature (1)..(520): Homolog of NCBI NO: 9293959 NR Description: chaperonin, t-complex protein alpha subunit
  misc_feature (1)..(520): Homolog of NCBI NO: 25083339 NR Description: t-complex polypeptide 1 homologue [Arabidopsis
  misc_feature (1)..(520): Homolog of NCBI NO: 15231024 NR Description: t-complex polypeptide 1 homologue

SEQ ID NO: 46122 - protein, 499 aa, Arabidopsis thaliana; identical to SEQ ID NO: 44987
  peptide (1)..(499): Ceres Seq. ID no. 12600280
  misc_feature (1)..(492): Pfam Name: TCP-1/cpn60 chaperonin family Pfam Description: TCP-1/cpn60 chaperonin family
  misc_feature (1)..(492): Pfam Name: TCP-1/cpn60 chaperonin family Pfam Description: TCP-1/cpn60 chaperonin family
  misc_feature (1)..(492): Pfam Name: TCP-1/cpn60 chaperonin family Pfam Description: TCP-1/cpn60 chaperonin family
  misc_feature (1)..(497): Homolog of NCBI NO: 13959583 NR Description: T-complex protein 1, alpha subunit (TCP-1-alpha)
  misc_feature (1)..(499): Homolog of NCBI NO: 135538 NR Description: T-complex protein 1, alpha subunit (TCP-1-alpha)
  misc_feature (1)..(497): Homolog of NCBI NO: 135536 NR Description: T-COMPLEX PROTEIN 1, ALPHA SUBUNIT (TCP-1-ALPHA)
  misc_feature (1)..(497): Homolog of NCBI NO: 18859465 NR Description: t-complex polypeptide 1 [Danio rerio]
  misc_feature (1)..(497): Homolog of NCBI NO: 27881870 NR Description: Unknown (protein for MGC:55424) [Danio rerio]
  misc_feature (1)..(497): Homolog of NCBI NO: 13959583 NR Description: T-complex protein 1, alpha subunit (TCP-1-alpha)
  misc_feature (1)..(497): Homolog of NCBI NO: 135536 NR Description: T-COMPLEX PROTEIN 1, ALPHA SUBUNIT (TCP-1-ALPHA)
  misc_feature (1)..(497): Homolog of NCBI NO: 27881870 NR Description: Unknown (protein for MGC:55424) [Danio rerio]
  misc_feature (1)..(497): Homolog of NCBI NO: 18859465 NR Description: t-complex polypeptide 1 [Danio rerio]
  misc_feature (1)..(497): Homolog of NCBI NO: 135536 NR Description: T-COMPLEX PROTEIN 1, ALPHA SUBUNIT (TCP-1-ALPHA)
  misc_feature (1)..(499): Homolog of NCBI NO: 135538 NR Description: T-complex protein 1, alpha subunit (TCP-1-alpha)
  misc_feature (1)..(497): Homolog of NCBI NO: 13959583 NR Description: T-complex protein 1, alpha subunit (TCP-1-alpha)
  misc_feature (1)..(499): Homolog of NCBI NO: 15231024 NR Description: t-complex polypeptide 1 homologue
  misc_feature (1)..(499): Homolog of NCBI NO: 25083339 NR Description: t-complex polypeptide 1 homologue [Arabidopsis
  misc_feature (1)..(499): Homolog of NCBI NO: 9293959 NR Description: chaperonin, t-complex protein alpha subunit
  misc_feature (1)..(499): Homolog of NCBI NO: 24371053 NR Description: t-complex polypeptide 1 [Bruguiera sexangula]
  misc_feature (1)..(497): Homolog of NCBI NO: 17066720 NR Description: CCT chaperonin alpha subunit [Physarum
  misc_feature (1)..(499): Homolog of NCBI NO: 15231024 NR Description: t-complex polypeptide 1 homologue
  misc_feature (1)..(499): Homolog of NCBI NO: 25083339 NR Description: t-complex polypeptide 1 homologue [Arabidopsis
  misc_feature (1)..(499): Homolog of NCBI NO: 9293959 NR Description: chaperonin, t-complex protein alpha subunit
  misc_feature (1)..(499): Homolog of NCBI NO: 24371053 NR Description: t-complex polypeptide 1 [Bruguiera sexangula]
  misc_feature (1)..(497): Homolog of NCBI NO: 17066720 NR Description: CCT chaperonin alpha subunit [Physarum
  misc_feature (1)..(497): Homolog of NCBI NO: 27881870 NR Description: Unknown (protein for MGC:55424) [Danio rerio]
  misc_feature (1)..(497): Homolog of NCBI NO: 18859465 NR Description: t-complex polypeptide 1 [Danio rerio]
  misc_feature (1)..(499): Homolog of NCBI NO: 135538 NR Description: T-complex protein 1, alpha subunit (TCP-1-alpha)
  misc_feature (1)..(497): Homolog of NCBI NO: 17066720 NR Description: CCT chaperonin alpha subunit [Physarum
  misc_feature (1)..(499): Homolog of NCBI NO: 24371053 NR Description: t-complex polypeptide 1 [Bruguiera sexangula]
  misc_feature (1)..(499): Homolog of NCBI NO: 9293959 NR Description: chaperonin, t-complex protein alpha subunit
  misc_feature (1)..(499): Homolog of NCBI NO: 25083339 NR Description: t-complex polypeptide 1 homologue [Arabidopsis
  misc_feature (1)..(499): Homolog of NCBI NO: 15231024 NR Description: t-complex polypeptide 1 homologue

SEQ ID NO: 46123 - DNA, 708 bp, Arabidopsis thaliana
  misc_feature (1)..(708): Ceres Seq. ID no. 13578577
  misc_feature: MA Experiment ID: 20000182 Result: Down-regulated in Transcription
  misc_feature: MA Experiment 20000182 PARAMETER Experiment Name: At_2mM_SA_P Parameter: Age (day) Value: 14
  misc_feature: MA Experiment 20000182 PARAMETER Experiment Name: At_2mM_SA_P Parameter: Organism Value: A. thaliana
  misc_feature: MA Experiment 20000182 PARAMETER Experiment Name: At_2mM_SA_P Parameter: Plant Line Value: WS
  misc_feature: MA Experiment 20000182 PARAMETER Experiment Name: At_2mM_SA_P Parameter: Timepoint (hr) Value: 6
  misc_feature: MA Experiment 20000182 PARAMETER Experiment Name: At_2mM_SA_P Parameter: Tissue Value: Aerial
  misc_feature: MA Experiment 20000182 PARAMETER Experiment Name: At_2mM_SA_P Parameter: Treatment Value: 2mM SA vs. No Treatment
  misc_feature: MA Experiment ID: 20000185 Result: Down-regulated in Transcription
  misc_feature: MA Experiment 20000185 PARAMETER Experiment Name: At_Roots__P Parameter: Age (day) Value: 7 vs. 21
  misc_feature: MA Experiment 20000185 PARAMETER Experiment Name: At_Roots__P Parameter: Organism Value: A. thaliana
  misc_feature: MA Experiment 20000185 PARAMETER Experiment Name: At_Roots__P Parameter: Tissue Value: Roots vs. Whole Plant
  misc_feature: MA Experiment ID: 20000264 Result: Down-regulated in Transcription
  misc_feature: MA Experiment 20000264 PARAMETER Experiment Name: At_Open_Flower_P Parameter: Age (day) Value: 21
  misc_feature: MA Experiment 20000264 PARAMETER Experiment Name: At_Open_Flower_P Parameter: Plant Line Value: WS
  misc_feature: MA Experiment 20000264 PARAMETER Experiment Name: At_Open_Flower_P Parameter: Tissue Value: Open Flower vs. Whole Plant
  misc_feature: MA Experiment ID: 20000286 Result: Down-regulated in Transcription
  misc_feature: MA Experiment 20000286 PARAMETER Experiment Name: At_Open_Flower_P Parameter: Age (day) Value: 21
  misc_feature: MA Experiment 20000286 PARAMETER Experiment Name: At_Open_Flower_P Parameter: Plant Line Value: WS
  misc_feature: MA Experiment 20000286 PARAMETER Experiment Name: At_Open_Flower_P Parameter: Tissue Value: Half Open vs. Whole Plant
  misc_feature: MA Experiment ID: 20000437 Result: Down-regulated in Transcription
  misc_feature: MA Experiment 20000437 PARAMETER Experiment Name: At_Drought_P Parameter: Age (day) Value: 8
  misc_feature: MA Experiment 20000437 PARAMETER Experiment Name: At_Drought_P Parameter: Organism Value: A. thaliana
  misc_feature: MA Experiment 20000437 PARAMETER Experiment Name: At_Drought_P Parameter: Plant Line Value: WS
  misc_feature: MA Experiment 20000437 PARAMETER Experiment Name: At_Drought_P Parameter: Timepoint (hr) Value: 24
  misc_feature: MA Experiment 20000437 PARAMETER Experiment Name: At_Drought_P Parameter: Tissue Value: Whole Plant
  misc_feature: MA Experiment 20000437 PARAMETER Experiment Name: At_Drought_P Parameter: Treatment Value: Drought vs. No Drought
  misc_feature: MA Experiment ID: 20000439 Result: Down-regulated in Transcription
  misc_feature: MA Experiment 20000439 PARAMETER Experiment Name: At_Roots__P Parameter: Age (day) Value: 14 vs. 21
  misc_feature: MA Experiment 20000439 PARAMETER Experiment Name: At_Roots__P Parameter: Organism Value: A. thaliana
  misc_feature: MA Experiment 20000439 PARAMETER Experiment Name: At_Roots__P Parameter: Tissue Value: Roots vs. Whole Plant
  misc_feature: MA Experiment ID: 20000495 Result: Down-regulated in Transcription
  misc_feature: MA Experiment 20000495 PARAMETER Experiment Name: At_Guard_Cells_P Parameter: Harvest Date Value: 8/2/2002
  misc_feature: MA Experiment 20000495 PARAMETER Experiment Name: At_Guard_Cells_P Parameter: Organism Value: A. thaliana
  misc_feature: MA Experiment 20000495 PARAMETER Experiment Name: At_Guard_Cells_P Parameter: Tissue Value: Guard Cells vs. Leaves
  misc_feature: MA Experiment ID: 20000496 Result: Down-regulated in Transcription
  misc_feature: MA Experiment 20000496 PARAMETER Experiment Name: At_Guard_Cells_P Parameter: Harvest Date Value: 7/19/2002
  misc_feature: MA Experiment 20000496 PARAMETER Experiment Name: At_Guard_Cells_P Parameter: Organism Value: Canola
  misc_feature: MA Experiment 20000496 PARAMETER Experiment Name: At_Guard_Cells_P Parameter: Tissue Value: Guard Cells vs. Leaves
  misc_feature: MA Experiment ID: 20000794 Result: Down-regulated in Transcription
  misc_feature: MA Experiment 20000794 PARAMETER Experiment Name: At_Petals_P Parameter: Age (day) Value: 23-25 days
  misc_feature: MA Experiment 20000794 PARAMETER Experiment Name: At_Petals_P Parameter: Plant Line Value: WS
  misc_feature: MA Experiment 20000794 PARAMETER Experiment Name: At_Petals_P Parameter: Tissue Value: Petals vs. Whole plant
  misc_feature: MA Experiment ID: 20001451 Result: Down-regulated in Transcription
  misc_feature: MA Experiment 20001451 PARAMETER Experiment Name: At_Far-red-induction_P Parameter: Age (day) Value: 7
  misc_feature: MA Experiment 20001451 PARAMETER Experiment Name: At_Far-red-induction_P Parameter: Light Value: Far-red vs. White
  misc_feature: MA Experiment 20001451 PARAMETER Experiment Name: At_Far-red-induction_P Parameter: Organism Value: A. thaliana
  misc_feature: MA Experiment 20001451 PARAMETER Experiment Name: At_Far-red-induction_P Parameter: Plant Line Value: Columbia
  misc_feature: MA Experiment 20001451 PARAMETER Experiment Name: At_Far-red-induction_P Parameter: Timepoint (hr) Value: 24
  misc_feature: MA Experiment 20001451 PARAMETER Experiment Name: At_Far-red-induction_P Parameter: Tissue Value: Whole Plant
  misc_feature: MA Experiment ID: 20001557 Result: Down-regulated in Transcription
  misc_feature: MA Experiment 20001557 PARAMETER Experiment Name: At_Drought_Soil_Dry_P Parameter: Age (day) Value: 27
  misc_feature: MA Experiment 20001557 PARAMETER Experiment Name: At_Drought_Soil_Dry_P Parameter: Organism Value: A. thaliana
  misc_feature: MA Experiment 20001557 PARAMETER Experiment Name: At_Drought_Soil_Dry_P Parameter: Plant Line Value: WS
  misc_feature: MA Experiment 20001557 PARAMETER Experiment Name: At_Drought_Soil_Dry_P Parameter: Post Timepoint (hr) Value: 3
  misc_feature: MA Experiment 20001557 PARAMETER Experiment Name: At_Drought_Soil_Dry_P Parameter: Post-Treatment Value: Re-Water vs. No Drought
  misc_feature: MA Experiment 20001557 PARAMETER Experiment Name: At_Drought_Soil_Dry_P Parameter: Timepoint (day) Value: 13
  misc_feature: MA Experiment 20001557 PARAMETER Experiment Name: At_Drought_Soil_Dry_P Parameter: Treatment Value: Drought vs. No Drought
  misc_feature: MA Experiment ID: 20001757 Result: Up-regulated in Transcription
  misc_feature: MA Experiment 20001757 PARAMETER Experiment Name: At_50mM_NH4NO3_L-to-H_P Parameter: Timepoint (hr) Value: 6
  misc_feature: MA Experiment 20001757 PARAMETER Experiment Name: At_50mM_NH4NO3_L-to-H_P Parameter: Tissue Value: Leaf
  misc_feature: MA Experiment 20001757 PARAMETER Experiment Name: At_50mM_NH4NO3_L-to-H_P Parameter: Treatment Value: 50mM NH4NO3 vs 100mM Mannitol
  misc_feature: MA Experiment ID: 20001905 Result: Down-regulated in Transcription
  misc_feature: MA Experiment 20001905 PARAMETER Experiment Name: At_Drought_Reproduction_P Parameter: Age (day) Value: 40
  misc_feature: MA Experiment 20001905 PARAMETER Experiment Name: At_Drought_Reproduction_P Parameter: Organism Value: A. thaliana
  misc_feature: MA Experiment 20001905 PARAMETER Experiment Name: At_Drought_Reproduction_P Parameter: Plant Line Value: WS
  misc_feature: MA Experiment 20001905 PARAMETER Experiment Name: At_Drought_Reproduction_P Parameter: Timepoint (day) Value: 10
  misc_feature: MA Experiment 20001905 PARAMETER Experiment Name: At_Drought_Reproduction_P Parameter: Tissue Value: Rosettes
  misc_feature: MA Experiment 20001905 PARAMETER Experiment Name: At_Drought_Reproduction_P Parameter: Treatment Value: Drought vs. No Drought
  misc_feature: MA Experiment ID: 20001906 Result: Down-regulated in Transcription
  misc_feature: MA Experiment 20001906 PARAMETER Experiment Name: At_Drought_Reproduction_P Parameter: Age (day) Value: 35
  misc_feature: MA Experiment 20001906 PARAMETER Experiment Name: At_Drought_Reproduction_P Parameter: Organism Value: A. thaliana
  misc_feature: MA Experiment 20001906 PARAMETER Experiment Name: At_Drought_Reproduction_P Parameter: Plant Line Value: WS
  misc_feature: MA Experiment 20001906 PARAMETER Experiment Name: At_Drought_Reproduction_P Parameter: Timepoint (day) Value: 5
  misc_feature: MA Experiment 20001906 PARAMETER Experiment Name: At_Drought_Reproduction_P Parameter: Tissue Value: Siliques
  misc_feature: MA Experiment 20001906 PARAMETER Experiment Name: At_Drought_Reproduction_P Parameter: Treatment Value: Drought vs. No Drought
ggttggattcgtgaagccgaaaaaaaaaaaaaaatggtaattctcagcaacgtctcgttgttctcctgctgcaacatctctcagaaaccatctctcttttctccgtcttctcgtagttctcattgtcccattcgttgctcacagtcacaggaagggaaagaagtggttaccagtcctttgagaagtgtggtttggtcattaggagaagaggtttcaaagagaagtctatttgcacttgtctctgcttctctcttctttgttgatcctgctcttgcttttaagggtggaggtccctatggtcaaggagtcaccaggggacaggacttatctggcaaagatttcagtggccagactcttatcaggcaggacttcaaaacgtccatcctaaggcaagccaacttcaagggtgcaaagttgttaggtgctagcttctttgatgcagatctaacaggtgctgatttatcggaagctgatctccgaggtgcagatttctccttggcaaatgtaacaaaggtgaatctaacgaacgctaacttagaaggagcgactgttactggaaacacatcattcaagggatcaaacattacaggcgcagacttcactgatgtccctctaagagatgatcagcgagtatacctttgcaaagttgcggatggagttaacgcgactactgggaatgcaacgcgggacacattgctttgcaactaa

SEQ ID NO: 46124 - protein, 235 aa, Arabidopsis thaliana
  peptide (1)..(235): Ceres Seq. ID no. 13578578
  misc_feature (167)..(207): Pfam Name: Pentapeptide repeats (8 copies) Pfam Description: Pentapeptide repeats (8 copies)
  misc_feature (107)..(234): Homolog of NCBI NO: 23039927 NR Description: hypothetical protein [Trichodesmium erythraeum
  misc_feature (105)..(234): Homolog of NCBI NO: 16331083 NR Description: unknown protein [Synechocystis sp. PCC 6803]
  misc_feature (113)..(234): Homolog of NCBI NO: 17230824 NR Description: hypothetical protein [Nostoc sp. PCC 7120]
  misc_feature (80)..(234): Homolog of NCBI NO: 23128511 NR Description: hypothetical protein [Nostoc punctiforme]
  misc_feature (76)..(234): Homolog of NCBI NO: 33865584 NR Description: conserved hypothetical protein [Synechococcus sp.
  misc_feature (134)..(235): Homolog of NCBI NO: 7486947 NR Description: hypothetical protein At2g44920 [imported] -
  misc_feature (12)..(187): Homolog of NCBI NO: 7486947 NR Description: hypothetical protein At2g44920 [imported] -
  misc_feature (58)..(234): Homolog of NCBI NO: 34895746 NR Description: P0024G09.19 [Oryza sativa (japonica
  misc_feature (12)..(198): Homolog of NCBI NO: 18406663 NR Description: thylakoid lumen pentapeptide repeat family
  misc_feature (12)..(235): Homolog of NCBI NO: 18406661 NR Description: thylakoid lumen pentapeptide repeat family
GWIREAEKKKKMVILSNVSLFSCCNISQKPSLFSPSSRSSHCPIRCSQSQEGKEVVTSPLRSVVWSLGEEVSKRSLFALVSASLFFVDPALAFKGGGPYGQGVTRGQDLSGKDFSGQTLIRQDFKTSILRQANFKGAKLLGASFFDADLTGADLSEADLRGADFSLANVTKVNLTNANLEGATVTGNTSFKGSNITGADFTDVPLRDDQRVYLCKVADGVNATTGNATRDTLLCN

SEQ ID NO: 46125 - protein, 224 aa, Arabidopsis thaliana
  peptide (1)..(224): Ceres Seq. ID no. 13578579
  misc_feature (156)..(196): Pfam Name: Pentapeptide repeats (8 copies) Pfam Description: Pentapeptide repeats (8 copies)
  misc_feature (96)..(223): Homolog of NCBI NO: 23039927 NR Description: hypothetical protein [Trichodesmium erythraeum
  misc_feature (94)..(223): Homolog of NCBI NO: 16331083 NR Description: unknown protein [Synechocystis sp. PCC 6803]
  misc_feature (102)..(223): Homolog of NCBI NO: 17230824 NR Description: hypothetical protein [Nostoc sp. PCC 7120]
  misc_feature (69)..(223): Homolog of NCBI NO: 23128511 NR Description: hypothetical protein [Nostoc punctiforme]
  misc_feature (65)..(223): Homolog of NCBI NO: 33865584 NR Description: conserved hypothetical protein [Synechococcus sp.
  misc_feature (123)..(224): Homolog of NCBI NO: 7486947 NR Description: hypothetical protein At2g44920 [imported] -
  misc_feature (1)..(176): Homolog of NCBI NO: 7486947 NR Description: hypothetical protein At2g44920 [imported] -
  misc_feature (47)..(223): Homolog of NCBI NO: 34895746 NR Description: P0024G09.19 [Oryza sativa (japonica
  misc_feature (1)..(187): Homolog of NCBI NO: 18406663 NR Description: thylakoid lumen pentapeptide repeat family
  misc_feature (1)..(224): Homolog of NCBI NO: 18406661 NR Description: thylakoid lumen pentapeptide repeat family
MVILSNVSLFSCCNISQKPSLFSPSSRSSHCPIRCSQSQEGKEVVTSPLRSVVWSLGEEVSKRSLFALVSASLFFVDPALAFKGGGPYGQGVTRGQDLSGKDFSGQTLIRQDFKTSILRQANFKGAKLLGASFFDADLTGADLSEADLRGADFSLANVTKVNLTNANLEGATVTGNTSFKGSNITGADFTDVPLRDDQRVYLCKVADGVNATTGNATRDTLLCN

SEQ ID NO: 46126 - DNA, 2093 bp, Arabidopsis thaliana; identical to SEQ ID NO: 43891
  misc_feature (1)..(2093): Ceres Seq. ID no. 12639093
  misc_feature: MA Experiment ID: 20000234 Result: Down-regulated in Transcription
  misc_feature: MA Experiment 20000234 PARAMETER Experiment Name: At_Siliques_P Parameter: Age (day) Value: 21
  misc_feature: MA Experiment 20000234 PARAMETER Experiment Name: At_Siliques_P Parameter: Organism Value: A. thaliana
  misc_feature: MA Experiment 20000234 PARAMETER Experiment Name: At_Siliques_P Parameter: Plant Line Value: WS
  misc_feature: MA Experiment 20000234 PARAMETER Experiment Name: At_Siliques_P Parameter: Tissue Value: Less Than 5mm Siliques vs. Whole Plant
  misc_feature: MA Experiment ID: 20000264 Result: Down-regulated in Transcription
  misc_feature: MA Experiment 20000264 PARAMETER Experiment Name: At_Open_Flower_P Parameter: Age (day) Value: 21
  misc_feature: MA Experiment 20000264 PARAMETER Experiment Name: At_Open_Flower_P Parameter: Plant Line Value: WS
  misc_feature: MA Experiment 20000264 PARAMETER Experiment Name: At_Open_Flower_P Parameter: Tissue Value: Open Flower vs. Whole Plant
  misc_feature: MA Experiment ID: 20000439 Result: Down-regulated in Transcription
  misc_feature: MA Experiment 20000439 PARAMETER Experiment Name: At_Roots__P Parameter: Age (day) Value: 14 vs. 21
  misc_feature: MA Experiment 20000439 PARAMETER Experiment Name: At_Roots__P Parameter: Organism Value: A. thaliana
  misc_feature: MA Experiment 20000439 PARAMETER Experiment Name: At_Roots__P Parameter: Tissue Value: Roots vs. Whole Plant
  misc_feature: MA Experiment ID: 20000495 Result: Down-regulated in Transcription
  misc_feature: MA Experiment 20000495 PARAMETER Experiment Name: At_Guard_Cells_P Parameter: Harvest Date Value: 8/2/2002
  misc_feature: MA Experiment 20000495 PARAMETER Experiment Name: At_Guard_Cells_P Parameter: Organism Value: A. thaliana
  misc_feature: MA Experiment 20000495 PARAMETER Experiment Name: At_Guard_Cells_P Parameter: Tissue Value: Guard Cells vs. Leaves

SEQ ID NO: 46127 - protein, 585 aa, Arabidopsis thaliana; identical to SEQ ID NO: 43892
  peptide (1)..(585): Ceres Seq. ID no. 12639094
  misc_feature (441)..(575): Pfam Name: Sodium/calcium exchanger protein Pfam Description: Sodium/calcium exchanger protein
  misc_feature (441)..(575): Pfam Name: Sodium/calcium exchanger protein Pfam Description: Sodium/calcium exchanger protein
  misc_feature (429)..(546): Homolog of NCBI NO: 15218787 NR Description: unknown protein; protein id: At1g29020.1
  misc_feature (3)..(374): Homolog of NCBI NO: 15218787 NR Description: unknown protein; protein id: At1g29020.1
  misc_feature (25)..(223): Homolog of NCBI NO: 15218787 NR Description: unknown protein; protein id: At1g29020.1
  misc_feature (232)..(576): Homolog of NCBI NO: 15218787 NR Description: unknown protein; protein id: At1g29020.1
  misc_feature (10)..(577): Homolog of NCBI NO: 26449859 NR Description: unknown protein [Arabidopsis thaliana]
  misc_feature (429)..(546): Homolog of NCBI NO: 15218787 NR Description: unknown protein; protein id: At1g29020.1
  misc_feature (25)..(223): Homolog of NCBI NO: 15218787 NR Description: unknown protein; protein id: At1g29020.1
  misc_feature (10)..(577): Homolog of NCBI NO: 26449859 NR Description: unknown protein [Arabidopsis thaliana]
  misc_feature (1)..(585): Homolog of NCBI NO: 30695448 NR Description: expressed protein [Arabidopsis thaliana]
  misc_feature (1)..(585): Homolog of NCBI NO: 25405975 NR Description: protein F12M16.12 [imported] - Arabidopsis
  misc_feature (93)..(585): Homolog of NCBI NO: 13605639 NR Description: At1g53210/F12M16_12 [Arabidopsis thaliana]
  misc_feature (141)..(585): Homolog of NCBI NO: 34903912 NR Description: unnamed protein product [Oryza sativa (japonica
  misc_feature (9)..(134): Homolog of NCBI NO: 34903912 NR Description: unnamed protein product [Oryza sativa (japonica
  misc_feature (232)..(576): Homolog of NCBI NO: 15218787 NR Description: unknown protein; protein id: At1g29020.1
  misc_feature (3)..(374): Homolog of NCBI NO: 15218787 NR Description: unknown protein; protein id: At1g29020.1
  misc_feature (9)..(134): Homolog of NCBI NO: 34903912 NR Description: unnamed protein product [Oryza sativa (japonica
  misc_feature (141)..(585): Homolog of NCBI NO: 34903912 NR Description: unnamed protein product [Oryza sativa (japonica
  misc_feature (93)..(585): Homolog of NCBI NO: 13605639 NR Description: At1g53210/F12M16_12 [Arabidopsis thaliana]
  misc_feature (1)..(585): Homolog of NCBI NO: 25405975 NR Description: protein F12M16.12 [imported] - Arabidopsis
  misc_feature (1)..(585): Homolog of NCBI NO: 30695448 NR Description: expressed protein [Arabidopsis thaliana]

SEQ ID NO: 46128 - protein, 513 aa, Arabidopsis thaliana; identical to SEQ ID NO: 43893
  peptide (1)..(513): Ceres Seq. ID no. 12639095
  misc_feature (369)..(503): Pfam Name: Sodium/calcium exchanger protein Pfam Description: Sodium/calcium exchanger protein
  misc_feature (369)..(503): Pfam Name: Sodium/calcium exchanger protein Pfam Description: Sodium/calcium exchanger protein
  misc_feature (357)..(474): Homolog of NCBI NO: 15218787 NR Description: unknown protein; protein id: At1g29020.1
  misc_feature (1)..(302): Homolog of NCBI NO: 15218787 NR Description: unknown protein; protein id: At1g29020.1
  misc_feature (1)..(151): Homolog of NCBI NO: 15218787 NR Description: unknown protein; protein id: At1g29020.1
  misc_feature (160)..(504): Homolog of NCBI NO: 15218787 NR Description: unknown protein; protein id: At1g29020.1
  misc_feature (1)..(505): Homolog of NCBI NO: 26449859 NR Description: unknown protein [Arabidopsis thaliana]
  misc_feature (357)..(474): Homolog of NCBI NO: 15218787 NR Description: unknown protein; protein id: At1g29020.1
  misc_feature (1)..(151): Homolog of NCBI NO: 15218787 NR Description: unknown protein; protein id: At1g29020.1
  misc_feature (1)..(505): Homolog of NCBI NO: 26449859 NR Description: unknown protein [Arabidopsis thaliana]
  misc_feature (1)..(513): Homolog of NCBI NO: 30695448 NR Description: expressed protein [Arabidopsis thaliana]
  misc_feature (1)..(513): Homolog of NCBI NO: 25405975 NR Description: protein F12M16.12 [imported] - Arabidopsis
  misc_feature (21)..(513): Homolog of NCBI NO: 13605639 NR Description: At1g53210/F12M16_12 [Arabidopsis thaliana]
  misc_feature (69)..(513): Homolog of NCBI NO: 34903912 NR Description: unnamed protein product [Oryza sativa (japonica
  misc_feature (1)..(62): Homolog of NCBI NO: 34903912 NR Description: unnamed protein product [Oryza sativa (japonica
  misc_feature (160)..(504): Homolog of NCBI NO: 15218787 NR Description: unknown protein; protein id: At1g29020.1
  misc_feature (1)..(302): Homolog of NCBI NO: 15218787 NR Description: unknown protein; protein id: At1g29020.1
  misc_feature (1)..(62): Homolog of NCBI NO: 34903912 NR Description: unnamed protein product [Oryza sativa (japonica
  misc_feature (69)..(513): Homolog of NCBI NO: 34903912 NR Description: unnamed protein product [Oryza sativa (japonica
  misc_feature (21)..(513): Homolog of NCBI NO: 13605639 NR Description: At1g53210/F12M16_12 [Arabidopsis thaliana]
  misc_feature (1)..(513): Homolog of NCBI NO: 25405975 NR Description: protein F12M16.12 [imported] - Arabidopsis
  misc_feature (1)..(513): Homolog of NCBI NO: 30695448 NR Description: expressed protein [Arabidopsis thaliana]

SEQ ID NO: 46129 - protein, 493 aa, Arabidopsis thaliana; identical to SEQ ID NO: 43894
  peptide (1)..(493): Ceres Seq. ID no. 12639096
  misc_feature (349)..(483): Pfam Name: Sodium/calcium exchanger protein Pfam Description: Sodium/calcium exchanger protein
  misc_feature (349)..(483): Pfam Name: Sodium/calcium exchanger protein Pfam Description: Sodium/calcium exchanger protein
  misc_feature (337)..(454): Homolog of NCBI NO: 15218787 NR Description: unknown protein; protein id: At1g29020.1
  misc_feature (1)..(282): Homolog of NCBI NO: 15218787 NR Description: unknown protein; protein id: At1g29020.1
  misc_feature (1)..(131): Homolog of NCBI NO: 15218787 NR Description: unknown protein; protein id: At1g29020.1
  misc_feature (140)..(484): Homolog of NCBI NO: 15218787 NR Description: unknown protein; protein id: At1g29020.1
  misc_feature (1)..(485): Homolog of NCBI NO: 26449859 NR Description: unknown protein [Arabidopsis thaliana]
  misc_feature (337)..(454): Homolog of NCBI NO: 15218787 NR Description: unknown protein; protein id: At1g29020.1
  misc_feature (1)..(131): Homolog of NCBI NO: 15218787 NR Description: unknown protein; protein id: At1g29020.1
  misc_feature (1)..(485): Homolog of NCBI NO: 26449859 NR Description: unknown protein [Arabidopsis thaliana]
  misc_feature (1)..(493): Homolog of NCBI NO: 30695448 NR Description: expressed protein [Arabidopsis thaliana]
  misc_feature (1)..(493): Homolog of NCBI NO: 25405975 NR Description: protein F12M16.12 [imported] - Arabidopsis
  misc_feature (1)..(493): Homolog of NCBI NO: 13605639 NR Description: At1g53210/F12M16_12 [Arabidopsis thaliana]
  misc_feature (49)..(493): Homolog of NCBI NO: 34903912 NR Description: unnamed protein product [Oryza sativa (japonica
  misc_feature (1)..(42): Homolog of NCBI NO: 34903912 NR Description: unnamed protein product [Oryza sativa (japonica
  misc_feature (140)..(484): Homolog of NCBI NO: 15218787 NR Description: unknown protein; protein id: At1g29020.1
  misc_feature (1)..(282): Homolog of NCBI NO: 15218787 NR Description: unknown protein; protein id: At1g29020.1
  misc_feature (1)..(42): Homolog of NCBI NO: 34903912 NR Description: unnamed protein product [Oryza sativa (japonica
  misc_feature (49)..(493): Homolog of NCBI NO: 34903912 NR Description: unnamed protein product [Oryza sativa (japonica
  misc_feature (1)..(493): Homolog of NCBI NO: 13605639 NR Description: At1g53210/F12M16_12 [Arabidopsis thaliana]
  misc_feature (1)..(493): Homolog of NCBI NO: 25405975 NR Description: protein F12M16.12 [imported] - Arabidopsis
  misc_feature (1)..(493): Homolog of NCBI NO: 30695448 NR Description: expressed protein [Arabidopsis thaliana]

SEQ ID NO: 46130 - DNA, 2055 bp, Arabidopsis thaliana
  misc_feature (1)..(2055): Ceres Seq. ID no. 13591783
  misc_feature: MA Experiment ID: 20000184 Result: Up-regulated in Transcription
  misc_feature: MA Experiment 20000184 PARAMETER Experiment Name: At_Shoots__P Parameter: Age (day) Value: 7
  misc_feature: MA Experiment 20000184 PARAMETER Experiment Name: At_Shoots__P Parameter: Tissue Value: Shoots vs. Whole Plant
aaaaaaaaaatcaaacgcagaatattatttttctcgctcgcgaattcctctttctcaccttttctcgctcctgggaatctgaagcagttcttctccgacgcctggatcgtgatttgattcgaactttcacataagatggctatggtagatgaaccgttgtatcccattgctgtgcttatagatgagcttaagaatgatgatattcagcttcgtttgaactcgatccgtcgcttatctactatagctcgtgctcttggagaggagcgtacaaggaaggagttaatcccttttttgagtgagaatagtgacgatgacgatgaggtgcttcttgcaatggctgaggagttaggagtttttattccgtttgttggaggaattgagtttgcgcatgttcttcttcctcctttggaatctctatgtactgttgaagagacttgtgtgagagaaaaagctgtggaatcgctttgtaagattggatctcagatgaaagagaatgatcttgttgaatcttttgttcctcttgtgaagaggttagcgggtggtgaatggtttgcagcaagagtttctgcatgtggtatatttcatgttgcataccaaggttgcactgatgtgttgaagactgagttacgggctacttatagccagttgtgcaaagatgatatgccaatggtgcgaagagctgctgcatctaacctggggaaatttgctacaactgtcgagtctacctttttgattgctgagatcatgactatgttcgatgatcttactaaagatgaccaagattctgtgagactattggctgttgaagggtgtgcagctcttggaaagttgttggaacctcaggattgtgttgcacgcattttacctgttattgttaatttctctcaggataaatcttggagggtgcgctacatggttgctaatcagctatatgaactttgtgaggcagtgggtcctgattgcacgaggacggatttggttccagcatatgtgagattgctaagggacaatgaggctgaagtgcgaatagcagcagcgggaaaagtgaccaagttctgtcggcttttgaatccagagcttgcgattcagcacatccttccttgtgtgaaggaattatcatcggattcttctcaacatgtccgctctgctctagcttcagtaataatggggatggctcctatccttgggaaggactcaaccattgagcatctgttaccaatttttctttcccttttgaaagatgaatttcctgatgtgcgccttaacatcataagcaagttagatcaagtcaaccaggttattggaattgatctactatctcaatccttgttaccggccattgtagaacttgctgaggatcggcactggagagtccgacttgcaataatagagtatgttccactgttggccagccagttaggtataggatttttcgatgacaagctcggagccctttgcatgcaatggctgcaagacaaggtctactctatccgcgaagctgcagcaaacaacctaaagcgcctcgcagaggagtttggtcctgaatgggcaatgcagcacttagttccccaggtattggacatggtcaacaatccgcactacctacacaggatgatggttctacgcgcaatatctctcatggcgcctgtaatgggatcagaaatcacatgctctaagtttcttcctgtggttgttgaagcatcaaaagacagagttccaaacatcaagttcaacgttgccaaacttctgcaatccctcatccccatagtcgaccaatcagtggtggacaaaacaatccgtcagtgtttggtggacctgagcgaagaccctgatgttgatgttcgttattttgcaaatcaagcacttaattccatcgatggttccacagcagcacaatcctgaattgtttttttttcatatgtatgatcgttaagttaagtttctattattcgtgttctctgcaatttatttggtttgtttgtgtaaaacgccattttggttgctggctatgaactgcaactatttttgttagtaaaattgtattaccttttttac

SEQ ID NO: 46131 - protein, 588 aa, Arabidopsis thaliana
  peptide (1)..(588): Ceres Seq. ID no. 13591784
  misc_feature (468)..(506): Pfam Name: HEAT repeat Pfam Description: HEAT repeat
  misc_feature (468)..(506): Pfam Name: HEAT repeat Pfam Description: HEAT repeat
  misc_feature (1)..(583): Homolog of NCBI NO: 7447393 NR Description: phosphoprotein phosphatase (EC 3.1.3.16) 2A
  misc_feature (3)..(581): Homolog of NCBI NO: 11094365 NR Description: Ser/Thr specific protein phosphatase 2A A
  misc_feature (1)..(581): Homolog of NCBI NO: 22329534 NR Description: serine/threonine protein phosphatase 2A
  misc_feature (1)..(581): Homolog of NCBI NO: 1076389 NR Description: phosphoprotein phosphatase 2A 65K regulatory
  misc_feature (1)..(581): Homolog of NCBI NO: 15230896 NR Description: serine/threonine protein phosphatase 2A, 65 KDa
  misc_feature (1)..(583): Homolog of NCBI NO: 7447393 NR Description: phosphoprotein phosphatase (EC 3.1.3.16) 2A
  misc_feature (1)..(581): Homolog of NCBI NO: 22329534 NR Description: serine/threonine protein phosphatase 2A
  misc_feature (1)..(581): Homolog of NCBI NO: 15230896 NR Description: serine/threonine protein phosphatase 2A, 65 KDa
  misc_feature (1)..(588): Homolog of NCBI NO: 15222601 NR Description: serine/threonine protein phosphatase 2A, 65 KDa
  misc_feature (1)..(588): Homolog of NCBI NO: 1254996 NR Description: serine/threonine protein phosphatase type 2A
  misc_feature (1)..(588): Homolog of NCBI NO: 2146743 NR Description: phosphoprotein phosphatase (EC 3.1.3.16) 2A
  misc_feature (1)..(588): Homolog of NCBI NO: 683506 NR Description: 65 kDa regulatory subunit of protein phosphatase
  misc_feature (1)..(588): Homolog of NCBI NO: 1076396 NR Description: phosphoprotein phosphatase 2A 65K regulatory
  misc_feature (1)..(581): Homolog of NCBI NO: 1076389 NR Description: phosphoprotein phosphatase 2A 65K regulatory
  misc_feature (3)..(581): Homolog of NCBI NO: 11094365 NR Description: Ser/Thr specific protein phosphatase 2A A
  misc_feature (1)..(588): Homolog of NCBI NO: 1076396 NR Description: phosphoprotein phosphatase 2A 65K regulatory
  misc_feature (1)..(588): Homolog of NCBI NO: 683506 NR Description: 65 kDa regulatory subunit of protein phosphatase
  misc_feature (1)..(588): Homolog of NCBI NO: 2146743 NR Description: phosphoprotein phosphatase (EC 3.1.3.16) 2A
  misc_feature (1)..(588): Homolog of NCBI NO: 1254996 NR Description: serine/threonine protein phosphatase type 2A
  misc_feature (1)..(588): Homolog of NCBI NO: 15222601 NR Description: serine/threonine protein phosphatase 2A, 65 KDa
MAMVDEPLYPIAVLIDELKNDDIQLRLNSIRRLSTIARALGEERTRKELIPFLSENSDDDDEVLLAMAEELGVFIPFVGGIEFAHVLLPPLESLCTVEETCVREKAVESLCKIGSQMKENDLVESFVPLVKRLAGGEWFAARVSACGIFHVAYQGCTDVLKTELRATYSQLCKDDMPMVRRAAASNLGKFATTVESTFLIAEIMTMFDDLTKDDQDSVRLLAVEGCAALGKLLEPQDCVARILPVIVNFSQDKSWRVRYMVANQLYELCEAVGPDCTRTDLVPAYVRLLRDNEAEVRIAAAGKVTKFCRLLNPELAIQHILPCVKELSSDSSQHVRSALASVIMGMAPILGKDSTIEHLLPIFLSLLKDEFPDVRLNIISKLDQVNQVIGIDLLSQSLLPAIVELAEDRHWRVRLAIIEYVPLLASQLGIGFFDDKLGALCMQWLQDKVYSIREAAANNLKRLAEEFGPEWAMQHLVPQVLDMVNNPHYLHRMMVLRAISLMAPVMGSEITCSKFLPVVVEASKDRVPNIKFNVAKLLQSLIPIVDQSVVDKTIRQCLVDLSEDPDVDVRYFANQALNSIDGSTAAQS

SEQ ID NO: 46132 - protein, 586 aa, Arabidopsis thaliana
  peptide (1)..(586): Ceres Seq. ID no. 13591785
  misc_feature (466)..(504): Pfam Name: HEAT repeat Pfam Description: HEAT repeat
  misc_feature (466)..(504): Pfam Name: HEAT repeat Pfam Description: HEAT repeat
  misc_feature (1)..(581): Homolog of NCBI NO: 7447393 NR Description: phosphoprotein phosphatase (EC 3.1.3.16) 2A
  misc_feature (1)..(579): Homolog of NCBI NO: 11094365 NR Description: Ser/Thr specific protein phosphatase 2A A
  misc_feature (1)..(579): Homolog of NCBI NO: 22329534 NR Description: serine/threonine protein phosphatase 2A
  misc_feature (1)..(579): Homolog of NCBI NO: 1076389 NR Description: phosphoprotein phosphatase 2A 65K regulatory
  misc_feature (1)..(579): Homolog of NCBI NO: 15230896 NR Description: serine/threonine protein phosphatase 2A, 65 KDa
  misc_feature (1)..(581): Homolog of NCBI NO: 7447393 NR Description: phosphoprotein phosphatase (EC 3.1.3.16) 2A
  misc_feature (1)..(579): Homolog of NCBI NO: 22329534 NR Description: serine/threonine protein phosphatase 2A
  misc_feature (1)..(579): Homolog of NCBI NO: 15230896 NR Description: serine/threonine protein phosphatase 2A, 65 KDa
  misc_feature (1)..(586): Homolog of NCBI NO: 15222601 NR Description: serine/threonine protein phosphatase 2A, 65 KDa
  misc_feature (1)..(586): Homolog of NCBI NO: 1254996 NR Description: serine/threonine protein phosphatase type 2A
  misc_feature (1)..(586): Homolog of NCBI NO: 2146743 NR Description: phosphoprotein phosphatase (EC 3.1.3.16) 2A
  misc_feature (1)..(586): Homolog of NCBI NO: 683506 NR Description: 65 kDa regulatory subunit of protein phosphatase
  misc_feature (1)..(586): Homolog of NCBI NO: 1076396 NR Description: phosphoprotein phosphatase 2A 65K regulatory
  misc_feature (1)..(579): Homolog of NCBI NO: 1076389 NR Description: phosphoprotein phosphatase 2A 65K regulatory
  misc_feature (1)..(579): Homolog of NCBI NO: 11094365 NR Description: Ser/Thr specific protein phosphatase 2A A
  misc_feature (1)..(586): Homolog of NCBI NO: 1076396 NR Description: phosphoprotein phosphatase 2A 65K regulatory
  misc_feature (1)..(586): Homolog of NCBI NO: 683506 NR Description: 65 kDa regulatory subunit of protein phosphatase
  misc_feature (1)..(586): Homolog of NCBI NO: 2146743 NR Description: phosphoprotein phosphatase (EC 3.1.3.16) 2A
  misc_feature (1)..(586): Homolog of NCBI NO: 1254996 NR Description: serine/threonine protein phosphatase type 2A
  misc_feature (1)..(586): Homolog of NCBI NO: 15222601 NR Description: serine/threonine protein phosphatase 2A, 65 KDa
MVDEPLYPIAVLIDELKNDDIQLRLNSIRRLSTIARALGEERTRKELIPFLSENSDDDDEVLLAMAEELGVFIPFVGGIEFAHVLLPPLESLCTVEETCVREKAVESLCKIGSQMKENDLVESFVPLVKRLAGGEWFAARVSACGIFHVAYQGCTDVLKTELRATYSQLCKDDMPMVRRAAASNLGKFATTVESTFLIAEIMTMFDDLTKDDQDSVRLLAVEGCAALGKLLEPQDCVARILPVIVNFSQDKSWRVRYMVANQLYELCEAVGPDCTRTDLVPAYVRLLRDNEAEVRIAAAGKVTKFCRLLNPELAIQHILPCVKELSSDSSQHVRSALASVIMGMAPILGKDSTIEHLLPIFLSLLKDEFPDVRLNIISKLDQVNQVIGIDLLSQSLLPAIVELAEDRHWRVRLAIIEYVPLLASQLGIGFFDDKLGALCMQWLQDKVYSIREAAANNLKRLAEEFGPEWAMQHLVPQVLDMVNNPHYLHRMMVLRAISLMAPVMGSEITCSKFLPVVVEASKDRVPNIKFNVAKLLQSLIPIVDQSVVDKTIRQCLVDLSEDPDVDVRYFANQALNSIDGSTAAQS

SEQ ID NO: 46133 - protein, 522 aa, Arabidopsis thaliana
  peptide (1)..(522): Ceres Seq. ID no. 13591786
  misc_feature (402)..(440): Pfam Name: HEAT repeat Pfam Description: HEAT repeat
  misc_feature (402)..(440): Pfam Name: HEAT repeat Pfam Description: HEAT repeat
  misc_feature (1)..(517): Homolog of NCBI NO: 7447393 NR Description: phosphoprotein phosphatase (EC 3.1.3.16) 2A
  misc_feature (1)..(515): Homolog of NCBI NO: 11094365 NR Description: Ser/Thr specific protein phosphatase 2A A
  misc_feature (1)..(515): Homolog of NCBI NO: 22329534 NR Description: serine/threonine protein phosphatase 2A
  misc_feature (1)..(515): Homolog of NCBI NO: 1076389 NR Description: phosphoprotein phosphatase 2A 65K regulatory
  misc_feature (1)..(515): Homolog of NCBI NO: 15230896 NR Description: serine/threonine protein phosphatase 2A, 65 KDa
  misc_feature (1)..(517): Homolog of NCBI NO: 7447393 NR Description: phosphoprotein phosphatase (EC 3.1.3.16) 2A
  misc_feature (1)..(515): Homolog of NCBI NO: 22329534 NR Description: serine/threonine protein phosphatase 2A
  misc_feature (1)..(515): Homolog of NCBI NO: 15230896 NR Description: serine/threonine protein phosphatase 2A, 65 KDa
  misc_feature (1)..(522): Homolog of NCBI NO: 15222601 NR Description: serine/threonine protein phosphatase 2A, 65 KDa
  misc_feature (1)..(522): Homolog of NCBI NO: 1254996 NR Description: serine/threonine protein phosphatase type 2A
  misc_feature (1)..(522): Homolog of NCBI NO: 2146743 NR Description: phosphoprotein phosphatase (EC 3.1.3.16) 2A
  misc_feature (1)..(522): Homolog of NCBI NO: 683506 NR Description: 65 kDa regulatory subunit of protein phosphatase
  misc_feature (1)..(522): Homolog of NCBI NO: 1076396 NR Description: phosphoprotein phosphatase 2A 65K regulatory
  misc_feature (1)..(515): Homolog of NCBI NO: 1076389 NR Description: phosphoprotein phosphatase 2A 65K regulatory
  misc_feature (1)..(515): Homolog of NCBI NO: 11094365 NR Description: Ser/Thr specific protein phosphatase 2A A
  misc_feature (1)..(522): Homolog of NCBI NO: 1076396 NR Description: phosphoprotein phosphatase 2A 65K regulatory
  misc_feature (1)..(522): Homolog of NCBI NO: 683506 NR Description: 65 kDa regulatory subunit of protein phosphatase
  misc_feature (1)..(522): Homolog of NCBI NO: 2146743 NR Description: phosphoprotein phosphatase (EC 3.1.3.16) 2A
  misc_feature (1)..(522): Homolog of NCBI NO: 1254996 NR Description: serine/threonine protein phosphatase type 2A
  misc_feature (1)..(522): Homolog of NCBI NO: 15222601 NR Description: serine/threonine protein phosphatase 2A, 65 KDa
MAEELGVFIPFVGGIEFAHVLLPPLESLCTVEETCVREKAVESLCKIGSQMKENDLVESFVPLVKRLAGGEWFAARVSACGIFHVAYQGCTDVLKTELRATYSQLCKDDMPMVRRAAASNLGKFATTVESTFLIAEIMTMFDDLTKDDQDSVRLLAVEGCAALGKLLEPQDCVARILPVIVNFSQDKSWRVRYMVANQLYELCEAVGPDCTRTDLVPAYVRLLRDNEAEVRIAAAGKVTKFCRLLNPELAIQHILPCVKELSSDSSQHVRSALASVIMGMAPILGKDSTIEHLLPIFLSLLKDEFPDVRLNIISKLDQVNQVIGIDLLSQSLLPAIVELAEDRHWRVRLAIIEYVPLLASQLGIGFFDDKLGALCMQWLQDKVYSIREAAANNLKRLAEEFGPEWAMQHLVPQVLDMVNNPHYLHRMMVLRAISLMAPVMGSEITCSKFLPVVVEASKDRVPNIKFNVAKLLQSLIPIVDQSVVDKTIRQCLVDLSEDPDVDVRYFANQALNSIDGSTAAQS

SEQ ID NO: 46134 - DNA, 2376 bp, Arabidopsis thaliana
  misc_feature (1)..(2376): Ceres Seq. ID no. 12574662
  misc_feature: MA Experiment ID: 20000179 Result: Down-regulated in Transcription
  misc_feature: MA Experiment 20000179 PARAMETER Experiment Name: At_Germinating_Seeds_P Parameter: Age (hr) Value: 6 vs. 0
  misc_feature: MA Experiment 20000179 PARAMETER Experiment Name: At_Germinating_Seeds_P Parameter: Tissue Value: Germinating Seeds
  misc_feature: MA Experiment ID: 20000180 Result: Down-regulated in Transcription
  misc_feature: MA Experiment 20000180 PARAMETER Experiment Name: At_Germinating_Seeds_P Parameter: Age (hr) Value: 24 vs. 0
  misc_feature: MA Experiment 20000180 PARAMETER Experiment Name: At_Germinating_Seeds_P Parameter: Tissue Value: Germinating Seeds
  misc_feature: MA Experiment ID: 20000286 Result: Down-regulated in Transcription
  misc_feature: MA Experiment 20000286 PARAMETER Experiment Name: At_Open_Flower_P Parameter: Age (day) Value: 21
  misc_feature: MA Experiment 20000286 PARAMETER Experiment Name: At_Open_Flower_P Parameter: Plant Line Value: WS
  misc_feature: MA Experiment 20000286 PARAMETER Experiment Name: At_Open_Flower_P Parameter: Tissue Value: Half Open vs. Whole Plant
  misc_feature: MA Experiment ID: 20001451 Result: Up-regulated in Transcription
  misc_feature: MA Experiment 20001451 PARAMETER Experiment Name: At_Far-red-induction_P Parameter: Age (day) Value: 7
  misc_feature: MA Experiment 20001451 PARAMETER Experiment Name: At_Far-red-induction_P Parameter: Light Value: Far-red vs. White
  misc_feature: MA Experiment 20001451 PARAMETER Experiment Name: At_Far-red-induction_P Parameter: Organism Value: A. thaliana
  misc_feature: MA Experiment 20001451 PARAMETER Experiment Name: At_Far-red-induction_P Parameter: Plant Line Value: Columbia
  misc_feature: MA Experiment 20001451 PARAMETER Experiment Name: At_Far-red-induction_P Parameter: Timepoint (hr) Value: 24
  misc_feature: MA Experiment 20001451 PARAMETER Experiment Name: At_Far-red-induction_P Parameter: Tissue Value: Whole Plant
gacgagagagagaaataaaaaaggcgtgagtctcctaactagctcctaataatgcgataaaccaaaaacatgccactttgcaataatttctccggcaatctcgtcgtcgccgttgctctcttctttgccggcgccctatatatcttcaactaccaaaactatgtcaacactctgagaacaacacagtatccggtagatgagctagaggcggccttgtatacggcagccgccggaaacaacaagacggtgataataacgatggtgaacaaagcgtacgtgaaggaggttggaagagggagtacgatgcttgatctgtttttggagagtttttgggaaggagaagggactctaccacttttggaccatctaatggtggtggcagtggatcaaacggcctatgatcgctgccgtttcaagaggcttcactgctacaagatggagactgaagatggggttgacttagagggagagaaagtattcatgtcaaaagatttcattgagatgatgtggagaaggactcgcttgatcctagacgttcttcgtcgtggctacaatgttattttcacggacacggacgtgatgtggctaaggagtccattgtctcggttaaacatgagcttggatatgcaaataagcgtggacagaattaacgtgggaggacagttgatcaacacgggattctaccacgtccggtctaacaacaagaccatctcactcttccaaaaatggtacgacatgaggctaaactcgacggggatgaaggaacaagacgttctcaagaatctcctagactccggcttcttcaaccagttaggtctcaacgttggcttccttagtaccaccgaattcagcggtttttgccaagacagtcctcacatgggcgttgtcactaccgtccatgctaactgctgcctccacatccctgccaaagtctttgatctcactcgtgttcttcgtgattggaaacgctacaaagcgtcacatgtcaacagcaaatggagccctcatcttaagtatttgaatatatccatcaaactactcattcttcatttaaaatgcggttgcttgagttatgcacgccaagtgttcgacgaattacccaagccaacattatcggcttacaactacatgattagtgggtacttgaagcatggattggtaaaggaattacttcttctagttcaacggatgtcatactctggggaaaaggcagatgggtacacgctttccatggttctaaaggcttctaatagtcgtggctcgactatgatactgccgcgtagcttatgtaggttggtccatgcccggattataaaatgtgatgttgagctagatgatgtgttgattactgcacttgttgatacttatgtgaagagtgggaagttggagtctgcaaggactgtgtttgaaacaatgaaagatgagaatgttgtgtgttgtacatcaatgatctcaggttacatgaatcaaggttttgtagaggatgcggaagagattttcaatactaccaaagtgaaggatattgtagtttacaatgctatggtggaaggtttcagcagatcaggtgaaactgctaagagatcagttgacatgtatatttcgatgcaacgagctggtttccatccgaatatttcaactttcgctagcgtgattggagcgtgttcggttttgacgtcccatgaagttggtcagcaagtgcacgctcagattatgaagagtggagtttacacgcatatcaaaatggggagctctttgttagacatgtatgccaaatgcggagggatcaatgatgcaagaagagtctttgaccaaatgcaagagaaaaacgtattttcgtggacttcgatgattgatggatatggaaagaatggaaaccctgaggaagcactcgaactcttcactaggatgaaggaattccgtatagaacccaattatgtaacctttcttggtgctctctctgcttgttcacattctggtttagtcgataaaggttatgagatctttgagagcatgcagagagattattccatgaaaccaaagatggaacactatgcttgcatagttgatctcatgggacgagctggagatttgaataaagctttcgaatttgctagggcgatgccggaaaggcctgactcagatatttgggcagctcttctcagttcttgtaatttgcatggtaatgttgaactcgcaagcatagctgcgagtgagcttttcaaactgaatgctgataaaagacctggagcttatttagctttatccaatgtctacgcttctaatgataaatgggacaatgtgagcaagatccgagaagtgatgaaaagaagaaggatatctaaaactattggtcgtagttggaccagcgaagattga

SEQ ID NO: 46135 - protein, 768 aa, Arabidopsis thaliana
  peptide (1)..(768): Ceres Seq. ID no. 12574663
  misc_feature (588)..(622): Pfam Name: PPR repeat Pfam Description: PPR repeat
  misc_feature (453)..(764): Homolog of NCBI NO: 38423978 NR Description: PPR-repeat protein-like [Oryza sativa (japonica
  misc_feature (323)..(479): Homolog of NCBI NO: 15235115 NR Description: putative protein; protein id: At4g39530.1
  misc_feature (458)..(764): Homolog of NCBI NO: 15235115 NR Description: putative protein; protein id: At4g39530.1
  misc_feature (167)..(315): Homolog of NCBI NO: 15218762 NR Description: hypothetical protein common family; protein id:
  misc_feature (5)..(152): Homolog of NCBI NO: 15218762 NR Description: hypothetical protein common family; protein id:
  misc_feature (318)..(768): Homolog of NCBI NO: 34896270 NR Description: hypothetical protein [Oryza sativa]
  misc_feature (1)..(315): Homolog of NCBI NO: 18396892 NR Description: expressed protein
  misc_feature (5)..(315): Homolog of NCBI NO: 25372968 NR Description: protein F1K23.10 [imported] - Arabidopsis
  misc_feature (286)..(374): Homolog of NCBI NO: 6691205 NR Description: F1K23.11 [Arabidopsis thaliana]
  misc_feature (538)..(613): Homolog of NCBI NO: 6691205 NR Description: F1K23.11 [Arabidopsis thaliana]
MPLCNNFSGNLVVAVALFFAGALYIFNYQNYVNTLRTTQYPVDELEAALYTAAAGNNKTVIITMVNKAYVKEVGRGSTMLDLFLESFWEGEGTLPLLDHLMVVAVDQTAYDRCRFKRLHCYKMETEDGVDLEGEKVFMSKDFIEMMWRRTRLILDVLRRGYNVIFTDTDVMWLRSPLSRLNMSLDMQISVDRINVGGQLINTGFYHVRSNNKTISLFQKWYDMRLNSTGMKEQDVLKNLLDSGFFNQLGLNVGFLSTTEFSGFCQDSPHMGVVTTVHANCCLHIPAKVFDLTRVLRDWKRYKASHVNSKWSPHLKYLNISIKLLILHLKCGCLSYARQVFDELPKPTLSAYNYMISGYLKHGLVKELLLLVQRMSYSGEKADGYTLSMVLKASNSRGSTMILPRSLCRLVHARIIKCDVELDDVLITALVDTYVKSGKLESARTVFETMKDENVVCCTSMISGYMNQGFVEDAEEIFNTTKVKDIVVYNAMVEGFSRSGETAKRSVDMYISMQRAGFHPNISTFASVIGACSVLTSHEVGQQVHAQIMKSGVYTHIKMGSSLLDMYAKCGGINDARRVFDQMQEKNVFSWTSMIDGYGKNGNPEEALELFTRMKEFRIEPNYVTFLGALSACSHSGLVDKGYEIFESMQRDYSMKPKMEHYACIVDLMGRAGDLNKAFEFARAMPERPDSDIWAALLSSCNLHGNVELASIAASELFKLNADKRPGAYLALSNVYASNDKWDNVSKIREVMKRRRISKTIGRSWTSED

SEQ ID NO: 46136 - protein, 705 aa, Arabidopsis thaliana
  peptide (1)..(705): Ceres Seq. ID no. 12574664
  misc_feature (525)..(559): Pfam Name: PPR repeat Pfam Description: PPR repeat
  misc_feature (390)..(701): Homolog of NCBI NO: 38423978 NR Description: PPR-repeat protein-like [Oryza sativa (japonica
  misc_feature (260)..(416): Homolog of NCBI NO: 15235115 NR Description: putative protein; protein id: At4g39530.1
  misc_feature (395)..(701): Homolog of NCBI NO: 15235115 NR Description: putative protein; protein id: At4g39530.1
  misc_feature (104)..(252): Homolog of NCBI NO: 15218762 NR Description: hypothetical protein common family; protein id:
  misc_feature (1)..(89): Homolog of NCBI NO: 15218762 NR Description: hypothetical protein common family; protein id:
  misc_feature (255)..(705): Homolog of NCBI NO: 34896270 NR Description: hypothetical protein [Oryza sativa]
  misc_feature (1)..(252): Homolog of NCBI NO: 18396892 NR Description: expressed protein
  misc_feature (1)..(252): Homolog of NCBI NO: 25372968 NR Description: protein F1K23.10 [imported] - Arabidopsis
  misc_feature (223)..(311): Homolog of NCBI NO: 6691205 NR Description: F1K23.11 [Arabidopsis thaliana]
  misc_feature (475)..(550): Homolog of NCBI NO: 6691205 NR Description: F1K23.11 [Arabidopsis thaliana]
MVNKAYVKEVGRGSTMLDLFLESFWEGEGTLPLLDHLMVVAVDQTAYDRCRFKRLHCYKMETEDGVDLEGEKVFMSKDFIEMMWRRTRLILDVLRRGYNVIFTDTDVMWLRSPLSRLNMSLDMQISVDRINVGGQLINTGFYHVRSNNKTISLFQKWYDMRLNSTGMKEQDVLKNLLDSGFFNQLGLNVGFLSTTEFSGFCQDSPHMGVVTTVHANCCLHIPAKVFDLTRVLRDWKRYKASHVNSKWSPHLKYLNISIKLLILHLKCGCLSYARQVFDELPKPTLSAYNYMISGYLKHGLVKELLLLVQRMSYSGEKADGYTLSMVLKASNSRGSTMILPRSLCRLVHARIIKCDVELDDVLITALVDTYVKSGKLESARTVFETMKDENVVCCTSMISGYMNQGFVEDAEEIFNTTKVKDIVVYNAMVEGFSRSGETAKRSVDMYISMQRAGFHPNISTFASVIGACSVLTSHEVGQQVHAQIMKSGVYTHIKMGSSLLDMYAKCGGINDARRVFDQMQEKNVFSWTSMIDGYGKNGNPEEALELFTRMKEFRIEPNYVTFLGALSACSHSGLVDKGYEIFESMQRDYSMKPKMEHYACIVDLMGRAGDLNKAFEFARAMPERPDSDIWAALLSSCNLHGNVELASIAASELFKLNADKRPGAYLALSNVYASNDKWDNVSKIREVMKRRRISKTIGRSWTSED

SEQ ID NO: 46137 - protein, 690 aa, Arabidopsis thaliana
  peptide (1)..(690): Ceres Seq. ID no. 12574665
  misc_feature (510)..(544): Pfam Name: PPR repeat Pfam Description: PPR repeat
  misc_feature (375)..(686): Homolog of NCBI NO: 38423978 NR Description: PPR-repeat protein-like [Oryza sativa (japonica
  misc_feature (245)..(401): Homolog of NCBI NO: 15235115 NR Description: putative protein; protein id: At4g39530.1
  misc_feature (380)..(686): Homolog of NCBI NO: 15235115 NR Description: putative protein; protein id: At4g39530.1
  misc_feature (89)..(237): Homolog of NCBI NO: 15218762 NR Description: hypothetical protein common family; protein id:
  misc_feature (1)..(74): Homolog of NCBI NO: 15218762 NR Description: hypothetical protein common family; protein id:
  misc_feature (240)..(690): Homolog of NCBI NO: 34896270 NR Description: hypothetical protein [Oryza sativa]
  misc_feature (1)..(237): Homolog of NCBI NO: 18396892 NR Description: expressed protein
  misc_feature (1)..(237): Homolog of NCBI NO: 25372968 NR Description: protein F1K23.10 [imported] - Arabidopsis
  misc_feature (208)..(296): Homolog of NCBI NO: 6691205 NR Description: F1K23.11 [Arabidopsis thaliana]
  misc_feature (460)..(535): Homolog of NCBI NO: 6691205 NR Description: F1K23.11 [Arabidopsis thaliana]
MLDLFLESFWEGEGTLPLLDHLMVVAVDQTAYDRCRFKRLHCYKMETEDGVDLEGEKVFMSKDFIEMMWRRTRLILDVLRRGYNVIFTDTDVMWLRSPLSRLNMSLDMQISVDRINVGGQLINTGFYHVRSNNKTISLFQKWYDMRLNSTGMKEQDVLKNLLDSGFFNQLGLNVGFLSTTEFSGFCQDSPHMGVVTTVHANCCLHIPAKVFDLTRVLRDWKRYKASHVNSKWSPHLKYLNISIKLLILHLKCGCLSYARQVFDELPKPTLSAYNYMISGYLKHGLVKELLLLVQRMSYSGEKADGYTLSMVLKASNSRGSTMILPRSLCRLVHARIIKCDVELDDVLITALVDTYVKSGKLESARTVFETMKDENVVCCTSMISGYMNQGFVEDAEEIFNTTKVKDIVVYNAMVEGFSRSGETAKRSVDMYISMQRAGFHPNISTFASVIGACSVLTSHEVGQQVHAQIMKSGVYTHIKMGSSLLDMYAKCGGINDARRVFDQMQEKNVFSWTSMIDGYGKNGNPEEALELFTRMKEFRIEPNYVTFLGALSACSHSGLVDKGYEIFESMQRDYSMKPKMEHYACIVDLMGRAGDLNKAFEFARAMPERPDSDIWAALLSSCNLHGNVELASIAASELFKLNADKRPGAYLALSNVYASNDKWDNVSKIREVMKRRRISKTIGRSWTSED

SEQ ID NO: 46138 - DNA, 1519 bp, Arabidopsis thaliana; identical to SEQ ID NO: 45000
  misc_feature (1)..(1519): Ceres Seq. ID no. 12600301
  misc_feature: MA Experiment ID: 20000307 Result: Down-regulated in Transcription
  misc_feature: MA Experiment 20000307 PARAMETER Experiment Name: At_Germinating_Seeds_Sub_P Parameter: Age (hr) Value: 24 vs. 0
  misc_feature: MA Experiment 20000307 PARAMETER Experiment Name: At_Germinating_Seeds_Sub_P Parameter: Organism Value: A. thaliana
  misc_feature: MA Experiment 20000307 PARAMETER Experiment Name: At_Germinating_Seeds_Sub_P Parameter: Plant Line Value: WS
  misc_feature: MA Experiment 20000307 PARAMETER Experiment Name: At_Germinating_Seeds_Sub_P Parameter: Tissue Value: Germinating Seeds

SEQ ID NO: 46139 - protein, 424 aa, Arabidopsis thaliana; identical to SEQ ID NO: 45001
  peptide (1)..(424): Ceres Seq. ID no. 12600302
  misc_feature (207)..(394): Pfam Name: ATPase family associated with various cellular Pfam Description: ATPase family associated with various cellular
  misc_feature (207)..(394): Pfam Name: ATPase family associated with various cellular Pfam Description: ATPase family associated with various cellular
  misc_feature (2)..(424): Homolog of NCBI NO: 1174613 NR Description: 26S PROTEASE REGULATORY SUBUNIT 6A HOMOLOG
  misc_feature (5)..(424): Homolog of NCBI NO: 3024431 NR Description: 26S protease regulatory subunit 6A homolog
  misc_feature (2)..(424): Homolog of NCBI NO: 17297989 NR Description: 26S proteasome regulatory particle triple-A
  misc_feature (1)..(424): Homolog of NCBI NO: 15217431 NR Description: 26S protease regulatory subunit 6A
  misc_feature (1)..(424): Homolog of NCBI NO: 1729860 NR Description: 26S PROTEASE REGULATORY SUBUNIT 6A HOMOLOG
  misc_feature (2)..(424): Homolog of NCBI NO: 1174613 NR Description: 26S PROTEASE REGULATORY SUBUNIT 6A HOMOLOG
  misc_feature (2)..(424): Homolog of NCBI NO: 17297989 NR Description: 26S proteasome regulatory particle triple-A
  misc_feature (1)..(424): Homolog of NCBI NO: 1729860 NR Description: 26S PROTEASE REGULATORY SUBUNIT 6A HOMOLOG
  misc_feature (1)..(424): Homolog of NCBI NO: 15230005 NR Description: 26S proteasome AAA-ATPase subunit RPT5a
  misc_feature (1)..(424): Homolog of NCBI NO: 12697589 NR Description: Tat binding protein like protein [Brassica rapa]
  misc_feature (1)..(424): Homolog of NCBI NO: 3024434 NR Description: 26S PROTEASE REGULATORY SUBUNIT 6A HOMOLOG
  misc_feature (1)..(424): Homolog of NCBI NO: 23197864 NR Description: 26S proteasome AAA-ATPase subunit RPT5a
  misc_feature (1)..(424): Homolog of NCBI NO: 5669047 NR Description: 19S proteasome regulatory complex subunit S6A
  misc_feature (1)..(424): Homolog of NCBI NO: 15217431 NR Description: 26S protease regulatory subunit 6A
  misc_feature (5)..(424): Homolog of NCBI NO: 3024431 NR Description: 26S protease regulatory subunit 6A homolog
  misc_feature (1)..(424): Homolog of NCBI NO: 5669047 NR Description: 19S proteasome regulatory complex subunit S6A
  misc_feature (1)..(424): Homolog of NCBI NO: 23197864 NR Description: 26S proteasome AAA-ATPase subunit RPT5a
  misc_feature (1)..(424): Homolog of NCBI NO: 3024434 NR Description: 26S PROTEASE REGULATORY SUBUNIT 6A HOMOLOG
  misc_feature (1)..(424): Homolog of NCBI NO: 12697589 NR Description: Tat binding protein like protein [Brassica rapa]
  misc_feature (1)..(424): Homolog of NCBI NO: 15230005 NR Description: 26S proteasome AAA-ATPase subunit RPT5a

SEQ ID NO: 46140 - protein, 420 aa, Arabidopsis thaliana; identical to SEQ ID NO: 45002
  peptide (1)..(420): Ceres Seq. ID no. 12600303
  misc_feature (203)..(390): Pfam Name: ATPase family associated with various cellular Pfam Description: ATPase family associated with various cellular
  misc_feature (203)..(390): Pfam Name: ATPase family associated with various cellular Pfam Description: ATPase family associated with various cellular
  misc_feature (1)..(420): Homolog of NCBI NO: 1174613 NR Description: 26S PROTEASE REGULATORY SUBUNIT 6A HOMOLOG
  misc_feature (1)..(420): Homolog of NCBI NO: 3024431 NR Description: 26S protease regulatory subunit 6A homolog
  misc_feature (1)..(420): Homolog of NCBI NO: 17297989 NR Description: 26S proteasome regulatory particle triple-A
  misc_feature (1)..(420): Homolog of NCBI NO: 15217431 NR Description: 26S protease regulatory subunit 6A
  misc_feature (1)..(420): Homolog of NCBI NO: 1729860 NR Description: 26S PROTEASE REGULATORY SUBUNIT 6A HOMOLOG
  misc_feature (1)..(420): Homolog of NCBI NO: 1174613 NR Description: 26S PROTEASE REGULATORY SUBUNIT 6A HOMOLOG
  misc_feature (1)..(420): Homolog of NCBI NO: 17297989 NR Description: 26S proteasome regulatory particle triple-A
  misc_feature (1)..(420): Homolog of NCBI NO: 1729860 NR Description: 26S PROTEASE REGULATORY SUBUNIT 6A HOMOLOG
  misc_feature (1)..(420): Homolog of NCBI NO: 15230005 NR Description: 26S proteasome AAA-ATPase subunit RPT5a
  misc_feature (1)..(420): Homolog of NCBI NO: 12697589 NR Description: Tat binding protein like protein [Brassica rapa]
  misc_feature (1)..(420): Homolog of NCBI NO: 3024434 NR Description: 26S PROTEASE REGULATORY SUBUNIT 6A HOMOLOG
  misc_feature (1)..(420): Homolog of NCBI NO: 23197864 NR Description: 26S proteasome AAA-ATPase subunit RPT5a
  misc_feature (1)..(420): Homolog of NCBI NO: 5669047 NR Description: 19S proteasome regulatory complex subunit S6A
  misc_feature (1)..(420): Homolog of NCBI NO: 15217431 NR Description: 26S protease regulatory subunit 6A
  misc_feature (1)..(420): Homolog of NCBI NO: 3024431 NR Description: 26S protease regulatory subunit 6A homolog
  misc_feature (1)..(420): Homolog of NCBI NO: 5669047 NR Description: 19S proteasome regulatory complex subunit S6A
  misc_feature (1)..(420): Homolog of NCBI NO: 23197864 NR Description: 26S proteasome AAA-ATPase subunit RPT5a
  misc_feature (1)..(420): Homolog of NCBI NO: 3024434 NR Description: 26S PROTEASE REGULATORY SUBUNIT 6A HOMOLOG
  misc_feature (1)..(420): Homolog of NCBI NO: 12697589 NR Description: Tat binding protein like protein [Brassica rapa]
  misc_feature (1)..(420): Homolog of NCBI NO: 15230005 NR Description: 26S proteasome AAA-ATPase subunit RPT5a

SEQ ID NO: 46141 - protein, 405 aa, Arabidopsis thaliana; identical to SEQ ID NO: 45003
  peptide (1)..(405): Ceres Seq. ID no. 12600304
  misc_feature (188)..(375): Pfam Name: ATPase family associated with various cellular Pfam Description: ATPase family associated with various cellular
  misc_feature (188)..(375): Pfam Name: ATPase family associated with various cellular Pfam Description: ATPase family associated with various cellular
  misc_feature (1)..(405): Homolog of NCBI NO: 1174613 NR Description: 26S PROTEASE REGULATORY SUBUNIT 6A HOMOLOG
  misc_feature (1)..(405): Homolog of NCBI NO: 3024431 NR Description: 26S protease regulatory subunit 6A homolog
  misc_feature (1)..(405): Homolog of NCBI NO: 17297989 NR Description: 26S proteasome regulatory particle triple-A
  misc_feature (1)..(405): Homolog of NCBI NO: 15217431 NR Description: 26S protease regulatory subunit 6A
  misc_feature (1)..(405): Homolog of NCBI NO: 1729860 NR Description: 26S PROTEASE REGULATORY SUBUNIT 6A HOMOLOG
  misc_feature (1)..(405): Homolog of NCBI NO: 1174613 NR Description: 26S PROTEASE REGULATORY SUBUNIT 6A HOMOLOG
  misc_feature (1)..(405): Homolog of NCBI NO: 17297989 NR Description: 26S proteasome regulatory particle triple-A
  misc_feature (1)..(405): Homolog of NCBI NO: 1729860 NR Description: 26S PROTEASE REGULATORY SUBUNIT 6A HOMOLOG
  misc_feature (1)..(405): Homolog of NCBI NO: 15230005 NR Description: 26S proteasome AAA-ATPase subunit RPT5a
  misc_feature (1)..(405): Homolog of NCBI NO: 12697589 NR Description: Tat binding protein like protein [Brassica rapa]
  misc_feature (1)..(405): Homolog of NCBI NO: 3024434 NR Description: 26S PROTEASE REGULATORY SUBUNIT 6A HOMOLOG
  misc_feature (1)..(405): Homolog of NCBI NO: 23197864 NR Description: 26S proteasome AAA-ATPase subunit RPT5a
  misc_feature (1)..(405): Homolog of NCBI NO: 5669047 NR Description: 19S proteasome regulatory complex subunit S6A
  misc_feature (1)..(405): Homolog of NCBI NO: 15217431 NR Description: 26S protease regulatory subunit 6A
  misc_feature (1)..(405): Homolog of NCBI NO: 3024431 NR Description: 26S protease regulatory subunit 6A homolog
  misc_feature (1)..(405): Homolog of NCBI NO: 5669047 NR Description: 19S proteasome regulatory complex subunit S6A
  misc_feature (1)..(405): Homolog of NCBI NO: 23197864 NR Description: 26S proteasome AAA-ATPase subunit RPT5a
  misc_feature (1)..(405): Homolog of NCBI NO: 3024434 NR Description: 26S PROTEASE REGULATORY SUBUNIT 6A HOMOLOG
  misc_feature (1)..(405): Homolog of NCBI NO: 12697589 NR Description: Tat binding protein like protein [Brassica rapa]
  misc_feature (1)..(405): Homolog of NCBI NO: 15230005 NR Description: 26S proteasome AAA-ATPase subunit RPT5a

SEQ ID NO: 46142 - DNA, 1978 bp, Arabidopsis thaliana
  misc_feature (1)..(1978): Ceres Seq. ID no. 13578537
  misc_feature: MA Experiment ID: 20000171 Result: Down-regulated in Transcription
  misc_feature: MA Experiment 20000171 PARAMETER Experiment Name: At_42deg_Heat_P Parameter: Age (day) Value: 14
  misc_feature: MA Experiment 20000171 PARAMETER Experiment Name: At_42deg_Heat_P Parameter: Organism Value: A. thaliana
  misc_feature: MA Experiment 20000171 PARAMETER Experiment Name: At_42deg_Heat_P Parameter: Plant Line Value: WS
  misc_feature: MA Experiment 20000171 PARAMETER Experiment Name: At_42deg_Heat_P Parameter: Temperature (deg C) Value: 42 vs. 22
  misc_feature: MA Experiment 20000171 PARAMETER Experiment Name: At_42deg_Heat_P Parameter: Timepoint (hr) Value: 1
  misc_feature: MA Experiment 20000171 PARAMETER Experiment Name: At_42deg_Heat_P Parameter: Tissue Value: Aerial
gtaaaggatatataaaaaaacaagtcttcatttttctctcactgtccattgcaattgtagttttatattcacagatccaaagtcctttcattttcttggattctgattctcccacagtttcatttcttcttgtgtggggaaatctgcatctttgtccactctcttttattttcccaagaaaggaaacaaattcccacaatttcttgtcttctcttaaagttcttcttaagttgaagcttcttgtctgtttttgagatttccagtaagaagaaacttcgctaattttcccgcggaaattctcttacaatcataaagttttctttttttttgctctcgagaaagttttgagaatttttacttcttcaatggcgtcaagagaagtatcaacgatgatcaaacaagggtttatcgcagacccttctctctctttttctccgtcaagaatctcatctccgattaaactctccaccgcctctcctcctcttcctccgccacctcctccgccaccaaacgaatcgactctctcaaacccgactcttttcgatatgatgtcagacgagcacaaccgcgagctaccaaggaggaaatctcacgcgcgcgtggctcaaatcttgacggagttcaagaacggcgtcgtttacggccacagcctcgggccaggagacgttaagctgactgtggtgggcaaagacggttacagagtcactatggatgttcatcggaaggttttatctgagaagagtaggttttttatggagaagatgaattctagaagagagaaaggagtttctcacatggtggagataagtgagtgtgatgatttagagatttatgtagagactgttgttttgatgtatagtgatgatctcaagaagaagttgatcggtgaaaatgtcatcaaaatcttggctttactcaaggtttctgcagctatctcgtttgatgaaggcgttatgtcatgtttggagcatttggaagctgtaccatggtcagaagatgaagaagagactgttgtgacttgtcttgaagagcttcatcttcctgatgattctgtcactttgattcttcagagagtttcatctcaaccttcgacttcctcaacgagaactagaactgatgatatcttttcgaagcttctcactggtgttctacaagcgaaagatgataaagctcggcgagagatgaaagttttgatctttaaattggttagagaagaagccgattatgatgtctctagagacacactctatggtttgtgccatcgatgtctcacgtctcttgtgctttgcttatctgaagtgaccacacagatgaatgatccggggaaagaccgtggtgctctgatgggagaaatcgccagagaagctgataacatgctgtggatggtagatatattgattgagaagaaactgtgcagtgagtttgtgaaactatgggcggatcaaaaggagctagcgaatcttcattccaagatcccaacgatgtacagacacgaaataagcaagatcaccgcgcagatatgtgttggtattggtaaaggaaggatcttggtgaatcgggagactaggtttgcggttctgaatacatggttagaggctttgtatgatgatttcgggtggatgagacggttatcctcgagatctctggataggaaactggtggaggatggactcagccagaccatattgactttgtcgttgagacaacaacaagtgattctgatgaaatggtttgatcggtttctgagcaaaggtgatgattgtccaaatgtgcaacgagcatttgaggtgtggtggagaagagctttcataagacaggtcttgacagagcccgatgagcctcggctgcagattacactctattgactaactcaatatagaataagattgtagaccctcaaaatgacaaatctttgttttcttacttttggtaaactgttactacttgtgaatttcaatgagataccaaggttcaaaag

SEQ ID NO: 46143 - protein, 499 aa, Arabidopsis thaliana
  peptide (1)..(499): Ceres Seq. ID no. 13578538
  misc_feature (1)..(483): Homolog of NCBI NO: 34900946 NR Description: putative PRLI-interacting factor G
  misc_feature (1)..(483): Homolog of NCBI NO: 34394507 NR Description: PRLI-interacting factor G-like protein
  misc_feature (7)..(491): Homolog of NCBI NO: 40539077 NR Description: expressed protein [Oryza sativa (japonica
  misc_feature (12)..(483): Homolog of NCBI NO: 15230303 NR Description: expressed protein [Arabidopsis thaliana]
  misc_feature (41)..(72): Homolog of NCBI NO: 32488518 NR Description: OSJNBa0011J08.25 [Oryza sativa (japonica
  misc_feature (135)..(497): Homolog of NCBI NO: 32488518 NR Description: OSJNBa0011J08.25 [Oryza sativa (japonica
  misc_feature (15)..(484): Homolog of NCBI NO: 38230508 NR Description: predicted protein [Populus alba x Populus tremula]
  misc_feature (17)..(65): Homolog of NCBI NO: 15222554 NR Description: expressed protein [Arabidopsis thaliana]
  misc_feature (100)..(497): Homolog of NCBI NO: 15222554 NR Description: expressed protein [Arabidopsis thaliana]
  misc_feature (1)..(499): Homolog of NCBI NO: 15238599 NR Description: expressed protein [Arabidopsis thaliana]
MASREVSTMIKQGFIADPSLSFSPSRISSPIKLSTASPPLPPPPPPPPNESTLSNPTLFDMMSDEHNRELPRRKSHARVAQILTEFKNGVVYGHSLGPGDVKLTVVGKDGYRVTMDVHRKVLSEKSRFFMEKMNSRREKGVSHMVEISECDDLEIYVETVVLMYSDDLKKKLIGENVIKILALLKVSAAISFDEGVMSCLEHLEAVPWSEDEEETVVTCLEELHLPDDSVTLILQRVSSQPSTSSTRTRTDDIFSKLLTGVLQAKDDKARREMKVLIFKLVREEADYDVSRDTLYGLCHRCLTSLVLCLSEVTTQMNDPGKDRGALMGEIAREADNMLWMVDILIEKKLCSEFVKLWADQKELANLHSKIPTMYRHEISKITAQICVGIGKGRILVNRETRFAVLNTWLEALYDDFGWMRRLSSRSLDRKLVEDGLSQTILTLSLRQQQVILMKWFDRFLSKGDDCPNVQRAFEVWWRRAFIRQVLTEPDEPRLQITLY

SEQ ID NO: 46144 - protein, 491 aa, Arabidopsis thaliana
  peptide (1)..(491): Ceres Seq. ID no. 13578539
  misc_feature (1)..(475): Homolog of NCBI NO: 34900946 NR Description: putative PRLI-interacting factor G
  misc_feature (1)..(475): Homolog of NCBI NO: 34394507 NR Description: PRLI-interacting factor G-like protein
  misc_feature (1)..(483): Homolog of NCBI NO: 40539077 NR Description: expressed protein [Oryza sativa (japonica
  misc_feature (4)..(475): Homolog of NCBI NO: 15230303 NR Description: expressed protein [Arabidopsis thaliana]
  misc_feature (33)..(64): Homolog of NCBI NO: 32488518 NR Description: OSJNBa0011J08.25 [Oryza sativa (japonica
  misc_feature (127)..(489): Homolog of NCBI NO: 32488518 NR Description: OSJNBa0011J08.25 [Oryza sativa (japonica
  misc_feature (7)..(476): Homolog of NCBI NO: 38230508 NR Description: predicted protein [Populus alba x Populus tremula]
  misc_feature (9)..(57): Homolog of NCBI NO: 15222554 NR Description: expressed protein [Arabidopsis thaliana]
  misc_feature (92)..(489): Homolog of NCBI NO: 15222554 NR Description: expressed protein [Arabidopsis thaliana]
  misc_feature (1)..(491): Homolog of NCBI NO: 15238599 NR Description: expressed protein [Arabidopsis thaliana]
MIKQGFIADPSLSFSPSRISSPIKLSTASPPLPPPPPPPPNESTLSNPTLFDMMSDEHNRELPRRKSHARVAQILTEFKNGVVYGHSLGPGDVKLTVVGKDGYRVTMDVHRKVLSEKSRFFMEKMNSRREKGVSHMVEISECDDLEIYVETVVLMYSDDLKKKLIGENVIKILALLKVSAAISFDEGVMSCLEHLEAVPWSEDEEETVVTCLEELHLPDDSVTLILQRVSSQPSTSSTRTRTDDIFSKLLTGVLQAKDDKARREMKVLIFKLVREEADYDVSRDTLYGLCHRCLTSLVLCLSEVTTQMNDPGKDRGALMGEIAREADNMLWMVDILIEKKLCSEFVKLWADQKELANLHSKIPTMYRHEISKITAQICVGIGKGRILVNRETRFAVLNTWLEALYDDFGWMRRLSSRSLDRKLVEDGLSQTILTLSLRQQQVILMKWFDRFLSKGDDCPNVQRAFEVWWRRAFIRQVLTEPDEPRLQITLY

SEQ ID NO: 46145 - protein, 439 aa, Arabidopsis thaliana
  peptide (1)..(439): Ceres Seq. ID no. 13578540
  misc_feature (31)..(425): Homolog of NCBI NO: 18397316 NR Description: f13j11 PRLI-interacting factor G -related
  misc_feature (1)..(423): Homolog of NCBI NO: 34900946 NR Description: putative PRLI-interacting factor G
  misc_feature (1)..(423): Homolog of NCBI NO: 34394507 NR Description: PRLI-interacting factor G-like protein
  misc_feature (1)..(431): Homolog of NCBI NO: 40539077 NR Description: expressed protein [Oryza sativa (japonica
  misc_feature (1)..(423): Homolog of NCBI NO: 15230303 NR Description: expressed protein [Arabidopsis thaliana]
  misc_feature (1)..(12): Homolog of NCBI NO: 32488518 NR Description: OSJNBa0011J08.25 [Oryza sativa (japonica
  misc_feature (75)..(437): Homolog of NCBI NO: 32488518 NR Description: OSJNBa0011J08.25 [Oryza sativa (japonica
  misc_feature (1)..(424): Homolog of NCBI NO: 38230508 NR Description: predicted protein [Populus alba x Populus tremula]
  misc_feature (40)..(437): Homolog of NCBI NO: 15222554 NR Description: expressed protein [Arabidopsis thaliana]
  misc_feature (1)..(439): Homolog of NCBI NO: 15238599 NR Description: expressed protein [Arabidopsis thaliana]
MMSDEHNRELPRRKSHARVAQILTEFKNGVVYGHSLGPGDVKLTVVGKDGYRVTMDVHRKVLSEKSRFFMEKMNSRREKGVSHMVEISECDDLEIYVETVVLMYSDDLKKKLIGENVIKILALLKVSAAISFDEGVMSCLEHLEAVPWSEDEEETVVTCLEELHLPDDSVTLILQRVSSQPSTSSTRTRTDDIFSKLLTGVLQAKDDKARREMKVLIFKLVREEADYDVSRDTLYGLCHRCLTSLVLCLSEVTTQMNDPGKDRGALMGEIAREADNMLWMVDILIEKKLCSEFVKLWADQKELANLHSKIPTMYRHEISKITAQICVGIGKGRILVNRETRFAVLNTWLEALYDDFGWMRRLSSRSLDRKLVEDGLSQTILTLSLRQQQVILMKWFDRFLSKGDDCPNVQRAFEVWWRRAFIRQVLTEPDEPRLQITLY

SEQ ID NO: 46146 - DNA, 804 bp, Arabidopsis thaliana; identical to SEQ ID NO: 43806
  misc_feature (1)..(804): Ceres Seq. ID no. 12601213
  misc_feature: MA Experiment ID: 20000227 Result: Up-regulated in Transcription
  misc_feature: MA Experiment 20000227 PARAMETER Experiment Name: At_Root-Tips-vs-Tops_P Parameter: Tissue Value: Root Tips vs. Root Tops
  misc_feature: MA Experiment ID: 20000794 Result: Down-regulated in Transcription
  misc_feature: MA Experiment 20000794 PARAMETER Experiment Name: At_Petals_P Parameter: Age (day) Value: 23-25 days
  misc_feature: MA Experiment 20000794 PARAMETER Experiment Name: At_Petals_P Parameter: Plant Line Value: WS
  misc_feature: MA Experiment 20000794 PARAMETER Experiment Name: At_Petals_P Parameter: Tissue Value: Petals vs. Whole plant

SEQ ID NO: 46147 - protein, 217 aa, Arabidopsis thaliana; identical to SEQ ID NO: 43807
  peptide (1)..(217): Ceres Seq. ID no. 12601214
  misc_feature (11)..(158): Pfam Name: Ribosomal protein L19e Pfam Description: Ribosomal protein L19e
  misc_feature (11)..(158): Pfam Name: Ribosomal protein L19e Pfam Description: Ribosomal protein L19e
  misc_feature (10)..(191): Homolog of NCBI NO: 28630352 NR Description: ribosomal protein L19 [Branchiostoma lanceolatum]
  misc_feature (10)..(191): Homolog of NCBI NO: 28200276 NR Description: ribosomal protein L19 [Branchiostoma belcheri
  misc_feature (10)..(194): Homolog of NCBI NO: 32401377 NR Description: ribosomal protein L19 [Triticum aestivum]
  misc_feature (10)..(217): Homolog of NCBI NO: 29837764 NR Description: putative ribosomal protein L19
  misc_feature (10)..(217): Homolog of NCBI NO: 40287526 NR Description: 60S ribosomal protein L19 [Capsicum annuum]
  misc_feature (10)..(191): Homolog of NCBI NO: 28630352 NR Description: ribosomal protein L19 [Branchiostoma lanceolatum]
  misc_feature (10)..(194): Homolog of NCBI NO: 32401377 NR Description: ribosomal protein L19 [Triticum aestivum]
  misc_feature (10)..(217): Homolog of NCBI NO: 40287526 NR Description: 60S ribosomal protein L19 [Capsicum annuum]
  misc_feature (10)..(217): Homolog of NCBI NO: 15235290 NR Description: putative ribosomal protein L19
  misc_feature (10)..(209): Homolog of NCBI NO: 7440943 NR Description: ribosomal protein L19.T2H3.3 - Arabidopsis
  misc_feature (10)..(217): Homolog of NCBI NO: 15218602 NR Description: ribosomal protein L19, putative
  misc_feature (10)..(217): Homolog of NCBI NO: 18087585 NR Description: At1g02780/T14P4_3 [Arabidopsis thaliana]
  misc_feature (10)..(217): Homolog of NCBI NO: 15228314 NR Description: putative ribosomal protein
  misc_feature (10)..(217): Homolog of NCBI NO: 29837764 NR Description: putative ribosomal protein L19
  misc_feature (10)..(191): Homolog of NCBI NO: 28200276 NR Description: ribosomal protein L19 [Branchiostoma belcheri
  misc_feature (10)..(217): Homolog of NCBI NO: 15228314 NR Description: putative ribosomal protein
  misc_feature (10)..(217): Homolog of NCBI NO: 18087585 NR Description: At1g02780/T14P4_3 [Arabidopsis thaliana]
  misc_feature (10)..(217): Homolog of NCBI NO: 15218602 NR Description: ribosomal protein L19, putative
  misc_feature (10)..(209): Homolog of NCBI NO: 7440943 NR Description: ribosomal protein L19.T2H3.3 - Arabidopsis
  misc_feature (10)..(217): Homolog of NCBI NO: 15235290 NR Description: putative ribosomal protein L19

SEQ ID NO: 46148 - protein, 208 aa, Arabidopsis thaliana; identical to SEQ ID NO: 43808
  peptide (1)..(208): Ceres Seq. ID no. 12601215
  misc_feature (2)..(149): Pfam Name: Ribosomal protein L19e Pfam Description: Ribosomal protein L19e
  misc_feature (2)..(149): Pfam Name: Ribosomal protein L19e Pfam Description: Ribosomal protein L19e
  misc_feature (1)..(182): Homolog of NCBI NO: 28630352 NR Description: ribosomal protein L19 [Branchiostoma lanceolatum]
  misc_feature (1)..(182): Homolog of NCBI NO: 28200276 NR Description: ribosomal protein L19 [Branchiostoma belcheri
  misc_feature (1)..(185): Homolog of NCBI NO: 32401377 NR Description: ribosomal protein L19 [Triticum aestivum]
  misc_feature (1)..(208): Homolog of NCBI NO: 29837764 NR Description: putative ribosomal protein L19
  misc_feature (1)..(208): Homolog of NCBI NO: 40287526 NR Description: 60S ribosomal protein L19 [Capsicum annuum]
  misc_feature (1)..(182): Homolog of NCBI NO: 28630352 NR Description: ribosomal protein L19 [Branchiostoma lanceolatum]
  misc_feature (1)..(185): Homolog of NCBI NO: 32401377 NR Description: ribosomal protein L19 [Triticum aestivum]
  misc_feature (1)..(208): Homolog of NCBI NO: 40287526 NR Description: 60S ribosomal protein L19 [Capsicum annuum]
  misc_feature (1)..(208): Homolog of NCBI NO: 15235290 NR Description: putative ribosomal protein L19
  misc_feature (1)..(200): Homolog of NCBI NO: 7440943 NR Description: ribosomal protein L19.T2H3.3 - Arabidopsis
  misc_feature (1)..(208): Homolog of NCBI NO: 15218602 NR Description: ribosomal protein L19, putative
  misc_feature (1)..(208): Homolog of NCBI NO: 18087585 NR Description: At1g02780/T14P4_3 [Arabidopsis thaliana]
  misc_feature (1)..(208): Homolog of NCBI NO: 15228314 NR Description: putative ribosomal protein
  misc_feature (1)..(208): Homolog of NCBI NO: 29837764 NR Description: putative ribosomal protein L19
  misc_feature (1)..(182): Homolog of NCBI NO: 28200276 NR Description: ribosomal protein L19 [Branchiostoma belcheri
  misc_feature (1)..(208): Homolog of NCBI NO: 15228314 NR Description: putative ribosomal protein
  misc_feature (1)..(208): Homolog of NCBI NO: 18087585 NR Description: At1g02780/T14P4_3 [Arabidopsis thaliana]
  misc_feature (1)..(208): Homolog of NCBI NO: 15218602 NR Description: ribosomal protein L19, putative
  misc_feature (1)..(200): Homolog of NCBI NO: 7440943 NR Description: ribosomal protein L19.T2H3.3 - Arabidopsis
  misc_feature (1)..(208): Homolog of NCBI NO: 15235290 NR Description: putative ribosomal protein L19

SEQ ID NO: 46149 - protein, 175 aa, Arabidopsis thaliana; identical to SEQ ID NO: 43809
  peptide (1)..(175): Ceres Seq. ID no. 12601216
  misc_feature (1)..(116): Pfam Name: Ribosomal protein L19e Pfam Description: Ribosomal protein L19e
  misc_feature (1)..(116): Pfam Name: Ribosomal protein L19e Pfam Description: Ribosomal protein L19e
  misc_feature (1)..(149): Homolog of NCBI NO: 28630352 NR Description: ribosomal protein L19 [Branchiostoma lanceolatum]
  misc_feature (1)..(149): Homolog of NCBI NO: 28200276 NR Description: ribosomal protein L19 [Branchiostoma belcheri
  misc_feature (1)..(152): Homolog of NCBI NO: 32401377 NR Description: ribosomal protein L19 [Triticum aestivum]
  misc_feature (1)..(175): Homolog of NCBI NO: 29837764 NR Description: putative ribosomal protein L19
  misc_feature (1)..(175): Homolog of NCBI NO: 40287526 NR Description: 60S ribosomal protein L19 [Capsicum annuum]
  misc_feature (1)..(149): Homolog of NCBI NO: 28630352 NR Description: ribosomal protein L19 [Branchiostoma lanceolatum]
  misc_feature (1)..(152): Homolog of NCBI NO: 32401377 NR Description: ribosomal protein L19 [Triticum aestivum]
  misc_feature (1)..(175): Homolog of NCBI NO: 40287526 NR Description: 60S ribosomal protein L19 [Capsicum annuum]
  misc_feature (1)..(175): Homolog of NCBI NO: 15235290 NR Description: putative ribosomal protein L19
  misc_feature (1)..(167): Homolog of NCBI NO: 7440943 NR Description: ribosomal protein L19.T2H3.3 - Arabidopsis
  misc_feature (1)..(175): Homolog of NCBI NO: 15218602 NR Description: ribosomal protein L19, putative
  misc_feature (1)..(175): Homolog of NCBI NO: 18087585 NR Description: At1g02780/T14P4_3 [Arabidopsis thaliana]
  misc_feature (1)..(175): Homolog of NCBI NO: 15228314 NR Description: putative ribosomal protein
  misc_feature (1)..(175): Homolog of NCBI NO: 29837764 NR Description: putative ribosomal protein L19
  misc_feature (1)..(149): Homolog of NCBI NO: 28200276 NR Description: ribosomal protein L19 [Branchiostoma belcheri
  misc_feature (1)..(175): Homolog of NCBI NO: 15228314 NR Description: putative ribosomal protein
  misc_feature (1)..(175): Homolog of NCBI NO: 18087585 NR Description: At1g02780/T14P4_3 [Arabidopsis thaliana]
  misc_feature (1)..(175): Homolog of NCBI NO: 15218602 NR Description: ribosomal protein L19, putative
  misc_feature (1)..(167): Homolog of NCBI NO: 7440943 NR Description: ribosomal protein L19.T2H3.3 - Arabidopsis
  misc_feature (1)..(175): Homolog of NCBI NO: 15235290 NR Description: putative ribosomal protein L19

SEQ ID NO: 46150 - DNA, 1480 bp, Arabidopsis thaliana
  misc_feature (1)..(1480): Ceres Seq. ID no. 13579138
  misc_feature: MA Experiment ID: 20000185 Result: Up-regulated in Transcription
  misc_feature: MA Experiment 20000185 PARAMETER Experiment Name: At_Roots__P Parameter: Age (day) Value: 7 vs. 21
  misc_feature: MA Experiment 20000185 PARAMETER Experiment Name: At_Roots__P Parameter: Organism Value: A. thaliana
  misc_feature: MA Experiment 20000185 PARAMETER Experiment Name: At_Roots__P Parameter: Tissue Value: Roots vs. Whole Plant
  misc_feature: MA Experiment ID: 20000439 Result: Up-regulated in Transcription
  misc_feature: MA Experiment 20000439 PARAMETER Experiment Name: At_Roots__P Parameter: Age (day) Value: 14 vs. 21
  misc_feature: MA Experiment 20000439 PARAMETER Experiment Name: At_Roots__P Parameter: Organism Value: A. thaliana
  misc_feature: MA Experiment 20000439 PARAMETER Experiment Name: At_Roots__P Parameter: Tissue Value: Roots vs. Whole Plant
  misc_feature: MA Experiment ID: 20000496 Result: Down-regulated in Transcription
  misc_feature: MA Experiment 20000496 PARAMETER Experiment Name: At_Guard_Cells_P Parameter: Harvest Date Value: 7/19/2002
  misc_feature: MA Experiment 20000496 PARAMETER Experiment Name: At_Guard_Cells_P Parameter: Organism Value: Canola
  misc_feature: MA Experiment 20000496 PARAMETER Experiment Name: At_Guard_Cells_P Parameter: Tissue Value: Guard Cells vs. Leaves
gaaaggaagcattaaacacaagaatagagagagaagaaagaagaagacgatgaaagcagaagcagagatcatcttcgttacatatccatcccctggtcatcttcttgtctccattgaattcgctaaatctctcatcaaacgtgatgatcgcatccacaccatcaccatcctctactgggctttacctctcgctcctcaagcccaccttttcgctaagtccctcgttgcttcacagcctcgaatccgtctccttgcgttgcctgatgttcaaaaccctccaccattggaactcttctttaaagctcccgaagcttatattcttgagtccaccaagaaaacagttcctttagtcagagacgctctctccactctagtttcttcacgtaaagaatccggttcggttcgtgtagtcggtttggttatcgattttttttgtgttccaatgatcgaagtggcaaacgagcttaaccttccttcttacatcttcctaacgtgtaacgctgggtttttaagtatgatgaagtatctccctgagagacatcgcataaccacttctgagctagatttaagctccggcaacgtagaacatccaattcctggctacgtctgctccgtgccgacgaaggttttgcctccaggtctattcgtgagagagtcctacgaggcttgggtcgagattgcagagaagttccctggagccaagggcattttggtaaactcagtcacatgtcttgagcagaatgcatttgattacttcgctcgtcttgatgagaactatcctccggtttacccggtcggaccggttcttagtttgaaggatcgtccgtctccaaatctggacgcatcggaccgggatcggatcatgagatggctcgaggaccagccggagtcgtcaattgtgtatatctgcttcggaagcctcggaatcattggcaagctgcagattgaagagatagctgaagccttggaactcaccggccacaggtttctttggtcaatacgtacaaatccgacggagaaagcgagcccgtacgatctgttgccggagggatttctcgatcggacggccagtaagggattggtgtgtgattgggccccgcaagtagaagttctggcccataaagcgctcggaggattcgtgtctcactgcggttggaactctgtactggagagcttatggttcggtgttccgatcgccacgtggccaatgtacgctgagcaacagttaaacgcattctcgatggtgaaggagttagggttagccgtggagctgcgtttagactacgtttcggcgtacggagagatagtaaaagctgaggagatcgcgggagccatacgatcattgatggacggtgaggatacgccgaggaagagagtgaaggagatggcggaagcggcgaggaatgctttgatggacggaggatcttcgtttgttgcggttaaacgatttctcgacgagttgatcggcggagatgtttag

SEQ ID NO: 46151 - protein, 492 aa, Arabidopsis thaliana
  peptide (1)..(492): Ceres Seq. ID no. 13579139
  misc_feature (41)..(491): Pfam Name: UDP-glucoronosyl and UDP-glucosyl transferase Pfam Description: UDP-glucoronosyl and UDP-glucosyl transferase
  misc_feature (14)..(484): Homolog of NCBI NO: 20146091 NR Description: glucosyltransferase NTGT3 [Nicotiana tabacum]
  misc_feature (21)..(489): Homolog of NCBI NO: 21555082 NR Description: putative flavonol 3-O-glucosyltransferase
  misc_feature (21)..(489): Homolog of NCBI NO: 15227606 NR Description: UDP-glycosyltransferase family [Arabidopsis
  misc_feature (22)..(489): Homolog of NCBI NO: 15227610 NR Description: UDP-glycosyltransferase family [Arabidopsis
  misc_feature (17)..(489): Homolog of NCBI NO: 15222344 NR Description: UDP-glycosyltransferase family [Arabidopsis
  misc_feature (34)..(487): Homolog of NCBI NO: 21954072 NR Description: putative UDP-glucose glucosyltransferase
  misc_feature (17)..(487): Homolog of NCBI NO: 30680040 NR Description: glycosyltransferase family [Arabidopsis thaliana]
  misc_feature (20)..(490): Homolog of NCBI NO: 15227616 NR Description: glycosyltransferase family [Arabidopsis thaliana]
  misc_feature (20)..(487): Homolog of NCBI NO: 15227613 NR Description: glycosyltransferase family [Arabidopsis thaliana]
  misc_feature (17)..(492): Homolog of NCBI NO: 15222348 NR Description: UDP-glycosyltransferase family [Arabidopsis
KGSIKHKNRERRKKKTMKAEAEIIFVTYPSPGHLLVSIEFAKSLIKRDDRIHTITILYWALPLAPQAHLFAKSLVASQPRIRLLALPDVQNPPPLELFFKAPEAYILESTKKTVPLVRDALSTLVSSRKESGSVRVVGLVIDFFCVPMIEVANELNLPSYIFLTCNAGFLSMMKYLPERHRITTSELDLSSGNVEHPIPGYVCSVPTKVLPPGLFVRESYEAWVEIAEKFPGAKGILVNSVTCLEQNAFDYFARLDENYPPVYPVGPVLSLKDRPSPNLDASDRDRIMRWLEDQPESSIVYICFGSLGIIGKLQIEEIAEALELTGHRFLWSIRTNPTEKASPYDLLPEGFLDRTASKGLVCDWAPQVEVLAHKALGGFVSHCGWNSVLESLWFGVPIATWPMYAEQQLNAFSMVKELGLAVELRLDYVSAYGEIVKAEEIAGAIRSLMDGEDTPRKRVKEMAEAARNALMDGGSSFVAVKRFLDELIGGDV

SEQ ID NO: 46152 - protein, 476 aa, Arabidopsis thaliana
  peptide (1)..(476): Ceres Seq. ID no. 13579140
  misc_feature (25)..(475): Pfam Name: UDP-glucoronosyl and UDP-glucosyl transferase Pfam Description: UDP-glucoronosyl and UDP-glucosyl transferase
  misc_feature (1)..(468): Homolog of NCBI NO: 20146091 NR Description: glucosyltransferase NTGT3 [Nicotiana tabacum]
  misc_feature (5)..(473): Homolog of NCBI NO: 21555082 NR Description: putative flavonol 3-O-glucosyltransferase
  misc_feature (5)..(473): Homolog of NCBI NO: 15227606 NR Description: UDP-glycosyltransferase family [Arabidopsis
  misc_feature (6)..(473): Homolog of NCBI NO: 15227610 NR Description: UDP-glycosyltransferase family [Arabidopsis
  misc_feature (1)..(473): Homolog of NCBI NO: 15222344 NR Description: UDP-glycosyltransferase family [Arabidopsis
  misc_feature (18)..(471): Homolog of NCBI NO: 21954072 NR Description: putative UDP-glucose glucosyltransferase
  misc_feature (1)..(471): Homolog of NCBI NO: 30680040 NR Description: glycosyltransferase family [Arabidopsis thaliana]
  misc_feature (4)..(474): Homolog of NCBI NO: 15227616 NR Description: glycosyltransferase family [Arabidopsis thaliana]
  misc_feature (4)..(471): Homolog of NCBI NO: 15227613 NR Description: glycosyltransferase family [Arabidopsis thaliana]
  misc_feature (1)..(476): Homolog of NCBI NO: 15222348 NR Description: UDP-glycosyltransferase family [Arabidopsis
MKAEAEIIFVTYPSPGHLLVSIEFAKSLIKRDDRIHTITILYWALPLAPQAHLFAKSLVASQPRIRLLALPDVQNPPPLELFFKAPEAYILESTKKTVPLVRDALSTLVSSRKESGSVRVVGLVIDFFCVPMIEVANELNLPSYIFLTCNAGFLSMMKYLPERHRITTSELDLSSGNVEHPIPGYVCSVPTKVLPPGLFVRESYEAWVEIAEKFPGAKGILVNSVTCLEQNAFDYFARLDENYPPVYPVGPVLSLKDRPSPNLDASDRDRIMRWLEDQPESSIVYICFGSLGIIGKLQIEEIAEALELTGHRFLWSIRTNPTEKASPYDLLPEGFLDRTASKGLVCDWAPQVEVLAHKALGGFVSHCGWNSVLESLWFGVPIATWPMYAEQQLNAFSMVKELGLAVELRLDYVSAYGEIVKAEEIAGAIRSLMDGEDTPRKRVKEMAEAARNALMDGGSSFVAVKRFLDELIGGDV

SEQ ID NO: 46153 - protein, 345 aa, Arabidopsis thaliana
  peptide (1)..(345): Ceres Seq. ID no. 13579141
  misc_feature (1)..(344): Pfam Name: UDP-glucoronosyl and UDP-glucosyl transferase Pfam Description: UDP-glucoronosyl and UDP-glucosyl transferase
  misc_feature (1)..(337): Homolog of NCBI NO: 20146091 NR Description: glucosyltransferase NTGT3 [Nicotiana tabacum]
  misc_feature (1)..(342): Homolog of NCBI NO: 21555082 NR Description: putative flavonol 3-O-glucosyltransferase
  misc_feature (1)..(342): Homolog of NCBI NO: 15227606 NR Description: UDP-glycosyltransferase family [Arabidopsis
  misc_feature (1)..(342): Homolog of NCBI NO: 15227610 NR Description: UDP-glycosyltransferase family [Arabidopsis
  misc_feature (1)..(342): Homolog of NCBI NO: 15222344 NR Description: UDP-glycosyltransferase family [Arabidopsis
  misc_feature (1)..(340): Homolog of NCBI NO: 21954072 NR Description: putative UDP-glucose glucosyltransferase
  misc_feature (1)..(340): Homolog of NCBI NO: 30680040 NR Description: glycosyltransferase family [Arabidopsis thaliana]
  misc_feature (1)..(343): Homolog of NCBI NO: 15227616 NR Description: glycosyltransferase family [Arabidopsis thaliana]
  misc_feature (1)..(340): Homolog of NCBI NO: 15227613 NR Description: glycosyltransferase family [Arabidopsis thaliana]
  misc_feature (1)..(345): Homolog of NCBI NO: 15222348 NR Description: UDP-glycosyltransferase family [Arabidopsis
MIEVANELNLPSYIFLTCNAGFLSMMKYLPERHRITTSELDLSSGNVEHPIPGYVCSVPTKVLPPGLFVRESYEAWVEIAEKFPGAKGILVNSVTCLEQNAFDYFARLDENYPPVYPVGPVLSLKDRPSPNLDASDRDRIMRWLEDQPESSIVYICFGSLGIIGKLQIEEIAEALELTGHRFLWSIRTNPTEKASPYDLLPEGFLDRTASKGLVCDWAPQVEVLAHKALGGFVSHCGWNSVLESLWFGVPIATWPMYAEQQLNAFSMVKELGLAVELRLDYVSAYGEIVKAEEIAGAIRSLMDGEDTPRKRVKEMAEAARNALMDGGSSFVAVKRFLDELIGGDV

SEQ ID NO: 46154 - DNA, 1193 bp, Arabidopsis thaliana
  misc_feature (1)..(1193): Ceres Seq. ID no. 12574427
  misc_feature: MA Experiment ID: 20000173 Result: Down-regulated in Transcription
  misc_feature: MA Experiment 20000173 PARAMETER Experiment Name: At_42deg_Heat_P Parameter: Age (day) Value: 14
  misc_feature: MA Experiment 20000173 PARAMETER Experiment Name: At_42deg_Heat_P Parameter: Organism Value: A. thaliana
  misc_feature: MA Experiment 20000173 PARAMETER Experiment Name: At_42deg_Heat_P Parameter: Plant Line Value: WS
  misc_feature: MA Experiment 20000173 PARAMETER Experiment Name: At_42deg_Heat_P Parameter: Temperature (deg C) Value: 42 vs. 22
  misc_feature: MA Experiment 20000173 PARAMETER Experiment Name: At_42deg_Heat_P Parameter: Timepoint (hr) Value: 6
  misc_feature: MA Experiment 20000173 PARAMETER Experiment Name: At_42deg_Heat_P Parameter: Tissue Value: Aerial
  misc_feature: MA Experiment ID: 20000180 Result: Up-regulated in Transcription
  misc_feature: MA Experiment 20000180 PARAMETER Experiment Name: At_Germinating_Seeds_P Parameter: Age (hr) Value: 24 vs. 0
  misc_feature: MA Experiment 20000180 PARAMETER Experiment Name: At_Germinating_Seeds_P Parameter: Tissue Value: Germinating Seeds
  misc_feature: MA Experiment ID: 20000213 Result: Up-regulated in Transcription
  misc_feature: MA Experiment 20000213 PARAMETER Experiment Name: At_4deg_Cold_P Parameter: Timepoint (hr) Value: 2
  misc_feature: MA Experiment ID: 20000227 Result: Down-regulated in Transcription
  misc_feature: MA Experiment 20000227 PARAMETER Experiment Name: At_Root-Tips-vs-Tops_P Parameter: Tissue Value: Root Tips vs. Root Tops
  misc_feature: MA Experiment ID: 20000234 Result: Down-regulated in Transcription
  misc_feature: MA Experiment 20000234 PARAMETER Experiment Name: At_Siliques_P Parameter: Age (day) Value: 21
  misc_feature: MA Experiment 20000234 PARAMETER Experiment Name: At_Siliques_P Parameter: Organism Value: A. thaliana
  misc_feature: MA Experiment 20000234 PARAMETER Experiment Name: At_Siliques_P Parameter: Plant Line Value: WS
  misc_feature: MA Experiment 20000234 PARAMETER Experiment Name: At_Siliques_P Parameter: Tissue Value: Less Than 5mm Siliques vs. Whole Plant
  misc_feature: MA Experiment ID: 20000235 Result: Down-regulated in Transcription
  misc_feature: MA Experiment 20000235 PARAMETER Experiment Name: At_Siliques_P Parameter: Age (day) Value: 21
  misc_feature: MA Experiment 20000235 PARAMETER Experiment Name: At_Siliques_P Parameter: Organism Value: A. thaliana
  misc_feature: MA Experiment 20000235 PARAMETER Experiment Name: At_Siliques_P Parameter: Plant Line Value: WS
  misc_feature: MA Experiment 20000235 PARAMETER Experiment Name: At_Siliques_P Parameter: Tissue Value: 5-10mm Siliques vs. Whole Plant
  misc_feature: MA Experiment ID: 20000264 Result: Down-regulated in Transcription
  misc_feature: MA Experiment 20000264 PARAMETER Experiment Name: At_Open_Flower_P Parameter: Age (day) Value: 21
  misc_feature: MA Experiment 20000264 PARAMETER Experiment Name: At_Open_Flower_P Parameter: Plant Line Value: WS
  misc_feature: MA Experiment 20000264 PARAMETER Experiment Name: At_Open_Flower_P Parameter: Tissue Value: Open Flower vs. Whole Plant
  misc_feature: MA Experiment ID: 20000265 Result: Down-regulated in Transcription
  misc_feature: MA Experiment 20000265 PARAMETER Experiment Name: At_Open_Flower_P Parameter: Age (day) Value: 21
  misc_feature: MA Experiment 20000265 PARAMETER Experiment Name: At_Open_Flower_P Parameter: Plant Line Value: WS
  misc_feature: MA Experiment 20000265 PARAMETER Experiment Name: At_Open_Flower_P Parameter: Tissue Value: Closed Flower vs. Whole Plant
  misc_feature: MA Experiment ID: 20000286 Result: Down-regulated in Transcription
  misc_feature: MA Experiment 20000286 PARAMETER Experiment Name: At_Open_Flower_P Parameter: Age (day) Value: 21
  misc_feature: MA Experiment 20000286 PARAMETER Experiment Name: At_Open_Flower_P Parameter: Plant Line Value: WS
  misc_feature: MA Experiment 20000286 PARAMETER Experiment Name: At_Open_Flower_P Parameter: Tissue Value: Half Open vs. Whole Plant
  misc_feature: MA Experiment ID: 20000436 Result: Down-regulated in Transcription
  misc_feature: MA Experiment 20000436 PARAMETER Experiment Name: At_Drought_P Parameter: Age (day) Value: 7
  misc_feature: MA Experiment 20000436 PARAMETER Experiment Name: At_Drought_P Parameter: Organism Value: A. thaliana
  misc_feature: MA Experiment 20000436 PARAMETER Experiment Name: At_Drought_P Parameter: Plant Line Value: WS
  misc_feature: MA Experiment 20000436 PARAMETER Experiment Name: At_Drought_P Parameter: Timepoint (hr) Value: 12
  misc_feature: MA Experiment 20000436 PARAMETER Experiment Name: At_Drought_P Parameter: Tissue Value: Whole Plant
  misc_feature: MA Experiment 20000436 PARAMETER Experiment Name: At_Drought_P Parameter: Treatment Value: Drought vs. No Drought
  misc_feature: MA Experiment ID: 20000438 Result: Down-regulated in Transcription
  misc_feature: MA Experiment 20000438 PARAMETER Experiment Name: At_Shoots__P Parameter: Age (day) Value: 14
  misc_feature: MA Experiment 20000438 PARAMETER Experiment Name: At_Shoots__P Parameter: Tissue Value: Shoots vs. Whole Plant
  misc_feature: MA Experiment ID: 20000445 Result: Down-regulated in Transcription
  misc_feature: MA Experiment 20000445 PARAMETER Experiment Name: At_100uM_NAA__P Parameter: Age (day) Value: 14
  misc_feature: MA Experiment 20000445 PARAMETER Experiment Name: At_100uM_NAA__P Parameter: Organism Value: A. thaliana
  misc_feature: MA Experiment 20000445 PARAMETER Experiment Name: At_100uM_NAA__P Parameter: Plant Line Value: WS
  misc_feature: MA Experiment 20000445 PARAMETER Experiment Name: At_100uM_NAA__P Parameter: Timepoint (hr) Value: 6
  misc_feature: MA Experiment 20000445 PARAMETER Experiment Name: At_100uM_NAA__P Parameter: Tissue Value: Aerial
  misc_feature: MA Experiment 20000445 PARAMETER Experiment Name: At_100uM_NAA__P Parameter: Treatment Value: 100uM NAA vs. No Treatment
  misc_feature: MA Experiment ID: 20000453 Result: Down-regulated in Transcription
  misc_feature: MA Experiment 20000453 PARAMETER Experiment Name: At_100uM_ABA_P Parameter: Age (day) Value: 15
  misc_feature: MA Experiment 20000453 PARAMETER Experiment Name: At_100uM_ABA_P Parameter: Organism Value: A. thaliana
  misc_feature: MA Experiment 20000453 PARAMETER Experiment Name: At_100uM_ABA_P Parameter: Plant Line Value: WS
  misc_feature: MA Experiment 20000453 PARAMETER Experiment Name: At_100uM_ABA_P Parameter: Timepoint (hr) Value: 24
  misc_feature: MA Experiment 20000453 PARAMETER Experiment Name: At_100uM_ABA_P Parameter: Tissue Value: Aerial
  misc_feature: MA Experiment 20000453 PARAMETER Experiment Name: At_100uM_ABA_P Parameter: Treatment Value: 100uM ABA vs. No Treatment
  misc_feature: MA Experiment ID: 20000456 Result: Up-regulated in Transcription
  misc_feature: MA Experiment 20000456 PARAMETER Experiment Name: At_100uM_BA_P Parameter: Age (day) Value: 14
  misc_feature: MA Experiment 20000456 PARAMETER Experiment Name: At_100uM_BA_P Parameter: Organism Value: A. thaliana
  misc_feature: MA Experiment 20000456 PARAMETER Experiment Name: At_100uM_BA_P Parameter: Plant Line Value: WS
  misc_feature: MA Experiment 20000456 PARAMETER Experiment Name: At_100uM_BA_P Parameter: Timepoint (hr) Value: 6
  misc_feature: MA Experiment 20000456 PARAMETER Experiment Name: At_100uM_BA_P Parameter: Tissue Value: Aerial
  misc_feature: MA Experiment 20000456 PARAMETER Experiment Name: At_100uM_BA_P Parameter: Treatment Value: 100uM BA vs. No Treatment
  misc_feature: MA Experiment ID: 20000709 Result: Up-regulated in Transcription
  misc_feature: MA Experiment 20000709 PARAMETER Experiment Name: At_15mM_NH4NO3_L-to-H_P Parameter: Age (hr) Value: 14
  misc_feature: MA Experiment 20000709 PARAMETER Experiment Name: At_15mM_NH4NO3_L-to-H_P Parameter: Organism Value: A. thaliana
  misc_feature: MA Experiment 20000709 PARAMETER Experiment Name: At_15mM_NH4NO3_L-to-H_P Parameter: Plant Line Value: WS
  misc_feature: MA Experiment 20000709 PARAMETER Experiment Name: At_15mM_NH4NO3_L-to-H_P Parameter: Timepoint (hr) Value: 4
  misc_feature: MA Experiment 20000709 PARAMETER Experiment Name: At_15mM_NH4NO3_L-to-H_P Parameter: Tissue Value: Aerial
  misc_feature: MA Experiment 20000709 PARAMETER Experiment Name: At_15mM_NH4NO3_L-to-H_P Parameter: Treatment Value: 15mM NH4NO3 vs. 30mM Mannitol
  misc_feature: MA Experiment ID: 20000794 Result: Down-regulated in Transcription
  misc_feature: MA Experiment 20000794 PARAMETER Experiment Name: At_Petals_P Parameter: Age (day) Value: 23-25 days
  misc_feature: MA Experiment 20000794 PARAMETER Experiment Name: At_Petals_P Parameter: Plant Line Value: WS
  misc_feature: MA Experiment 20000794 PARAMETER Experiment Name: At_Petals_P Parameter: Tissue Value: Petals vs. Whole plant
  misc_feature: MA Experiment ID: 20001248 Result: Down-regulated in Transcription
  misc_feature: MA Experiment 20001248 PARAMETER Experiment Name: At_Far-red-induction_P Parameter: Age (day) Value: 7
  misc_feature: MA Experiment 20001248 PARAMETER Experiment Name: At_Far-red-induction_P Parameter: Light Value: Far-red vs. White
  misc_feature: MA Experiment 20001248 PARAMETER Experiment Name: At_Far-red-induction_P Parameter: Organism Value: A. thaliana
  misc_feature: MA Experiment 20001248 PARAMETER Experiment Name: At_Far-red-induction_P Parameter: Plant Line Value: Columbia
  misc_feature: MA Experiment 20001248 PARAMETER Experiment Name: At_Far-red-induction_P Parameter: Timepoint (hr) Value: 4
  misc_feature: MA Experiment 20001248 PARAMETER Experiment Name: At_Far-red-induction_P Parameter: Tissue Value: Whole Plant
  misc_feature: MA Experiment ID: 20001450 Result: Down-regulated in Transcription
  misc_feature: MA Experiment 20001450 PARAMETER Experiment Name: At_Far-red-induction_P Parameter: Age (day) Value: 7
  misc_feature: MA Experiment 20001450 PARAMETER Experiment Name: At_Far-red-induction_P Parameter: Light Value: Far-red vs. White
  misc_feature: MA Experiment 20001450 PARAMETER Experiment Name: At_Far-red-induction_P Parameter: Organism Value: A. thaliana
  misc_feature: MA Experiment 20001450 PARAMETER Experiment Name: At_Far-red-induction_P Parameter: Plant Line Value: Columbia
  misc_feature: MA Experiment 20001450 PARAMETER Experiment Name: At_Far-red-induction_P Parameter: Timepoint (hr) Value: 8
  misc_feature: MA Experiment 20001450 PARAMETER Experiment Name: At_Far-red-induction_P Parameter: Tissue Value: Whole Plant
  misc_feature: MA Experiment ID: 20001755 Result: Up-regulated in Transcription
  misc_feature: MA Experiment 20001755 PARAMETER Experiment Name: At_50mM_NH4NO3_L-to-H_P Parameter: Timepoint (hr) Value: 2
  misc_feature: MA Experiment 20001755 PARAMETER Experiment Name: At_50mM_NH4NO3_L-to-H_P Parameter: Tissue Value: Leaf
  misc_feature: MA Experiment 20001755 PARAMETER Experiment Name: At_50mM_NH4NO3_L-to-H_P Parameter: Treatment Value: 50mM NH4NO3 vs 100mM Mannitol
  misc_feature: MA Experiment ID: 20001756 Result: Up-regulated in Transcription
  misc_feature: MA Experiment 20001756 PARAMETER Experiment Name: At_50mM_NH4NO3_L-to-H_P Parameter: Timepoint (hr) Value: 4
  misc_feature: MA Experiment 20001756 PARAMETER Experiment Name: At_50mM_NH4NO3_L-to-H_P Parameter: Tissue Value: Leaf
  misc_feature: MA Experiment 20001756 PARAMETER Experiment Name: At_50mM_NH4NO3_L-to-H_P Parameter: Treatment Value: 50mM NH4NO3 vs 100mM Mannitol
  misc_feature: MA Experiment ID: 20001757 Result: Up-regulated in Transcription
  misc_feature: MA Experiment 20001757 PARAMETER Experiment Name: At_50mM_NH4NO3_L-to-H_P Parameter: Timepoint (hr) Value: 6
  misc_feature: MA Experiment 20001757 PARAMETER Experiment Name: At_50mM_NH4NO3_L-to-H_P Parameter: Tissue Value: Leaf
  misc_feature: MA Experiment 20001757 PARAMETER Experiment Name: At_50mM_NH4NO3_L-to-H_P Parameter: Treatment Value: 50mM NH4NO3 vs 100mM Mannitol
aaaactgtcttaaggaagagaaaggaacaaaagaaaacagatgtgagctcttcttcttcgtcttcttctctctattttattctcatcctctcctcacagttactataagctcgtctatggccagagacggtggtgtttcttgtttacgaaggtcggagatgatgagcgtcggtggtatcggaggaattgaatctgcgccgttggatttagatgaagttcatgtcttagccgttgatgacagtctcgttgatcgtattgtcatcgagagattgcttcgtattacttcctgcaaagttacggcggtagatagtggatggcgtgctctggaatttctagggttagataatgagaaagcttctgctgaattcgatagattgaaagttgatttgatcatcactgattactgtatgcctggaatgactggttatgagcttctcaagaagattaaggaatcgtccaatttcagagaagttccggttgtaatcatgtcgtcggagaatgtattgaccagaatcgacagatgccttgaggaaggtgctcaagatttcttattgaaaccggtgaaactcgccgacgtgaaacgtctgagaagtcatttaactaaagacgttaaactttccaacggaaacaaacggaagcttccggaagattctagttccgttaactcttcgcttcctccaccgtcacctccgttgactatctcgcctgaatcgtcgccgccgttgactgtttcgactgaatcgtcggattcgtctccgccgttatctccggtggagatcttttccacctcgccactttcatctccgatagacgatgaagatgatgacgtgttgacgtcgtcgtcggaggaatcgccgattcgacggcagaagatgaggagtcccggattagattagtggaactattctgggatgccgtgtaatattatctatctccgttaacttcgtttttacctctgacggtgtttttaattgcacgttgacttgacgccgtcaaattttatagatgtccctttaatctctcgcgcctccacgtgggccttttttccttttccttaaagcttttcgaatatcttttaattattttaatttctgcacaaagttacgtttttaacttttttagtctttaaacaaagggaaaattgcaatcgaaccttcgacattcaccatttattatgataacgagacttgaat

SEQ ID NO: 46155 - protein, 297 aa, Arabidopsis thaliana
  peptide (1)..(297): Ceres Seq. ID no. 12574428
  misc_feature (72)..(203): Pfam Name: Response regulator receiver domain Pfam Description: Response regulator receiver domain
  misc_feature (71)..(251): Homolog of NCBI NO: 15222035 NR Description: response regulator 7, putative
  misc_feature (50)..(201): Homolog of NCBI NO: 11358906 NR Description: two-component response regulator homolog
  misc_feature (50)..(201): Homolog of NCBI NO: 11358763 NR Description: response regulator 5 [imported] - Arabidopsis
  misc_feature (50)..(224): Homolog of NCBI NO: 15228338 NR Description: response reactor 2 (ATRR2)
  misc_feature (71)..(223): Homolog of NCBI NO: 15221927 NR Description: response regulator 5, putative
  misc_feature (70)..(224): Homolog of NCBI NO: 15242000 NR Description: response regulator 6 (ARR6)
  misc_feature (71)..(293): Homolog of NCBI NO: 33330864 NR Description: type-A response regulator [Catharanthus roseus]
  misc_feature (62)..(273): Homolog of NCBI NO: 13173408 NR Description: response regulator protein [Dianthus caryophyllus]
  misc_feature (39)..(268): Homolog of NCBI NO: 15218957 NR Description: response regulator 3
  misc_feature (39)..(297): Homolog of NCBI NO: 15218550 NR Description: putative response regulator 3
NCLKEEKGTKENRCELFFFVFFSLFYSHPLLTVTISSSMARDGGVSCLRRSEMMSVGGIGGIESAPLDLDEVHVLAVDDSLVDRIVIERLLRITSCKVTAVDSGWRALEFLGLDNEKASAEFDRLKVDLIITDYCMPGMTGYELLKKIKESSNFREVPVVIMSSENVLTRIDRCLEEGAQDFLLKPVKLADVKRLRSHLTKDVKLSNGNKRKLPEDSSSVNSSLPPPSPPLTISPESSPPLTVSTESSDSSPPLSPVEIFSTSPLSSPIDDEDDDVLTSSSEESPIRRQKMRSPGLD

SEQ ID NO: 46156 - protein, 259 aa, Arabidopsis thaliana
  peptide (1)..(259): Ceres Seq. ID no. 12574429
  misc_feature (34)..(165): Pfam Name: Response regulator receiver domain Pfam Description: Response regulator receiver domain
  misc_feature (33)..(213): Homolog of NCBI NO: 15222035 NR Description: response regulator 7, putative
  misc_feature (12)..(163): Homolog of NCBI NO: 11358906 NR Description: two-component response regulator homolog
  misc_feature (12)..(163): Homolog of NCBI NO: 11358763 NR Description: response regulator 5 [imported] - Arabidopsis
  misc_feature (12)..(186): Homolog of NCBI NO: 15228338 NR Description: response reactor 2 (ATRR2)
  misc_feature (33)..(185): Homolog of NCBI NO: 15221927 NR Description: response regulator 5, putative
  misc_feature (32)..(186): Homolog of NCBI NO: 15242000 NR Description: response regulator 6 (ARR6)
  misc_feature (33)..(255): Homolog of NCBI NO: 33330864 NR Description: type-A response regulator [Catharanthus roseus]
  misc_feature (24)..(235): Homolog of NCBI NO: 13173408 NR Description: response regulator protein [Dianthus caryophyllus]
  misc_feature (1)..(230): Homolog of NCBI NO: 15218957 NR Description: response regulator 3
  misc_feature (1)..(259): Homolog of NCBI NO: 15218550 NR Description: putative response regulator 3
MARDGGVSCLRRSEMMSVGGIGGIESAPLDLDEVHVLAVDDSLVDRIVIERLLRITSCKVTAVDSGWRALEFLGLDNEKASAEFDRLKVDLIITDYCMPGMTGYELLKKIKESSNFREVPVVIMSSENVLTRIDRCLEEGAQDFLLKPVKLADVKRLRSHLTKDVKLSNGNKRKLPEDSSSVNSSLPPPSPPLTISPESSPPLTVSTESSDSSPPLSPVEIFSTSPLSSPIDDEDDDVLTSSSEESPIRRQKMRSPGLD

SEQ ID NO: 46157 - protein, 245 aa, Arabidopsis thaliana
  peptide (1)..(245): Ceres Seq. ID no. 12574430
  misc_feature (20)..(151): Pfam Name: Response regulator receiver domain Pfam Description: Response regulator receiver domain
  misc_feature (19)..(199): Homolog of NCBI NO: 15222035 NR Description: response regulator 7, putative
  misc_feature (1)..(149): Homolog of NCBI NO: 11358906 NR Description: two-component response regulator homolog
  misc_feature (1)..(149): Homolog of NCBI NO: 11358763 NR Description: response regulator 5 [imported] - Arabidopsis
  misc_feature (1)..(172): Homolog of NCBI NO: 15228338 NR Description: response reactor 2 (ATRR2)
  misc_feature (19)..(171): Homolog of NCBI NO: 15221927 NR Description: response regulator 5, putative
  misc_feature (18)..(172): Homolog of NCBI NO: 15242000 NR Description: response regulator 6 (ARR6)
  misc_feature (19)..(241): Homolog of NCBI NO: 33330864 NR Description: type-A response regulator [Catharanthus roseus]
  misc_feature (10)..(221): Homolog of NCBI NO: 13173408 NR Description: response regulator protein [Dianthus caryophyllus]
  misc_feature (1)..(216): Homolog of NCBI NO: 15218957 NR Description: response regulator 3
  misc_feature (1)..(245): Homolog of NCBI NO: 15218550 NR Description: putative response regulator 3
MMSVGGIGGIESAPLDLDEVHVLAVDDSLVDRIVIERLLRITSCKVTAVDSGWRALEFLGLDNEKASAEFDRLKVDLIITDYCMPGMTGYELLKKIKESSNFREVPVVIMSSENVLTRIDRCLEEGAQDFLLKPVKLADVKRLRSHLTKDVKLSNGNKRKLPEDSSSVNSSLPPPSPPLTISPESSPPLTVSTESSDSSPPLSPVEIFSTSPLSSPIDDEDDDVLTSSSEESPIRRQKMRSPGLD

SEQ ID NO: 46158 - DNA, 1534 bp, Arabidopsis thaliana; identical to SEQ ID NO: 40297
  misc_feature (1)..(1534): Ceres Seq. ID no. 12558430
  misc_feature: MA Experiment ID: 20000171 Result: Up-regulated in Transcription
  misc_feature: MA Experiment 20000171 PARAMETER Experiment Name: At_42deg_Heat_P Parameter: Age (day) Value: 14
  misc_feature: MA Experiment 20000171 PARAMETER Experiment Name: At_42deg_Heat_P Parameter: Organism Value: A. thaliana
  misc_feature: MA Experiment 20000171 PARAMETER Experiment Name: At_42deg_Heat_P Parameter: Plant Line Value: WS
  misc_feature: MA Experiment 20000171 PARAMETER Experiment Name: At_42deg_Heat_P Parameter: Temperature (deg C) Value: 42 vs. 22
  misc_feature: MA Experiment 20000171 PARAMETER Experiment Name: At_42deg_Heat_P Parameter: Timepoint (hr) Value: 1
  misc_feature: MA Experiment 20000171 PARAMETER Experiment Name: At_42deg_Heat_P Parameter: Tissue Value: Aerial
  misc_feature: MA Experiment ID: 20000173 Result: Up-regulated in Transcription
  misc_feature: MA Experiment 20000173 PARAMETER Experiment Name: At_42deg_Heat_P Parameter: Age (day) Value: 14
  misc_feature: MA Experiment 20000173 PARAMETER Experiment Name: At_42deg_Heat_P Parameter: Organism Value: A. thaliana
  misc_feature: MA Experiment 20000173 PARAMETER Experiment Name: At_42deg_Heat_P Parameter: Plant Line Value: WS
  misc_feature: MA Experiment 20000173 PARAMETER Experiment Name: At_42deg_Heat_P Parameter: Temperature (deg C) Value: 42 vs. 22
  misc_feature: MA Experiment 20000173 PARAMETER Experiment Name: At_42deg_Heat_P Parameter: Timepoint (hr) Value: 6
  misc_feature: MA Experiment 20000173 PARAMETER Experiment Name: At_42deg_Heat_P Parameter: Tissue Value: Aerial
  misc_feature: MA Experiment ID: 20000575 Result: Down-regulated in Transcription
  misc_feature: MA Experiment 20000575 PARAMETER Experiment Name: At_100uM_ABA_Mutants__P Parameter: Organism Value: A. thaliana
  misc_feature: MA Experiment 20000575 PARAMETER Experiment Name: At_100uM_ABA_Mutants__P Parameter: Plant Line Value: CS22
  misc_feature: MA Experiment 20000575 PARAMETER Experiment Name: At_100uM_ABA_Mutants__P Parameter: Timepoint (hr) Value: 6
  misc_feature: MA Experiment 20000575 PARAMETER Experiment Name: At_100uM_ABA_Mutants__P Parameter: Tissue Value: Whole Plant
  misc_feature: MA Experiment 20000575 PARAMETER Experiment Name: At_100uM_ABA_Mutants__P Parameter: Treatment Value: 1uM ABA vs. No Treatment
  misc_feature: MA Experiment ID: 20001450 Result: Up-regulated in Transcription
  misc_feature: MA Experiment 20001450 PARAMETER Experiment Name: At_Far-red-induction_P Parameter: Age (day) Value: 7
  misc_feature: MA Experiment 20001450 PARAMETER Experiment Name: At_Far-red-induction_P Parameter: Light Value: Far-red vs. White
  misc_feature: MA Experiment 20001450 PARAMETER Experiment Name: At_Far-red-induction_P Parameter: Organism Value: A. thaliana
  misc_feature: MA Experiment 20001450 PARAMETER Experiment Name: At_Far-red-induction_P Parameter: Plant Line Value: Columbia
  misc_feature: MA Experiment 20001450 PARAMETER Experiment Name: At_Far-red-induction_P Parameter: Timepoint (hr) Value: 8
  misc_feature: MA Experiment 20001450 PARAMETER Experiment Name: At_Far-red-induction_P Parameter: Tissue Value: Whole Plant
  misc_feature: MA Experiment ID: 20001451 Result: Up-regulated in Transcription
  misc_feature: MA Experiment 20001451 PARAMETER Experiment Name: At_Far-red-induction_P Parameter: Age (day) Value: 7
  misc_feature: MA Experiment 20001451 PARAMETER Experiment Name: At_Far-red-induction_P Parameter: Light Value: Far-red vs. White
  misc_feature: MA Experiment 20001451 PARAMETER Experiment Name: At_Far-red-induction_P Parameter: Organism Value: A. thaliana
  misc_feature: MA Experiment 20001451 PARAMETER Experiment Name: At_Far-red-induction_P Parameter: Plant Line Value: Columbia
  misc_feature: MA Experiment 20001451 PARAMETER Experiment Name: At_Far-red-induction_P Parameter: Timepoint (hr) Value: 24
  misc_feature: MA Experiment 20001451 PARAMETER Experiment Name: At_Far-red-induction_P Parameter: Tissue Value: Whole Plant
  misc_feature: MA Experiment ID: 20001458 Result: Up-regulated in Transcription
  misc_feature: MA Experiment 20001458 PARAMETER Experiment Name: At_50mM_NH4NO3_L-to-H_P Parameter: Age (day) Value: Undefined
  misc_feature: MA Experiment 20001458 PARAMETER Experiment Name: At_50mM_NH4NO3_L-to-H_P Parameter: Organism Value: Undefined
  misc_feature: MA Experiment 20001458 PARAMETER Experiment Name: At_50mM_NH4NO3_L-to-H_P Parameter: Plant Line Value: Undefined
  misc_feature: MA Experiment 20001458 PARAMETER Experiment Name: At_50mM_NH4NO3_L-to-H_P Parameter: Timepoint (hr) Value: 2
  misc_feature: MA Experiment 20001458 PARAMETER Experiment Name: At_50mM_NH4NO3_L-to-H_P Parameter: Tissue Value: Siliques
  misc_feature: MA Experiment 20001458 PARAMETER Experiment Name: At_50mM_NH4NO3_L-to-H_P Parameter: Treatment Value: 50mM NH4NO3 vs. 100mM Manitol
  misc_feature: MA Experiment ID: 20001761 Result: Down-regulated in Transcription
  misc_feature: MA Experiment 20001761 PARAMETER Experiment Name: At_50mM_NH4NO3_L-to-H_P Parameter: Timepoint (hr) Value: 4
  misc_feature: MA Experiment 20001761 PARAMETER Experiment Name: At_50mM_NH4NO3_L-to-H_P Parameter: Tissue Value: Siliques
  misc_feature: MA Experiment 20001761 PARAMETER Experiment Name: At_50mM_NH4NO3_L-to-H_P Parameter: Treatment Value: 50mM NH4NO3 vs 100mM Mannitol

SEQ ID NO: 46159 - protein, 420 aa, Arabidopsis thaliana; identical to SEQ ID NO: 40298
  peptide (1)..(420): Ceres Seq. ID no. 12558431
  misc_feature (318)..(409): Homolog of NCBI NO: 122785 NR Description: GLYCINE-RICH PROTEIN HC1
  misc_feature (347)..(408): Homolog of NCBI NO: 1346181 NR Description: Glycine-rich RNA-binding protein GRP2A
  misc_feature (313)..(409): Homolog of NCBI NO: 7440064 NR Description: fus-like protein - human (fragment)
  misc_feature (337)..(407): Homolog of NCBI NO: 21388660 NR Description: glycine-rich RNA-binding protein [Physcomitrella
  misc_feature (308)..(411): Homolog of NCBI NO: 37534930 NR Description: putative glycine-rich protein
  misc_feature (314)..(408): Homolog of NCBI NO: 1170023 NR Description: ABSCISIC ACID AND ENVIRONMENTAL STRESS INDUCIBLE
  misc_feature (284)..(410): Homolog of NCBI NO: 1170023 NR Description: ABSCISIC ACID AND ENVIRONMENTAL STRESS INDUCIBLE
  misc_feature (304)..(410): Homolog of NCBI NO: 7488799 NR Description: dormancy-associated protein 2 - garden pea
  misc_feature (9)..(120): Homolog of NCBI NO: 15230159 NR Description: unknown protein; protein id: At3g24690.1
  misc_feature (1)..(420): Homolog of NCBI NO: 15223426 NR Description: unknown protein
  misc_feature (318)..(409): Homolog of NCBI NO: 122785 NR Description: GLYCINE-RICH PROTEIN HC1
  misc_feature (347)..(408): Homolog of NCBI NO: 1346181 NR Description: Glycine-rich RNA-binding protein GRP2A
  misc_feature (313)..(409): Homolog of NCBI NO: 7440064 NR Description: fus-like protein - human (fragment)
  misc_feature (337)..(407): Homolog of NCBI NO: 21388660 NR Description: glycine-rich RNA-binding protein [Physcomitrella
  misc_feature (308)..(411): Homolog of NCBI NO: 37534930 NR Description: putative glycine-rich protein
  misc_feature (314)..(408): Homolog of NCBI NO: 1170023 NR Description: ABSCISIC ACID AND ENVIRONMENTAL STRESS INDUCIBLE
  misc_feature (284)..(410): Homolog of NCBI NO: 1170023 NR Description: ABSCISIC ACID AND ENVIRONMENTAL STRESS INDUCIBLE
  misc_feature (304)..(410): Homolog of NCBI NO: 7488799 NR Description: dormancy-associated protein 2 - garden pea
  misc_feature (9)..(120): Homolog of NCBI NO: 15230159 NR Description: unknown protein; protein id: At3g24690.1
  misc_feature (1)..(420): Homolog of NCBI NO: 15223426 NR Description: unknown protein

SEQ ID NO: 46160 - protein, 406 aa, Arabidopsis thaliana; identical to SEQ ID NO: 40299
  peptide (1)..(406): Ceres Seq. ID no. 12558432
  misc_feature (304)..(395): Homolog of NCBI NO: 122785 NR Description: GLYCINE-RICH PROTEIN HC1
  misc_feature (333)..(394): Homolog of NCBI NO: 1346181 NR Description: Glycine-rich RNA-binding protein GRP2A
  misc_feature (299)..(395): Homolog of NCBI NO: 7440064 NR Description: fus-like protein - human (fragment)
  misc_feature (323)..(393): Homolog of NCBI NO: 21388660 NR Description: glycine-rich RNA-binding protein [Physcomitrella
  misc_feature (294)..(397): Homolog of NCBI NO: 37534930 NR Description: putative glycine-rich protein
  misc_feature (300)..(394): Homolog of NCBI NO: 1170023 NR Description: ABSCISIC ACID AND ENVIRONMENTAL STRESS INDUCIBLE
  misc_feature (270)..(396): Homolog of NCBI NO: 1170023 NR Description: ABSCISIC ACID AND ENVIRONMENTAL STRESS INDUCIBLE
  misc_feature (290)..(396): Homolog of NCBI NO: 7488799 NR Description: dormancy-associated protein 2 - garden pea
  misc_feature (1)..(106): Homolog of NCBI NO: 15230159 NR Description: unknown protein; protein id: At3g24690.1
  misc_feature (1)..(406): Homolog of NCBI NO: 15223426 NR Description: unknown protein
  misc_feature (304)..(395): Homolog of NCBI NO: 122785 NR Description: GLYCINE-RICH PROTEIN HC1
  misc_feature (333)..(394): Homolog of NCBI NO: 1346181 NR Description: Glycine-rich RNA-binding protein GRP2A
  misc_feature (299)..(395): Homolog of NCBI NO: 7440064 NR Description: fus-like protein - human (fragment)
  misc_feature (323)..(393): Homolog of NCBI NO: 21388660 NR Description: glycine-rich RNA-binding protein [Physcomitrella
  misc_feature (294)..(397): Homolog of NCBI NO: 37534930 NR Description: putative glycine-rich protein
  misc_feature (300)..(394): Homolog of NCBI NO: 1170023 NR Description: ABSCISIC ACID AND ENVIRONMENTAL STRESS INDUCIBLE
  misc_feature (270)..(396): Homolog of NCBI NO: 1170023 NR Description: ABSCISIC ACID AND ENVIRONMENTAL STRESS INDUCIBLE
  misc_feature (290)..(396): Homolog of NCBI NO: 7488799 NR Description: dormancy-associated protein 2 - garden pea
  misc_feature (1)..(106): Homolog of NCBI NO: 15230159 NR Description: unknown protein; protein id: At3g24690.1
  misc_feature (1)..(406): Homolog of NCBI NO: 15223426 NR Description: unknown protein

SEQ ID NO: 46161 - protein, 386 aa, Arabidopsis thaliana; identical to SEQ ID NO: 40300
  peptide (1)..(386): Ceres Seq. ID no. 12558433
  misc_feature (284)..(375): Homolog of NCBI NO: 122785 NR Description: GLYCINE-RICH PROTEIN HC1
  misc_feature (313)..(374): Homolog of NCBI NO: 1346181 NR Description: Glycine-rich RNA-binding protein GRP2A
  misc_feature (279)..(375): Homolog of NCBI NO: 7440064 NR Description: fus-like protein - human (fragment)
  misc_feature (303)..(373): Homolog of NCBI NO: 21388660 NR Description: glycine-rich RNA-binding protein [Physcomitrella
  misc_feature (274)..(377): Homolog of NCBI NO: 37534930 NR Description: putative glycine-rich protein
  misc_feature (280)..(374): Homolog of NCBI NO: 1170023 NR Description: ABSCISIC ACID AND ENVIRONMENTAL STRESS INDUCIBLE
  misc_feature (250)..(376): Homolog of NCBI NO: 1170023 NR Description: ABSCISIC ACID AND ENVIRONMENTAL STRESS INDUCIBLE
  misc_feature (270)..(376): Homolog of NCBI NO: 7488799 NR Description: dormancy-associated protein 2 - garden pea
  misc_feature (1)..(86): Homolog of NCBI NO: 15230159 NR Description: unknown protein; protein id: At3g24690.1
  misc_feature (1)..(386): Homolog of NCBI NO: 15223426 NR Description: unknown protein
  misc_feature (284)..(375): Homolog of NCBI NO: 122785 NR Description: GLYCINE-RICH PROTEIN HC1
  misc_feature (313)..(374): Homolog of NCBI NO: 1346181 NR Description: Glycine-rich RNA-binding protein GRP2A
  misc_feature (279)..(375): Homolog of NCBI NO: 7440064 NR Description: fus-like protein - human (fragment)
  misc_feature (303)..(373): Homolog of NCBI NO: 21388660 NR Description: glycine-rich RNA-binding protein [Physcomitrella
  misc_feature (274)..(377): Homolog of NCBI NO: 37534930 NR Description: putative glycine-rich protein
  misc_feature (280)..(374): Homolog of NCBI NO: 1170023 NR Description: ABSCISIC ACID AND ENVIRONMENTAL STRESS INDUCIBLE
  misc_feature (250)..(376): Homolog of NCBI NO: 1170023 NR Description: ABSCISIC ACID AND ENVIRONMENTAL STRESS INDUCIBLE
  misc_feature (270)..(376): Homolog of NCBI NO: 7488799 NR Description: dormancy-associated protein 2 - garden pea
  misc_feature (1)..(86): Homolog of NCBI NO: 15230159 NR Description: unknown protein; protein id: At3g24690.1
  misc_feature (1)..(386): Homolog of NCBI NO: 15223426 NR Description: unknown protein

SEQ ID NO: 46162 - DNA, 1786 bp, Arabidopsis thaliana
  misc_feature (1)..(1786): Ceres Seq. ID no. 12574921
  misc_feature: MA Experiment ID: 20000171 Result: Down-regulated in Transcription
  misc_feature: MA Experiment 20000171 PARAMETER Experiment Name: At_42deg_Heat_P Parameter: Age (day) Value: 14
  misc_feature: MA Experiment 20000171 PARAMETER Experiment Name: At_42deg_Heat_P Parameter: Organism Value: A. thaliana
  misc_feature: MA Experiment 20000171 PARAMETER Experiment Name: At_42deg_Heat_P Parameter: Plant Line Value: WS
  misc_feature: MA Experiment 20000171 PARAMETER Experiment Name: At_42deg_Heat_P Parameter: Temperature (deg C) Value: 42 vs. 22
  misc_feature: MA Experiment 20000171 PARAMETER Experiment Name: At_42deg_Heat_P Parameter: Timepoint (hr) Value: 1
  misc_feature: MA Experiment 20000171 PARAMETER Experiment Name: At_42deg_Heat_P Parameter: Tissue Value: Aerial
  misc_feature: MA Experiment ID: 20000173 Result: Down-regulated in Transcription
  misc_feature: MA Experiment 20000173 PARAMETER Experiment Name: At_42deg_Heat_P Parameter: Age (day) Value: 14
  misc_feature: MA Experiment 20000173 PARAMETER Experiment Name: At_42deg_Heat_P Parameter: Organism Value: A. thaliana
  misc_feature: MA Experiment 20000173 PARAMETER Experiment Name: At_42deg_Heat_P Parameter: Plant Line Value: WS
  misc_feature: MA Experiment 20000173 PARAMETER Experiment Name: At_42deg_Heat_P Parameter: Temperature (deg C) Value: 42 vs. 22
  misc_feature: MA Experiment 20000173 PARAMETER Experiment Name: At_42deg_Heat_P Parameter: Timepoint (hr) Value: 6
  misc_feature: MA Experiment 20000173 PARAMETER Experiment Name: At_42deg_Heat_P Parameter: Tissue Value: Aerial
  misc_feature: MA Experiment ID: 20000182 Result: Down-regulated in Transcription
  misc_feature: MA Experiment 20000182 PARAMETER Experiment Name: At_2mM_SA_P Parameter: Age (day) Value: 14
  misc_feature: MA Experiment 20000182 PARAMETER Experiment Name: At_2mM_SA_P Parameter: Organism Value: A. thaliana
  misc_feature: MA Experiment 20000182 PARAMETER Experiment Name: At_2mM_SA_P Parameter: Plant Line Value: WS
  misc_feature: MA Experiment 20000182 PARAMETER Experiment Name: At_2mM_SA_P Parameter: Timepoint (hr) Value: 6
  misc_feature: MA Experiment 20000182 PARAMETER Experiment Name: At_2mM_SA_P Parameter: Tissue Value: Aerial
  misc_feature: MA Experiment 20000182 PARAMETER Experiment Name: At_2mM_SA_P Parameter: Treatment Value: 2mM SA vs. No Treatment
  misc_feature: MA Experiment ID: 20000184 Result: Down-regulated in Transcription
  misc_feature: MA Experiment 20000184 PARAMETER Experiment Name: At_Shoots__P Parameter: Age (day) Value: 7
  misc_feature: MA Experiment 20000184 PARAMETER Experiment Name: At_Shoots__P Parameter: Tissue Value: Shoots vs. Whole Plant
  misc_feature: MA Experiment ID: 20000185 Result: Down-regulated in Transcription
  misc_feature: MA Experiment 20000185 PARAMETER Experiment Name: At_Roots__P Parameter: Age (day) Value: 7 vs. 21
  misc_feature: MA Experiment 20000185 PARAMETER Experiment Name: At_Roots__P Parameter: Organism Value: A. thaliana
  misc_feature: MA Experiment 20000185 PARAMETER Experiment Name: At_Roots__P Parameter: Tissue Value: Roots vs. Whole Plant
  misc_feature: MA Experiment ID: 20000234 Result: Up-regulated in Transcription
  misc_feature: MA Experiment 20000234 PARAMETER Experiment Name: At_Siliques_P Parameter: Age (day) Value: 21
  misc_feature: MA Experiment 20000234 PARAMETER Experiment Name: At_Siliques_P Parameter: Organism Value: A. thaliana
  misc_feature: MA Experiment 20000234 PARAMETER Experiment Name: At_Siliques_P Parameter: Plant Line Value: WS
  misc_feature: MA Experiment 20000234 PARAMETER Experiment Name: At_Siliques_P Parameter: Tissue Value: Less Than 5mm Siliques vs. Whole Plant
  misc_feature: MA Experiment ID: 20000264 Result: Up-regulated in Transcription
  misc_feature: MA Experiment 20000264 PARAMETER Experiment Name: At_Open_Flower_P Parameter: Age (day) Value: 21
  misc_feature: MA Experiment 20000264 PARAMETER Experiment Name: At_Open_Flower_P Parameter: Plant Line Value: WS
  misc_feature: MA Experiment 20000264 PARAMETER Experiment Name: At_Open_Flower_P Parameter: Tissue Value: Open Flower vs. Whole Plant
  misc_feature: MA Experiment ID: 20000265 Result: Up-regulated in Transcription
  misc_feature: MA Experiment 20000265 PARAMETER Experiment Name: At_Open_Flower_P Parameter: Age (day) Value: 21
  misc_feature: MA Experiment 20000265 PARAMETER Experiment Name: At_Open_Flower_P Parameter: Plant Line Value: WS
  misc_feature: MA Experiment 20000265 PARAMETER Experiment Name: At_Open_Flower_P Parameter: Tissue Value: Closed Flower vs. Whole Plant
  misc_feature: MA Experiment ID: 20000286 Result: Up-regulated in Transcription
  misc_feature: MA Experiment 20000286 PARAMETER Experiment Name: At_Open_Flower_P Parameter: Age (day) Value: 21
  misc_feature: MA Experiment 20000286 PARAMETER Experiment Name: At_Open_Flower_P Parameter: Plant Line Value: WS
  misc_feature: MA Experiment 20000286 PARAMETER Experiment Name: At_Open_Flower_P Parameter: Tissue Value: Half Open vs. Whole Plant
  misc_feature: MA Experiment ID: 20000438 Result: Down-regulated in Transcription
  misc_feature: MA Experiment 20000438 PARAMETER Experiment Name: At_Shoots__P Parameter: Age (day) Value: 14
  misc_feature: MA Experiment 20000438 PARAMETER Experiment Name: At_Shoots__P Parameter: Tissue Value: Shoots vs. Whole Plant
  misc_feature: MA Experiment ID: 20000439 Result: Down-regulated in Transcription
  misc_feature: MA Experiment 20000439 PARAMETER Experiment Name: At_Roots__P Parameter: Age (day) Value: 14 vs. 21
  misc_feature: MA Experiment 20000439 PARAMETER Experiment Name: At_Roots__P Parameter: Organism Value: A. thaliana
  misc_feature: MA Experiment 20000439 PARAMETER Experiment Name: At_Roots__P Parameter: Tissue Value: Roots vs. Whole Plant
  misc_feature: MA Experiment ID: 20000527 Result: Down-regulated in Transcription
  misc_feature: MA Experiment 20000527 PARAMETER Experiment Name: At_10percent_PEG_P Parameter: Age (day) Value: 20
  misc_feature: MA Experiment 20000527 PARAMETER Experiment Name: At_10percent_PEG_P Parameter: Organism Value: A. thaliana
  misc_feature: MA Experiment 20000527 PARAMETER Experiment Name: At_10percent_PEG_P Parameter: Plant Line Value: WS
  misc_feature: MA Experiment 20000527 PARAMETER Experiment Name: At_10percent_PEG_P Parameter: Timepoint (day) Value: 20
  misc_feature: MA Experiment 20000527 PARAMETER Experiment Name: At_10percent_PEG_P Parameter: Tissue Value: Whole Plant
  misc_feature: MA Experiment 20000527 PARAMETER Experiment Name: At_10percent_PEG_P Parameter: Treatment Value: 10percent PEG vs. No Treatment
  misc_feature: MA Experiment ID: 20000794 Result: Up-regulated in Transcription
  misc_feature: MA Experiment 20000794 PARAMETER Experiment Name: At_Petals_P Parameter: Age (day) Value: 23-25 days
  misc_feature: MA Experiment 20000794 PARAMETER Experiment Name: At_Petals_P Parameter: Plant Line Value: WS
  misc_feature: MA Experiment 20000794 PARAMETER Experiment Name: At_Petals_P Parameter: Tissue Value: Petals vs. Whole plant
  misc_feature: MA Experiment ID: 20001554 Result: Down-regulated in Transcription
  misc_feature: MA Experiment 20001554 PARAMETER Experiment Name: At_Drought_Soil_Dry_P Parameter: Age (day) Value: 21
  misc_feature: MA Experiment 20001554 PARAMETER Experiment Name: At_Drought_Soil_Dry_P Parameter: Organism Value: A. thaliana
  misc_feature: MA Experiment 20001554 PARAMETER Experiment Name: At_Drought_Soil_Dry_P Parameter: Plant Line Value: WS
  misc_feature: MA Experiment 20001554 PARAMETER Experiment Name: At_Drought_Soil_Dry_P Parameter: Post Timepoint (hr) Value: None
  misc_feature: MA Experiment 20001554 PARAMETER Experiment Name: At_Drought_Soil_Dry_P Parameter: Post-Treatment Value: None
  misc_feature: MA Experiment 20001554 PARAMETER Experiment Name: At_Drought_Soil_Dry_P Parameter: Timepoint (day) Value: 7
  misc_feature: MA Experiment 20001554 PARAMETER Experiment Name: At_Drought_Soil_Dry_P Parameter: Treatment Value: Drought vs. No Drought
  misc_feature: MA Experiment ID: 20001555 Result: Down-regulated in Transcription
  misc_feature: MA Experiment 20001555 PARAMETER Experiment Name: At_Drought_Soil_Dry_P Parameter: Age (day) Value: 24
  misc_feature: MA Experiment 20001555 PARAMETER Experiment Name: At_Drought_Soil_Dry_P Parameter: Organism Value: A. thaliana
  misc_feature: MA Experiment 20001555 PARAMETER Experiment Name: At_Drought_Soil_Dry_P Parameter: Plant Line Value: WS
  misc_feature: MA Experiment 20001555 PARAMETER Experiment Name: At_Drought_Soil_Dry_P Parameter: Post Timepoint (hr) Value: None
  misc_feature: MA Experiment 20001555 PARAMETER Experiment Name: At_Drought_Soil_Dry_P Parameter: Post-Treatment Value: None
  misc_feature: MA Experiment 20001555 PARAMETER Experiment Name: At_Drought_Soil_Dry_P Parameter: Timepoint (day) Value: 10
  misc_feature: MA Experiment 20001555 PARAMETER Experiment Name: At_Drought_Soil_Dry_P Parameter: Treatment Value: Drought vs. No Drought
  misc_feature: MA Experiment ID: 20001556 Result: Down-regulated in Transcription
  misc_feature: MA Experiment 20001556 PARAMETER Experiment Name: At_Drought_Soil_Dry_P Parameter: Age (day) Value: 26
  misc_feature: MA Experiment 20001556 PARAMETER Experiment Name: At_Drought_Soil_Dry_P Parameter: Organism Value: A. thaliana
  misc_feature: MA Experiment 20001556 PARAMETER Experiment Name: At_Drought_Soil_Dry_P Parameter: Plant Line Value: WS
  misc_feature: MA Experiment 20001556 PARAMETER Experiment Name: At_Drought_Soil_Dry_P Parameter: Post Timepoint (hr) Value: None
  misc_feature: MA Experiment 20001556 PARAMETER Experiment Name: At_Drought_Soil_Dry_P Parameter: Post-Treatment Value: None
  misc_feature: MA Experiment 20001556 PARAMETER Experiment Name: At_Drought_Soil_Dry_P Parameter: Timepoint (day) Value: 12
  misc_feature: MA Experiment 20001556 PARAMETER Experiment Name: At_Drought_Soil_Dry_P Parameter: Treatment Value: Drought vs. No Drought
  misc_feature: MA Experiment ID: 20001906 Result: Down-regulated in Transcription
  misc_feature: MA Experiment 20001906 PARAMETER Experiment Name: At_Drought_Reproduction_P Parameter: Age (day) Value: 35
  misc_feature: MA Experiment 20001906 PARAMETER Experiment Name: At_Drought_Reproduction_P Parameter: Organism Value: A. thaliana
  misc_feature: MA Experiment 20001906 PARAMETER Experiment Name: At_Drought_Reproduction_P Parameter: Plant Line Value: WS
  misc_feature: MA Experiment 20001906 PARAMETER Experiment Name: At_Drought_Reproduction_P Parameter: Timepoint (day) Value: 5
  misc_feature: MA Experiment 20001906 PARAMETER Experiment Name: At_Drought_Reproduction_P Parameter: Tissue Value: Siliques
  misc_feature: MA Experiment 20001906 PARAMETER Experiment Name: At_Drought_Reproduction_P Parameter: Treatment Value: Drought vs. No Drought
  misc_feature: MA Experiment ID: 20001908 Result: Down-regulated in Transcription
  misc_feature: MA Experiment 20001908 PARAMETER Experiment Name: At_Drought_Reproduction_P Parameter: Age (day) Value: 40
  misc_feature: MA Experiment 20001908 PARAMETER Experiment Name: At_Drought_Reproduction_P Parameter: Organism Value: A. thaliana
  misc_feature: MA Experiment 20001908 PARAMETER Experiment Name: At_Drought_Reproduction_P Parameter: Plant Line Value: WS
  misc_feature: MA Experiment 20001908 PARAMETER Experiment Name: At_Drought_Reproduction_P Parameter: Timepoint (day) Value: 10
  misc_feature: MA Experiment 20001908 PARAMETER Experiment Name: At_Drought_Reproduction_P Parameter: Tissue Value: Siliques
  misc_feature: MA Experiment 20001908 PARAMETER Experiment Name: At_Drought_Reproduction_P Parameter: Treatment Value: Drought vs. No Drought
  misc_feature: MA Experiment ID: 20001911 Result: Down-regulated in Transcription
  misc_feature: MA Experiment 20001911 PARAMETER Experiment Name: At_Drought_Reproduction_P Parameter: Age (day) Value: 40
  misc_feature: MA Experiment 20001911 PARAMETER Experiment Name: At_Drought_Reproduction_P Parameter: Organism Value: A. thaliana
  misc_feature: MA Experiment 20001911 PARAMETER Experiment Name: At_Drought_Reproduction_P Parameter: Plant Line Value: WS
  misc_feature: MA Experiment 20001911 PARAMETER Experiment Name: At_Drought_Reproduction_P Parameter: Timepoint (day) Value: 10
  misc_feature: MA Experiment 20001911 PARAMETER Experiment Name: At_Drought_Reproduction_P Parameter: Tissue Value: Flowers
  misc_feature: MA Experiment 20001911 PARAMETER Experiment Name: At_Drought_Reproduction_P Parameter: Treatment Value: Drought vs. No Drought
atatcattatttaaaaatagaattttatttttctttcttcttcttcaattattatgacactcccgtgttcctaatcttttctcttattcttctctttcttctcatcttacaaaatcttgcaaatcaattttaatgaagagagagcacaaccaccgtgaatcatccgccggagaaggtgggagttcatcaatgacgacggtgattaaagaagaagctgccggagttgacgagcttttggttgttttaggttacaaagttcgatcatccgacatggctgacgtggcacacaagcttgaacagttagagatggttcttggtgatggaatctcgaatctttctgatgaaactgttcattacaatccttctgatctctctggttgggtcgaaagcatgctctcggatcttgacccgacccggattcaagaaaagcctgactcagagtacgatcttagagctattcctggctctgcagtgtatccacgtgacgagcacgtgactcgtcggagcaagaggacgagaattgaatcggagttatcctctacgcgctctgtggtggttttggattctcaagaaactggagtgcgtttagtccacgcgctattagcttgtgctgaagctgttcaacagaacaatttgaagttagccgacgcgctcgtgaagcacgtggggttactcgcgtcctctcaagctggtgctatgaggaaagtcgcgacttacttcgctgaagggcttgcgagaaggatttaccgtatttaccctcgagacgatgtcgcgttgtcttcgttttcggacactcttcagattcatttctatgagtcttgtccgtatctcaagtttgcgcattttacggcgaatcaagcgatacttgaggtttttgctacggcggagaaggttcatgttattgatttaggacttaaccatggtttacaatggccggctttgattcaagctcttgctttacgtcctaatggtccaccggattttcggttaaccgggatcggttattcgttaaccgatattcaagaagttggttggaaacttggtcagcttgcgagtactattggtgtcaatttcgaattcaagagcattgctttaaacaatttgtctgatcttaaaccggaaatgctagacattagacccggtttagaatcagtggcggttaactcggtcttcgagcttcatcgcctcttagctcatcccggttccatcgataagtttttatcgacaatcaaatcaatccgaccggatataatgactgtggtcgagcaagaagcaaaccataacggtaccgtatttctcgatcggttcacggaatcgctacattactattcgagcttattcgactcgctcgagggcccgccaagccaagaccgagtgatgtcggagttattcctaggacggcagatactaaaccttgtggcatgcgaaggagaagaccgggtagagaggcatgagactttaaatcagtggagaaaccggttcggtttaggaggatttaaaccggttagtatcggttcgaacgcgtataagcaagcaagcatgttgttggcactttatgccggggctgatgggtataatgtggaagagaatgaaggttgtttgttgcttggatggcaaacgcgaccgcttattgcaacatctgcgtggcgaatcaatcgtgtggaataaaaataaataatgggaaaagtgaaaatgtgctatatactttattgcattgctgataaagaaaaaaagtcccacgttttccaaattttatgaattctaaattttgttcacttgtcacgag

SEQ ID NO: 46163 - protein, 511 aa, Arabidopsis thaliana
  peptide (1)..(511): Ceres Seq. ID no. 12574922
  misc_feature (126)..(418): Pfam Name: GRAS family transcription factor Pfam Description: GRAS family transcription factor
  misc_feature (1)..(114): Homolog of NCBI NO: 2339980 NR Description: RGA2 protein [Arabidopsis thaliana]
  misc_feature (136)..(508): Homolog of NCBI NO: 2339980 NR Description: RGA2 protein [Arabidopsis thaliana]
  misc_feature (1)..(114): Homolog of NCBI NO: 15223951 NR Description: signal response protein (GAI)
  misc_feature (1)..(114): Homolog of NCBI NO: 2569938 NR Description: GAI [Arabidopsis thaliana]
  misc_feature (136)..(508): Homolog of NCBI NO: 15223951 NR Description: signal response protein (GAI)
  misc_feature (136)..(508): Homolog of NCBI NO: 2569938 NR Description: GAI [Arabidopsis thaliana]
  misc_feature (1)..(94): Homolog of NCBI NO: 20334379 NR Description: GAI-like protein 1 [Vitis vinifera]
  misc_feature (136)..(507): Homolog of NCBI NO: 20334379 NR Description: GAI-like protein 1 [Vitis vinifera]
  misc_feature (1)..(511): Homolog of NCBI NO: 3021336 NR Description: RGA-like [Arabidopsis thaliana]
  misc_feature (1)..(511): Homolog of NCBI NO: 15219630 NR Description: gibberellin regulatory protein, putative
MKREHNHRESSAGEGGSSSMTTVIKEEAAGVDELLVVLGYKVRSSDMADVAHKLEQLEMVLGDGISNLSDETVHYNPSDLSGWVESMLSDLDPTRIQEKPDSEYDLRAIPGSAVYPRDEHVTRRSKRTRIESELSSTRSVVVLDSQETGVRLVHALLACAEAVQQNNLKLADALVKHVGLLASSQAGAMRKVATYFAEGLARRIYRIYPRDDVALSSFSDTLQIHFYESCPYLKFAHFTANQAILEVFATAEKVHVIDLGLNHGLQWPALIQALALRPNGPPDFRLTGIGYSLTDIQEVGWKLGQLASTIGVNFEFKSIALNNLSDLKPEMLDIRPGLESVAVNSVFELHRLLAHPGSIDKFLSTIKSIRPDIMTVVEQEANHNGTVFLDRFTESLHYYSSLFDSLEGPPSQDRVMSELFLGRQILNLVACEGEDRVERHETLNQWRNRFGLGGFKPVSIGSNAYKQASMLLALYAGADGYNVEENEGCLLLGWQTRPLIATSAWRINRVE

SEQ ID NO: 46164 - protein, 492 aa, Arabidopsis thaliana
  peptide (1)..(492): Ceres Seq. ID no. 12574923
  misc_feature (107)..(399): Pfam Name: GRAS family transcription factor Pfam Description: GRAS family transcription factor
  misc_feature (1)..(95): Homolog of NCBI NO: 2339980 NR Description: RGA2 protein [Arabidopsis thaliana]
  misc_feature (117)..(489): Homolog of NCBI NO: 2339980 NR Description: RGA2 protein [Arabidopsis thaliana]
  misc_feature (1)..(95): Homolog of NCBI NO: 15223951 NR Description: signal response protein (GAI)
  misc_feature (1)..(95): Homolog of NCBI NO: 2569938 NR Description: GAI [Arabidopsis thaliana]
  misc_feature (117)..(489): Homolog of NCBI NO: 15223951 NR Description: signal response protein (GAI)
  misc_feature (117)..(489): Homolog of NCBI NO: 2569938 NR Description: GAI [Arabidopsis thaliana]
  misc_feature (1)..(75): Homolog of NCBI NO: 20334379 NR Description: GAI-like protein 1 [Vitis vinifera]
  misc_feature (117)..(488): Homolog of NCBI NO: 20334379 NR Description: GAI-like protein 1 [Vitis vinifera]
  misc_feature (1)..(492): Homolog of NCBI NO: 3021336 NR Description: RGA-like [Arabidopsis thaliana]
  misc_feature (1)..(492): Homolog of NCBI NO: 15219630 NR Description: gibberellin regulatory protein, putative
MTTVIKEEAAGVDELLVVLGYKVRSSDMADVAHKLEQLEMVLGDGISNLSDETVHYNPSDLSGWVESMLSDLDPTRIQEKPDSEYDLRAIPGSAVYPRDEHVTRRSKRTRIESELSSTRSVVVLDSQETGVRLVHALLACAEAVQQNNLKLADALVKHVGLLASSQAGAMRKVATYFAEGLARRIYRIYPRDDVALSSFSDTLQIHFYESCPYLKFAHFTANQAILEVFATAEKVHVIDLGLNHGLQWPALIQALALRPNGPPDFRLTGIGYSLTDIQEVGWKLGQLASTIGVNFEFKSIALNNLSDLKPEMLDIRPGLESVAVNSVFELHRLLAHPGSIDKFLSTIKSIRPDIMTVVEQEANHNGTVFLDRFTESLHYYSSLFDSLEGPPSQDRVMSELFLGRQILNLVACEGEDRVERHETLNQWRNRFGLGGFKPVSIGSNAYKQASMLLALYAGADGYNVEENEGCLLLGWQTRPLIATSAWRINRVE

SEQ ID NO: 46165 - protein, 465 aa, Arabidopsis thaliana
  peptide (1)..(465): Ceres Seq. ID no. 12574924
  misc_feature (80)..(372): Pfam Name: GRAS family transcription factor Pfam Description: GRAS family transcription factor
  misc_feature (1)..(68): Homolog of NCBI NO: 2339980 NR Description: RGA2 protein [Arabidopsis thaliana]
  misc_feature (90)..(462): Homolog of NCBI NO: 2339980 NR Description: RGA2 protein [Arabidopsis thaliana]
  misc_feature (1)..(68): Homolog of NCBI NO: 15223951 NR Description: signal response protein (GAI)
  misc_feature (1)..(68): Homolog of NCBI NO: 2569938 NR Description: GAI [Arabidopsis thaliana]
  misc_feature (90)..(462): Homolog of NCBI NO: 15223951 NR Description: signal response protein (GAI)
  misc_feature (90)..(462): Homolog of NCBI NO: 2569938 NR Description: GAI [Arabidopsis thaliana]
  misc_feature (1)..(48): Homolog of NCBI NO: 20334379 NR Description: GAI-like protein 1 [Vitis vinifera]
  misc_feature (90)..(461): Homolog of NCBI NO: 20334379 NR Description: GAI-like protein 1 [Vitis vinifera]
  misc_feature (1)..(465): Homolog of NCBI NO: 3021336 NR Description: RGA-like [Arabidopsis thaliana]
  misc_feature (1)..(465): Homolog of NCBI NO: 15219630 NR Description: gibberellin regulatory protein, putative
MADVAHKLEQLEMVLGDGISNLSDETVHYNPSDLSGWVESMLSDLDPTRIQEKPDSEYDLRAIPGSAVYPRDEHVTRRSKRTRIESELSSTRSVVVLDSQETGVRLVHALLACAEAVQQNNLKLADALVKHVGLLASSQAGAMRKVATYFAEGLARRIYRIYPRDDVALSSFSDTLQIHFYESCPYLKFAHFTANQAILEVFATAEKVHVIDLGLNHGLQWPALIQALALRPNGPPDFRLTGIGYSLTDIQEVGWKLGQLASTIGVNFEFKSIALNNLSDLKPEMLDIRPGLESVAVNSVFELHRLLAHPGSIDKFLSTIKSIRPDIMTVVEQEANHNGTVFLDRFTESLHYYSSLFDSLEGPPSQDRVMSELFLGRQILNLVACEGEDRVERHETLNQWRNRFGLGGFKPVSIGSNAYKQASMLLALYAGADGYNVEENEGCLLLGWQTRPLIATSAWRINRVE

SEQ ID NO: 46166 - DNA, 2003 bp, Arabidopsis thaliana
  misc_feature (1)..(2003): Ceres Seq. ID no. 13592058
  misc_feature: MA Experiment ID: 20000173 Result: Down-regulated in Transcription
  misc_feature: MA Experiment 20000173 PARAMETER Experiment Name: At_42deg_Heat_P Parameter: Age (day) Value: 14
  misc_feature: MA Experiment 20000173 PARAMETER Experiment Name: At_42deg_Heat_P Parameter: Organism Value: A. thaliana
  misc_feature: MA Experiment 20000173 PARAMETER Experiment Name: At_42deg_Heat_P Parameter: Plant Line Value: WS
  misc_feature: MA Experiment 20000173 PARAMETER Experiment Name: At_42deg_Heat_P Parameter: Temperature (deg C) Value: 42 vs. 22
  misc_feature: MA Experiment 20000173 PARAMETER Experiment Name: At_42deg_Heat_P Parameter: Timepoint (hr) Value: 6
  misc_feature: MA Experiment 20000173 PARAMETER Experiment Name: At_42deg_Heat_P Parameter: Tissue Value: Aerial
  misc_feature: MA Experiment ID: 20000182 Result: Up-regulated in Transcription
  misc_feature: MA Experiment 20000182 PARAMETER Experiment Name: At_2mM_SA_P Parameter: Age (day) Value: 14
  misc_feature: MA Experiment 20000182 PARAMETER Experiment Name: At_2mM_SA_P Parameter: Organism Value: A. thaliana
  misc_feature: MA Experiment 20000182 PARAMETER Experiment Name: At_2mM_SA_P Parameter: Plant Line Value: WS
  misc_feature: MA Experiment 20000182 PARAMETER Experiment Name: At_2mM_SA_P Parameter: Timepoint (hr) Value: 6
  misc_feature: MA Experiment 20000182 PARAMETER Experiment Name: At_2mM_SA_P Parameter: Tissue Value: Aerial
  misc_feature: MA Experiment 20000182 PARAMETER Experiment Name: At_2mM_SA_P Parameter: Treatment Value: 2mM SA vs. No Treatment
  misc_feature: MA Experiment ID: 20000184 Result: Down-regulated in Transcription
  misc_feature: MA Experiment 20000184 PARAMETER Experiment Name: At_Shoots__P Parameter: Age (day) Value: 7
  misc_feature: MA Experiment 20000184 PARAMETER Experiment Name: At_Shoots__P Parameter: Tissue Value: Shoots vs. Whole Plant
  misc_feature: MA Experiment ID: 20001904 Result: Down-regulated in Transcription
  misc_feature: MA Experiment 20001904 PARAMETER Experiment Name: At_Drought_Reproduction_P Parameter: Age (day) Value: 37
  misc_feature: MA Experiment 20001904 PARAMETER Experiment Name: At_Drought_Reproduction_P Parameter: Organism Value: A. thaliana
  misc_feature: MA Experiment 20001904 PARAMETER Experiment Name: At_Drought_Reproduction_P Parameter: Plant Line Value: WS
  misc_feature: MA Experiment 20001904 PARAMETER Experiment Name: At_Drought_Reproduction_P Parameter: Timepoint (day) Value: 7
  misc_feature: MA Experiment 20001904 PARAMETER Experiment Name: At_Drought_Reproduction_P Parameter: Tissue Value: Rosettes
  misc_feature: MA Experiment 20001904 PARAMETER Experiment Name: At_Drought_Reproduction_P Parameter: Treatment Value: Drought vs. No Drought
  misc_feature: MA Experiment ID: 20001905 Result: Down-regulated in Transcription
  misc_feature: MA Experiment 20001905 PARAMETER Experiment Name: At_Drought_Reproduction_P Parameter: Age (day) Value: 40
  misc_feature: MA Experiment 20001905 PARAMETER Experiment Name: At_Drought_Reproduction_P Parameter: Organism Value: A. thaliana
  misc_feature: MA Experiment 20001905 PARAMETER Experiment Name: At_Drought_Reproduction_P Parameter: Plant Line Value: WS
  misc_feature: MA Experiment 20001905 PARAMETER Experiment Name: At_Drought_Reproduction_P Parameter: Timepoint (day) Value: 10
  misc_feature: MA Experiment 20001905 PARAMETER Experiment Name: At_Drought_Reproduction_P Parameter: Tissue Value: Rosettes
  misc_feature: MA Experiment 20001905 PARAMETER Experiment Name: At_Drought_Reproduction_P Parameter: Treatment Value: Drought vs. No Drought
  misc_feature: MA Experiment ID: 20001911 Result: Down-regulated in Transcription
  misc_feature: MA Experiment 20001911 PARAMETER Experiment Name: At_Drought_Reproduction_P Parameter: Age (day) Value: 40
  misc_feature: MA Experiment 20001911 PARAMETER Experiment Name: At_Drought_Reproduction_P Parameter: Organism Value: A. thaliana
  misc_feature: MA Experiment 20001911 PARAMETER Experiment Name: At_Drought_Reproduction_P Parameter: Plant Line Value: WS
  misc_feature: MA Experiment 20001911 PARAMETER Experiment Name: At_Drought_Reproduction_P Parameter: Timepoint (day) Value: 10
  misc_feature: MA Experiment 20001911 PARAMETER Experiment Name: At_Drought_Reproduction_P Parameter: Tissue Value: Flowers
  misc_feature: MA Experiment 20001911 PARAMETER Experiment Name: At_Drought_Reproduction_P Parameter: Treatment Value: Drought vs. No Drought
ttcaacaactgtgttatctctatgaacagttcctttgatgaagaacacaaagtgaaagttgctgtctttataaccaggatttggtaattcccattgtttcatgggcaattcttgccgtggatctttcaaggacaaactcgacgaaggcgataacaataagcctgaagattactctaaaacctctaccaccaacttgtcttctaattccgaccattcaccgaacgctgcagacatcattgctcaagaattctccaaagacaacaacagcaacaacaacagcaaagatccagctcttgttattcctttaagagaaccaatcatgaggcgtaacccagacaatcaagcttactatgttcttggtcataagacaccaaacattcgtgatatctatacccttagccgcaagctaggtcaaggtcaatttggaacgacttatctatgtacagagattgcctcaggcgttgactacgcttgtaagtcaatatccaagaggaagttgatctctaaagaagatgttgaggatgttagaagggagattcagataatgcatcatttagctggtcacggtagtatcgtgacgattaaaggagcttatgaggactctttgtatgttcacattgttatggagctttgtgctggaggtgaattgtttgataggattattcagagaggacattatagtgagaggaaagctgctgagctgactaagatcattgtcggtgttgttgaagcgtgtcattcgcttggtgtgatgcatagagacttgaagcctgagaatttcttattggttaataaggatgatgatttctctctcaaggctattgattttgggctatctgtctttttcaaaccaggtcaaatattcactgatgttgttggaagtccatattatgttgctcctgaggttttgctcaaacgttatgggcctgaagctgatgtgtggactgctggtgttatattgtatatattgctaagcggagtcccacctttctgggcagaaacacagcaagggatatttgatgctgtgttgaaaggatatatcgactttgagtcagacccgtggcctgtgatatccgacagtgctaaagacttgatccgcagaatgttatcctccaagcctgcagaacgtttgaccgctcatgaagtcttgcgtcatccatggatctgtgagaatggtgttgcaccagatagagcactagatccagctgttctttctcgtctcaagcaattctctgcaatgaataaactaaagaagatggctttgaaggttatagctgagagtctctcggaagaagagatagctggtttaagagaaatgtttcaagcaatggatactgataacagcggggcaatcacatttgatgaactcaaagctgggctgagaaaatatggatctaccttgaaagacacagagatccatgatcttatggatgcggctgatgtagacaacagtgggacaatagattacagtgagttcattgcagcgacgatccatctcaacaaactagagcgggaagagcatcttgttgcagcgtttcaatattttgacaaagatggaagcggtttcataacaattgatgagctacaacaagcgtgtgttgaacatggcatggctgatgttttccttgaagacatcatcaaagaagttgatcaaaacaatgatggaaagattgattatggtgagtttgtggagatgatgcaaaagggaaatgctggtgttggaagaaggacgatgagaaatagtctaaacattagcatgagagacgcgtagaggttgttttccccggtgtttaatatgttagtgcgatcgtgactgcgaaaatgttcttattcatggaatcaacaacctcaatgctcaccacctagaaggcgatgaaagaagaccaaaccggattcatacctgtggatggttcgagttttgtttaacgactgtgtgattaatcgtcaagtagttttggaggttttttctttacctctttgttgtttgttcattatggccattg

SEQ ID NO: 46167 - protein, 556 aa, Arabidopsis thaliana
  peptide (1)..(556): Ceres Seq. ID no. 13592059
  misc_feature (97)..(355): Pfam Name: Protein kinase domain Pfam Description: Protein kinase domain
  misc_feature (97)..(355): Pfam Name: Protein kinase domain Pfam Description: Protein kinase domain
  misc_feature (1)..(555): Homolog of NCBI NO: 30679935 NR Description: calcium-dependent protein kinase (CDPK)(CPK6)
  misc_feature (1)..(555): Homolog of NCBI NO: 30679935 NR Description: calcium-dependent protein kinase (CDPK)(CPK6)
  misc_feature (1)..(556): Homolog of NCBI NO: 15236966 NR Description: calcium-dependent protein kinase, putative (CDPK)
  misc_feature (1)..(556): Homolog of NCBI NO: 15236966 NR Description: calcium-dependent protein kinase, putative (CDPK)
MGNSCRGSFKDKLDEGDNNKPEDYSKTSTTNLSSNSDHSPNAADIIAQEFSKDNNSNNNSKDPALVIPLREPIMRRNPDNQAYYVLGHKTPNIRDIYTLSRKLGQGQFGTTYLCTEIASGVDYACKSISKRKLISKEDVEDVRREIQIMHHLAGHGSIVTIKGAYEDSLYVHIVMELCAGGELFDRIIQRGHYSERKAAELTKIIVGVVEACHSLGVMHRDLKPENFLLVNKDDDFSLKAIDFGLSVFFKPGQIFTDVVGSPYYVAPEVLLKRYGPEADVWTAGVILYILLSGVPPFWAETQQGIFDAVLKGYIDFESDPWPVISDSAKDLIRRMLSSKPAERLTAHEVLRHPWICENGVAPDRALDPAVLSRLKQFSAMNKLKKMALKVIAESLSEEEIAGLREMFQAMDTDNSGAITFDELKAGLRKYGSTLKDTEIHDLMDAADVDNSGTIDYSEFIAATIHLNKLEREEHLVAAFQYFDKDGSGFITIDELQQACVEHGMADVFLEDIIKEVDQNNDGKIDYGEFVEMMQKGNAGVGRRTMRNSLNISMRDA

SEQ ID NO: 46168 - protein, 483 aa, Arabidopsis thaliana
  peptide (1)..(483): Ceres Seq. ID no. 13592060
  misc_feature (24)..(282): Pfam Name: Protein kinase domain Pfam Description: Protein kinase domain
  misc_feature (24)..(282): Pfam Name: Protein kinase domain Pfam Description: Protein kinase domain
  misc_feature (1)..(482): Homolog of NCBI NO: 30679935 NR Description: calcium-dependent protein kinase (CDPK)(CPK6)
  misc_feature (1)..(482): Homolog of NCBI NO: 30679935 NR Description: calcium-dependent protein kinase (CDPK)(CPK6)
  misc_feature (1)..(483): Homolog of NCBI NO: 15236966 NR Description: calcium-dependent protein kinase, putative (CDPK)
  misc_feature (1)..(483): Homolog of NCBI NO: 15236966 NR Description: calcium-dependent protein kinase, putative (CDPK)
MRRNPDNQAYYVLGHKTPNIRDIYTLSRKLGQGQFGTTYLCTEIASGVDYACKSISKRKLISKEDVEDVRREIQIMHHLAGHGSIVTIKGAYEDSLYVHIVMELCAGGELFDRIIQRGHYSERKAAELTKIIVGVVEACHSLGVMHRDLKPENFLLVNKDDDFSLKAIDFGLSVFFKPGQIFTDVVGSPYYVAPEVLLKRYGPEADVWTAGVILYILLSGVPPFWAETQQGIFDAVLKGYIDFESDPWPVISDSAKDLIRRMLSSKPAERLTAHEVLRHPWICENGVAPDRALDPAVLSRLKQFSAMNKLKKMALKVIAESLSEEEIAGLREMFQAMDTDNSGAITFDELKAGLRKYGSTLKDTEIHDLMDAADVDNSGTIDYSEFIAATIHLNKLEREEHLVAAFQYFDKDGSGFITIDELQQACVEHGMADVFLEDIIKEVDQNNDGKIDYGEFVEMMQKGNAGVGRRTMRNSLNISMRDA

SEQ ID NO: 46169 - protein, 408 aa, Arabidopsis thaliana
  peptide (1)..(408): Ceres Seq. ID no. 13592061
  misc_feature (1)..(207): Pfam Name: Protein kinase domain Pfam Description: Protein kinase domain
  misc_feature (1)..(207): Pfam Name: Protein kinase domain Pfam Description: Protein kinase domain
  misc_feature (1)..(407): Homolog of NCBI NO: 30679935 NR Description: calcium-dependent protein kinase (CDPK)(CPK6)
  misc_feature (1)..(407): Homolog of NCBI NO: 30679935 NR Description: calcium-dependent protein kinase (CDPK)(CPK6)
  misc_feature (1)..(408): Homolog of NCBI NO: 15236966 NR Description: calcium-dependent protein kinase, putative (CDPK)
  misc_feature (1)..(408): Homolog of NCBI NO: 15236966 NR Description: calcium-dependent protein kinase, putative (CDPK)
MHHLAGHGSIVTIKGAYEDSLYVHIVMELCAGGELFDRIIQRGHYSERKAAELTKIIVGVVEACHSLGVMHRDLKPENFLLVNKDDDFSLKAIDFGLSVFFKPGQIFTDVVGSPYYVAPEVLLKRYGPEADVWTAGVILYILLSGVPPFWAETQQGIFDAVLKGYIDFESDPWPVISDSAKDLIRRMLSSKPAERLTAHEVLRHPWICENGVAPDRALDPAVLSRLKQFSAMNKLKKMALKVIAESLSEEEIAGLREMFQAMDTDNSGAITFDELKAGLRKYGSTLKDTEIHDLMDAADVDNSGTIDYSEFIAATIHLNKLEREEHLVAAFQYFDKDGSGFITIDELQQACVEHGMADVFLEDIIKEVDQNNDGKIDYGEFVEMMQKGNAGVGRRTMRNSLNISMRDA

SEQ ID NO: 46170 - DNA, 1640 bp, Arabidopsis thaliana
  misc_feature (1)..(1640): Ceres Seq. ID no. 12601217
  misc_feature: MA Experiment ID: 20000179 Result: Down-regulated in Transcription
  misc_feature: MA Experiment 20000179 PARAMETER Experiment Name: At_Germinating_Seeds_P Parameter: Age (hr) Value: 6 vs. 0
  misc_feature: MA Experiment 20000179 PARAMETER Experiment Name: At_Germinating_Seeds_P Parameter: Tissue Value: Germinating Seeds
gaaacggaaaactcaaagccgagacagtactctagcttctccggcgactccaggagcgcctctttgcacctctcttcttctctcgctctctgtttctgaggttctgcaagaagtaaaacatgtcagttcttattgtgacgagccttggtgatatagtaattgaccttcactcggataaatgccctttgacttgcaagaacttccttaagctttgcaagatcaagtactacaatgggtgtctttttcacactgtgcaaaaggatttcacagcacagactggtgatccaactggtacgggagctggtggagattcaatctacaaatttctgtacggtgagcaggctcgtttttacaaagatgagattcatcttgatttaaaacattcaaagaccggcactgttgcaatggccagtggtggagagaatctcaatgcttcccagttctatttcacacttcgtgatgatttggactatcttgatgggaaacacactgtgtttggacagattgctgaggggtttgacactttgactaggataaatgaagcttatgttgatccgaagaacagaccctataagaacattagaatcaagcacacacatatacttgatgatccatttgatgatcccccacagctggctgaaatgatgccagatgcttcccctgaaggaaaaccgaaagaagaggtcaaagatgacgtgcggcttgaagatgattgggttccaatggatgaagaacttggtgctcaggaactggaggaggttatccgcgaaaaggcagcccattcaagtgctgttgtacttgaaagtataggagatatccccgaggctgaggtaaaacctcctgacaatgtgctgttcgtctgcaaactgaatccagtgactgaggatgaagacctccataccattttttcacgctttggaaccgttgtatcggctgatgtaatccgggatttcaagacaggtgacagtttgtgctatgcttttatagagtttgagaacaaggagtcatgcgaacaagcgtactttaagatggacaatgctctgatcgatgatagacggatacatgtggatttcagtcagagtgtgtccaaactttggtcacagttcaggcaaaaagactcccaaaagggcaaagggaatgggtgtttcaaatgcggctcgacggatcatattgccaaggactgtgtgggtggtccgtcttcaaagtttattgtaaaagatcaaaacagacagcacggaggaggtgaaggctatgagatggtgtttgagggtgatgtgcatgaaacccccaagcataatagtcatgagagggagaggagtgagaagattcagaggagaagtcctcatggtaatggggaaggcaaaagacagcacagagatgaacgtgatgatggtagaagacagcatgatcgggaagacgcacgagaactggagaggaaacacagagagagaaaagaaagagagagtagggaagatgaagacagaagaagaagaagacgccgtgaagagtctagagataaagagagtcggagagagagagacgaagatgatcatcggagtcatagagattataaagagaggagaagagagagagacgatagacatggaagagaagctagacatgagagaagggatagatga

SEQ ID NO: 46171 - protein, 506 aa, Arabidopsis thaliana
  peptide (1)..(506): Ceres Seq. ID no. 12601218
  misc_feature (245)..(316): Pfam Name: RNA recognition motif. (a.k.a. RRM, RBD, or RNP domain) Pfam Description: RNA recognition motif. (a.k.a. RRM, RBD, or RNP
  misc_feature (294)..(506): Homolog of NCBI NO: 34852572 NR Description: similar to peptidylprolyl isomerase-like 4
  misc_feature (1)..(313): Homolog of NCBI NO: 34852572 NR Description: similar to peptidylprolyl isomerase-like 4
  misc_feature (1)..(462): Homolog of NCBI NO: 12856573 NR Description: unnamed protein product [Mus musculus]
  misc_feature (1)..(506): Homolog of NCBI NO: 21312976 NR Description: peptidylprolyl isomerase-like 4 [Mus musculus]
  misc_feature (1)..(500): Homolog of NCBI NO: 31873601 NR Description: hypothetical protein [Homo sapiens]
  misc_feature (1)..(500): Homolog of NCBI NO: 20911035 NR Description: peptidylprolyl isomerase-like 4
  misc_feature (1)..(464): Homolog of NCBI NO: 34784008 NR Description: Unknown (protein for MGC:63746) [Danio rerio]
  misc_feature (1)..(440): Homolog of NCBI NO: 16648909 NR Description: Unknown protein [Arabidopsis thaliana]
  misc_feature (1)..(506): Homolog of NCBI NO: 25405664 NR Description: hypothetical protein F22G10.24 [imported] -
  misc_feature (1)..(506): Homolog of NCBI NO: 22330231 NR Description: cyclophilin-RNA interacting protein, putative
MSVLIVTSLGDIVIDLHSDKCPLTCKNFLKLCKIKYYNGCLFHTVQKDFTAQTGDPTGTGAGGDSIYKFLYGEQARFYKDEIHLDLKHSKTGTVAMASGGENLNASQFYFTLRDDLDYLDGKHTVFGQIAEGFDTLTRINEAYVDPKNRPYKNIRIKHTHILDDPFDDPPQLAEMMPDASPEGKPKEEVKDDVRLEDDWVPMDEELGAQELEEVIREKAAHSSAVVLESIGDIPEAEVKPPDNVLFVCKLNPVTEDEDLHTIFSRFGTVVSADVIRDFKTGDSLCYAFIEFENKESCEQAYFKMDNALIDDRRIHVDFSQSVSKLWSQFRQKDSQKGKGNGCFKCGSTDHIAKDCVGGPSSKFIVKDQNRQHGGGEGYEMVFEGDVHETPKHNSHERERSEKIQRRSPHGNGEGKRQHRDERDDGRRQHDREDARELERKHRERKERESREDEDRRRRRRREESRDKESRRERDEDDHRSHRDYKERRRERDDRHGREARHERRDR

SEQ ID NO: 46172 - protein, 411 aa, Arabidopsis thaliana
  peptide (1)..(411): Ceres Seq. ID no. 12601219
  misc_feature (150)..(221): Pfam Name: RNA recognition motif. (a.k.a. RRM, RBD, or RNP domain) Pfam Description: RNA recognition motif. (a.k.a. RRM, RBD, or RNP
  misc_feature (199)..(411): Homolog of NCBI NO: 34852572 NR Description: similar to peptidylprolyl isomerase-like 4
  misc_feature (1)..(218): Homolog of NCBI NO: 34852572 NR Description: similar to peptidylprolyl isomerase-like 4
  misc_feature (1)..(367): Homolog of NCBI NO: 12856573 NR Description: unnamed protein product [Mus musculus]
  misc_feature (1)..(411): Homolog of NCBI NO: 21312976 NR Description: peptidylprolyl isomerase-like 4 [Mus musculus]
  misc_feature (1)..(405): Homolog of NCBI NO: 31873601 NR Description: hypothetical protein [Homo sapiens]
  misc_feature (1)..(405): Homolog of NCBI NO: 20911035 NR Description: peptidylprolyl isomerase-like 4
  misc_feature (1)..(369): Homolog of NCBI NO: 34784008 NR Description: Unknown (protein for MGC:63746) [Danio rerio]
  misc_feature (1)..(345): Homolog of NCBI NO: 16648909 NR Description: Unknown protein [Arabidopsis thaliana]
  misc_feature (1)..(411): Homolog of NCBI NO: 25405664 NR Description: hypothetical protein F22G10.24 [imported] -
  misc_feature (1)..(411): Homolog of NCBI NO: 22330231 NR Description: cyclophilin-RNA interacting protein, putative
MASGGENLNASQFYFTLRDDLDYLDGKHTVFGQIAEGFDTLTRINEAYVDPKNRPYKNIRIKHTHILDDPFDDPPQLAEMMPDASPEGKPKEEVKDDVRLEDDWVPMDEELGAQELEEVIREKAAHSSAVVLESIGDIPEAEVKPPDNVLFVCKLNPVTEDEDLHTIFSRFGTVVSADVIRDFKTGDSLCYAFIEFENKESCEQAYFKMDNALIDDRRIHVDFSQSVSKLWSQFRQKDSQKGKGNGCFKCGSTDHIAKDCVGGPSSKFIVKDQNRQHGGGEGYEMVFEGDVHETPKHNSHERERSEKIQRRSPHGNGEGKRQHRDERDDGRRQHDREDARELERKHRERKERESREDEDRRRRRRREESRDKESRRERDEDDHRSHRDYKERRRERDDRHGREARHERRDR

SEQ ID NO: 46173 - protein, 332 aa, Arabidopsis thaliana
  peptide (1)..(332): Ceres Seq. ID no. 12601220
  misc_feature (71)..(142): Pfam Name: RNA recognition motif. (a.k.a. RRM, RBD, or RNP domain) Pfam Description: RNA recognition motif. (a.k.a. RRM, RBD, or RNP
  misc_feature (120)..(332): Homolog of NCBI NO: 34852572 NR Description: similar to peptidylprolyl isomerase-like 4
  misc_feature (1)..(139): Homolog of NCBI NO: 34852572 NR Description: similar to peptidylprolyl isomerase-like 4
  misc_feature (1)..(288): Homolog of NCBI NO: 12856573 NR Description: unnamed protein product [Mus musculus]
  misc_feature (1)..(332): Homolog of NCBI NO: 21312976 NR Description: peptidylprolyl isomerase-like 4 [Mus musculus]
  misc_feature (1)..(326): Homolog of NCBI NO: 31873601 NR Description: hypothetical protein [Homo sapiens]
  misc_feature (1)..(326): Homolog of NCBI NO: 20911035 NR Description: peptidylprolyl isomerase-like 4
  misc_feature (1)..(290): Homolog of NCBI NO: 34784008 NR Description: Unknown (protein for MGC:63746) [Danio rerio]
  misc_feature (1)..(266): Homolog of NCBI NO: 16648909 NR Description: Unknown protein [Arabidopsis thaliana]
  misc_feature (1)..(332): Homolog of NCBI NO: 25405664 NR Description: hypothetical protein F22G10.24 [imported] -
  misc_feature (1)..(332): Homolog of NCBI NO: 22330231 NR Description: cyclophilin-RNA interacting protein, putative
MMPDASPEGKPKEEVKDDVRLEDDWVPMDEELGAQELEEVIREKAAHSSAVVLESIGDIPEAEVKPPDNVLFVCKLNPVTEDEDLHTIFSRFGTVVSADVIRDFKTGDSLCYAFIEFENKESCEQAYFKMDNALIDDRRIHVDFSQSVSKLWSQFRQKDSQKGKGNGCFKCGSTDHIAKDCVGGPSSKFIVKDQNRQHGGGEGYEMVFEGDVHETPKHNSHERERSEKIQRRSPHGNGEGKRQHRDERDDGRRQHDREDARELERKHRERKERESREDEDRRRRRRREESRDKESRRERDEDDHRSHRDYKERRRERDDRHGREARHERRDR

SEQ ID NO: 46174 - DNA, 1281 bp, Arabidopsis thaliana
  misc_feature (1)..(1281): Ceres Seq. ID no. 12574298
  misc_feature: MA Experiment ID: 20000184 Result: Down-regulated in Transcription
  misc_feature: MA Experiment 20000184 PARAMETER Experiment Name: At_Shoots__P Parameter: Age (day) Value: 7
  misc_feature: MA Experiment 20000184 PARAMETER Experiment Name: At_Shoots__P Parameter: Tissue Value: Shoots vs. Whole Plant
atggagagattcaatttctttaatctgatgatcatagctttatgtttatcatccttcgttcacagtctcgaggttcttcttcttatacacacttctcttctaatcttttatgaatcttttaaaagtaacagagaagtttttttattttactcacagatgggagaaacatgtagttcgaccagcgaatgcgacgccggattgagctgtcaaagttgtccggcgaatggaaataccggctctacttgtacccggatccaacctcttaacccgacttcaaaggtgaatggtttgccgtttaacaagtactcgtggctaacaacacacaattcgtacgcaatcacgggggcaaattcggcaactggttcattccttgtctctccaaagaatcaagaagactccatcaccaatcagcttaagaatggtgtgagaggtataatgctagatacatatgattttcaaaacgatatatggttgtgtcattccactggagggacttgctttaacttcacagcctttcaaccagctatcaatgcacttaaagagatcaatgattttcttgaatcaaacttgtctgagattgttactatcatacttgaagattatgtcaaatctcaaatgggattgactaatgtattcaatgcatctggattgagtaagttcttgttaccaatctcgagaatgccgaaagacggtacagactggccaacggttgatgatatggtgaagcagaaccaaaggcttgtggtttttacttccaagaaggataaagaagcttctgaaggtcttgcttaccagtggaattacatggttgaaaatcaatatggtaatgatggaatgaaggatggatcatgctcgagtcgatctgaatcttcttcactagataccatgtctcggtctttggtgtttcagaactactttgaaaccagtccgaattcaacgcaagcgtgtgcggataattcctctccgttgatcgaaatgatgagaacttgccatgaagcagcgggtaaaaggtggcctaacttcatagctgttgatttttatcagaggagtgatagtggaggagctgccgaagctgtagatgaagcaaacggtcgtctcacatgtggttgtgacagcttagtctattgcaagtcaaacgcaccttttggcacttgtgatgctcctcctccgaagtcgtctccatcaccagtctccggaggaaggatacttcacggaaaccaagaaatcttcctgcgggtaatgctgattctacagctattggattgtcatctctcgttctaa

SEQ ID NO: 46175 - protein, 426 aa, Arabidopsis thaliana
  peptide (1)..(426): Ceres Seq. ID no. 12574299
  misc_feature (12)..(385): Homolog of NCBI NO: 21593427 NR Description: unknown [Arabidopsis thaliana]
  misc_feature (12)..(385): Homolog of NCBI NO: 18425155 NR Description: putative protein
  misc_feature (52)..(368): Homolog of NCBI NO: 34897530 NR Description: OSJNBa0042L16.2 [Oryza sativa (japonica
  misc_feature (53)..(394): Homolog of NCBI NO: 38345515 NR Description: OSJNBa0039K24.18 [Oryza sativa (japonica
  misc_feature (52)..(397): Homolog of NCBI NO: 38345461 NR Description: OSJNBa0042L16.16 [Oryza sativa (japonica
  misc_feature (54)..(383): Homolog of NCBI NO: 18402763 NR Description: expressed protein
  misc_feature (54)..(395): Homolog of NCBI NO: 27754722 NR Description: unknown protein [Arabidopsis thaliana]
  misc_feature (54)..(395): Homolog of NCBI NO: 15230348 NR Description: unknown protein; protein id: At3g19310.1
  misc_feature (51)..(401): Homolog of NCBI NO: 38637049 NR Description: MAP3K-like protein kinase [Oryza sativa (japonica
  misc_feature (52)..(425): Homolog of NCBI NO: 25407778 NR Description: MAP3K-like protein kinase [imported] -
MERFNFFNLMIIALCLSSFVHSLEVLLLIHTSLLIFYESFKSNREVFLFYSQMGETCSSTSECDAGLSCQSCPANGNTGSTCTRIQPLNPTSKVNGLPFNKYSWLTTHNSYAITGANSATGSFLVSPKNQEDSITNQLKNGVRGIMLDTYDFQNDIWLCHSTGGTCFNFTAFQPAINALKEINDFLESNLSEIVTIILEDYVKSQMGLTNVFNASGLSKFLLPISRMPKDGTDWPTVDDMVKQNQRLVVFTSKKDKEASEGLAYQWNYMVENQYGNDGMKDGSCSSRSESSSLDTMSRSLVFQNYFETSPNSTQACADNSSPLIEMMRTCHEAAGKRWPNFIAVDFYQRSDSGGAAEAVDEANGRLTCGCDSLVYCKSNAPFGTCDAPPPKSSPSPVSGGRILHGNQEIFLRVMLILQLLDCHLSF

SEQ ID NO: 46176 - protein, 417 aa, Arabidopsis thaliana
  peptide (1)..(417): Ceres Seq. ID no. 12574300
  misc_feature (3)..(376): Homolog of NCBI NO: 21593427 NR Description: unknown [Arabidopsis thaliana]
  misc_feature (3)..(376): Homolog of NCBI NO: 18425155 NR Description: putative protein
  misc_feature (43)..(359): Homolog of NCBI NO: 34897530 NR Description: OSJNBa0042L16.2 [Oryza sativa (japonica
  misc_feature (44)..(385): Homolog of NCBI NO: 38345515 NR Description: OSJNBa0039K24.18 [Oryza sativa (japonica
  misc_feature (43)..(388): Homolog of NCBI NO: 38345461 NR Description: OSJNBa0042L16.16 [Oryza sativa (japonica
  misc_feature (45)..(374): Homolog of NCBI NO: 18402763 NR Description: expressed protein
  misc_feature (45)..(386): Homolog of NCBI NO: 27754722 NR Description: unknown protein [Arabidopsis thaliana]
  misc_feature (45)..(386): Homolog of NCBI NO: 15230348 NR Description: unknown protein; protein id: At3g19310.1
  misc_feature (42)..(392): Homolog of NCBI NO: 38637049 NR Description: MAP3K-like protein kinase [Oryza sativa (japonica
  misc_feature (43)..(416): Homolog of NCBI NO: 25407778 NR Description: MAP3K-like protein kinase [imported] -
MIIALCLSSFVHSLEVLLLIHTSLLIFYESFKSNREVFLFYSQMGETCSSTSECDAGLSCQSCPANGNTGSTCTRIQPLNPTSKVNGLPFNKYSWLTTHNSYAITGANSATGSFLVSPKNQEDSITNQLKNGVRGIMLDTYDFQNDIWLCHSTGGTCFNFTAFQPAINALKEINDFLESNLSEIVTIILEDYVKSQMGLTNVFNASGLSKFLLPISRMPKDGTDWPTVDDMVKQNQRLVVFTSKKDKEASEGLAYQWNYMVENQYGNDGMKDGSCSSRSESSSLDTMSRSLVFQNYFETSPNSTQACADNSSPLIEMMRTCHEAAGKRWPNFIAVDFYQRSDSGGAAEAVDEANGRLTCGCDSLVYCKSNAPFGTCDAPPPKSSPSPVSGGRILHGNQEIFLRVMLILQLLDCHLSF

SEQ ID NO: 46177 - protein, 374 aa, Arabidopsis thaliana
  peptide (1)..(374): Ceres Seq. ID no. 12574301
  misc_feature (1)..(333): Homolog of NCBI NO: 21593427 NR Description: unknown [Arabidopsis thaliana]
  misc_feature (1)..(333): Homolog of NCBI NO: 18425155 NR Description: putative protein
  misc_feature (1)..(316): Homolog of NCBI NO: 34897530 NR Description: OSJNBa0042L16.2 [Oryza sativa (japonica
  misc_feature (1)..(342): Homolog of NCBI NO: 38345515 NR Description: OSJNBa0039K24.18 [Oryza sativa (japonica
  misc_feature (1)..(345): Homolog of NCBI NO: 38345461 NR Description: OSJNBa0042L16.16 [Oryza sativa (japonica
  misc_feature (2)..(331): Homolog of NCBI NO: 18402763 NR Description: expressed protein
  misc_feature (2)..(343): Homolog of NCBI NO: 27754722 NR Description: unknown protein [Arabidopsis thaliana]
  misc_feature (2)..(343): Homolog of NCBI NO: 15230348 NR Description: unknown protein; protein id: At3g19310.1
  misc_feature (1)..(349): Homolog of NCBI NO: 38637049 NR Description: MAP3K-like protein kinase [Oryza sativa (japonica
  misc_feature (1)..(373): Homolog of NCBI NO: 25407778 NR Description: MAP3K-like protein kinase [imported] -
MGETCSSTSECDAGLSCQSCPANGNTGSTCTRIQPLNPTSKVNGLPFNKYSWLTTHNSYAITGANSATGSFLVSPKNQEDSITNQLKNGVRGIMLDTYDFQNDIWLCHSTGGTCFNFTAFQPAINALKEINDFLESNLSEIVTIILEDYVKSQMGLTNVFNASGLSKFLLPISRMPKDGTDWPTVDDMVKQNQRLVVFTSKKDKEASEGLAYQWNYMVENQYGNDGMKDGSCSSRSESSSLDTMSRSLVFQNYFETSPNSTQACADNSSPLIEMMRTCHEAAGKRWPNFIAVDFYQRSDSGGAAEAVDEANGRLTCGCDSLVYCKSNAPFGTCDAPPPKSSPSPVSGGRILHGNQEIFLRVMLILQLLDCHLSF

SEQ ID NO: 46178 - DNA, 2307 bp, Arabidopsis thaliana
  misc_feature (1)..(2307): Ceres Seq. ID no. 12600696
  misc_feature: MA Experiment ID: 20000171 Result: Down-regulated in Transcription
  misc_feature: MA Experiment 20000171 PARAMETER Experiment Name: At_42deg_Heat_P Parameter: Age (day) Value: 14
  misc_feature: MA Experiment 20000171 PARAMETER Experiment Name: At_42deg_Heat_P Parameter: Organism Value: A. thaliana
  misc_feature: MA Experiment 20000171 PARAMETER Experiment Name: At_42deg_Heat_P Parameter: Plant Line Value: WS
  misc_feature: MA Experiment 20000171 PARAMETER Experiment Name: At_42deg_Heat_P Parameter: Temperature (deg C) Value: 42 vs. 22
  misc_feature: MA Experiment 20000171 PARAMETER Experiment Name: At_42deg_Heat_P Parameter: Timepoint (hr) Value: 1
  misc_feature: MA Experiment 20000171 PARAMETER Experiment Name: At_42deg_Heat_P Parameter: Tissue Value: Aerial
  misc_feature: MA Experiment ID: 20000173 Result: Down-regulated in Transcription
  misc_feature: MA Experiment 20000173 PARAMETER Experiment Name: At_42deg_Heat_P Parameter: Age (day) Value: 14
  misc_feature: MA Experiment 20000173 PARAMETER Experiment Name: At_42deg_Heat_P Parameter: Organism Value: A. thaliana
  misc_feature: MA Experiment 20000173 PARAMETER Experiment Name: At_42deg_Heat_P Parameter: Plant Line Value: WS
  misc_feature: MA Experiment 20000173 PARAMETER Experiment Name: At_42deg_Heat_P Parameter: Temperature (deg C) Value: 42 vs. 22
  misc_feature: MA Experiment 20000173 PARAMETER Experiment Name: At_42deg_Heat_P Parameter: Timepoint (hr) Value: 6
  misc_feature: MA Experiment 20000173 PARAMETER Experiment Name: At_42deg_Heat_P Parameter: Tissue Value: Aerial
gatctccccaaattagagtaaaccctaattgtgtatctgtagctttctctctctctctctctctctctctcgcgaagaagaagaagaagaaggagatcaaggaactcgaagtgtgtgtgtgtgtgtttgccttctcttgtcttttagttttttctctctttggctgtgatttcgtcggcgaagagagacatagatcggatatggcggctgataatacgggttcgaaatcgagctccgctgcggattcttacgttgggagcttgattagtttgacatctaagagtgagatcagatacgaagggatcctttacaatattaatacagatgaatccagtatcggacttcaaaacgttcgatcatttggaactgaaggaaggaaaaaagatggtccacaagttcctccaagtgacaaagtttacgagtacatattgttccgtggaactgatatcaaggatttgcaagtcaaagcttctccaccagttcagcctcctgcatctactataaataatgaccctgctataattcagtctcactaccctagcccgatgccaacatctggtagcttgccttctactgcgagcgggtcactacctgacattagttctcataatggacaacctggacaacatggaatgggatttcaaaacgcaatgcctttgtatcagcctggtggaaatcttggttcatggggagcgtcaccacaaccaccaatgtattggcaaggtttctacaccccacctcccaatggccttccccaattgcatcagcagtctctgattcgaccccctcatgggctgccaatgcccaactctcttcagcaacccctgcaatatcctaactttaatacccctcctccacctactgggtcatcatctttgcaggggtcaagcttgccagaagcaccctcttcattgtttccttttagtaccagttctcaaatgttagctcctagttcattgcctttccctggtctaccacctgtgacgctctcgtctagcctgcagtctacactgcaatcagcaccatctccttcactagcttcagagatggcacctccgttgctgtcaaacaaagctcctattactgctcctcctaccctacctcaggatactaatttgctttcgttttctctatctactacgagagccacagaagcaagtactggccttccactgtctaacaagcctagtgtagtaactggtccaatttctccgccgcagacaacaccattaacatctgctcctgttgcgggagtttctagttccattagccaagataagccaaaacctttgttggttactcctggtcaactgctgcagtctggatcttctgcagtctctttgtccccaccctcgacaaatgctgataaagatgttgaggtggttcaagtatcgtcatcagctgggttggaacaatctgttccagttacatccgaagcccaacctccaatactgccattgccttcctctgcaagaccaactcagaagccaaacgggcattctttcccaaatcataatggttacaggggacgtggaagaggacgaggaagaggagcagggagatcacaccaagtaatgaaattcactgaagattttgatttcacagcaatgaacgaaaagttcaataaggatgaagtatggggtcatcttgggaagagtactaccttagatggtgatgaagatgatgattccccgactgtagatgaggctgagcttcctaagatcgaggccaaacctgtttacaacaaagatgactttttcgatagcctatcatcaaacaccattgaccgagagtcccaaaattcaaggcctaggttctcagagcaacggaaactagatactgagacatttggtgaattctcgagattccgaggaggtcgaggagggcgtggtggttatggacgaaacaacggttactcacgtggtggttatggagggcgtggttatggcggttatggtggccgtggcggcggcggcggtggctacgggtatggtggacgtggccaggggagaggcgtatcaaatcgtactacctaaactgttctgctagaaagggctctaaagactcaaaatccaatgggagctcagctcttgagtgcttttggtatgtggcaataaaacaaaaaccgagtcccgtgtaatgttttctgttataaaaccccacttgtgtggttttggagtgtattaatttgatttctgatctttgtttttaagacttggtaatagcgtcgttcttcttatatccaatgttattttgaacttttgtatactcgacatttggtgtgaaatgcattttctatttactctc

SEQ ID NO: 46179 - protein, 677 aa, Arabidopsis thaliana
  peptide (1)..(677): Ceres Seq. ID no. 12600697
  misc_feature (61)..(413): Pfam Name: Atrophin-1 family Pfam Description: Atrophin-1 family
  misc_feature (61)..(413): Pfam Name: Atrophin-1 family Pfam Description: Atrophin-1 family
  misc_feature (67)..(503): Homolog of NCBI NO: 12320748 NR Description: unknown protein [Arabidopsis thaliana]
  misc_feature (67)..(503): Homolog of NCBI NO: 12320748 NR Description: unknown protein [Arabidopsis thaliana]
  misc_feature (182)..(677): Homolog of NCBI NO: 20260584 NR Description: unknown protein [Arabidopsis thaliana]
  misc_feature (182)..(677): Homolog of NCBI NO: 20260584 NR Description: unknown protein [Arabidopsis thaliana]
SPQIRVNPNCVSVAFSLSLSLSLAKKKKKKEIKELEVCVCVFAFSCLLVFSLFGCDFVGEERHRSDMAADNTGSKSSSAADSYVGSLISLTSKSEIRYEGILYNINTDESSIGLQNVRSFGTEGRKKDGPQVPPSDKVYEYILFRGTDIKDLQVKASPPVQPPASTINNDPAIIQSHYPSPMPTSGSLPSTASGSLPDISSHNGQPGQHGMGFQNAMPLYQPGGNLGSWGASPQPPMYWQGFYTPPPNGLPQLHQQSLIRPPHGLPMPNSLQQPLQYPNFNTPPPPTGSSSLQGSSLPEAPSSLFPFSTSSQMLAPSSLPFPGLPPVTLSSSLQSTLQSAPSPSLASEMAPPLLSNKAPITAPPTLPQDTNLLSFSLSTTRATEASTGLPLSNKPSVVTGPISPPQTTPLTSAPVAGVSSSISQDKPKPLLVTPGQLLQSGSSAVSLSPPSTNADKDVEVVQVSSSAGLEQSVPVTSEAQPPILPLPSSARPTQKPNGHSFPNHNGYRGRGRGRGRGAGRSHQVMKFTEDFDFTAMNEKFNKDEVWGHLGKSTTLDGDEDDDSPTVDEAELPKIEAKPVYNKDDFFDSLSSNTIDRESQNSRPRFSEQRKLDTETFGEFSRFRGGRGGRGGYGRNNGYSRGGYGGRGYGGYGGRGGGGGGYGYGGRGQGRGVSNRTT

SEQ ID NO: 46180 - protein, 611 aa, Arabidopsis thaliana
  peptide (1)..(611): Ceres Seq. ID no. 12600698
  misc_feature (1)..(347): Pfam Name: Atrophin-1 family Pfam Description: Atrophin-1 family
  misc_feature (1)..(347): Pfam Name: Atrophin-1 family Pfam Description: Atrophin-1 family
  misc_feature (1)..(437): Homolog of NCBI NO: 12320748 NR Description: unknown protein [Arabidopsis thaliana]
  misc_feature (1)..(437): Homolog of NCBI NO: 12320748 NR Description: unknown protein [Arabidopsis thaliana]
  misc_feature (116)..(611): Homolog of NCBI NO: 20260584 NR Description: unknown protein [Arabidopsis thaliana]
  misc_feature (116)..(611): Homolog of NCBI NO: 20260584 NR Description: unknown protein [Arabidopsis thaliana]
MAADNTGSKSSSAADSYVGSLISLTSKSEIRYEGILYNINTDESSIGLQNVRSFGTEGRKKDGPQVPPSDKVYEYILFRGTDIKDLQVKASPPVQPPASTINNDPAIIQSHYPSPMPTSGSLPSTASGSLPDISSHNGQPGQHGMGFQNAMPLYQPGGNLGSWGASPQPPMYWQGFYTPPPNGLPQLHQQSLIRPPHGLPMPNSLQQPLQYPNFNTPPPPTGSSSLQGSSLPEAPSSLFPFSTSSQMLAPSSLPFPGLPPVTLSSSLQSTLQSAPSPSLASEMAPPLLSNKAPITAPPTLPQDTNLLSFSLSTTRATEASTGLPLSNKPSVVTGPISPPQTTPLTSAPVAGVSSSISQDKPKPLLVTPGQLLQSGSSAVSLSPPSTNADKDVEVVQVSSSAGLEQSVPVTSEAQPPILPLPSSARPTQKPNGHSFPNHNGYRGRGRGRGRGAGRSHQVMKFTEDFDFTAMNEKFNKDEVWGHLGKSTTLDGDEDDDSPTVDEAELPKIEAKPVYNKDDFFDSLSSNTIDRESQNSRPRFSEQRKLDTETFGEFSRFRGGRGGRGGYGRNNGYSRGGYGGRGYGGYGGRGGGGGGYGYGGRGQGRGVSNRTT

SEQ ID NO: 46181 - protein, 496 aa, Arabidopsis thaliana
  peptide (1)..(496): Ceres Seq. ID no. 12600699
  misc_feature (1)..(232): Pfam Name: Atrophin-1 family Pfam Description: Atrophin-1 family
  misc_feature (1)..(232): Pfam Name: Atrophin-1 family Pfam Description: Atrophin-1 family
  misc_feature (1)..(322): Homolog of NCBI NO: 12320748 NR Description: unknown protein [Arabidopsis thaliana]
  misc_feature (1)..(322): Homolog of NCBI NO: 12320748 NR Description: unknown protein [Arabidopsis thaliana]
  misc_feature (1)..(496): Homolog of NCBI NO: 20260584 NR Description: unknown protein [Arabidopsis thaliana]
  misc_feature (1)..(496): Homolog of NCBI NO: 20260584 NR Description: unknown protein [Arabidopsis thaliana]
MPTSGSLPSTASGSLPDISSHNGQPGQHGMGFQNAMPLYQPGGNLGSWGASPQPPMYWQGFYTPPPNGLPQLHQQSLIRPPHGLPMPNSLQQPLQYPNFNTPPPPTGSSSLQGSSLPEAPSSLFPFSTSSQMLAPSSLPFPGLPPVTLSSSLQSTLQSAPSPSLASEMAPPLLSNKAPITAPPTLPQDTNLLSFSLSTTRATEASTGLPLSNKPSVVTGPISPPQTTPLTSAPVAGVSSSISQDKPKPLLVTPGQLLQSGSSAVSLSPPSTNADKDVEVVQVSSSAGLEQSVPVTSEAQPPILPLPSSARPTQKPNGHSFPNHNGYRGRGRGRGRGAGRSHQVMKFTEDFDFTAMNEKFNKDEVWGHLGKSTTLDGDEDDDSPTVDEAELPKIEAKPVYNKDDFFDSLSSNTIDRESQNSRPRFSEQRKLDTETFGEFSRFRGGRGGRGGYGRNNGYSRGGYGGRGYGGYGGRGGGGGGYGYGGRGQGRGVSNRTT

SEQ ID NO: 46182 - DNA, 1429 bp, Arabidopsis thaliana
  misc_feature (1)..(1429): Ceres Seq. ID no. 13578582
  misc_feature: MA Experiment ID: 20001911 Result: Down-regulated in Transcription
  misc_feature: MA Experiment 20001911 PARAMETER Experiment Name: At_Drought_Reproduction_P Parameter: Age (day) Value: 40
  misc_feature: MA Experiment 20001911 PARAMETER Experiment Name: At_Drought_Reproduction_P Parameter: Organism Value: A. thaliana
  misc_feature: MA Experiment 20001911 PARAMETER Experiment Name: At_Drought_Reproduction_P Parameter: Plant Line Value: WS
  misc_feature: MA Experiment 20001911 PARAMETER Experiment Name: At_Drought_Reproduction_P Parameter: Timepoint (day) Value: 10
  misc_feature: MA Experiment 20001911 PARAMETER Experiment Name: At_Drought_Reproduction_P Parameter: Tissue Value: Flowers
  misc_feature: MA Experiment 20001911 PARAMETER Experiment Name: At_Drought_Reproduction_P Parameter: Treatment Value: Drought vs. No Drought
tacacacactctctctttcctctctcttacaccaaaacctatgacgatgaagagagctttaccatctccttcctcactgctcttcttctttctcctgataacaccactcttcctctgccaagaaaacagagtctctgcctcaatgcctccatctgagtcagaaactctcttcaagatcatggaatcaatgtcttctgatcaacaatggcgtcaatcccacccaaacccttgtgcacctggctcatcttggccaggcattgagtgcaaaaccggtccagaccacttatcacacgtctctcgactcgatttcggctctgctccaaacccctcttgtaaatcctctgcttctttcccttcttcaatcttcactctcccttttctccaatcagtcttcttcttcaactgcttcactcacttcccaaccacaatcatgttccctataaaactcatccctaactcttctcttcaacaacttagcctcagatcaaacccttctctctcaggtcaaatccctcctcgcatttcttctctcaaatctttacaaatcctcactctctcacaaaaccgattaaccggagatatccctccggcgattttctcattgaaaagcctcgtacacctcgatctcagctacaacaagctcacaggtaaaatccctctgcaattagggaatctaaataacctcgttggcttagatttaagctacaattctttaaccggtacaatccctccaacgatctctcaactgggtatgcttcagaaactcgacttgagctcaaattctctcttcggaagaatcccggaaggtgtagaaaagcttcgttcgttgtctttcatggcgttgagcaacaacaaactaaagggagcttttccaaaaggaatctcgaaccttcagagtttgcagtacttcataatggataataacccaatgttcgttgctctccccgttgaattagggtttcttcctaaacttcaagagctccagctcgagaattctggatattccggcgtaatcccggagagttacaccaaattgacgaaccttagctcgttgtctcttgctaacaacagattaaccggcgaaatcccatcagggtttgagtctctgccacacgttttccatctgaatctcagcaggaacttactgatcggcgttgttccgtttgattcaagtttcttaagacggttgggtaagaacttggatttgagcgggaacagaggattgtgtctgaatccggaggatgagtttagtgttgtcaagaccggggttgatgtatgcgggaagaacgttagtagtggtggaggtttatcggtgcattcatcgaagaagaaatctcaagcttctcggtattacagatcttgcttcttcgccaatgctctgtttccgtttgctctgtttctaggtttacatcaacgatgggttctctaa

SEQ ID NO: 46183 - protein, 475 aa, Arabidopsis thaliana
  peptide (1)..(475): Ceres Seq. ID no. 13578583
  misc_feature (203)..(226): Pfam Name: Leucine Rich Repeat Pfam Description: Leucine Rich Repeat
  misc_feature (25)..(414): Homolog of NCBI NO: 15236148 NR Description: leucine rich repeat protein family (fragment)
  misc_feature (25)..(414): Homolog of NCBI NO: 7487680 NR Description: hypothetical protein T5F17.10 - Arabidopsis
  misc_feature (48)..(409): Homolog of NCBI NO: 15222215 NR Description: leucine rich repeat protein family [Arabidopsis
  misc_feature (41)..(426): Homolog of NCBI NO: 18409119 NR Description: leucine rich repeat protein family [Arabidopsis
  misc_feature (45)..(456): Homolog of NCBI NO: 34894182 NR Description: P0439B06.12 [Oryza sativa (japonica
  misc_feature (46)..(426): Homolog of NCBI NO: 34912808 NR Description: P0501G01.13 [Oryza sativa (japonica
  misc_feature (46)..(447): Homolog of NCBI NO: 26452151 NR Description: GPI-anchored protein [Arabidopsis thaliana]
  misc_feature (46)..(447): Homolog of NCBI NO: 15220050 NR Description: leucine rich repeat protein family [Arabidopsis
  misc_feature (36)..(435): Homolog of NCBI NO: 34910824 NR Description: putative Hcr2-0B [Oryza sativa (japonica
  misc_feature (14)..(475): Homolog of NCBI NO: 15228004 NR Description: leucine rich repeat protein family [Arabidopsis
THTLSFLSLTPKPMTMKRALPSPSSLLFFFLLITPLFLCQENRVSASMPPSESETLFKIMESMSSDQQWRQSHPNPCAPGSSWPGIECKTGPDHLSHVSRLDFGSAPNPSCKSSASFPSSIFTLPFLQSVFFFNCFTHFPTTIMFPIKLIPNSSLQQLSLRSNPSLSGQIPPRISSLKSLQILTLSQNRLTGDIPPAIFSLKSLVHLDLSYNKLTGKIPLQLGNLNNLVGLDLSYNSLTGTIPPTISQLGMLQKLDLSSNSLFGRIPEGVEKLRSLSFMALSNNKLKGAFPKGISNLQSLQYFIMDNNPMFVALPVELGFLPKLQELQLENSGYSGVIPESYTKLTNLSSLSLANNRLTGEIPSGFESLPHVFHLNLSRNLLIGVVPFDSSFLRRLGKNLDLSGNRGLCLNPEDEFSVVKTGVDVCGKNVSSGGGLSVHSSKKKSQASRYYRSCFFANALFPFALFLGLHQRWVL

SEQ ID NO: 46184 - protein, 462 aa, Arabidopsis thaliana
  peptide (1)..(462): Ceres Seq. ID no. 13578584
  misc_feature (190)..(213): Pfam Name: Leucine Rich Repeat Pfam Description: Leucine Rich Repeat
  misc_feature (12)..(401): Homolog of NCBI NO: 15236148 NR Description: leucine rich repeat protein family (fragment)
  misc_feature (12)..(401): Homolog of NCBI NO: 7487680 NR Description: hypothetical protein T5F17.10 - Arabidopsis
  misc_feature (35)..(396): Homolog of NCBI NO: 15222215 NR Description: leucine rich repeat protein family [Arabidopsis
  misc_feature (28)..(413): Homolog of NCBI NO: 18409119 NR Description: leucine rich repeat protein family [Arabidopsis
  misc_feature (32)..(443): Homolog of NCBI NO: 34894182 NR Description: P0439B06.12 [Oryza sativa (japonica
  misc_feature (33)..(413): Homolog of NCBI NO: 34912808 NR Description: P0501G01.13 [Oryza sativa (japonica
  misc_feature (33)..(434): Homolog of NCBI NO: 26452151 NR Description: GPI-anchored protein [Arabidopsis thaliana]
  misc_feature (33)..(434): Homolog of NCBI NO: 15220050 NR Description: leucine rich repeat protein family [Arabidopsis
  misc_feature (23)..(422): Homolog of NCBI NO: 34910824 NR Description: putative Hcr2-0B [Oryza sativa (japonica
  misc_feature (1)..(462): Homolog of NCBI NO: 15228004 NR Description: leucine rich repeat protein family [Arabidopsis
MTMKRALPSPSSLLFFFLLITPLFLCQENRVSASMPPSESETLFKIMESMSSDQQWRQSHPNPCAPGSSWPGIECKTGPDHLSHVSRLDFGSAPNPSCKSSASFPSSIFTLPFLQSVFFFNCFTHFPTTIMFPIKLIPNSSLQQLSLRSNPSLSGQIPPRISSLKSLQILTLSQNRLTGDIPPAIFSLKSLVHLDLSYNKLTGKIPLQLGNLNNLVGLDLSYNSLTGTIPPTISQLGMLQKLDLSSNSLFGRIPEGVEKLRSLSFMALSNNKLKGAFPKGISNLQSLQYFIMDNNPMFVALPVELGFLPKLQELQLENSGYSGVIPESYTKLTNLSSLSLANNRLTGEIPSGFESLPHVFHLNLSRNLLIGVVPFDSSFLRRLGKNLDLSGNRGLCLNPEDEFSVVKTGVDVCGKNVSSGGGLSVHSSKKKSQASRYYRSCFFANALFPFALFLGLHQRWVL

SEQ ID NO: 46185 - protein, 460 aa, Arabidopsis thaliana
  peptide (1)..(460): Ceres Seq. ID no. 13578585
  misc_feature (188)..(211): Pfam Name: Leucine Rich Repeat Pfam Description: Leucine Rich Repeat
  misc_feature (10)..(399): Homolog of NCBI NO: 15236148 NR Description: leucine rich repeat protein family (fragment)
  misc_feature (10)..(399): Homolog of NCBI NO: 7487680 NR Description: hypothetical protein T5F17.10 - Arabidopsis
  misc_feature (33)..(394): Homolog of NCBI NO: 15222215 NR Description: leucine rich repeat protein family [Arabidopsis
  misc_feature (26)..(411): Homolog of NCBI NO: 18409119 NR Description: leucine rich repeat protein family [Arabidopsis
  misc_feature (30)..(441): Homolog of NCBI NO: 34894182 NR Description: P0439B06.12 [Oryza sativa (japonica
  misc_feature (31)..(411): Homolog of NCBI NO: 34912808 NR Description: P0501G01.13 [Oryza sativa (japonica
  misc_feature (31)..(432): Homolog of NCBI NO: 26452151 NR Description: GPI-anchored protein [Arabidopsis thaliana]
  misc_feature (31)..(432): Homolog of NCBI NO: 15220050 NR Description: leucine rich repeat protein family [Arabidopsis
  misc_feature (21)..(420): Homolog of NCBI NO: 34910824 NR Description: putative Hcr2-0B [Oryza sativa (japonica
  misc_feature (1)..(460): Homolog of NCBI NO: 15228004 NR Description: leucine rich repeat protein family [Arabidopsis
MKRALPSPSSLLFFFLLITPLFLCQENRVSASMPPSESETLFKIMESMSSDQQWRQSHPNPCAPGSSWPGIECKTGPDHLSHVSRLDFGSAPNPSCKSSASFPSSIFTLPFLQSVFFFNCFTHFPTTIMFPIKLIPNSSLQQLSLRSNPSLSGQIPPRISSLKSLQILTLSQNRLTGDIPPAIFSLKSLVHLDLSYNKLTGKIPLQLGNLNNLVGLDLSYNSLTGTIPPTISQLGMLQKLDLSSNSLFGRIPEGVEKLRSLSFMALSNNKLKGAFPKGISNLQSLQYFIMDNNPMFVALPVELGFLPKLQELQLENSGYSGVIPESYTKLTNLSSLSLANNRLTGEIPSGFESLPHVFHLNLSRNLLIGVVPFDSSFLRRLGKNLDLSGNRGLCLNPEDEFSVVKTGVDVCGKNVSSGGGLSVHSSKKKSQASRYYRSCFFANALFPFALFLGLHQRWVL

SEQ ID NO: 46186 - DNA, 2386 bp, Arabidopsis thaliana
  misc_feature (1)..(2386): Ceres Seq. ID no. 12601233
  misc_feature: MA Experiment ID: 20000286 Result: Down-regulated in Transcription
  misc_feature: MA Experiment 20000286 PARAMETER Experiment Name: At_Open_Flower_P Parameter: Age (day) Value: 21
  misc_feature: MA Experiment 20000286 PARAMETER Experiment Name: At_Open_Flower_P Parameter: Plant Line Value: WS
  misc_feature: MA Experiment 20000286 PARAMETER Experiment Name: At_Open_Flower_P Parameter: Tissue Value: Half Open vs. Whole Plant
  misc_feature: MA Experiment ID: 20000439 Result: Down-regulated in Transcription
  misc_feature: MA Experiment 20000439 PARAMETER Experiment Name: At_Roots__P Parameter: Age (day) Value: 14 vs. 21
  misc_feature: MA Experiment 20000439 PARAMETER Experiment Name: At_Roots__P Parameter: Organism Value: A. thaliana
  misc_feature: MA Experiment 20000439 PARAMETER Experiment Name: At_Roots__P Parameter: Tissue Value: Roots vs. Whole Plant
  misc_feature: MA Experiment ID: 20001451 Result: Up-regulated in Transcription
  misc_feature: MA Experiment 20001451 PARAMETER Experiment Name: At_Far-red-induction_P Parameter: Age (day) Value: 7
  misc_feature: MA Experiment 20001451 PARAMETER Experiment Name: At_Far-red-induction_P Parameter: Light Value: Far-red vs. White
  misc_feature: MA Experiment 20001451 PARAMETER Experiment Name: At_Far-red-induction_P Parameter: Organism Value: A. thaliana
  misc_feature: MA Experiment 20001451 PARAMETER Experiment Name: At_Far-red-induction_P Parameter: Plant Line Value: Columbia
  misc_feature: MA Experiment 20001451 PARAMETER Experiment Name: At_Far-red-induction_P Parameter: Timepoint (hr) Value: 24
  misc_feature: MA Experiment 20001451 PARAMETER Experiment Name: At_Far-red-induction_P Parameter: Tissue Value: Whole Plant
  misc_feature: MA Experiment ID: 20001905 Result: Down-regulated in Transcription
  misc_feature: MA Experiment 20001905 PARAMETER Experiment Name: At_Drought_Reproduction_P Parameter: Age (day) Value: 40
  misc_feature: MA Experiment 20001905 PARAMETER Experiment Name: At_Drought_Reproduction_P Parameter: Organism Value: A. thaliana
  misc_feature: MA Experiment 20001905 PARAMETER Experiment Name: At_Drought_Reproduction_P Parameter: Plant Line Value: WS
  misc_feature: MA Experiment 20001905 PARAMETER Experiment Name: At_Drought_Reproduction_P Parameter: Timepoint (day) Value: 10
  misc_feature: MA Experiment 20001905 PARAMETER Experiment Name: At_Drought_Reproduction_P Parameter: Tissue Value: Rosettes
  misc_feature: MA Experiment 20001905 PARAMETER Experiment Name: At_Drought_Reproduction_P Parameter: Treatment Value: Drought vs. No Drought
aaaaaataatccccaaataatggagacgaagtggagagagaaagctcccactctctcacaccccaaagcttcttcttcttcttcctcttcttcctcttcctcttctctaatctgaatccaaagcctctctctttatgacacaagatcgctcagaaatgtctgaagatgacgatgaccaacaatctccaccgttggatctaccctctaccgccatagctgatccttgctcatcttcctcttcaccaaacaaatctcgtaactgtatctcaaattctcaaactttccctgaccatgttctcgaaaacgtacttgagaacgttcttcagttcctagattcaagatgtgaccgtaacgctgcttctctagtttgcaaatcttggtggcgtgttgaagctttgactcgatctgaggtttttattggtaactgttacgctctttctccggcgaggttgactcagagattcaagcgtgttaggtctcttgtgctgaaagggaaacctaggtttgctgatttcaatctcatgcctcctgattggggtgctaattttgctccttgggtttctactatggctcaagcttatccttgtcttgagaaagttgatttgaagaggatgtttgttactgatgatgatttagctcttcttgctgactcttttcctgggtttaaagagcttatcttggtttgttgtgaaggttttggtactagtggtatctctattgttgccaacaagtgcagaaagctgaaagtgcttgatttgattgagtctgaggtcacggatgatgaagtggattggatctcttgtttccctgaggatgtaacttgtttggagtctttagcttttgactgtgtggaagctcctatcaattttaaggcgcttgagggtcttgttgctaggtcaccgttcttgaagaaacttaggctaaacaggtttgtgtctcttgtggagctacatcgtctgctacttggagctccacagcttactagtcttgggactggttcatttagccatgatgaggaacctcagagtgagcaagaaccagattatgctgctgcatttcgtgcttgtaaatctgtagtttgcttgtcagggtttagagagttgatgccggagtatcttccagctatctttccggtgtgcgctaatctcacctccctgaacttcagttatgctaacatttctcctgacatgttcaagcccatcatactcaattgccacaaactccaggtgttctgggcccttgattcaatatgtgatgaaggactacaggcagttgcagccacttgcaaggaactccgtgaactcaggatcttcccttttgatcctcgggaagacagtgaaggtcctgtctctgaattaggcctccaagcaatctccgagggttgtaggaaactagaatctattctctacttttgccagcgcatgactaatgccgctgtgatagccatgtcagagaactgtccagagcttactgtgtttaggctgtgcataatgggtcgacataggcctgaccatgtaacaggaaagcctatggacgagggatttggtgccattgttaaaaactgcaagaagctaactcgccttgcagtgtcgggattgctgacagatcaagcttttaggtatatgggtgagtatgggaaattggtccgtacgctttcagtagcttttgcaggggacagtgacatggctctgagacatgtcctagaaggttgccctagactgcagaaacttgagataagggacagtccctttggagatgttgcattacggtctggtatgcatcgctattacaacatgaggtttgtttggatgtcagcatgtagcttgtctaagggatgctgcaaggatattgcacgagcaatgccgaatctagttgtggaagtaattggatcggatgatgatgatgacaatagggattatgtcgagactttatacatgtatcggtctcttgatggtccaaggaatgatgcaccaaagttcgtcacgattttatagaacgaggagcatttccgtgtttccgttttttaagacgggaatgaaatgggtaagtgtaggaagctcagatgatgatggtggtggcatcagaggcacactacatgattgttgatgatgaatgatggtggttgggacttgggaggaatgcaagattgttgtatcattattttctttttttatttttgggttcaaaagatgttatttgggtggttaggtggaacagtggatgtatgttttgggagcatcggtgttagttagacagctgagttggttctaataagctgcacttttggctctctctagttgttgttgttgagaaactaatgagacatctctctcttttgtctttcccatttttaattaattttgagatatttcatcttaatctgttt

SEQ ID NO: 46187 - protein, 619 aa, Arabidopsis thaliana
  peptide (1)..(619): Ceres Seq. ID no. 12601234
  misc_feature (56)..(544): Homolog of NCBI NO: 21536497 NR Description: F-box protein family, AtFBL4 [Arabidopsis
  misc_feature (56)..(619): Homolog of NCBI NO: 18412567 NR Description: transport inhibitor response 1 (TIR1), AtFBL1
  misc_feature (58)..(619): Homolog of NCBI NO: 18412177 NR Description: F-box protein GRR1-like protein 1, AtFBL18
  misc_feature (58)..(619): Homolog of NCBI NO: 12658970 NR Description: GRR1-like protein 1 [Arabidopsis thaliana]
  misc_feature (50)..(619): Homolog of NCBI NO: 18405102 NR Description: transport inhibitor response 1 (TIR1), putative
  misc_feature (50)..(619): Homolog of NCBI NO: 18391439 NR Description: transport inhibitor response 1 (TIR1), putative
  misc_feature (8)..(619): Homolog of NCBI NO: 34902412 NR Description: Putative F-box containing protein TIR1
  misc_feature (1)..(619): Homolog of NCBI NO: 13249030 NR Description: F-box containing protein TIR1
  misc_feature (8)..(619): Homolog of NCBI NO: 7487322 NR Description: hypothetical protein T22A6.220 - Arabidopsis
  misc_feature (1)..(619): Homolog of NCBI NO: 30686516 NR Description: F-box protein family, AtFBX14 [Arabidopsis
  misc_feature (56)..(544): Homolog of NCBI NO: 21536497 NR Description: F-box protein family, AtFBL4 [Arabidopsis
  misc_feature (56)..(619): Homolog of NCBI NO: 18412567 NR Description: transport inhibitor response 1 (TIR1), AtFBL1
  misc_feature (58)..(619): Homolog of NCBI NO: 18412177 NR Description: F-box protein GRR1-like protein 1, AtFBL18
  misc_feature (58)..(619): Homolog of NCBI NO: 12658970 NR Description: GRR1-like protein 1 [Arabidopsis thaliana]
  misc_feature (50)..(619): Homolog of NCBI NO: 18405102 NR Description: transport inhibitor response 1 (TIR1), putative
  misc_feature (50)..(619): Homolog of NCBI NO: 18391439 NR Description: transport inhibitor response 1 (TIR1), putative
  misc_feature (8)..(619): Homolog of NCBI NO: 34902412 NR Description: Putative F-box containing protein TIR1
  misc_feature (1)..(619): Homolog of NCBI NO: 13249030 NR Description: F-box containing protein TIR1
  misc_feature (8)..(619): Homolog of NCBI NO: 7487322 NR Description: hypothetical protein T22A6.220 - Arabidopsis
  misc_feature (1)..(619): Homolog of NCBI NO: 30686516 NR Description: F-box protein family, AtFBX14 [Arabidopsis
MTQDRSEMSEDDDDQQSPPLDLPSTAIADPCSSSSSPNKSRNCISNSQTFPDHVLENVLENVLQFLDSRCDRNAASLVCKSWWRVEALTRSEVFIGNCYALSPARLTQRFKRVRSLVLKGKPRFADFNLMPPDWGANFAPWVSTMAQAYPCLEKVDLKRMFVTDDDLALLADSFPGFKELILVCCEGFGTSGISIVANKCRKLKVLDLIESEVTDDEVDWISCFPEDVTCLESLAFDCVEAPINFKALEGLVARSPFLKKLRLNRFVSLVELHRLLLGAPQLTSLGTGSFSHDEEPQSEQEPDYAAAFRACKSVVCLSGFRELMPEYLPAIFPVCANLTSLNFSYANISPDMFKPIILNCHKLQVFWALDSICDEGLQAVAATCKELRELRIFPFDPREDSEGPVSELGLQAISEGCRKLESILYFCQRMTNAAVIAMSENCPELTVFRLCIMGRHRPDHVTGKPMDEGFGAIVKNCKKLTRLAVSGLLTDQAFRYMGEYGKLVRTLSVAFAGDSDMALRHVLEGCPRLQKLEIRDSPFGDVALRSGMHRYYNMRFVWMSACSLSKGCCKDIARAMPNLVVEVIGSDDDDDNRDYVETLYMYRSLDGPRNDAPKFVTIL

SEQ ID NO: 46188 - protein, 612 aa, Arabidopsis thaliana
  peptide (1)..(612): Ceres Seq. ID no. 12601235
  misc_feature (49)..(537): Homolog of NCBI NO: 21536497 NR Description: F-box protein family, AtFBL4 [Arabidopsis
  misc_feature (49)..(612): Homolog of NCBI NO: 18412567 NR Description: transport inhibitor response 1 (TIR1), AtFBL1
  misc_feature (51)..(612): Homolog of NCBI NO: 18412177 NR Description: F-box protein GRR1-like protein 1, AtFBL18
  misc_feature (51)..(612): Homolog of NCBI NO: 12658970 NR Description: GRR1-like protein 1 [Arabidopsis thaliana]
  misc_feature (43)..(612): Homolog of NCBI NO: 18405102 NR Description: transport inhibitor response 1 (TIR1), putative
  misc_feature (43)..(612): Homolog of NCBI NO: 18391439 NR Description: transport inhibitor response 1 (TIR1), putative
  misc_feature (1)..(612): Homolog of NCBI NO: 34902412 NR Description: Putative F-box containing protein TIR1
  misc_feature (1)..(612): Homolog of NCBI NO: 13249030 NR Description: F-box containing protein TIR1
  misc_feature (1)..(612): Homolog of NCBI NO: 7487322 NR Description: hypothetical protein T22A6.220 - Arabidopsis
  misc_feature (1)..(612): Homolog of NCBI NO: 30686516 NR Description: F-box protein family, AtFBX14 [Arabidopsis
  misc_feature (49)..(537): Homolog of NCBI NO: 21536497 NR Description: F-box protein family, AtFBL4 [Arabidopsis
  misc_feature (49)..(612): Homolog of NCBI NO: 18412567 NR Description: transport inhibitor response 1 (TIR1), AtFBL1
  misc_feature (51)..(612): Homolog of NCBI NO: 18412177 NR Description: F-box protein GRR1-like protein 1, AtFBL18
  misc_feature (51)..(612): Homolog of NCBI NO: 12658970 NR Description: GRR1-like protein 1 [Arabidopsis thaliana]
  misc_feature (43)..(612): Homolog of NCBI NO: 18405102 NR Description: transport inhibitor response 1 (TIR1), putative
  misc_feature (43)..(612): Homolog of NCBI NO: 18391439 NR Description: transport inhibitor response 1 (TIR1), putative
  misc_feature (1)..(612): Homolog of NCBI NO: 34902412 NR Description: Putative F-box containing protein TIR1
  misc_feature (1)..(612): Homolog of NCBI NO: 13249030 NR Description: F-box containing protein TIR1
  misc_feature (1)..(612): Homolog of NCBI NO: 7487322 NR Description: hypothetical protein T22A6.220 - Arabidopsis
  misc_feature (1)..(612): Homolog of NCBI NO: 30686516 NR Description: F-box protein family, AtFBX14 [Arabidopsis
MSEDDDDQQSPPLDLPSTAIADPCSSSSSPNKSRNCISNSQTFPDHVLENVLENVLQFLDSRCDRNAASLVCKSWWRVEALTRSEVFIGNCYALSPARLTQRFKRVRSLVLKGKPRFADFNLMPPDWGANFAPWVSTMAQAYPCLEKVDLKRMFVTDDDLALLADSFPGFKELILVCCEGFGTSGISIVANKCRKLKVLDLIESEVTDDEVDWISCFPEDVTCLESLAFDCVEAPINFKALEGLVARSPFLKKLRLNRFVSLVELHRLLLGAPQLTSLGTGSFSHDEEPQSEQEPDYAAAFRACKSVVCLSGFRELMPEYLPAIFPVCANLTSLNFSYANISPDMFKPIILNCHKLQVFWALDSICDEGLQAVAATCKELRELRIFPFDPREDSEGPVSELGLQAISEGCRKLESILYFCQRMTNAAVIAMSENCPELTVFRLCIMGRHRPDHVTGKPMDEGFGAIVKNCKKLTRLAVSGLLTDQAFRYMGEYGKLVRTLSVAFAGDSDMALRHVLEGCPRLQKLEIRDSPFGDVALRSGMHRYYNMRFVWMSACSLSKGCCKDIARAMPNLVVEVIGSDDDDDNRDYVETLYMYRSLDGPRNDAPKFVTIL

SEQ ID NO: 46189 - protein, 490 aa, Arabidopsis thaliana
  peptide (1)..(490): Ceres Seq. ID no. 12601236
  misc_feature (1)..(415): Homolog of NCBI NO: 21536497 NR Description: F-box protein family, AtFBL4 [Arabidopsis
  misc_feature (1)..(490): Homolog of NCBI NO: 18412567 NR Description: transport inhibitor response 1 (TIR1), AtFBL1
  misc_feature (1)..(490): Homolog of NCBI NO: 18412177 NR Description: F-box protein GRR1-like protein 1, AtFBL18
  misc_feature (1)..(490): Homolog of NCBI NO: 12658970 NR Description: GRR1-like protein 1 [Arabidopsis thaliana]
  misc_feature (1)..(490): Homolog of NCBI NO: 18405102 NR Description: transport inhibitor response 1 (TIR1), putative
  misc_feature (1)..(490): Homolog of NCBI NO: 18391439 NR Description: transport inhibitor response 1 (TIR1), putative
  misc_feature (1)..(490): Homolog of NCBI NO: 34902412 NR Description: Putative F-box containing protein TIR1
  misc_feature (1)..(490): Homolog of NCBI NO: 13249030 NR Description: F-box containing protein TIR1
  misc_feature (1)..(490): Homolog of NCBI NO: 7487322 NR Description: hypothetical protein T22A6.220 - Arabidopsis
  misc_feature (1)..(490): Homolog of NCBI NO: 30686516 NR Description: F-box protein family, AtFBX14 [Arabidopsis
  misc_feature (1)..(415): Homolog of NCBI NO: 21536497 NR Description: F-box protein family, AtFBL4 [Arabidopsis
  misc_feature (1)..(490): Homolog of NCBI NO: 18412567 NR Description: transport inhibitor response 1 (TIR1), AtFBL1
  misc_feature (1)..(490): Homolog of NCBI NO: 18412177 NR Description: F-box protein GRR1-like protein 1, AtFBL18
  misc_feature (1)..(490): Homolog of NCBI NO: 12658970 NR Description: GRR1-like protein 1 [Arabidopsis thaliana]
  misc_feature (1)..(490): Homolog of NCBI NO: 18405102 NR Description: transport inhibitor response 1 (TIR1), putative
  misc_feature (1)..(490): Homolog of NCBI NO: 18391439 NR Description: transport inhibitor response 1 (TIR1), putative
  misc_feature (1)..(490): Homolog of NCBI NO: 34902412 NR Description: Putative F-box containing protein TIR1
  misc_feature (1)..(490): Homolog of NCBI NO: 13249030 NR Description: F-box containing protein TIR1
  misc_feature (1)..(490): Homolog of NCBI NO: 7487322 NR Description: hypothetical protein T22A6.220 - Arabidopsis
  misc_feature (1)..(490): Homolog of NCBI NO: 30686516 NR Description: F-box protein family, AtFBX14 [Arabidopsis
MPPDWGANFAPWVSTMAQAYPCLEKVDLKRMFVTDDDLALLADSFPGFKELILVCCEGFGTSGISIVANKCRKLKVLDLIESEVTDDEVDWISCFPEDVTCLESLAFDCVEAPINFKALEGLVARSPFLKKLRLNRFVSLVELHRLLLGAPQLTSLGTGSFSHDEEPQSEQEPDYAAAFRACKSVVCLSGFRELMPEYLPAIFPVCANLTSLNFSYANISPDMFKPIILNCHKLQVFWALDSICDEGLQAVAATCKELRELRIFPFDPREDSEGPVSELGLQAISEGCRKLESILYFCQRMTNAAVIAMSENCPELTVFRLCIMGRHRPDHVTGKPMDEGFGAIVKNCKKLTRLAVSGLLTDQAFRYMGEYGKLVRTLSVAFAGDSDMALRHVLEGCPRLQKLEIRDSPFGDVALRSGMHRYYNMRFVWMSACSLSKGCCKDIARAMPNLVVEVIGSDDDDDNRDYVETLYMYRSLDGPRNDAPKFVTIL

SEQ ID NO: 46190 - DNA, 1786 bp, Arabidopsis thaliana
  misc_feature (1)..(1786): Ceres Seq. ID no. 14309881
  misc_feature: MA Experiment ID: 20000173 Result: Down-regulated in Transcription
  misc_feature: MA Experiment 20000173 PARAMETER Experiment Name: At_42deg_Heat_P Parameter: Age (day) Value: 14
  misc_feature: MA Experiment 20000173 PARAMETER Experiment Name: At_42deg_Heat_P Parameter: Organism Value: A. thaliana
  misc_feature: MA Experiment 20000173 PARAMETER Experiment Name: At_42deg_Heat_P Parameter: Plant Line Value: WS
  misc_feature: MA Experiment 20000173 PARAMETER Experiment Name: At_42deg_Heat_P Parameter: Temperature (deg C) Value: 42 vs. 22
  misc_feature: MA Experiment 20000173 PARAMETER Experiment Name: At_42deg_Heat_P Parameter: Timepoint (hr) Value: 6
  misc_feature: MA Experiment 20000173 PARAMETER Experiment Name: At_42deg_Heat_P Parameter: Tissue Value: Aerial
  misc_feature: MA Experiment ID: 20000180 Result: Down-regulated in Transcription
  misc_feature: MA Experiment 20000180 PARAMETER Experiment Name: At_Germinating_Seeds_P Parameter: Age (hr) Value: 24 vs. 0
  misc_feature: MA Experiment 20000180 PARAMETER Experiment Name: At_Germinating_Seeds_P Parameter: Tissue Value: Germinating Seeds
  misc_feature: MA Experiment ID: 20000182 Result: Up-regulated in Transcription
  misc_feature: MA Experiment 20000182 PARAMETER Experiment Name: At_2mM_SA_P Parameter: Age (day) Value: 14
  misc_feature: MA Experiment 20000182 PARAMETER Experiment Name: At_2mM_SA_P Parameter: Organism Value: A. thaliana
  misc_feature: MA Experiment 20000182 PARAMETER Experiment Name: At_2mM_SA_P Parameter: Plant Line Value: WS
  misc_feature: MA Experiment 20000182 PARAMETER Experiment Name: At_2mM_SA_P Parameter: Timepoint (hr) Value: 6
  misc_feature: MA Experiment 20000182 PARAMETER Experiment Name: At_2mM_SA_P Parameter: Tissue Value: Aerial
  misc_feature: MA Experiment 20000182 PARAMETER Experiment Name: At_2mM_SA_P Parameter: Treatment Value: 2mM SA vs. No Treatment
  misc_feature: MA Experiment ID: 20000437 Result: Up-regulated in Transcription
  misc_feature: MA Experiment 20000437 PARAMETER Experiment Name: At_Drought_P Parameter: Age (day) Value: 8
  misc_feature: MA Experiment 20000437 PARAMETER Experiment Name: At_Drought_P Parameter: Organism Value: A. thaliana
  misc_feature: MA Experiment 20000437 PARAMETER Experiment Name: At_Drought_P Parameter: Plant Line Value: WS
  misc_feature: MA Experiment 20000437 PARAMETER Experiment Name: At_Drought_P Parameter: Timepoint (hr) Value: 24
  misc_feature: MA Experiment 20000437 PARAMETER Experiment Name: At_Drought_P Parameter: Tissue Value: Whole Plant
  misc_feature: MA Experiment 20000437 PARAMETER Experiment Name: At_Drought_P Parameter: Treatment Value: Drought vs. No Drought
  misc_feature: MA Experiment ID: 20001451 Result: Down-regulated in Transcription
  misc_feature: MA Experiment 20001451 PARAMETER Experiment Name: At_Far-red-induction_P Parameter: Age (day) Value: 7
  misc_feature: MA Experiment 20001451 PARAMETER Experiment Name: At_Far-red-induction_P Parameter: Light Value: Far-red vs. White
  misc_feature: MA Experiment 20001451 PARAMETER Experiment Name: At_Far-red-induction_P Parameter: Organism Value: A. thaliana
  misc_feature: MA Experiment 20001451 PARAMETER Experiment Name: At_Far-red-induction_P Parameter: Plant Line Value: Columbia
  misc_feature: MA Experiment 20001451 PARAMETER Experiment Name: At_Far-red-induction_P Parameter: Timepoint (hr) Value: 24
  misc_feature: MA Experiment 20001451 PARAMETER Experiment Name: At_Far-red-induction_P Parameter: Tissue Value: Whole Plant
  misc_feature: MA Experiment ID: 20001911 Result: Up-regulated in Transcription
  misc_feature: MA Experiment 20001911 PARAMETER Experiment Name: At_Drought_Reproduction_P Parameter: Age (day) Value: 40
  misc_feature: MA Experiment 20001911 PARAMETER Experiment Name: At_Drought_Reproduction_P Parameter: Organism Value: A. thaliana
  misc_feature: MA Experiment 20001911 PARAMETER Experiment Name: At_Drought_Reproduction_P Parameter: Plant Line Value: WS
  misc_feature: MA Experiment 20001911 PARAMETER Experiment Name: At_Drought_Reproduction_P Parameter: Timepoint (day) Value: 10
  misc_feature: MA Experiment 20001911 PARAMETER Experiment Name: At_Drought_Reproduction_P Parameter: Tissue Value: Flowers
  misc_feature: MA Experiment 20001911 PARAMETER Experiment Name: At_Drought_Reproduction_P Parameter: Treatment Value: Drought vs. No Drought
aaattttagcgtaaagacaatctcttgaaggagaaaaggaaaacaatctctctttctgtgacctttcgcaacttgtcaaagcaccacgaccttctctctacggagttgagatcaatccccccaaatctcggtgtggttcctctagggtttttgatcggaatcggaatcgataatctaaccggcatgaggccaatcctattgccggatccacccagtctatctaccggcgtccctgatattttcgaacaaggcggttcccataacgtcgtcagacgcgccgtcgtcatcggaaacggtttccctggctccgagaatcagtgtatcggtctcgttcgtgcgctcggcttatctgataatcaccttctcaaccgagtgacaaggcctaaaggaggactaaatgagtggctgcactggctcccagttggttttcacaagaagttggactttatcctcaggcatatttacctctactccagattgatgcttggatccaaacaaagtaaatacatctcatctgtaccctcagagaatggtggtaatgtaggtttggcctctattctagaggctgatgtgaagggcattgtaaatttggcccgtcagacctatgaaaaggatggcccgttgatcgtgattgcatgtggaagagatactatttctattgctagctcgataagacgtttggcttctgaaaacgtcttcgttgttcagatacaacatcctagatcacatttaaataggtttgacatggtgatcacgcctcgtcacgactactatcctctaacactcgaagcgcaggagcaggtccctagatttatgcgtagttggataactccacgtgaacctcctcaggatcatgtagtcttgactactggagctctacaccagatcgattatgcctcactccgtaaagcagctagtgcctggcatgatgaatttgctgctcttccgaagcctttagttgtggttaacatcggctggcctagaagtaactgtcggtatggagcagacctcgcaaaacagctaacagactcccttcttaatgtccttgctacctgtggaagtgtcagaattactctttcctacaaaacccctgcaaaggtttcaagagtaatcttcaaagaacttggagataaccccaaagtttacatatggaatggccaagaaccaaatccttacatggggcatctagcttggggtgatgcttttgtggtgacagcagattcagtcagtctgataagcgaagcttgtagcaccgggaaaccagtgtacgttgttggagccgatcactgtaaatggaagattgcagaattccaaaagtctttgagggagcgaggagttgtccgctcatttacaggtttcgaagatatgtcggaaagttggagttatccgccattgaatgacacagcagaggcagctacgagaatacggcgtgaattggctgcacgtggatggagtttacggtcttgaattatatactcttctttgctgtaccacttatttgcggaatcacattttgtccaaagctggagaaacagaagcctaagagaatcggatgttgtgcagaaagaaagaatagttgaagatatcatttaaaaagggtcattttactctagcttgccctaaaattttgctgataatgttttaccaataggccaaatactaaaaaaaatctctgttacttaatcggagaggcctttgtgagataaaagaaagcggaaaggttttttttaatctttttaacgtttgtattgttttgtcgacgagatttgaccgtttgagtgtgtat

SEQ ID NO: 46191 - protein, 427 aa, Arabidopsis thaliana
  peptide (1)..(427): Ceres Seq. ID no. 14309882
  misc_feature (35)..(420): Pfam Name: Protein of unknown function (DUF1022) Pfam Description: Protein of unknown function (DUF1022)
  misc_feature (130)..(195): Homolog of NCBI NO: 22968024 NR Description: hypothetical protein [Rhodospirillum rubrum]
  misc_feature (224)..(421): Homolog of NCBI NO: 22968024 NR Description: hypothetical protein [Rhodospirillum rubrum]
  misc_feature (9)..(395): Homolog of NCBI NO: 9759316 NR Description: gene_id:MBL20.6~similar to unknown
  misc_feature (15)..(190): Homolog of NCBI NO: 38346329 NR Description: OJ000126_13.11 [Oryza sativa (japonica
  misc_feature (223)..(413): Homolog of NCBI NO: 38346329 NR Description: OJ000126_13.11 [Oryza sativa (japonica
  misc_feature (9)..(86): Homolog of NCBI NO: 18415120 NR Description: expressed protein [Arabidopsis thaliana]
  misc_feature (107)..(427): Homolog of NCBI NO: 18415120 NR Description: expressed protein [Arabidopsis thaliana]
  misc_feature (1)..(61): Homolog of NCBI NO: 9757815 NR Description: gene_id:MWD9.14~similar to unknown
  misc_feature (63)..(427): Homolog of NCBI NO: 9757815 NR Description: gene_id:MWD9.14~similar to unknown
  misc_feature (1)..(427): Homolog of NCBI NO: 18420465 NR Description: expressed protein [Arabidopsis thaliana]
MRPILLPDPPSLSTGVPDIFEQGGSHNVVRRAVVIGNGFPGSENQCIGLVRALGLSDNHLLNRVTRPKGGLNEWLHWLPVGFHKKLDFILRHIYLYSRLMLGSKQSKYISSVPSENGGNVGLASILEADVKGIVNLARQTYEKDGPLIVIACGRDTISIASSIRRLASENVFVVQIQHPRSHLNRFDMVITPRHDYYPLTLEAQEQVPRFMRSWITPREPPQDHVVLTTGALHQIDYASLRKAASAWHDEFAALPKPLVVVNIGWPRSNCRYGADLAKQLTDSLLNVLATCGSVRITLSYKTPAKVSRVIFKELGDNPKVYIWNGQEPNPYMGHLAWGDAFVVTADSVSLISEACSTGKPVYVVGADHCKWKIAEFQKSLRERGVVRSFTGFEDMSESWSYPPLNDTAEAATRIRRELAARGWSLRS

SEQ ID NO: 46192 - protein, 328 aa, Arabidopsis thaliana
  peptide (1)..(328): Ceres Seq. ID no. 14309883
  misc_feature (1)..(321): Pfam Name: Protein of unknown function (DUF1022) Pfam Description: Protein of unknown function (DUF1022)
  misc_feature (45)..(96): Homolog of NCBI NO: 16127081 NR Description: conserved hypothetical protein [Caulobacter
  misc_feature (107)..(322): Homolog of NCBI NO: 16127081 NR Description: conserved hypothetical protein [Caulobacter
  misc_feature (31)..(96): Homolog of NCBI NO: 22968024 NR Description: hypothetical protein [Rhodospirillum rubrum]
  misc_feature (125)..(322): Homolog of NCBI NO: 22968024 NR Description: hypothetical protein [Rhodospirillum rubrum]
  misc_feature (1)..(296): Homolog of NCBI NO: 9759316 NR Description: gene_id:MBL20.6~similar to unknown
  misc_feature (1)..(91): Homolog of NCBI NO: 38346329 NR Description: OJ000126_13.11 [Oryza sativa (japonica
  misc_feature (124)..(314): Homolog of NCBI NO: 38346329 NR Description: OJ000126_13.11 [Oryza sativa (japonica
  misc_feature (8)..(328): Homolog of NCBI NO: 18415120 NR Description: expressed protein [Arabidopsis thaliana]
  misc_feature (1)..(328): Homolog of NCBI NO: 9757815 NR Description: gene_id:MWD9.14~similar to unknown
  misc_feature (1)..(328): Homolog of NCBI NO: 18420465 NR Description: expressed protein [Arabidopsis thaliana]
MLGSKQSKYISSVPSENGGNVGLASILEADVKGIVNLARQTYEKDGPLIVIACGRDTISIASSIRRLASENVFVVQIQHPRSHLNRFDMVITPRHDYYPLTLEAQEQVPRFMRSWITPREPPQDHVVLTTGALHQIDYASLRKAASAWHDEFAALPKPLVVVNIGWPRSNCRYGADLAKQLTDSLLNVLATCGSVRITLSYKTPAKVSRVIFKELGDNPKVYIWNGQEPNPYMGHLAWGDAFVVTADSVSLISEACSTGKPVYVVGADHCKWKIAEFQKSLRERGVVRSFTGFEDMSESWSYPPLNDTAEAATRIRRELAARGWSLRS

SEQ ID NO: 46193 - protein, 240 aa, Arabidopsis thaliana
  peptide (1)..(240): Ceres Seq. ID no. 14309884
  misc_feature (1)..(233): Pfam Name: Protein of unknown function (DUF1022) Pfam Description: Protein of unknown function (DUF1022)
  misc_feature (21)..(231): Homolog of NCBI NO: 21233033 NR Description: conserved hypothetical protein
  misc_feature (1)..(236): Homolog of NCBI NO: 15892085 NR Description: unknown [Rickettsia conorii]
  misc_feature (37)..(231): Homolog of NCBI NO: 23014165 NR Description: hypothetical protein [Magnetospirillum
  misc_feature (19)..(234): Homolog of NCBI NO: 16127081 NR Description: conserved hypothetical protein [Caulobacter
  misc_feature (37)..(234): Homolog of NCBI NO: 22968024 NR Description: hypothetical protein [Rhodospirillum rubrum]
  misc_feature (1)..(208): Homolog of NCBI NO: 9759316 NR Description: gene_id:MBL20.6~similar to unknown
  misc_feature (36)..(226): Homolog of NCBI NO: 38346329 NR Description: OJ000126_13.11 [Oryza sativa (japonica
  misc_feature (1)..(240): Homolog of NCBI NO: 18415120 NR Description: expressed protein [Arabidopsis thaliana]
  misc_feature (1)..(240): Homolog of NCBI NO: 9757815 NR Description: gene_id:MWD9.14~similar to unknown
  misc_feature (1)..(240): Homolog of NCBI NO: 18420465 NR Description: expressed protein [Arabidopsis thaliana]
MVITPRHDYYPLTLEAQEQVPRFMRSWITPREPPQDHVVLTTGALHQIDYASLRKAASAWHDEFAALPKPLVVVNIGWPRSNCRYGADLAKQLTDSLLNVLATCGSVRITLSYKTPAKVSRVIFKELGDNPKVYIWNGQEPNPYMGHLAWGDAFVVTADSVSLISEACSTGKPVYVVGADHCKWKIAEFQKSLRERGVVRSFTGFEDMSESWSYPPLNDTAEAATRIRRELAARGWSLRS

SEQ ID NO: 46194 - DNA, 1982 bp, Arabidopsis thaliana
  misc_feature (1)..(1982): Ceres Seq. ID no. 12601039
  misc_feature: MA Experiment ID: 108434 Result: Down-regulated in Transcription
  misc_feature: MA Experiment 108434 PARAMETER Experiment Name: At_Root_Tips_cDNA_P Parameter: Tissue Value: Root Tips
  misc_feature: MA Experiment ID: 108464 Result: Up-regulated in Transcription
  misc_feature: MA Experiment 108464 PARAMETER Experiment Name: At_Germinating_Seeds_cDNA_P Parameter: Age (day) Value: 4 vs. 0
  misc_feature: MA Experiment 108464 PARAMETER Experiment Name: At_Germinating_Seeds_cDNA_P Parameter: Tissue Value: Germinating Seeds
  misc_feature: MA Experiment ID: 108577 Result: Down-regulated in Transcription
  misc_feature: MA Experiment 108577 PARAMETER Experiment Name: At_42deg_Heat_cDNA_P Parameter: Temperature (deg C) Value: 42 vs. 22
  misc_feature: MA Experiment 108577 PARAMETER Experiment Name: At_42deg_Heat_cDNA_P Parameter: Timepoint (hr) Value: 6
  misc_feature: MA Experiment 108577 PARAMETER Experiment Name: At_42deg_Heat_cDNA_P Parameter: Tissue Value: Aerial
  misc_feature: MA Experiment ID: 20000111 Result: Down-regulated in Transcription
  misc_feature: MA Experiment 20000111 PARAMETER Experiment Name: At_42deg_Heat_cDNA_P Parameter: Temperature (deg C) Value: 42 vs. 22
  misc_feature: MA Experiment 20000111 PARAMETER Experiment Name: At_42deg_Heat_cDNA_P Parameter: Timepoint (hr) Value: 6
  misc_feature: MA Experiment 20000111 PARAMETER Experiment Name: At_42deg_Heat_cDNA_P Parameter: Tissue Value: Aerial
  misc_feature: MA Experiment ID: 20000185 Result: Down-regulated in Transcription
  misc_feature: MA Experiment 20000185 PARAMETER Experiment Name: At_Roots__P Parameter: Age (day) Value: 7 vs. 21
  misc_feature: MA Experiment 20000185 PARAMETER Experiment Name: At_Roots__P Parameter: Organism Value: A. thaliana
  misc_feature: MA Experiment 20000185 PARAMETER Experiment Name: At_Roots__P Parameter: Tissue Value: Roots vs. Whole Plant
  misc_feature: MA Experiment ID: 20001558 Result: Down-regulated in Transcription
  misc_feature: MA Experiment 20001558 PARAMETER Experiment Name: At_Drought_Soil_Dry_P Parameter: Age (day) Value: 27
  misc_feature: MA Experiment 20001558 PARAMETER Experiment Name: At_Drought_Soil_Dry_P Parameter: Organism Value: A. thaliana
  misc_feature: MA Experiment 20001558 PARAMETER Experiment Name: At_Drought_Soil_Dry_P Parameter: Plant Line Value: WS
  misc_feature: MA Experiment 20001558 PARAMETER Experiment Name: At_Drought_Soil_Dry_P Parameter: Post Timepoint (hr) Value: 6
  misc_feature: MA Experiment 20001558 PARAMETER Experiment Name: At_Drought_Soil_Dry_P Parameter: Post-Treatment Value: Re-Water vs. No Drought
  misc_feature: MA Experiment 20001558 PARAMETER Experiment Name: At_Drought_Soil_Dry_P Parameter: Timepoint (day) Value: 13
  misc_feature: MA Experiment 20001558 PARAMETER Experiment Name: At_Drought_Soil_Dry_P Parameter: Treatment Value: Drought vs. No Drought
  misc_feature: MA Experiment ID: 20001560 Result: Down-regulated in Transcription
  misc_feature: MA Experiment 20001560 PARAMETER Experiment Name: At_Drought_Soil_Dry_P Parameter: Age (day) Value: 28
  misc_feature: MA Experiment 20001560 PARAMETER Experiment Name: At_Drought_Soil_Dry_P Parameter: Organism Value: A. thaliana
  misc_feature: MA Experiment 20001560 PARAMETER Experiment Name: At_Drought_Soil_Dry_P Parameter: Plant Line Value: WS
  misc_feature: MA Experiment 20001560 PARAMETER Experiment Name: At_Drought_Soil_Dry_P Parameter: Post Timepoint (hr) Value: None
  misc_feature: MA Experiment 20001560 PARAMETER Experiment Name: At_Drought_Soil_Dry_P Parameter: Post-Treatment Value: None
  misc_feature: MA Experiment 20001560 PARAMETER Experiment Name: At_Drought_Soil_Dry_P Parameter: Timepoint (day) Value: 14
  misc_feature: MA Experiment 20001560 PARAMETER Experiment Name: At_Drought_Soil_Dry_P Parameter: Treatment Value: Drought vs. No Drought
aacaaaagttgaaaagtcatgttactcctcctctcaattcgtctcctccgccatgcgaactcaaactcaaagctctctctaactttttgcttttcttcgaatctgtgatagatcgagacttggatttatcagcttctccgtgctcctttagcttctgctcggttttgttttttttagtctgacgatgagtaacaactggaaatccgttcgattaaggcttcaaaatcgtactctcgtgtttcttctggtgattttgagcttcggttcttgctattcgttgaaatctcaaggtgatggttttctggaatccgtgacgaaagatctatggtcagatatagatgctgaggatttgagagcagttggttttcacaggaaattacttggccgttttcgtaacccgtacacccatttgaatgcgttcagggaccgccctgtggcaagagctacacctccgtcatcttcggtttctacgagacctgatgccaaaagatcctctacattgcctccgccacaaaaaagtcctcctgcgcaacatgtttctgctccacctccttttgtgcaccatgtgactttacctagtctaacaagcagctccaaaacttcttcaaacagcacaattcctatagtggctggctgcatagcgggtgctgtgtttatcctccttttagctactggtgttttcttttttaaaagtaaggctgggaaatctgtgaatccctggcgtacaggtcttagtggacaacttcagaaagtgttcataactggtgtccccaaactcaaaagatctgagattgaagctgcctgtgaagattttagtaatgtcattgggtcttgccccattggtacattgttcaaagggacgctatcaagtggggtggagatagctgtggcttctgttgctactgcgtctgccaaagaatggacaaataatatagaaatgcagttcagaaagaagatcgaaatgttatccaagataaaccacaagaattttgtcaaccttcttggttactgtgaagaagaagaacctttcactaggatcttggtctttgaatatgcatcaaacggaacagtctttgaacatttacactataaagaatcagaacacttggactgggtaatgcggctaagaatagcaatgggcatagcttattgccttgaccatatgcacggactcaagccacctatagtccacagcaatcttctctcatcatcagttcaactcacagaggactacgcagtcaaaattgcggatttcaattttggatatttaaaaggcccatccgagacagaaagcagcaccaatgcactcatagatacaaacatctcagaaacaacacaagaagacaatgttcacagcttcgggttgctgttgtttgaactgatgacaggaaaactcccagagtcagttcaaaaaggtgactcgatagataccggattggctgtcttcttgagaggaaagacattaagggagatggtggatccgacaattgaaagctttgacgagaagattgagaatataggtgaagtgatcaaaagctgcataagagcagacgcgaaacagagaccgataatgaaggaagtcacagggagattacgagagatcactggattatcaccagacgacactatcccaaaactttcaccactctggtgggcagagctggaagttctgtccactgcgtgaagagacaactactgaacttcacaaaaaaatctgtaagtattaatatgaagatttgagtgaggtttttgagtctcttagaagctcttggcttctctttaggctactttcatctatctatctatatataagtatggaacttagtttatataacggctttaaaattcggtggatctatttggtcgtttatgtcgtaaacagaaaatgtcctaatcacggtaatacccctttttggtgtgcataatgttggtgggtggttactgtctttgtaaattagtgttactatgttcttgatatgttt

SEQ ID NO: 46195 - protein, 499 aa, Arabidopsis thaliana
  peptide (1)..(499): Ceres Seq. ID no. 12601040
  misc_feature (260)..(499): Homolog of NCBI NO: 25408681 NR Description: probable protein kinase [imported] - Arabidopsis
  misc_feature (88)..(498): Homolog of NCBI NO: 9758931 NR Description: receptor protein kinase-like protein [Arabidopsis
  misc_feature (84)..(498): Homolog of NCBI NO: 30684487 NR Description: leucine-rich repeat transmembrane protein kinase,
  misc_feature (84)..(498): Homolog of NCBI NO: 7486276 NR Description: hypothetical protein F28A21.50 - Arabidopsis
  misc_feature (84)..(498): Homolog of NCBI NO: 7268658 NR Description: putative protein (fragment) [Arabidopsis thaliana]
  misc_feature (88)..(498): Homolog of NCBI NO: 15242513 NR Description: leucine-rich repeat transmembrane protein kinase,
  misc_feature (175)..(498): Homolog of NCBI NO: 28916446 NR Description: ser-thr protein kinase [Gossypium hirsutum]
  misc_feature (15)..(499): Homolog of NCBI NO: 18405327 NR Description: putative protein kinase
  misc_feature (15)..(499): Homolog of NCBI NO: 4588001 NR Description: hypothetical Ser-Thr protein kinase [Arabidopsis
  misc_feature (1)..(499): Homolog of NCBI NO: 15228810 NR Description: putative protein kinase
MSNNWKSVRLRLQNRTLVFLLVILSFGSCYSLKSQGDGFLESVTKDLWSDIDAEDLRAVGFHRKLLGRFRNPYTHLNAFRDRPVARATPPSSSVSTRPDAKRSSTLPPPQKSPPAQHVSAPPPFVHHVTLPSLTSSSKTSSNSTIPIVAGCIAGAVFILLLATGVFFFKSKAGKSVNPWRTGLSGQLQKVFITGVPKLKRSEIEAACEDFSNVIGSCPIGTLFKGTLSSGVEIAVASVATASAKEWTNNIEMQFRKKIEMLSKINHKNFVNLLGYCEEEEPFTRILVFEYASNGTVFEHLHYKESEHLDWVMRLRIAMGIAYCLDHMHGLKPPIVHSNLLSSSVQLTEDYAVKIADFNFGYLKGPSETESSTNALIDTNISETTQEDNVHSFGLLLFELMTGKLPESVQKGDSIDTGLAVFLRGKTLREMVDPTIESFDEKIENIGEVIKSCIRADAKQRPIMKEVTGRLREITGLSPDDTIPKLSPLWWAELEVLSTA

SEQ ID NO: 46196 - DNA, 2895 bp, Arabidopsis thaliana
  misc_feature (1)..(2895): Ceres Seq. ID no. 12601041
  misc_feature: MA Experiment ID: 20000315 Result: Down-regulated in Transcription
  misc_feature: MA Experiment 20000315 PARAMETER Experiment Name: At_14day_Shoots-Roots_Sub_P Parameter: Age (day) Value: 14
  misc_feature: MA Experiment 20000315 PARAMETER Experiment Name: At_14day_Shoots-Roots_Sub_P Parameter: Organism Value: A. thaliana
  misc_feature: MA Experiment 20000315 PARAMETER Experiment Name: At_14day_Shoots-Roots_Sub_P Parameter: Plant Line Value: WS
  misc_feature: MA Experiment 20000315 PARAMETER Experiment Name: At_14day_Shoots-Roots_Sub_P Parameter: Tissue Value: Shoots vs. Whole Plant
  misc_feature: MA Experiment ID: 20000327 Result: Down-regulated in Transcription
  misc_feature: MA Experiment 20000327 PARAMETER Experiment Name: At_42deg_Heat_Sub_P Parameter: Age (day) Value: 14
  misc_feature: MA Experiment 20000327 PARAMETER Experiment Name: At_42deg_Heat_Sub_P Parameter: Organism Value: A. thaliana
  misc_feature: MA Experiment 20000327 PARAMETER Experiment Name: At_42deg_Heat_Sub_P Parameter: Plant Line Value: WS
  misc_feature: MA Experiment 20000327 PARAMETER Experiment Name: At_42deg_Heat_Sub_P Parameter: Temperature (deg C) Value: 42 vs. 22
  misc_feature: MA Experiment 20000327 PARAMETER Experiment Name: At_42deg_Heat_Sub_P Parameter: Timepoint (hr) Value: 1
  misc_feature: MA Experiment 20000327 PARAMETER Experiment Name: At_42deg_Heat_Sub_P Parameter: Tissue Value: Aerial
  misc_feature: MA Experiment ID: 20000328 Result: Down-regulated in Transcription
  misc_feature: MA Experiment 20000328 PARAMETER Experiment Name: At_42deg_Heat_Sub_P Parameter: Age (day) Value: 14
  misc_feature: MA Experiment 20000328 PARAMETER Experiment Name: At_42deg_Heat_Sub_P Parameter: Organism Value: A. thaliana
  misc_feature: MA Experiment 20000328 PARAMETER Experiment Name: At_42deg_Heat_Sub_P Parameter: Plant Line Value: WS
  misc_feature: MA Experiment 20000328 PARAMETER Experiment Name: At_42deg_Heat_Sub_P Parameter: Temperature (deg C) Value: 42 vs. 22
  misc_feature: MA Experiment 20000328 PARAMETER Experiment Name: At_42deg_Heat_Sub_P Parameter: Timepoint (hr) Value: 6
  misc_feature: MA Experiment 20000328 PARAMETER Experiment Name: At_42deg_Heat_Sub_P Parameter: Tissue Value: Aerial
  misc_feature: MA Experiment ID: 20000347 Result: Up-regulated in Transcription
  misc_feature: MA Experiment 20000347 PARAMETER Experiment Name: At_2mM_SA_Sub_P Parameter: Age (day) Value: 14
  misc_feature: MA Experiment 20000347 PARAMETER Experiment Name: At_2mM_SA_Sub_P Parameter: Organism Value: A. thaliana
  misc_feature: MA Experiment 20000347 PARAMETER Experiment Name: At_2mM_SA_Sub_P Parameter: Plant Line Value: WS
  misc_feature: MA Experiment 20000347 PARAMETER Experiment Name: At_2mM_SA_Sub_P Parameter: Timepoint (hr) Value: 6
  misc_feature: MA Experiment 20000347 PARAMETER Experiment Name: At_2mM_SA_Sub_P Parameter: Tissue Value: Aerial
  misc_feature: MA Experiment 20000347 PARAMETER Experiment Name: At_2mM_SA_Sub_P Parameter: Treatment Value: 2mM SA vs. No Treatment
  misc_feature: MA Experiment ID: 20000355 Result: Down-regulated in Transcription
  misc_feature: MA Experiment 20000355 PARAMETER Experiment Name: At_Siliques_Sub_P Parameter: Age (day) Value: 21
  misc_feature: MA Experiment 20000355 PARAMETER Experiment Name: At_Siliques_Sub_P Parameter: Organism Value: A. thaliana
  misc_feature: MA Experiment 20000355 PARAMETER Experiment Name: At_Siliques_Sub_P Parameter: Plant Line Value: WS
  misc_feature: MA Experiment 20000355 PARAMETER Experiment Name: At_Siliques_Sub_P Parameter: Tissue Value: Less Than 5mm Siliques vs. Whole Plant
  misc_feature: MA Experiment ID: 20000440 Result: Down-regulated in Transcription
  misc_feature: MA Experiment 20000440 PARAMETER Experiment Name: At_Closed-Flower__Sub_P Parameter: Tissue Value: Closed Flower vs. Whole Plant
tttttctttcacgttgacttctcctccgccatagtccgaaacagaggcatcacagcaacccaactcgaaccctcgatctcctcatcactctcaccaccaccaccaccgccactctttttcgactccctcttccacagaatcttcaaatcctaccgccggagctcgccgtaatccatttcggagatgtcgtatgggttgtagatcactagatctatcctgggaaatttttcaagtggggtcctccactactacttgctcctcgttgcttatttagtcttctctctatctctctctcgagctccattgacttggacttggtggtatccaatggccatcaccgattttttcgccggtgaaattgcgacggagctcctgaagcagctctttacgatatctacaacggcgtggagatacaaaaacaccgccaaacaactcctcaccttgatcgatagcattcgaccgacgatcaaggagattcaatacagcggcgtggagcttcctgctcaccgccaagctcaaatcggtatgctcttcgatactttagagaaaggcaagaagctcactgacaaagtccttagctctaagcgatggaatttatatcgacagctaaccctagccagaaaaatggagaagctagagaagaccatctctaatttccttaaaaatgaggtctttacacatatcctcgctgacgttcatcatctccgggccgataccagtgtgcgtttggatcgggttgacatgagcctcgacagggtgattcagcaagtgggttccatgaaaattgggggaggtggcttgatatcagaggccatgaagagagccgaggctatggagattgagaccaacgacgattcggagaaatttggggttggattggaattgggaaaggttaaggttaagaagatgatgttcgaatctcaaggaggggtttttgggatcagtggaatgggcggtgttggtaaaaccactcttgccaaagaacttcaacgggaccatgaagtccaatgtcactttgagaaccggattttgtttctgactgtatcacaatctccgcttcttgaggagctgagggaacttatatggggtttcttatctggttgtgaagctggaaatcctgttcctgactgtaattttccgtttgatggcgcgcgtaagctcgtgattcttgatgatgtttggaccacacaggccctggaccgcttgacctcgtttaagtttcctggttgcacaactcttgtggtctcacgatccaaactcactgagcctaaattcacttatgatgtcgaagtactgagtgaagatgaagcaatctctctcttctgtctctgtgctttcggtcagaaatctatccctcttggtttctgcaaagatctggttaagcagcataatattcaaagcttttcgattctcagagttctctgtttggctcaggttgctaatgaatgtaaagggcttcctttagctctcaaagtcacgggtgcttcattaaatggcaaacctgaaatgtactggaagggcgtattgcagaggttatcaaaaggtgaacctgctgatgactctcacgagagtagattgcttcgtcaaatggaagctagtctagacaatctcgaccagacgaccaaagattgtttcttggatcttggcgccttccctgaagacaggaagattcctcttgatgttctcatcaacatttggattgagttacatgatatagatgaaggaaatgcttttgccatccttgttgatttgtcacacaagaatctccttactcttgggaaggatccacggcttggctctttgtacgcaagccactatgatatatttgtgacacagcatgatgttctgcgagacctagctcttcatttaagcaatgcagggaaagtaaacagaagaaagcggttgctgatgccgaaaagagagttagatcttccaggagattgggaaaggaacaatgatgagcattacattgcccagattgtctctattcatactggcaagtgcttttctacactgcaaatattcttggttctctcatgtaataatcaccaggatcataatgttggggaaatgaatgaaatgcaatggtttgacatggagttccccaaggcagagattctaatattgaacttctcttcagacaagtatgttcttccgccttttatcagtaagatgagccggcttaaggtcctagtgattatcaacaacggcatgtctcccgcggttctccatgacttttcaatatttgctcatttgtcgaaactaagaagtctctggctagagagggttcacgtccctcaactctccaactcaaccacccccttgaaaaatctccacaagatgtctttgattctgtgcaagatcaataaaagttttgatcaaaccggacttgacgtggcagatatcttcccaaaattgggcgatctgacaatagatcactgtgatgatctcgtggcactaccttcaagcatttgcggactgacctcccttagctgcttaagcataacaaattgtccacgcctcggtgaattgcccaagaacctcagtaagctacaagctctcgaaatcttaaggctatatgcttgccctgagctaaagacattacctggagaaatatgtgagcttcctgggcttaagtatctcgacatctcacaatgtgtcagcctgagttgtcttccagaggaaataggaaagctaaagaagcttgagaagatcgacatgagagaatgttgcttctcggatagaccgagctctgctgtttcactgaagtctctgcgccatgtaatctgcgataccgacgttgcatttatgtgggaagaagttgagaaggctgttccagggttaaagatcgaagctgctgagaaatgcttcagcctagactggcttgacgaataa

SEQ ID NO: 46197 - protein, 855 aa, Arabidopsis thaliana
  peptide (1)..(855): Ceres Seq. ID no. 12601042
  misc_feature (182)..(293): Pfam Name: NB-ARC domain Pfam Description: NB-ARC domain
  misc_feature (296)..(558): Homolog of NCBI NO: 15238054 NR Description: disease resistance protein (NBS-LRR class),
  misc_feature (578)..(855): Homolog of NCBI NO: 15238054 NR Description: disease resistance protein (NBS-LRR class),
  misc_feature (578)..(855): Homolog of NCBI NO: 15238281 NR Description: disease resistance protein (CC-NBS-LRR class),
  misc_feature (3)..(353): Homolog of NCBI NO: 15238281 NR Description: disease resistance protein (CC-NBS-LRR class),
  misc_feature (5)..(256): Homolog of NCBI NO: 25403197 NR Description: probable disease resistance protein
  misc_feature (270)..(855): Homolog of NCBI NO: 25403197 NR Description: probable disease resistance protein
  misc_feature (5)..(256): Homolog of NCBI NO: 30692890 NR Description: disease resistance protein (CC-NBS-LRR class),
  misc_feature (578)..(855): Homolog of NCBI NO: 30692890 NR Description: disease resistance protein (CC-NBS-LRR class),
  misc_feature (270)..(558): Homolog of NCBI NO: 30692890 NR Description: disease resistance protein (CC-NBS-LRR class),
  misc_feature (1)..(796): Homolog of NCBI NO: 30689664 NR Description: disease resistance protein (CC-NBS-LRR class),
MAITDFFAGEIATELLKQLFTISTTAWRYKNTAKQLLTLIDSIRPTIKEIQYSGVELPAHRQAQIGMLFDTLEKGKKLTDKVLSSKRWNLYRQLTLARKMEKLEKTISNFLKNEVFTHILADVHHLRADTSVRLDRVDMSLDRVIQQVGSMKIGGGGLISEAMKRAEAMEIETNDDSEKFGVGLELGKVKVKKMMFESQGGVFGISGMGGVGKTTLAKELQRDHEVQCHFENRILFLTVSQSPLLEELRELIWGFLSGCEAGNPVPDCNFPFDGARKLVILDDVWTTQALDRLTSFKFPGCTTLVVSRSKLTEPKFTYDVEVLSEDEAISLFCLCAFGQKSIPLGFCKDLVKQHNIQSFSILRVLCLAQVANECKGLPLALKVTGASLNGKPEMYWKGVLQRLSKGEPADDSHESRLLRQMEASLDNLDQTTKDCFLDLGAFPEDRKIPLDVLINIWIELHDIDEGNAFAILVDLSHKNLLTLGKDPRLGSLYASHYDIFVTQHDVLRDLALHLSNAGKVNRRKRLLMPKRELDLPGDWERNNDEHYIAQIVSIHTGKCFSTLQIFLVLSCNNHQDHNVGEMNEMQWFDMEFPKAEILILNFSSDKYVLPPFISKMSRLKVLVIINNGMSPAVLHDFSIFAHLSKLRSLWLERVHVPQLSNSTTPLKNLHKMSLILCKINKSFDQTGLDVADIFPKLGDLTIDHCDDLVALPSSICGLTSLSCLSITNCPRLGELPKNLSKLQALEILRLYACPELKTLPGEICELPGLKYLDISQCVSLSCLPEEIGKLKKLEKIDMRECCFSDRPSSAVSLKSLRHVICDTDVAFMWEEVEKAVPGLKIEAAEKCFSLDWLDE

SEQ ID NO: 46198 - protein, 789 aa, Arabidopsis thaliana
  peptide (1)..(789): Ceres Seq. ID no. 12601043
  misc_feature (116)..(227): Pfam Name: NB-ARC domain Pfam Description: NB-ARC domain
  misc_feature (230)..(492): Homolog of NCBI NO: 15238054 NR Description: disease resistance protein (NBS-LRR class),
  misc_feature (512)..(789): Homolog of NCBI NO: 15238054 NR Description: disease resistance protein (NBS-LRR class),
  misc_feature (512)..(789): Homolog of NCBI NO: 15238281 NR Description: disease resistance protein (CC-NBS-LRR class),
  misc_feature (1)..(287): Homolog of NCBI NO: 15238281 NR Description: disease resistance protein (CC-NBS-LRR class),
  misc_feature (1)..(190): Homolog of NCBI NO: 25403197 NR Description: probable disease resistance protein
  misc_feature (204)..(789): Homolog of NCBI NO: 25403197 NR Description: probable disease resistance protein
  misc_feature (1)..(190): Homolog of NCBI NO: 30692890 NR Description: disease resistance protein (CC-NBS-LRR class),
  misc_feature (512)..(789): Homolog of NCBI NO: 30692890 NR Description: disease resistance protein (CC-NBS-LRR class),
  misc_feature (204)..(492): Homolog of NCBI NO: 30692890 NR Description: disease resistance protein (CC-NBS-LRR class),
  misc_feature (1)..(730): Homolog of NCBI NO: 30689664 NR Description: disease resistance protein (CC-NBS-LRR class),
MLFDTLEKGKKLTDKVLSSKRWNLYRQLTLARKMEKLEKTISNFLKNEVFTHILADVHHLRADTSVRLDRVDMSLDRVIQQVGSMKIGGGGLISEAMKRAEAMEIETNDDSEKFGVGLELGKVKVKKMMFESQGGVFGISGMGGVGKTTLAKELQRDHEVQCHFENRILFLTVSQSPLLEELRELIWGFLSGCEAGNPVPDCNFPFDGARKLVILDDVWTTQALDRLTSFKFPGCTTLVVSRSKLTEPKFTYDVEVLSEDEAISLFCLCAFGQKSIPLGFCKDLVKQHNIQSFSILRVLCLAQVANECKGLPLALKVTGASLNGKPEMYWKGVLQRLSKGEPADDSHESRLLRQMEASLDNLDQTTKDCFLDLGAFPEDRKIPLDVLINIWIELHDIDEGNAFAILVDLSHKNLLTLGKDPRLGSLYASHYDIFVTQHDVLRDLALHLSNAGKVNRRKRLLMPKRELDLPGDWERNNDEHYIAQIVSIHTGKCFSTLQIFLVLSCNNHQDHNVGEMNEMQWFDMEFPKAEILILNFSSDKYVLPPFISKMSRLKVLVIINNGMSPAVLHDFSIFAHLSKLRSLWLERVHVPQLSNSTTPLKNLHKMSLILCKINKSFDQTGLDVADIFPKLGDLTIDHCDDLVALPSSICGLTSLSCLSITNCPRLGELPKNLSKLQALEILRLYACPELKTLPGEICELPGLKYLDISQCVSLSCLPEEIGKLKKLEKIDMRECCFSDRPSSAVSLKSLRHVICDTDVAFMWEEVEKAVPGLKIEAAEKCFSLDWLDE

SEQ ID NO: 46199 - protein, 756 aa, Arabidopsis thaliana
  peptide (1)..(756): Ceres Seq. ID no. 12601044
  misc_feature (83)..(194): Pfam Name: NB-ARC domain Pfam Description: NB-ARC domain
  misc_feature (197)..(459): Homolog of NCBI NO: 15238054 NR Description: disease resistance protein (NBS-LRR class),
  misc_feature (479)..(756): Homolog of NCBI NO: 15238054 NR Description: disease resistance protein (NBS-LRR class),
  misc_feature (479)..(756): Homolog of NCBI NO: 15238281 NR Description: disease resistance protein (CC-NBS-LRR class),
  misc_feature (1)..(254): Homolog of NCBI NO: 15238281 NR Description: disease resistance protein (CC-NBS-LRR class),
  misc_feature (1)..(157): Homolog of NCBI NO: 25403197 NR Description: probable disease resistance protein
  misc_feature (171)..(756): Homolog of NCBI NO: 25403197 NR Description: probable disease resistance protein
  misc_feature (1)..(157): Homolog of NCBI NO: 30692890 NR Description: disease resistance protein (CC-NBS-LRR class),
  misc_feature (479)..(756): Homolog of NCBI NO: 30692890 NR Description: disease resistance protein (CC-NBS-LRR class),
  misc_feature (171)..(459): Homolog of NCBI NO: 30692890 NR Description: disease resistance protein (CC-NBS-LRR class),
  misc_feature (1)..(697): Homolog of NCBI NO: 30689664 NR Description: disease resistance protein (CC-NBS-LRR class),
MEKLEKTISNFLKNEVFTHILADVHHLRADTSVRLDRVDMSLDRVIQQVGSMKIGGGGLISEAMKRAEAMEIETNDDSEKFGVGLELGKVKVKKMMFESQGGVFGISGMGGVGKTTLAKELQRDHEVQCHFENRILFLTVSQSPLLEELRELIWGFLSGCEAGNPVPDCNFPFDGARKLVILDDVWTTQALDRLTSFKFPGCTTLVVSRSKLTEPKFTYDVEVLSEDEAISLFCLCAFGQKSIPLGFCKDLVKQHNIQSFSILRVLCLAQVANECKGLPLALKVTGASLNGKPEMYWKGVLQRLSKGEPADDSHESRLLRQMEASLDNLDQTTKDCFLDLGAFPEDRKIPLDVLINIWIELHDIDEGNAFAILVDLSHKNLLTLGKDPRLGSLYASHYDIFVTQHDVLRDLALHLSNAGKVNRRKRLLMPKRELDLPGDWERNNDEHYIAQIVSIHTGKCFSTLQIFLVLSCNNHQDHNVGEMNEMQWFDMEFPKAEILILNFSSDKYVLPPFISKMSRLKVLVIINNGMSPAVLHDFSIFAHLSKLRSLWLERVHVPQLSNSTTPLKNLHKMSLILCKINKSFDQTGLDVADIFPKLGDLTIDHCDDLVALPSSICGLTSLSCLSITNCPRLGELPKNLSKLQALEILRLYACPELKTLPGEICELPGLKYLDISQCVSLSCLPEEIGKLKKLEKIDMRECCFSDRPSSAVSLKSLRHVICDTDVAFMWEEVEKAVPGLKIEAAEKCFSLDWLDE

SEQ ID NO: 46200 - DNA, 1724 bp, Arabidopsis thaliana
  misc_feature (1)..(1724): Ceres Seq. ID no. 12600771
  misc_feature: MA Experiment ID: 108434 Result: Up-regulated in Transcription
  misc_feature: MA Experiment 108434 PARAMETER Experiment Name: At_Root_Tips_cDNA_P Parameter: Tissue Value: Root Tips
  misc_feature: MA Experiment ID: 108461 Result: Up-regulated in Transcription
  misc_feature: MA Experiment 108461 PARAMETER Experiment Name: At_Germinating_Seeds_cDNA_P Parameter: Age (day) Value: 1 vs. 0
  misc_feature: MA Experiment 108461 PARAMETER Experiment Name: At_Germinating_Seeds_cDNA_P Parameter: Tissue Value: Germinating Seeds
  misc_feature: MA Experiment ID: 108462 Result: Up-regulated in Transcription
  misc_feature: MA Experiment 108462 PARAMETER Experiment Name: At_Germinating_Seeds_cDNA_P Parameter: Age (day) Value: 2 vs. 0
  misc_feature: MA Experiment 108462 PARAMETER Experiment Name: At_Germinating_Seeds_cDNA_P Parameter: Tissue Value: Germinating Seeds
  misc_feature: MA Experiment ID: 108473 Result: Down-regulated in Transcription
  misc_feature: MA Experiment 108473 PARAMETER Experiment Name: At_Drought_Flowers_cDNA_P Parameter: Timepoint (hr) Value: 7 d
  misc_feature: MA Experiment 108473 PARAMETER Experiment Name: At_Drought_Flowers_cDNA_P Parameter: Tissue Value: Flower
  misc_feature: MA Experiment 108473 PARAMETER Experiment Name: At_Drought_Flowers_cDNA_P Parameter: Treatment Value: Drought vs. No Drought
  misc_feature: MA Experiment ID: 108489 Result: Down-regulated in Transcription
  misc_feature: MA Experiment ID: 108561 Result: Down-regulated in Transcription
  misc_feature: MA Experiment 108561 PARAMETER Experiment Name: At_100uM_ABA_cDNA_P Parameter: Timepoint (hr) Value: 6
  misc_feature: MA Experiment 108561 PARAMETER Experiment Name: At_100uM_ABA_cDNA_P Parameter: Tissue Value: Aerial
  misc_feature: MA Experiment 108561 PARAMETER Experiment Name: At_100uM_ABA_cDNA_P Parameter: Treatment Value: 100uM ABA vs. No Treatment
  misc_feature: MA Experiment ID: 108569 Result: Up-regulated in Transcription
  misc_feature: MA Experiment 108569 PARAMETER Experiment Name: At_0.001%_MeJA__cDNA_P Parameter: Timepoint (hr) Value: 6
  misc_feature: MA Experiment 108569 PARAMETER Experiment Name: At_0.001%_MeJA__cDNA_P Parameter: Tissue Value: Aerial
  misc_feature: MA Experiment 108569 PARAMETER Experiment Name: At_0.001%_MeJA__cDNA_P Parameter: Treatment Value: 0.001% MeJA vs. No Treatment
  misc_feature: MA Experiment ID: 108573 Result: Down-regulated in Transcription
  misc_feature: MA Experiment 108573 PARAMETER Experiment Name: At_Drought_cDNA_P Parameter: Timepoint (hr) Value: 6
  misc_feature: MA Experiment 108573 PARAMETER Experiment Name: At_Drought_cDNA_P Parameter: Tissue Value: Aerial
  misc_feature: MA Experiment 108573 PARAMETER Experiment Name: At_Drought_cDNA_P Parameter: Treatment Value: Drought vs. No Drought
  misc_feature: MA Experiment ID: 108574 Result: Up-regulated in Transcription
  misc_feature: MA Experiment 108574 PARAMETER Experiment Name: At_Wounding__cDNA_P Parameter: Timepoint (hr) Value: 1
  misc_feature: MA Experiment 108574 PARAMETER Experiment Name: At_Wounding__cDNA_P Parameter: Tissue Value: Aerial
  misc_feature: MA Experiment 108574 PARAMETER Experiment Name: At_Wounding__cDNA_P Parameter: Treatment Value: Wounding vs. No Wounding
  misc_feature: MA Experiment ID: 108576 Result: Down-regulated in Transcription
  misc_feature: MA Experiment 108576 PARAMETER Experiment Name: At_42deg_Heat_cDNA_P Parameter: Temperature (deg C) Value: 42 vs. 22
  misc_feature: MA Experiment 108576 PARAMETER Experiment Name: At_42deg_Heat_cDNA_P Parameter: Timepoint (hr) Value: 1
  misc_feature: MA Experiment 108576 PARAMETER Experiment Name: At_42deg_Heat_cDNA_P Parameter: Tissue Value: Aerial
  misc_feature: MA Experiment ID: 108579 Result: Up-regulated in Transcription
  misc_feature: MA Experiment 108579 PARAMETER Experiment Name: At_4deg_Cold_cDNA_P Parameter: Temperature (deg C) Value: 4 vs. 22
  misc_feature: MA Experiment 108579 PARAMETER Experiment Name: At_4deg_Cold_cDNA_P Parameter: Timepoint (hr) Value: 6
  misc_feature: MA Experiment 108579 PARAMETER Experiment Name: At_4deg_Cold_cDNA_P Parameter: Tissue Value: Aerial
  misc_feature: MA Experiment ID: 108585 Result: Down-regulated in Transcription
  misc_feature: MA Experiment 108585 PARAMETER Experiment Name: At_5mM_NaNP_cDNA_P Parameter: Timepoint (hr) Value: 6
  misc_feature: MA Experiment 108585 PARAMETER Experiment Name: At_5mM_NaNP_cDNA_P Parameter: Tissue Value: Aerial
  misc_feature: MA Experiment 108585 PARAMETER Experiment Name: At_5mM_NaNP_cDNA_P Parameter: Treatment Value: null
  misc_feature: MA Experiment ID: 20000111 Result: Down-regulated in Transcription
  misc_feature: MA Experiment 20000111 PARAMETER Experiment Name: At_42deg_Heat_cDNA_P Parameter: Temperature (deg C) Value: 42 vs. 22
  misc_feature: MA Experiment 20000111 PARAMETER Experiment Name: At_42deg_Heat_cDNA_P Parameter: Timepoint (hr) Value: 6
  misc_feature: MA Experiment 20000111 PARAMETER Experiment Name: At_42deg_Heat_cDNA_P Parameter: Tissue Value: Aerial
  misc_feature: MA Experiment ID: 20000113 Result: Down-regulated in Transcription
  misc_feature: MA Experiment 20000113 PARAMETER Experiment Name: At_42deg_Heat_cDNA_P Parameter: Temperature (deg C) Value: 42 vs. 22
  misc_feature: MA Experiment 20000113 PARAMETER Experiment Name: At_42deg_Heat_cDNA_P Parameter: Timepoint (hr) Value: 8
  misc_feature: MA Experiment 20000113 PARAMETER Experiment Name: At_42deg_Heat_cDNA_P Parameter: Tissue Value: Aerial
  misc_feature: MA Experiment ID: 20000171 Result: Down-regulated in Transcription
  misc_feature: MA Experiment 20000171 PARAMETER Experiment Name: At_42deg_Heat_P Parameter: Age (day) Value: 14
  misc_feature: MA Experiment 20000171 PARAMETER Experiment Name: At_42deg_Heat_P Parameter: Organism Value: A. thaliana
  misc_feature: MA Experiment 20000171 PARAMETER Experiment Name: At_42deg_Heat_P Parameter: Plant Line Value: WS
  misc_feature: MA Experiment 20000171 PARAMETER Experiment Name: At_42deg_Heat_P Parameter: Temperature (deg C) Value: 42 vs. 22
  misc_feature: MA Experiment 20000171 PARAMETER Experiment Name: At_42deg_Heat_P Parameter: Timepoint (hr) Value: 1
  misc_feature: MA Experiment 20000171 PARAMETER Experiment Name: At_42deg_Heat_P Parameter: Tissue Value: Aerial
  misc_feature: MA Experiment ID: 20000173 Result: Down-regulated in Transcription
  misc_feature: MA Experiment 20000173 PARAMETER Experiment Name: At_42deg_Heat_P Parameter: Age (day) Value: 14
  misc_feature: MA Experiment 20000173 PARAMETER Experiment Name: At_42deg_Heat_P Parameter: Organism Value: A. thaliana
  misc_feature: MA Experiment 20000173 PARAMETER Experiment Name: At_42deg_Heat_P Parameter: Plant Line Value: WS
  misc_feature: MA Experiment 20000173 PARAMETER Experiment Name: At_42deg_Heat_P Parameter: Temperature (deg C) Value: 42 vs. 22
  misc_feature: MA Experiment 20000173 PARAMETER Experiment Name: At_42deg_Heat_P Parameter: Timepoint (hr) Value: 6
  misc_feature: MA Experiment 20000173 PARAMETER Experiment Name: At_42deg_Heat_P Parameter: Tissue Value: Aerial
  misc_feature: MA Experiment ID: 20000180 Result: Up-regulated in Transcription
  misc_feature: MA Experiment 20000180 PARAMETER Experiment Name: At_Germinating_Seeds_P Parameter: Age (hr) Value: 24 vs. 0
  misc_feature: MA Experiment 20000180 PARAMETER Experiment Name: At_Germinating_Seeds_P Parameter: Tissue Value: Germinating Seeds
  misc_feature: MA Experiment ID: 20000234 Result: Up-regulated in Transcription
  misc_feature: MA Experiment 20000234 PARAMETER Experiment Name: At_Siliques_P Parameter: Age (day) Value: 21
  misc_feature: MA Experiment 20000234 PARAMETER Experiment Name: At_Siliques_P Parameter: Organism Value: A. thaliana
  misc_feature: MA Experiment 20000234 PARAMETER Experiment Name: At_Siliques_P Parameter: Plant Line Value: WS
  misc_feature: MA Experiment 20000234 PARAMETER Experiment Name: At_Siliques_P Parameter: Tissue Value: Less Than 5mm Siliques vs. Whole Plant
  misc_feature: MA Experiment ID: 20000264 Result: Up-regulated in Transcription
  misc_feature: MA Experiment 20000264 PARAMETER Experiment Name: At_Open_Flower_P Parameter: Age (day) Value: 21
  misc_feature: MA Experiment 20000264 PARAMETER Experiment Name: At_Open_Flower_P Parameter: Plant Line Value: WS
  misc_feature: MA Experiment 20000264 PARAMETER Experiment Name: At_Open_Flower_P Parameter: Tissue Value: Open Flower vs. Whole Plant
  misc_feature: MA Experiment ID: 20000265 Result: Up-regulated in Transcription
  misc_feature: MA Experiment 20000265 PARAMETER Experiment Name: At_Open_Flower_P Parameter: Age (day) Value: 21
  misc_feature: MA Experiment 20000265 PARAMETER Experiment Name: At_Open_Flower_P Parameter: Plant Line Value: WS
  misc_feature: MA Experiment 20000265 PARAMETER Experiment Name: At_Open_Flower_P Parameter: Tissue Value: Closed Flower vs. Whole Plant
  misc_feature: MA Experiment ID: 20000286 Result: Up-regulated in Transcription
  misc_feature: MA Experiment 20000286 PARAMETER Experiment Name: At_Open_Flower_P Parameter: Age (day) Value: 21
  misc_feature: MA Experiment 20000286 PARAMETER Experiment Name: At_Open_Flower_P Parameter: Plant Line Value: WS
  misc_feature: MA Experiment 20000286 PARAMETER Experiment Name: At_Open_Flower_P Parameter: Tissue Value: Half Open vs. Whole Plant
  misc_feature: MA Experiment ID: 20000438 Result: Up-regulated in Transcription
  misc_feature: MA Experiment 20000438 PARAMETER Experiment Name: At_Shoots__P Parameter: Age (day) Value: 14
  misc_feature: MA Experiment 20000438 PARAMETER Experiment Name: At_Shoots__P Parameter: Tissue Value: Shoots vs. Whole Plant
  misc_feature: MA Experiment ID: 20000452 Result: Up-regulated in Transcription
  misc_feature: MA Experiment 20000452 PARAMETER Experiment Name: At_CS6879_Shoots-Roots_P Parameter: Age (day) Value: 14
  misc_feature: MA Experiment 20000452 PARAMETER Experiment Name: At_CS6879_Shoots-Roots_P Parameter: Organism Value: A. thaliana
  misc_feature: MA Experiment 20000452 PARAMETER Experiment Name: At_CS6879_Shoots-Roots_P Parameter: Plant Line Value: CS6879 vs. WS
  misc_feature: MA Experiment 20000452 PARAMETER Experiment Name: At_CS6879_Shoots-Roots_P Parameter: Tissue Value: Shoots
  misc_feature: MA Experiment ID: 20000573 Result: Down-regulated in Transcription
  misc_feature: MA Experiment 20000573 PARAMETER Experiment Name: At_100uM_ABA_Mutants__P Parameter: Organism Value: A. thaliana
  misc_feature: MA Experiment 20000573 PARAMETER Experiment Name: At_100uM_ABA_Mutants__P Parameter: Plant Line Value: CS22 vs. Ler wt
  misc_feature: MA Experiment 20000573 PARAMETER Experiment Name: At_100uM_ABA_Mutants__P Parameter: Timepoint (hr) Value: N/A
  misc_feature: MA Experiment 20000573 PARAMETER Experiment Name: At_100uM_ABA_Mutants__P Parameter: Tissue Value: Whole Plant
  misc_feature: MA Experiment 20000573 PARAMETER Experiment Name: At_100uM_ABA_Mutants__P Parameter: Treatment Value: None
  misc_feature: MA Experiment ID: 20000574 Result: Down-regulated in Transcription
  misc_feature: MA Experiment 20000574 PARAMETER Experiment Name: At_100uM_ABA_Mutants__P Parameter: Organism Value: A. thaliana
  misc_feature: MA Experiment 20000574 PARAMETER Experiment Name: At_100uM_ABA_Mutants__P Parameter: Plant Line Value: CS23 vs. Ler wt
  misc_feature: MA Experiment 20000574 PARAMETER Experiment Name: At_100uM_ABA_Mutants__P Parameter: Timepoint (hr) Value: N/A
  misc_feature: MA Experiment 20000574 PARAMETER Experiment Name: At_100uM_ABA_Mutants__P Parameter: Tissue Value: Whole Plant
  misc_feature: MA Experiment 20000574 PARAMETER Experiment Name: At_100uM_ABA_Mutants__P Parameter: Treatment Value: None
  misc_feature: MA Experiment ID: 20000794 Result: Up-regulated in Transcription
  misc_feature: MA Experiment 20000794 PARAMETER Experiment Name: At_Petals_P Parameter: Age (day) Value: 23-25 days
  misc_feature: MA Experiment 20000794 PARAMETER Experiment Name: At_Petals_P Parameter: Plant Line Value: WS
  misc_feature: MA Experiment 20000794 PARAMETER Experiment Name: At_Petals_P Parameter: Tissue Value: Petals vs. Whole plant
  misc_feature: MA Experiment ID: 20001247 Result: Down-regulated in Transcription
  misc_feature: MA Experiment 20001247 PARAMETER Experiment Name: At_Far-red-induction_P Parameter: Age (day) Value: 7
  misc_feature: MA Experiment 20001247 PARAMETER Experiment Name: At_Far-red-induction_P Parameter: Light Value: Far-red vs. White
  misc_feature: MA Experiment 20001247 PARAMETER Experiment Name: At_Far-red-induction_P Parameter: Organism Value: A. thaliana
  misc_feature: MA Experiment 20001247 PARAMETER Experiment Name: At_Far-red-induction_P Parameter: Plant Line Value: Columbia
  misc_feature: MA Experiment 20001247 PARAMETER Experiment Name: At_Far-red-induction_P Parameter: Timepoint (hr) Value: 1
  misc_feature: MA Experiment 20001247 PARAMETER Experiment Name: At_Far-red-induction_P Parameter: Tissue Value: Whole Plant
  misc_feature: MA Experiment ID: 20001248 Result: Down-regulated in Transcription
  misc_feature: MA Experiment 20001248 PARAMETER Experiment Name: At_Far-red-induction_P Parameter: Age (day) Value: 7
  misc_feature: MA Experiment 20001248 PARAMETER Experiment Name: At_Far-red-induction_P Parameter: Light Value: Far-red vs. White
  misc_feature: MA Experiment 20001248 PARAMETER Experiment Name: At_Far-red-induction_P Parameter: Organism Value: A. thaliana
  misc_feature: MA Experiment 20001248 PARAMETER Experiment Name: At_Far-red-induction_P Parameter: Plant Line Value: Columbia
  misc_feature: MA Experiment 20001248 PARAMETER Experiment Name: At_Far-red-induction_P Parameter: Timepoint (hr) Value: 4
  misc_feature: MA Experiment 20001248 PARAMETER Experiment Name: At_Far-red-induction_P Parameter: Tissue Value: Whole Plant
  misc_feature: MA Experiment ID: 20001450 Result: Down-regulated in Transcription
  misc_feature: MA Experiment 20001450 PARAMETER Experiment Name: At_Far-red-induction_P Parameter: Age (day) Value: 7
  misc_feature: MA Experiment 20001450 PARAMETER Experiment Name: At_Far-red-induction_P Parameter: Light Value: Far-red vs. White
  misc_feature: MA Experiment 20001450 PARAMETER Experiment Name: At_Far-red-induction_P Parameter: Organism Value: A. thaliana
  misc_feature: MA Experiment 20001450 PARAMETER Experiment Name: At_Far-red-induction_P Parameter: Plant Line Value: Columbia
  misc_feature: MA Experiment 20001450 PARAMETER Experiment Name: At_Far-red-induction_P Parameter: Timepoint (hr) Value: 8
  misc_feature: MA Experiment 20001450 PARAMETER Experiment Name: At_Far-red-induction_P Parameter: Tissue Value: Whole Plant
  misc_feature: MA Experiment ID: 20001558 Result: Down-regulated in Transcription
  misc_feature: MA Experiment 20001558 PARAMETER Experiment Name: At_Drought_Soil_Dry_P Parameter: Age (day) Value: 27
  misc_feature: MA Experiment 20001558 PARAMETER Experiment Name: At_Drought_Soil_Dry_P Parameter: Organism Value: A. thaliana
  misc_feature: MA Experiment 20001558 PARAMETER Experiment Name: At_Drought_Soil_Dry_P Parameter: Plant Line Value: WS
  misc_feature: MA Experiment 20001558 PARAMETER Experiment Name: At_Drought_Soil_Dry_P Parameter: Post Timepoint (hr) Value: 6
  misc_feature: MA Experiment 20001558 PARAMETER Experiment Name: At_Drought_Soil_Dry_P Parameter: Post-Treatment Value: Re-Water vs. No Drought
  misc_feature: MA Experiment 20001558 PARAMETER Experiment Name: At_Drought_Soil_Dry_P Parameter: Timepoint (day) Value: 13
  misc_feature: MA Experiment 20001558 PARAMETER Experiment Name: At_Drought_Soil_Dry_P Parameter: Treatment Value: Drought vs. No Drought
  misc_feature: MA Experiment ID: 20001757 Result: Down-regulated in Transcription
  misc_feature: MA Experiment 20001757 PARAMETER Experiment Name: At_50mM_NH4NO3_L-to-H_P Parameter: Timepoint (hr) Value: 6
  misc_feature: MA Experiment 20001757 PARAMETER Experiment Name: At_50mM_NH4NO3_L-to-H_P Parameter: Tissue Value: Leaf
  misc_feature: MA Experiment 20001757 PARAMETER Experiment Name: At_50mM_NH4NO3_L-to-H_P Parameter: Treatment Value: 50mM NH4NO3 vs 100mM Mannitol
tgagaacgatcgatcaaaaatctctcccacgataaaaatgaggaccctgaagctcattgtacttaacgtcttcccctttccagaaaaatcaaccaaacccatttcagtttccccggaaagtttttgtctttcaatcaccattagaattcagctgcaacacaagtgtttgcaacagagagaatcatggagagagctatggaaagacaaaagatattgcttcgtcatctcaatccagtttcttcttctaattcttctcttaaacatgaaccttctcttctgtctcctgtgaattgtgtttctgaagtttccccaatggctgcttttggagatgacattgtgattgtagcggcatatcgtaccgccatttgcaaagcgagacgtggaggtttcaaagacactcttcctgatgatcttcttgcttctgttcttaaggctgtagtggaaagaacatctttggatccaagtgaagttggtgatatcgttgttggtaccgtgatagcgcctggttctcagagagcaatggagtgtagagttgcagcttattttgctggttttcctgactccgtgccagttagaactgtcaatagacaatgctcatcaggactacaagcagttgctgatgttgctgcttccattagagctggttattacgacattggtattggtgctggagtggaatcaatgtcaactgatcatattcctggaggcggctttcatggctctaatccaagagcacaggatttcccaaaagcccgtgattgtttgcttccaatgggaattacttctgaaaacgttgcagaaaggttcggtgtcacaagagaagagcaagatatggctgcggtggagtctcacaaacgcgctgcagctgcaatcgcgtctggtaaactcaaggatgaaatcattcctgttgctactaagattgtggaccctgagactaaagcagagaaggcaatcgtcgtatctgttgatgacggtgtacgtccaaactcaaacatggcagatttggcaaagctgaagactgtctttaaacagaacggttccaccacagctggcaatgctagtcagatcagtgatggtgctggagcagtactgctaatgaagagaagtttggctatgaagaagggacttcccattcttggagtattcaggagttttgctgttactggtgtggaaccatctgtaatgggtattggtccagctgttgccattcccgctgcaactaagctcgcagggctcaacgtcagcgatattgatctattcgagatcaatgaggcatttgcatctcagtatgtgtactcttgcaagaagttagagctggatatggaaaaggtcaatgttaatggaggagccattgctattggccatcccctgggtgctacaggagctcgatgtgttgcgacattgttgcacgagatgaagcggagaggaaaagattgccgctttggagtaatctcaatgtgcataggcactggaatgggagctgcagctgtttttgagaggggagactctgttgataacttgtccaacgctcgtgtggctaacggggatagtcattagaacatcgaagagagcttgaataagtagaagtaatgatgcattgagtctaataaatatgatgctttagctctttcacattgctgaacaatgaaaacttttgtcattctgagtttaaaatcaactacttttctctgaacaaagtgttaaatctaaaaccaaaagttaca

SEQ ID NO: 46201 - protein, 457 aa, Arabidopsis thaliana
  peptide (1)..(457): Ceres Seq. ID no. 12600772
  misc_feature (48)..(308): Pfam Name: Thiolase, N-terminal domain Pfam Description: Thiolase, N-terminal domain
  misc_feature (1)..(450): Homolog of NCBI NO: 29367431 NR Description: 3-ketoacyl-CoA thiolase-like protein
  misc_feature (1)..(450): Homolog of NCBI NO: 21537268 NR Description: putative acetyl-CoA acyltransferase [Arabidopsis
  misc_feature (1)..(457): Homolog of NCBI NO: 7433644 NR Description: acetyl-CoA C-acyltransferase (EC 2.3.1.16)
  misc_feature (1)..(450): Homolog of NCBI NO: 15219797 NR Description: putative acetyl-CoA acyltransferase
  misc_feature (1)..(450): Homolog of NCBI NO: 15225798 NR Description: 3-ketoacyl-CoA thiolase
  misc_feature (1)..(454): Homolog of NCBI NO: 421810 NR Description: acetyl-CoA C-acyltransferase (EC 2.3.1.16)
  misc_feature (1)..(454): Homolog of NCBI NO: 7433647 NR Description: acetyl-CoA C-acyltransferase (EC 2.3.1.16)
  misc_feature (1)..(454): Homolog of NCBI NO: 393707 NR Description: 3-ketoacyl-CoA thiolase; acetyl-CoA
  misc_feature (44)..(457): Homolog of NCBI NO: 30695561 NR Description: acetyl-CoA C-acyltransferase 1 (3-ketoacyl-CoA
  misc_feature (1)..(457): Homolog of NCBI NO: 30695564 NR Description: acetyl-CoA C-acyltransferase 1 (3-ketoacyl-CoA
MERAMERQKILLRHLNPVSSSNSSLKHEPSLLSPVNCVSEVSPMAAFGDDIVIVAAYRTAICKARRGGFKDTLPDDLLASVLKAVVERTSLDPSEVGDIVVGTVIAPGSQRAMECRVAAYFAGFPDSVPVRTVNRQCSSGLQAVADVAASIRAGYYDIGIGAGVESMSTDHIPGGGFHGSNPRAQDFPKARDCLLPMGITSENVAERFGVTREEQDMAAVESHKRAAAAIASGKLKDEIIPVATKIVDPETKAEKAIVVSVDDGVRPNSNMADLAKLKTVFKQNGSTTAGNASQISDGAGAVLLMKRSLAMKKGLPILGVFRSFAVTGVEPSVMGIGPAVAIPAATKLAGLNVSDIDLFEINEAFASQYVYSCKKLELDMEKVNVNGGAIAIGHPLGATGARCVATLLHEMKRRGKDCRFGVISMCIGTGMGAAAVFERGDSVDNLSNARVANGDSH

SEQ ID NO: 46202 - protein, 453 aa, Arabidopsis thaliana
  peptide (1)..(453): Ceres Seq. ID no. 12600773
  misc_feature (44)..(304): Pfam Name: Thiolase, N-terminal domain Pfam Description: Thiolase, N-terminal domain
  misc_feature (1)..(446): Homolog of NCBI NO: 29367431 NR Description: 3-ketoacyl-CoA thiolase-like protein
  misc_feature (1)..(446): Homolog of NCBI NO: 21537268 NR Description: putative acetyl-CoA acyltransferase [Arabidopsis
  misc_feature (1)..(453): Homolog of NCBI NO: 7433644 NR Description: acetyl-CoA C-acyltransferase (EC 2.3.1.16)
  misc_feature (1)..(446): Homolog of NCBI NO: 15219797 NR Description: putative acetyl-CoA acyltransferase
  misc_feature (1)..(446): Homolog of NCBI NO: 15225798 NR Description: 3-ketoacyl-CoA thiolase
  misc_feature (1)..(450): Homolog of NCBI NO: 421810 NR Description: acetyl-CoA C-acyltransferase (EC 2.3.1.16)
  misc_feature (1)..(450): Homolog of NCBI NO: 7433647 NR Description: acetyl-CoA C-acyltransferase (EC 2.3.1.16)
  misc_feature (1)..(450): Homolog of NCBI NO: 393707 NR Description: 3-ketoacyl-CoA thiolase; acetyl-CoA
  misc_feature (40)..(453): Homolog of NCBI NO: 30695561 NR Description: acetyl-CoA C-acyltransferase 1 (3-ketoacyl-CoA
  misc_feature (1)..(453): Homolog of NCBI NO: 30695564 NR Description: acetyl-CoA C-acyltransferase 1 (3-ketoacyl-CoA
MERQKILLRHLNPVSSSNSSLKHEPSLLSPVNCVSEVSPMAAFGDDIVIVAAYRTAICKARRGGFKDTLPDDLLASVLKAVVERTSLDPSEVGDIVVGTVIAPGSQRAMECRVAAYFAGFPDSVPVRTVNRQCSSGLQAVADVAASIRAGYYDIGIGAGVESMSTDHIPGGGFHGSNPRAQDFPKARDCLLPMGITSENVAERFGVTREEQDMAAVESHKRAAAAIASGKLKDEIIPVATKIVDPETKAEKAIVVSVDDGVRPNSNMADLAKLKTVFKQNGSTTAGNASQISDGAGAVLLMKRSLAMKKGLPILGVFRSFAVTGVEPSVMGIGPAVAIPAATKLAGLNVSDIDLFEINEAFASQYVYSCKKLELDMEKVNVNGGAIAIGHPLGATGARCVATLLHEMKRRGKDCRFGVISMCIGTGMGAAAVFERGDSVDNLSNARVANGDSH

SEQ ID NO: 46203 - protein, 414 aa, Arabidopsis thaliana; identical to SEQ ID NO: 29323
  peptide (1)..(414): Ceres Seq. ID no. 12600774
  misc_feature (5)..(265): Pfam Name: Thiolase, N-terminal domain Pfam Description: Thiolase, N-terminal domain
  misc_feature (1)..(407): Homolog of NCBI NO: 29367431 NR Description: 3-ketoacyl-CoA thiolase-like protein
  misc_feature (1)..(407): Homolog of NCBI NO: 21537268 NR Description: putative acetyl-CoA acyltransferase [Arabidopsis
  misc_feature (1)..(414): Homolog of NCBI NO: 7433644 NR Description: acetyl-CoA C-acyltransferase (EC 2.3.1.16)
  misc_feature (1)..(407): Homolog of NCBI NO: 15219797 NR Description: putative acetyl-CoA acyltransferase
  misc_feature (1)..(407): Homolog of NCBI NO: 15225798 NR Description: 3-ketoacyl-CoA thiolase
  misc_feature (1)..(411): Homolog of NCBI NO: 421810 NR Description: acetyl-CoA C-acyltransferase (EC 2.3.1.16)
  misc_feature (1)..(411): Homolog of NCBI NO: 7433647 NR Description: acetyl-CoA C-acyltransferase (EC 2.3.1.16)
  misc_feature (1)..(411): Homolog of NCBI NO: 393707 NR Description: 3-ketoacyl-CoA thiolase; acetyl-CoA
  misc_feature (1)..(414): Homolog of NCBI NO: 30695561 NR Description: acetyl-CoA C-acyltransferase 1 (3-ketoacyl-CoA
  misc_feature (1)..(414): Homolog of NCBI NO: 30695564 NR Description: acetyl-CoA C-acyltransferase 1 (3-ketoacyl-CoA

SEQ ID NO: 46204 - DNA, 1762 bp, Arabidopsis thaliana; identical to SEQ ID NO: 43860
  misc_feature (1)..(1762): Ceres Seq. ID no. 12576067
  misc_feature: MA Experiment ID: 20000179 Result: Up-regulated in Transcription
  misc_feature: MA Experiment 20000179 PARAMETER Experiment Name: At_Germinating_Seeds_P Parameter: Age (hr) Value: 6 vs. 0
  misc_feature: MA Experiment 20000179 PARAMETER Experiment Name: At_Germinating_Seeds_P Parameter: Tissue Value: Germinating Seeds
  misc_feature: MA Experiment ID: 20000180 Result: Up-regulated in Transcription
  misc_feature: MA Experiment 20000180 PARAMETER Experiment Name: At_Germinating_Seeds_P Parameter: Age (hr) Value: 24 vs. 0
  misc_feature: MA Experiment 20000180 PARAMETER Experiment Name: At_Germinating_Seeds_P Parameter: Tissue Value: Germinating Seeds
  misc_feature: MA Experiment ID: 20000185 Result: Down-regulated in Transcription
  misc_feature: MA Experiment 20000185 PARAMETER Experiment Name: At_Roots__P Parameter: Age (day) Value: 7 vs. 21
  misc_feature: MA Experiment 20000185 PARAMETER Experiment Name: At_Roots__P Parameter: Organism Value: A. thaliana
  misc_feature: MA Experiment 20000185 PARAMETER Experiment Name: At_Roots__P Parameter: Tissue Value: Roots vs. Whole Plant
  misc_feature: MA Experiment ID: 20000227 Result: Up-regulated in Transcription
  misc_feature: MA Experiment 20000227 PARAMETER Experiment Name: At_Root-Tips-vs-Tops_P Parameter: Tissue Value: Root Tips vs. Root Tops
  misc_feature: MA Experiment ID: 20000265 Result: Up-regulated in Transcription
  misc_feature: MA Experiment 20000265 PARAMETER Experiment Name: At_Open_Flower_P Parameter: Age (day) Value: 21
  misc_feature: MA Experiment 20000265 PARAMETER Experiment Name: At_Open_Flower_P Parameter: Plant Line Value: WS
  misc_feature: MA Experiment 20000265 PARAMETER Experiment Name: At_Open_Flower_P Parameter: Tissue Value: Closed Flower vs. Whole Plant
  misc_feature: MA Experiment ID: 20000286 Result: Up-regulated in Transcription
  misc_feature: MA Experiment 20000286 PARAMETER Experiment Name: At_Open_Flower_P Parameter: Age (day) Value: 21
  misc_feature: MA Experiment 20000286 PARAMETER Experiment Name: At_Open_Flower_P Parameter: Plant Line Value: WS
  misc_feature: MA Experiment 20000286 PARAMETER Experiment Name: At_Open_Flower_P Parameter: Tissue Value: Half Open vs. Whole Plant
  misc_feature: MA Experiment ID: 20000439 Result: Down-regulated in Transcription
  misc_feature: MA Experiment 20000439 PARAMETER Experiment Name: At_Roots__P Parameter: Age (day) Value: 14 vs. 21
  misc_feature: MA Experiment 20000439 PARAMETER Experiment Name: At_Roots__P Parameter: Organism Value: A. thaliana
  misc_feature: MA Experiment 20000439 PARAMETER Experiment Name: At_Roots__P Parameter: Tissue Value: Roots vs. Whole Plant
  misc_feature: MA Experiment ID: 20000794 Result: Up-regulated in Transcription
  misc_feature: MA Experiment 20000794 PARAMETER Experiment Name: At_Petals_P Parameter: Age (day) Value: 23-25 days
  misc_feature: MA Experiment 20000794 PARAMETER Experiment Name: At_Petals_P Parameter: Plant Line Value: WS
  misc_feature: MA Experiment 20000794 PARAMETER Experiment Name: At_Petals_P Parameter: Tissue Value: Petals vs. Whole plant
  misc_feature: MA Experiment ID: 20001247 Result: Down-regulated in Transcription
  misc_feature: MA Experiment 20001247 PARAMETER Experiment Name: At_Far-red-induction_P Parameter: Age (day) Value: 7
  misc_feature: MA Experiment 20001247 PARAMETER Experiment Name: At_Far-red-induction_P Parameter: Light Value: Far-red vs. White
  misc_feature: MA Experiment 20001247 PARAMETER Experiment Name: At_Far-red-induction_P Parameter: Organism Value: A. thaliana
  misc_feature: MA Experiment 20001247 PARAMETER Experiment Name: At_Far-red-induction_P Parameter: Plant Line Value: Columbia
  misc_feature: MA Experiment 20001247 PARAMETER Experiment Name: At_Far-red-induction_P Parameter: Timepoint (hr) Value: 1
  misc_feature: MA Experiment 20001247 PARAMETER Experiment Name: At_Far-red-induction_P Parameter: Tissue Value: Whole Plant
  misc_feature: MA Experiment ID: 20001248 Result: Down-regulated in Transcription
  misc_feature: MA Experiment 20001248 PARAMETER Experiment Name: At_Far-red-induction_P Parameter: Age (day) Value: 7
  misc_feature: MA Experiment 20001248 PARAMETER Experiment Name: At_Far-red-induction_P Parameter: Light Value: Far-red vs. White
  misc_feature: MA Experiment 20001248 PARAMETER Experiment Name: At_Far-red-induction_P Parameter: Organism Value: A. thaliana
  misc_feature: MA Experiment 20001248 PARAMETER Experiment Name: At_Far-red-induction_P Parameter: Plant Line Value: Columbia
  misc_feature: MA Experiment 20001248 PARAMETER Experiment Name: At_Far-red-induction_P Parameter: Timepoint (hr) Value: 4
  misc_feature: MA Experiment 20001248 PARAMETER Experiment Name: At_Far-red-induction_P Parameter: Tissue Value: Whole Plant

SEQ ID NO: 46205 - protein, 473 aa, Arabidopsis thaliana; identical to SEQ ID NO: 43861
  peptide (1)..(473): Ceres Seq. ID no. 12576068
  misc_feature (3)..(472): Pfam Name: UDP-glucoronosyl and UDP-glucosyl transferase Pfam Description: UDP-glucoronosyl and UDP-glucosyl transferase
  misc_feature (3)..(472): Pfam Name: UDP-glucoronosyl and UDP-glucosyl transferase Pfam Description: UDP-glucoronosyl and UDP-glucosyl transferase
  misc_feature (2)..(468): Homolog of NCBI NO: 15233158 NR Description: putative UDP-glucose glucosyltransferase; protein
  misc_feature (2)..(92): Homolog of NCBI NO: 7488111 NR Description: probable glucosyltransferase - Arabidopsis
  misc_feature (56)..(472): Homolog of NCBI NO: 7488111 NR Description: probable glucosyltransferase - Arabidopsis
  misc_feature (1)..(472): Homolog of NCBI NO: 15233761 NR Description: UTP-glucose glucosyltransferase; protein id:
  misc_feature (1)..(472): Homolog of NCBI NO: 15233157 NR Description: putative UDP-glucose glucosyltransferase; protein
  misc_feature (2)..(468): Homolog of NCBI NO: 15233158 NR Description: putative UDP-glucose glucosyltransferase; protein
  misc_feature (56)..(472): Homolog of NCBI NO: 7488111 NR Description: probable glucosyltransferase - Arabidopsis
  misc_feature (1)..(472): Homolog of NCBI NO: 15233157 NR Description: putative UDP-glucose glucosyltransferase; protein
  misc_feature (1)..(473): Homolog of NCBI NO: 15233149 NR Description: UDP-glycosyltransferase family; protein id:
  misc_feature (1)..(454): Homolog of NCBI NO: 13605541 NR Description: AT3g21750/MSD21_6 [Arabidopsis thaliana]
  misc_feature (1)..(472): Homolog of NCBI NO: 15233151 NR Description: putative UDP-glucose glucosyltransferase
  misc_feature (1)..(472): Homolog of NCBI NO: 11994645 NR Description: UTP-glucose glucosyltransferase [Arabidopsis
  misc_feature (1)..(472): Homolog of NCBI NO: 11994646 NR Description: UTP-glucose glucosyltransferase [Arabidopsis
  misc_feature (1)..(472): Homolog of NCBI NO: 15233761 NR Description: UTP-glucose glucosyltransferase; protein id:
  misc_feature (2)..(92): Homolog of NCBI NO: 7488111 NR Description: probable glucosyltransferase - Arabidopsis
  misc_feature (1)..(472): Homolog of NCBI NO: 11994646 NR Description: UTP-glucose glucosyltransferase [Arabidopsis
  misc_feature (1)..(472): Homolog of NCBI NO: 11994645 NR Description: UTP-glucose glucosyltransferase [Arabidopsis
  misc_feature (1)..(472): Homolog of NCBI NO: 15233151 NR Description: putative UDP-glucose glucosyltransferase
  misc_feature (1)..(454): Homolog of NCBI NO: 13605541 NR Description: AT3g21750/MSD21_6 [Arabidopsis thaliana]
  misc_feature (1)..(473): Homolog of NCBI NO: 15233149 NR Description: UDP-glycosyltransferase family; protein id:

SEQ ID NO: 46206 - protein, 363 aa, Arabidopsis thaliana; identical to SEQ ID NO: 43862
  peptide (1)..(363): Ceres Seq. ID no. 12576069
  misc_feature (1)..(362): Pfam Name: UDP-glucoronosyl and UDP-glucosyl transferase Pfam Description: UDP-glucoronosyl and UDP-glucosyl transferase
  misc_feature (1)..(362): Pfam Name: UDP-glucoronosyl and UDP-glucosyl transferase Pfam Description: UDP-glucoronosyl and UDP-glucosyl transferase
  misc_feature (1)..(362): Homolog of NCBI NO: 15233155 NR Description: putative UDP-glucose glucosyltransferase; protein
  misc_feature (1)..(358): Homolog of NCBI NO: 15233158 NR Description: putative UDP-glucose glucosyltransferase; protein
  misc_feature (1)..(362): Homolog of NCBI NO: 7488111 NR Description: probable glucosyltransferase - Arabidopsis
  misc_feature (1)..(362): Homolog of NCBI NO: 15233761 NR Description: UTP-glucose glucosyltransferase; protein id:
  misc_feature (1)..(362): Homolog of NCBI NO: 15233157 NR Description: putative UDP-glucose glucosyltransferase; protein
  misc_feature (1)..(362): Homolog of NCBI NO: 15233155 NR Description: putative UDP-glucose glucosyltransferase; protein
  misc_feature (1)..(362): Homolog of NCBI NO: 7488111 NR Description: probable glucosyltransferase - Arabidopsis
  misc_feature (1)..(362): Homolog of NCBI NO: 15233157 NR Description: putative UDP-glucose glucosyltransferase; protein
  misc_feature (1)..(363): Homolog of NCBI NO: 15233149 NR Description: UDP-glycosyltransferase family; protein id:
  misc_feature (1)..(344): Homolog of NCBI NO: 13605541 NR Description: AT3g21750/MSD21_6 [Arabidopsis thaliana]
  misc_feature (1)..(362): Homolog of NCBI NO: 15233151 NR Description: putative UDP-glucose glucosyltransferase
  misc_feature (1)..(362): Homolog of NCBI NO: 11994645 NR Description: UTP-glucose glucosyltransferase [Arabidopsis
  misc_feature (1)..(362): Homolog of NCBI NO: 11994646 NR Description: UTP-glucose glucosyltransferase [Arabidopsis
  misc_feature (1)..(362): Homolog of NCBI NO: 15233761 NR Description: UTP-glucose glucosyltransferase; protein id:
  misc_feature (1)..(358): Homolog of NCBI NO: 15233158 NR Description: putative UDP-glucose glucosyltransferase; protein
  misc_feature (1)..(362): Homolog of NCBI NO: 11994646 NR Description: UTP-glucose glucosyltransferase [Arabidopsis
  misc_feature (1)..(362): Homolog of NCBI NO: 11994645 NR Description: UTP-glucose glucosyltransferase [Arabidopsis
  misc_feature (1)..(362): Homolog of NCBI NO: 15233151 NR Description: putative UDP-glucose glucosyltransferase
  misc_feature (1)..(344): Homolog of NCBI NO: 13605541 NR Description: AT3g21750/MSD21_6 [Arabidopsis thaliana]
  misc_feature (1)..(363): Homolog of NCBI NO: 15233149 NR Description: UDP-glycosyltransferase family; protein id:

SEQ ID NO: 46207 - protein, 358 aa, Arabidopsis thaliana; identical to SEQ ID NO: 43863
  peptide (1)..(358): Ceres Seq. ID no. 12576070
  misc_feature (1)..(357): Pfam Name: UDP-glucoronosyl and UDP-glucosyl transferase Pfam Description: UDP-glucoronosyl and UDP-glucosyl transferase
  misc_feature (1)..(357): Pfam Name: UDP-glucoronosyl and UDP-glucosyl transferase Pfam Description: UDP-glucoronosyl and UDP-glucosyl transferase
  misc_feature (1)..(357): Homolog of NCBI NO: 15233155 NR Description: putative UDP-glucose glucosyltransferase; protein
  misc_feature (1)..(353): Homolog of NCBI NO: 15233158 NR Description: putative UDP-glucose glucosyltransferase; protein
  misc_feature (1)..(357): Homolog of NCBI NO: 7488111 NR Description: probable glucosyltransferase - Arabidopsis
  misc_feature (1)..(357): Homolog of NCBI NO: 15233761 NR Description: UTP-glucose glucosyltransferase; protein id:
  misc_feature (1)..(357): Homolog of NCBI NO: 15233157 NR Description: putative UDP-glucose glucosyltransferase; protein
  misc_feature (1)..(357): Homolog of NCBI NO: 15233155 NR Description: putative UDP-glucose glucosyltransferase; protein
  misc_feature (1)..(357): Homolog of NCBI NO: 7488111 NR Description: probable glucosyltransferase - Arabidopsis
  misc_feature (1)..(357): Homolog of NCBI NO: 15233157 NR Description: putative UDP-glucose glucosyltransferase; protein
  misc_feature (1)..(358): Homolog of NCBI NO: 15233149 NR Description: UDP-glycosyltransferase family; protein id:
  misc_feature (1)..(339): Homolog of NCBI NO: 13605541 NR Description: AT3g21750/MSD21_6 [Arabidopsis thaliana]
  misc_feature (1)..(357): Homolog of NCBI NO: 15233151 NR Description: putative UDP-glucose glucosyltransferase
  misc_feature (1)..(357): Homolog of NCBI NO: 11994645 NR Description: UTP-glucose glucosyltransferase [Arabidopsis
  misc_feature (1)..(357): Homolog of NCBI NO: 11994646 NR Description: UTP-glucose glucosyltransferase [Arabidopsis
  misc_feature (1)..(357): Homolog of NCBI NO: 15233761 NR Description: UTP-glucose glucosyltransferase; protein id:
  misc_feature (1)..(353): Homolog of NCBI NO: 15233158 NR Description: putative UDP-glucose glucosyltransferase; protein
  misc_feature (1)..(357): Homolog of NCBI NO: 11994646 NR Description: UTP-glucose glucosyltransferase [Arabidopsis
  misc_feature (1)..(357): Homolog of NCBI NO: 11994645 NR Description: UTP-glucose glucosyltransferase [Arabidopsis
  misc_feature (1)..(357): Homolog of NCBI NO: 15233151 NR Description: putative UDP-glucose glucosyltransferase
  misc_feature (1)..(339): Homolog of NCBI NO: 13605541 NR Description: AT3g21750/MSD21_6 [Arabidopsis thaliana]
  misc_feature (1)..(358): Homolog of NCBI NO: 15233149 NR Description: UDP-glycosyltransferase family; protein id:

SEQ ID NO: 46208 - DNA, 3978 bp, Arabidopsis thaliana; identical to SEQ ID NO: 44836
  misc_feature (1)..(3978): Ceres Seq. ID no. 13646346
  misc_feature: MA Experiment ID: 20000171 Result: Down-regulated in Transcription
  misc_feature: MA Experiment 20000171 PARAMETER Experiment Name: At_42deg_Heat_P Parameter: Age (day) Value: 14
  misc_feature: MA Experiment 20000171 PARAMETER Experiment Name: At_42deg_Heat_P Parameter: Organism Value: A. thaliana
  misc_feature: MA Experiment 20000171 PARAMETER Experiment Name: At_42deg_Heat_P Parameter: Plant Line Value: WS
  misc_feature: MA Experiment 20000171 PARAMETER Experiment Name: At_42deg_Heat_P Parameter: Temperature (deg C) Value: 42 vs. 22
  misc_feature: MA Experiment 20000171 PARAMETER Experiment Name: At_42deg_Heat_P Parameter: Timepoint (hr) Value: 1
  misc_feature: MA Experiment 20000171 PARAMETER Experiment Name: At_42deg_Heat_P Parameter: Tissue Value: Aerial
  misc_feature: MA Experiment ID: 20000184 Result: Down-regulated in Transcription
  misc_feature: MA Experiment 20000184 PARAMETER Experiment Name: At_Shoots__P Parameter: Age (day) Value: 7
  misc_feature: MA Experiment 20000184 PARAMETER Experiment Name: At_Shoots__P Parameter: Tissue Value: Shoots vs. Whole Plant
  misc_feature: MA Experiment ID: 20000234 Result: Up-regulated in Transcription
  misc_feature: MA Experiment 20000234 PARAMETER Experiment Name: At_Siliques_P Parameter: Age (day) Value: 21
  misc_feature: MA Experiment 20000234 PARAMETER Experiment Name: At_Siliques_P Parameter: Organism Value: A. thaliana
  misc_feature: MA Experiment 20000234 PARAMETER Experiment Name: At_Siliques_P Parameter: Plant Line Value: WS
  misc_feature: MA Experiment 20000234 PARAMETER Experiment Name: At_Siliques_P Parameter: Tissue Value: Less Than 5mm Siliques vs. Whole Plant
  misc_feature: MA Experiment ID: 20000265 Result: Up-regulated in Transcription
  misc_feature: MA Experiment 20000265 PARAMETER Experiment Name: At_Open_Flower_P Parameter: Age (day) Value: 21
  misc_feature: MA Experiment 20000265 PARAMETER Experiment Name: At_Open_Flower_P Parameter: Plant Line Value: WS
  misc_feature: MA Experiment 20000265 PARAMETER Experiment Name: At_Open_Flower_P Parameter: Tissue Value: Closed Flower vs. Whole Plant
  misc_feature: MA Experiment ID: 20000286 Result: Up-regulated in Transcription
  misc_feature: MA Experiment 20000286 PARAMETER Experiment Name: At_Open_Flower_P Parameter: Age (day) Value: 21
  misc_feature: MA Experiment 20000286 PARAMETER Experiment Name: At_Open_Flower_P Parameter: Plant Line Value: WS
  misc_feature: MA Experiment 20000286 PARAMETER Experiment Name: At_Open_Flower_P Parameter: Tissue Value: Half Open vs. Whole Plant
  misc_feature: MA Experiment ID: 20000439 Result: Up-regulated in Transcription
  misc_feature: MA Experiment 20000439 PARAMETER Experiment Name: At_Roots__P Parameter: Age (day) Value: 14 vs. 21
  misc_feature: MA Experiment 20000439 PARAMETER Experiment Name: At_Roots__P Parameter: Organism Value: A. thaliana
  misc_feature: MA Experiment 20000439 PARAMETER Experiment Name: At_Roots__P Parameter: Tissue Value: Roots vs. Whole Plant
  misc_feature: MA Experiment ID: 20000794 Result: Up-regulated in Transcription
  misc_feature: MA Experiment 20000794 PARAMETER Experiment Name: At_Petals_P Parameter: Age (day) Value: 23-25 days
  misc_feature: MA Experiment 20000794 PARAMETER Experiment Name: At_Petals_P Parameter: Plant Line Value: WS
  misc_feature: MA Experiment 20000794 PARAMETER Experiment Name: At_Petals_P Parameter: Tissue Value: Petals vs. Whole plant
  misc_feature: MA Experiment ID: 20001451 Result: Down-regulated in Transcription
  misc_feature: MA Experiment 20001451 PARAMETER Experiment Name: At_Far-red-induction_P Parameter: Age (day) Value: 7
  misc_feature: MA Experiment 20001451 PARAMETER Experiment Name: At_Far-red-induction_P Parameter: Light Value: Far-red vs. White
  misc_feature: MA Experiment 20001451 PARAMETER Experiment Name: At_Far-red-induction_P Parameter: Organism Value: A. thaliana
  misc_feature: MA Experiment 20001451 PARAMETER Experiment Name: At_Far-red-induction_P Parameter: Plant Line Value: Columbia
  misc_feature: MA Experiment 20001451 PARAMETER Experiment Name: At_Far-red-induction_P Parameter: Timepoint (hr) Value: 24
  misc_feature: MA Experiment 20001451 PARAMETER Experiment Name: At_Far-red-induction_P Parameter: Tissue Value: Whole Plant

SEQ ID NO: 46209 - protein, 1125 aa, Arabidopsis thaliana; identical to SEQ ID NO: 44837
  peptide (1)..(1125): Ceres Seq. ID no. 13646347
  misc_feature (145)..(191): Pfam Name: Paired amphipathic helix repeat Pfam Description: Paired amphipathic helix repeat
  misc_feature (145)..(191): Pfam Name: Paired amphipathic helix repeat Pfam Description: Paired amphipathic helix repeat
  misc_feature (34)..(228): Homolog of NCBI NO: 15223031 NR Description: expressed protein [Arabidopsis thaliana]
  misc_feature (41)..(794): Homolog of NCBI NO: 9945050 NR Description: Similar to Arabidopsis chromosome I BAC genomic
  misc_feature (1)..(344): Homolog of NCBI NO: 6094552 NR Description: unknown protein [Arabidopsis thaliana]
  misc_feature (269)..(794): Homolog of NCBI NO: 6094552 NR Description: unknown protein [Arabidopsis thaliana]
  misc_feature (726)..(1068): Homolog of NCBI NO: 34894158 NR Description: putative co-repressor protein
  misc_feature (34)..(228): Homolog of NCBI NO: 15223031 NR Description: expressed protein [Arabidopsis thaliana]
  misc_feature (1)..(344): Homolog of NCBI NO: 6094552 NR Description: unknown protein [Arabidopsis thaliana]
  misc_feature (726)..(1068): Homolog of NCBI NO: 34894158 NR Description: putative co-repressor protein
  misc_feature (131)..(671): Homolog of NCBI NO: 15223031 NR Description: expressed protein [Arabidopsis thaliana]
  misc_feature (573)..(1117): Homolog of NCBI NO: 15223031 NR Description: expressed protein [Arabidopsis thaliana]
  misc_feature (131)..(671): Homolog of NCBI NO: 25406027 NR Description: hypothetical protein F20P5.21 [imported] -
  misc_feature (573)..(1092): Homolog of NCBI NO: 25406027 NR Description: hypothetical protein F20P5.21 [imported] -
  misc_feature (133)..(730): Homolog of NCBI NO: 34894158 NR Description: putative co-repressor protein
  misc_feature (269)..(794): Homolog of NCBI NO: 6094552 NR Description: unknown protein [Arabidopsis thaliana]
  misc_feature (41)..(794): Homolog of NCBI NO: 9945050 NR Description: Similar to Arabidopsis chromosome I BAC genomic
  misc_feature (133)..(730): Homolog of NCBI NO: 34894158 NR Description: putative co-repressor protein
  misc_feature (573)..(1092): Homolog of NCBI NO: 25406027 NR Description: hypothetical protein F20P5.21 [imported] -
  misc_feature (131)..(671): Homolog of NCBI NO: 25406027 NR Description: hypothetical protein F20P5.21 [imported] -
  misc_feature (573)..(1117): Homolog of NCBI NO: 15223031 NR Description: expressed protein [Arabidopsis thaliana]
  misc_feature (131)..(671): Homolog of NCBI NO: 15223031 NR Description: expressed protein [Arabidopsis thaliana]

SEQ ID NO: 46210 - protein, 1112 aa, Arabidopsis thaliana; identical to SEQ ID NO: 44838
  peptide (1)..(1112): Ceres Seq. ID no. 13646348
  misc_feature (132)..(178): Pfam Name: Paired amphipathic helix repeat Pfam Description: Paired amphipathic helix repeat
  misc_feature (132)..(178): Pfam Name: Paired amphipathic helix repeat Pfam Description: Paired amphipathic helix repeat
  misc_feature (21)..(215): Homolog of NCBI NO: 15223031 NR Description: expressed protein [Arabidopsis thaliana]
  misc_feature (28)..(781): Homolog of NCBI NO: 9945050 NR Description: Similar to Arabidopsis chromosome I BAC genomic
  misc_feature (1)..(331): Homolog of NCBI NO: 6094552 NR Description: unknown protein [Arabidopsis thaliana]
  misc_feature (256)..(781): Homolog of NCBI NO: 6094552 NR Description: unknown protein [Arabidopsis thaliana]
  misc_feature (713)..(1055): Homolog of NCBI NO: 34894158 NR Description: putative co-repressor protein
  misc_feature (21)..(215): Homolog of NCBI NO: 15223031 NR Description: expressed protein [Arabidopsis thaliana]
  misc_feature (1)..(331): Homolog of NCBI NO: 6094552 NR Description: unknown protein [Arabidopsis thaliana]
  misc_feature (713)..(1055): Homolog of NCBI NO: 34894158 NR Description: putative co-repressor protein
  misc_feature (118)..(658): Homolog of NCBI NO: 15223031 NR Description: expressed protein [Arabidopsis thaliana]
  misc_feature (560)..(1104): Homolog of NCBI NO: 15223031 NR Description: expressed protein [Arabidopsis thaliana]
  misc_feature (118)..(658): Homolog of NCBI NO: 25406027 NR Description: hypothetical protein F20P5.21 [imported] -
  misc_feature (560)..(1079): Homolog of NCBI NO: 25406027 NR Description: hypothetical protein F20P5.21 [imported] -
  misc_feature (120)..(717): Homolog of NCBI NO: 34894158 NR Description: putative co-repressor protein
  misc_feature (256)..(781): Homolog of NCBI NO: 6094552 NR Description: unknown protein [Arabidopsis thaliana]
  misc_feature (28)..(781): Homolog of NCBI NO: 9945050 NR Description: Similar to Arabidopsis chromosome I BAC genomic
  misc_feature (120)..(717): Homolog of NCBI NO: 34894158 NR Description: putative co-repressor protein
  misc_feature (560)..(1079): Homolog of NCBI NO: 25406027 NR Description: hypothetical protein F20P5.21 [imported] -
  misc_feature (118)..(658): Homolog of NCBI NO: 25406027 NR Description: hypothetical protein F20P5.21 [imported] -
  misc_feature (560)..(1104): Homolog of NCBI NO: 15223031 NR Description: expressed protein [Arabidopsis thaliana]
  misc_feature (118)..(658): Homolog of NCBI NO: 15223031 NR Description: expressed protein [Arabidopsis thaliana]

SEQ ID NO: 46211 - protein, 1070 aa, Arabidopsis thaliana; identical to SEQ ID NO: 44839
  peptide (1)..(1070): Ceres Seq. ID no. 13646349
  misc_feature (90)..(136): Pfam Name: Paired amphipathic helix repeat Pfam Description: Paired amphipathic helix repeat
  misc_feature (90)..(136): Pfam Name: Paired amphipathic helix repeat Pfam Description: Paired amphipathic helix repeat
  misc_feature (1)..(173): Homolog of NCBI NO: 15223031 NR Description: expressed protein [Arabidopsis thaliana]
  misc_feature (1)..(739): Homolog of NCBI NO: 9945050 NR Description: Similar to Arabidopsis chromosome I BAC genomic
  misc_feature (1)..(289): Homolog of NCBI NO: 6094552 NR Description: unknown protein [Arabidopsis thaliana]
  misc_feature (214)..(739): Homolog of NCBI NO: 6094552 NR Description: unknown protein [Arabidopsis thaliana]
  misc_feature (671)..(1013): Homolog of NCBI NO: 34894158 NR Description: putative co-repressor protein
  misc_feature (1)..(173): Homolog of NCBI NO: 15223031 NR Description: expressed protein [Arabidopsis thaliana]
  misc_feature (1)..(289): Homolog of NCBI NO: 6094552 NR Description: unknown protein [Arabidopsis thaliana]
  misc_feature (671)..(1013): Homolog of NCBI NO: 34894158 NR Description: putative co-repressor protein
  misc_feature (76)..(616): Homolog of NCBI NO: 15223031 NR Description: expressed protein [Arabidopsis thaliana]
  misc_feature (518)..(1062): Homolog of NCBI NO: 15223031 NR Description: expressed protein [Arabidopsis thaliana]
  misc_feature (76)..(616): Homolog of NCBI NO: 25406027 NR Description: hypothetical protein F20P5.21 [imported] -
  misc_feature (518)..(1037): Homolog of NCBI NO: 25406027 NR Description: hypothetical protein F20P5.21 [imported] -
  misc_feature (78)..(675): Homolog of NCBI NO: 34894158 NR Description: putative co-repressor protein
  misc_feature (214)..(739): Homolog of NCBI NO: 6094552 NR Description: unknown protein [Arabidopsis thaliana]
  misc_feature (1)..(739): Homolog of NCBI NO: 9945050 NR Description: Similar to Arabidopsis chromosome I BAC genomic
  misc_feature (78)..(675): Homolog of NCBI NO: 34894158 NR Description: putative co-repressor protein
  misc_feature (518)..(1037): Homolog of NCBI NO: 25406027 NR Description: hypothetical protein F20P5.21 [imported] -
  misc_feature (76)..(616): Homolog of NCBI NO: 25406027 NR Description: hypothetical protein F20P5.21 [imported] -
  misc_feature (518)..(1062): Homolog of NCBI NO: 15223031 NR Description: expressed protein [Arabidopsis thaliana]
  misc_feature (76)..(616): Homolog of NCBI NO: 15223031 NR Description: expressed protein [Arabidopsis thaliana]

SEQ ID NO: 46212 - DNA, 2456 bp, Arabidopsis thaliana; identical to SEQ ID NO: 45655
  misc_feature (1)..(2456): Ceres Seq. ID no. 13592201
  misc_feature: MA Experiment ID: 20000166 Result: Down-regulated in Transcription
  misc_feature: MA Experiment 20000166 PARAMETER Experiment Name: At_100uM_ABA_P Parameter: Age (day) Value: 14
  misc_feature: MA Experiment 20000166 PARAMETER Experiment Name: At_100uM_ABA_P Parameter: Organism Value: A. thaliana
  misc_feature: MA Experiment 20000166 PARAMETER Experiment Name: At_100uM_ABA_P Parameter: Plant Line Value: WS
  misc_feature: MA Experiment 20000166 PARAMETER Experiment Name: At_100uM_ABA_P Parameter: Timepoint (hr) Value: 1
  misc_feature: MA Experiment 20000166 PARAMETER Experiment Name: At_100uM_ABA_P Parameter: Tissue Value: Aerial
  misc_feature: MA Experiment 20000166 PARAMETER Experiment Name: At_100uM_ABA_P Parameter: Treatment Value: 100uM ABA vs. No Treatment
  misc_feature: MA Experiment ID: 20000169 Result: Up-regulated in Transcription
  misc_feature: MA Experiment 20000169 PARAMETER Experiment Name: At_100uM_ABA_P Parameter: Age (day) Value: 14
  misc_feature: MA Experiment 20000169 PARAMETER Experiment Name: At_100uM_ABA_P Parameter: Organism Value: A. thaliana
  misc_feature: MA Experiment 20000169 PARAMETER Experiment Name: At_100uM_ABA_P Parameter: Plant Line Value: WS
  misc_feature: MA Experiment 20000169 PARAMETER Experiment Name: At_100uM_ABA_P Parameter: Timepoint (hr) Value: 6
  misc_feature: MA Experiment 20000169 PARAMETER Experiment Name: At_100uM_ABA_P Parameter: Tissue Value: Aerial
  misc_feature: MA Experiment 20000169 PARAMETER Experiment Name: At_100uM_ABA_P Parameter: Treatment Value: 100uM ABA vs. No Treatment
  misc_feature: MA Experiment ID: 20000171 Result: Down-regulated in Transcription
  misc_feature: MA Experiment 20000171 PARAMETER Experiment Name: At_42deg_Heat_P Parameter: Age (day) Value: 14
  misc_feature: MA Experiment 20000171 PARAMETER Experiment Name: At_42deg_Heat_P Parameter: Organism Value: A. thaliana
  misc_feature: MA Experiment 20000171 PARAMETER Experiment Name: At_42deg_Heat_P Parameter: Plant Line Value: WS
  misc_feature: MA Experiment 20000171 PARAMETER Experiment Name: At_42deg_Heat_P Parameter: Temperature (deg C) Value: 42 vs. 22
  misc_feature: MA Experiment 20000171 PARAMETER Experiment Name: At_42deg_Heat_P Parameter: Timepoint (hr) Value: 1
  misc_feature: MA Experiment 20000171 PARAMETER Experiment Name: At_42deg_Heat_P Parameter: Tissue Value: Aerial
  misc_feature: MA Experiment ID: 20000173 Result: Down-regulated in Transcription
  misc_feature: MA Experiment 20000173 PARAMETER Experiment Name: At_42deg_Heat_P Parameter: Age (day) Value: 14
  misc_feature: MA Experiment 20000173 PARAMETER Experiment Name: At_42deg_Heat_P Parameter: Organism Value: A. thaliana
  misc_feature: MA Experiment 20000173 PARAMETER Experiment Name: At_42deg_Heat_P Parameter: Plant Line Value: WS
  misc_feature: MA Experiment 20000173 PARAMETER Experiment Name: At_42deg_Heat_P Parameter: Temperature (deg C) Value: 42 vs. 22
  misc_feature: MA Experiment 20000173 PARAMETER Experiment Name: At_42deg_Heat_P Parameter: Timepoint (hr) Value: 6
  misc_feature: MA Experiment 20000173 PARAMETER Experiment Name: At_42deg_Heat_P Parameter: Tissue Value: Aerial
  misc_feature: MA Experiment ID: 20000179 Result: Down-regulated in Transcription
  misc_feature: MA Experiment 20000179 PARAMETER Experiment Name: At_Germinating_Seeds_P Parameter: Age (hr) Value: 6 vs. 0
  misc_feature: MA Experiment 20000179 PARAMETER Experiment Name: At_Germinating_Seeds_P Parameter: Tissue Value: Germinating Seeds
  misc_feature: MA Experiment ID: 20000184 Result: Down-regulated in Transcription
  misc_feature: MA Experiment 20000184 PARAMETER Experiment Name: At_Shoots__P Parameter: Age (day) Value: 7
  misc_feature: MA Experiment 20000184 PARAMETER Experiment Name: At_Shoots__P Parameter: Tissue Value: Shoots vs. Whole Plant
  misc_feature: MA Experiment ID: 20000227 Result: Up-regulated in Transcription
  misc_feature: MA Experiment 20000227 PARAMETER Experiment Name: At_Root-Tips-vs-Tops_P Parameter: Tissue Value: Root Tips vs. Root Tops
  misc_feature: MA Experiment ID: 20000264 Result: Up-regulated in Transcription
  misc_feature: MA Experiment 20000264 PARAMETER Experiment Name: At_Open_Flower_P Parameter: Age (day) Value: 21
  misc_feature: MA Experiment 20000264 PARAMETER Experiment Name: At_Open_Flower_P Parameter: Plant Line Value: WS
  misc_feature: MA Experiment 20000264 PARAMETER Experiment Name: At_Open_Flower_P Parameter: Tissue Value: Open Flower vs. Whole Plant
  misc_feature: MA Experiment ID: 20000269 Result: Down-regulated in Transcription
  misc_feature: MA Experiment 20000269 PARAMETER Experiment Name: At_1mM_KNO3_L-vs-H_Roots_P Parameter: Age (day) Value: 7,10,12
  misc_feature: MA Experiment 20000269 PARAMETER Experiment Name: At_1mM_KNO3_L-vs-H_Roots_P Parameter: Organism Value: A. thaliana
  misc_feature: MA Experiment 20000269 PARAMETER Experiment Name: At_1mM_KNO3_L-vs-H_Roots_P Parameter: Plant Line Value: WS
  misc_feature: MA Experiment 20000269 PARAMETER Experiment Name: At_1mM_KNO3_L-vs-H_Roots_P Parameter: Timepoint (day) Value: 7,10,12
  misc_feature: MA Experiment 20000269 PARAMETER Experiment Name: At_1mM_KNO3_L-vs-H_Roots_P Parameter: Tissue Value: Roots
  misc_feature: MA Experiment 20000269 PARAMETER Experiment Name: At_1mM_KNO3_L-vs-H_Roots_P Parameter: Treatment Value: 1mM KNO3 vs. 50mM KNO3
  misc_feature: MA Experiment ID: 20000436 Result: Up-regulated in Transcription
  misc_feature: MA Experiment 20000436 PARAMETER Experiment Name: At_Drought_P Parameter: Age (day) Value: 7
  misc_feature: MA Experiment 20000436 PARAMETER Experiment Name: At_Drought_P Parameter: Organism Value: A. thaliana
  misc_feature: MA Experiment 20000436 PARAMETER Experiment Name: At_Drought_P Parameter: Plant Line Value: WS
  misc_feature: MA Experiment 20000436 PARAMETER Experiment Name: At_Drought_P Parameter: Timepoint (hr) Value: 12
  misc_feature: MA Experiment 20000436 PARAMETER Experiment Name: At_Drought_P Parameter: Tissue Value: Whole Plant
  misc_feature: MA Experiment 20000436 PARAMETER Experiment Name: At_Drought_P Parameter: Treatment Value: Drought vs. No Drought
  misc_feature: MA Experiment ID: 20000438 Result: Down-regulated in Transcription
  misc_feature: MA Experiment 20000438 PARAMETER Experiment Name: At_Shoots__P Parameter: Age (day) Value: 14
  misc_feature: MA Experiment 20000438 PARAMETER Experiment Name: At_Shoots__P Parameter: Tissue Value: Shoots vs. Whole Plant
  misc_feature: MA Experiment ID: 20000439 Result: Down-regulated in Transcription
  misc_feature: MA Experiment 20000439 PARAMETER Experiment Name: At_Roots__P Parameter: Age (day) Value: 14 vs. 21
  misc_feature: MA Experiment 20000439 PARAMETER Experiment Name: At_Roots__P Parameter: Organism Value: A. thaliana
  misc_feature: MA Experiment 20000439 PARAMETER Experiment Name: At_Roots__P Parameter: Tissue Value: Roots vs. Whole Plant
  misc_feature: MA Experiment ID: 20000441 Result: Up-regulated in Transcription
  misc_feature: MA Experiment 20000441 PARAMETER Experiment Name: At_1uM_BR-BRZ__P Parameter: Tissue Value: Shoot Apices
  misc_feature: MA Experiment 20000441 PARAMETER Experiment Name: At_1uM_BR-BRZ__P Parameter: Treatment Value: 1uM BR vs. No Treatment
  misc_feature: MA Experiment ID: 20000443 Result: Up-regulated in Transcription
  misc_feature: MA Experiment 20000443 PARAMETER Experiment Name: At_1uM_BR-BRZ__P Parameter: Tissue Value: Shoot Apices
  misc_feature: MA Experiment 20000443 PARAMETER Experiment Name: At_1uM_BR-BRZ__P Parameter: Treatment Value: 1uM BRZ vs. No Treatment
  misc_feature: MA Experiment ID: 20000453 Result: Up-regulated in Transcription
  misc_feature: MA Experiment 20000453 PARAMETER Experiment Name: At_100uM_ABA_P Parameter: Age (day) Value: 15
  misc_feature: MA Experiment 20000453 PARAMETER Experiment Name: At_100uM_ABA_P Parameter: Organism Value: A. thaliana
  misc_feature: MA Experiment 20000453 PARAMETER Experiment Name: At_100uM_ABA_P Parameter: Plant Line Value: WS
  misc_feature: MA Experiment 20000453 PARAMETER Experiment Name: At_100uM_ABA_P Parameter: Timepoint (hr) Value: 24
  misc_feature: MA Experiment 20000453 PARAMETER Experiment Name: At_100uM_ABA_P Parameter: Tissue Value: Aerial
  misc_feature: MA Experiment 20000453 PARAMETER Experiment Name: At_100uM_ABA_P Parameter: Treatment Value: 100uM ABA vs. No Treatment
  misc_feature: MA Experiment ID: 20000495 Result: Up-regulated in Transcription
  misc_feature: MA Experiment 20000495 PARAMETER Experiment Name: At_Guard_Cells_P Parameter: Harvest Date Value: 8/2/2002
  misc_feature: MA Experiment 20000495 PARAMETER Experiment Name: At_Guard_Cells_P Parameter: Organism Value: A. thaliana
  misc_feature: MA Experiment 20000495 PARAMETER Experiment Name: At_Guard_Cells_P Parameter: Tissue Value: Guard Cells vs. Leaves
  misc_feature: MA Experiment ID: 20000496 Result: Up-regulated in Transcription
  misc_feature: MA Experiment 20000496 PARAMETER Experiment Name: At_Guard_Cells_P Parameter: Harvest Date Value: 7/19/2002
  misc_feature: MA Experiment 20000496 PARAMETER Experiment Name: At_Guard_Cells_P Parameter: Organism Value: Canola
  misc_feature: MA Experiment 20000496 PARAMETER Experiment Name: At_Guard_Cells_P Parameter: Tissue Value: Guard Cells vs. Leaves
  misc_feature: MA Experiment ID: 20000573 Result: Up-regulated in Transcription
  misc_feature: MA Experiment 20000573 PARAMETER Experiment Name: At_100uM_ABA_Mutants__P Parameter: Organism Value: A. thaliana
  misc_feature: MA Experiment 20000573 PARAMETER Experiment Name: At_100uM_ABA_Mutants__P Parameter: Plant Line Value: CS22 vs. Ler wt
  misc_feature: MA Experiment 20000573 PARAMETER Experiment Name: At_100uM_ABA_Mutants__P Parameter: Timepoint (hr) Value: N/A
  misc_feature: MA Experiment 20000573 PARAMETER Experiment Name: At_100uM_ABA_Mutants__P Parameter: Tissue Value: Whole Plant
  misc_feature: MA Experiment 20000573 PARAMETER Experiment Name: At_100uM_ABA_Mutants__P Parameter: Treatment Value: None
  misc_feature: MA Experiment ID: 20000606 Result: Up-regulated in Transcription
  misc_feature: MA Experiment 20000606 PARAMETER Experiment Name: At_CS8548_Mutant_P Parameter: Age (day) Value: 14
  misc_feature: MA Experiment 20000606 PARAMETER Experiment Name: At_CS8548_Mutant_P Parameter: Plant Line Value: CS8548 vs. wt
  misc_feature: MA Experiment 20000606 PARAMETER Experiment Name: At_CS8548_Mutant_P Parameter: Tissue Value: Whole Plant
  misc_feature: MA Experiment ID: 20000794 Result: Up-regulated in Transcription
  misc_feature: MA Experiment 20000794 PARAMETER Experiment Name: At_Petals_P Parameter: Age (day) Value: 23-25 days
  misc_feature: MA Experiment 20000794 PARAMETER Experiment Name: At_Petals_P Parameter: Plant Line Value: WS
  misc_feature: MA Experiment 20000794 PARAMETER Experiment Name: At_Petals_P Parameter: Tissue Value: Petals vs. Whole plant
  misc_feature: MA Experiment ID: 20001247 Result: Up-regulated in Transcription
  misc_feature: MA Experiment 20001247 PARAMETER Experiment Name: At_Far-red-induction_P Parameter: Age (day) Value: 7
  misc_feature: MA Experiment 20001247 PARAMETER Experiment Name: At_Far-red-induction_P Parameter: Light Value: Far-red vs. White
  misc_feature: MA Experiment 20001247 PARAMETER Experiment Name: At_Far-red-induction_P Parameter: Organism Value: A. thaliana
  misc_feature: MA Experiment 20001247 PARAMETER Experiment Name: At_Far-red-induction_P Parameter: Plant Line Value: Columbia
  misc_feature: MA Experiment 20001247 PARAMETER Experiment Name: At_Far-red-induction_P Parameter: Timepoint (hr) Value: 1
  misc_feature: MA Experiment 20001247 PARAMETER Experiment Name: At_Far-red-induction_P Parameter: Tissue Value: Whole Plant
  misc_feature: MA Experiment ID: 20001248 Result: Up-regulated in Transcription
  misc_feature: MA Experiment 20001248 PARAMETER Experiment Name: At_Far-red-induction_P Parameter: Age (day) Value: 7
  misc_feature: MA Experiment 20001248 PARAMETER Experiment Name: At_Far-red-induction_P Parameter: Light Value: Far-red vs. White
  misc_feature: MA Experiment 20001248 PARAMETER Experiment Name: At_Far-red-induction_P Parameter: Organism Value: A. thaliana
  misc_feature: MA Experiment 20001248 PARAMETER Experiment Name: At_Far-red-induction_P Parameter: Plant Line Value: Columbia
  misc_feature: MA Experiment 20001248 PARAMETER Experiment Name: At_Far-red-induction_P Parameter: Timepoint (hr) Value: 4
  misc_feature: MA Experiment 20001248 PARAMETER Experiment Name: At_Far-red-induction_P Parameter: Tissue Value: Whole Plant
  misc_feature: MA Experiment ID: 20001450 Result: Up-regulated in Transcription
  misc_feature: MA Experiment 20001450 PARAMETER Experiment Name: At_Far-red-induction_P Parameter: Age (day) Value: 7
  misc_feature: MA Experiment 20001450 PARAMETER Experiment Name: At_Far-red-induction_P Parameter: Light Value: Far-red vs. White
  misc_feature: MA Experiment 20001450 PARAMETER Experiment Name: At_Far-red-induction_P Parameter: Organism Value: A. thaliana
  misc_feature: MA Experiment 20001450 PARAMETER Experiment Name: At_Far-red-induction_P Parameter: Plant Line Value: Columbia
  misc_feature: MA Experiment 20001450 PARAMETER Experiment Name: At_Far-red-induction_P Parameter: Timepoint (hr) Value: 8
  misc_feature: MA Experiment 20001450 PARAMETER Experiment Name: At_Far-red-induction_P Parameter: Tissue Value: Whole Plant
  misc_feature: MA Experiment ID: 20001451 Result: Up-regulated in Transcription
  misc_feature: MA Experiment 20001451 PARAMETER Experiment Name: At_Far-red-induction_P Parameter: Age (day) Value: 7
  misc_feature: MA Experiment 20001451 PARAMETER Experiment Name: At_Far-red-induction_P Parameter: Light Value: Far-red vs. White
  misc_feature: MA Experiment 20001451 PARAMETER Experiment Name: At_Far-red-induction_P Parameter: Organism Value: A. thaliana
  misc_feature: MA Experiment 20001451 PARAMETER Experiment Name: At_Far-red-induction_P Parameter: Plant Line Value: Columbia
  misc_feature: MA Experiment 20001451 PARAMETER Experiment Name: At_Far-red-induction_P Parameter: Timepoint (hr) Value: 24
  misc_feature: MA Experiment 20001451 PARAMETER Experiment Name: At_Far-red-induction_P Parameter: Tissue Value: Whole Plant
  misc_feature: MA Experiment ID: 20001554 Result: Up-regulated in Transcription
  misc_feature: MA Experiment 20001554 PARAMETER Experiment Name: At_Drought_Soil_Dry_P Parameter: Age (day) Value: 21
  misc_feature: MA Experiment 20001554 PARAMETER Experiment Name: At_Drought_Soil_Dry_P Parameter: Organism Value: A. thaliana
  misc_feature: MA Experiment 20001554 PARAMETER Experiment Name: At_Drought_Soil_Dry_P Parameter: Plant Line Value: WS
  misc_feature: MA Experiment 20001554 PARAMETER Experiment Name: At_Drought_Soil_Dry_P Parameter: Post Timepoint (hr) Value: None
  misc_feature: MA Experiment 20001554 PARAMETER Experiment Name: At_Drought_Soil_Dry_P Parameter: Post-Treatment Value: None
  misc_feature: MA Experiment 20001554 PARAMETER Experiment Name: At_Drought_Soil_Dry_P Parameter: Timepoint (day) Value: 7
  misc_feature: MA Experiment 20001554 PARAMETER Experiment Name: At_Drought_Soil_Dry_P Parameter: Treatment Value: Drought vs. No Drought

SEQ ID NO: 46213 - protein, 793 aa, Arabidopsis thaliana; identical to SEQ ID NO: 45656
  peptide (1)..(793): Ceres Seq. ID no. 13592202
  misc_feature (423)..(653): Pfam Name: Glycosyl hydrolase family 3 C terminal domain Pfam Description: Glycosyl hydrolase family 3 C terminal domain
  misc_feature (423)..(653): Pfam Name: Glycosyl hydrolase family 3 C terminal domain Pfam Description: Glycosyl hydrolase family 3 C terminal domain
  misc_feature (423)..(653): Pfam Name: Glycosyl hydrolase family 3 C terminal domain Pfam Description: Glycosyl hydrolase family 3 C terminal domain
  misc_feature (32)..(218): Homolog of NCBI NO: 15238197 NR Description: glycosyl hydrolase family 3 [Arabidopsis
  misc_feature (193)..(791): Homolog of NCBI NO: 15238197 NR Description: glycosyl hydrolase family 3 [Arabidopsis
  misc_feature (49)..(790): Homolog of NCBI NO: 18025342 NR Description: beta-D-xylosidase [Hordeum vulgare]
  misc_feature (32)..(792): Homolog of NCBI NO: 25518461 NR Description: hypothetical protein T14P4.8 - Arabidopsis
  misc_feature (32)..(792): Homolog of NCBI NO: 18378991 NR Description: glycosyl hydrolase family 3 [Arabidopsis
  misc_feature (32)..(218): Homolog of NCBI NO: 15238197 NR Description: glycosyl hydrolase family 3 [Arabidopsis
  misc_feature (49)..(790): Homolog of NCBI NO: 18025342 NR Description: beta-D-xylosidase [Hordeum vulgare]
  misc_feature (32)..(792): Homolog of NCBI NO: 18378991 NR Description: glycosyl hydrolase family 3 [Arabidopsis
  misc_feature (32)..(792): Homolog of NCBI NO: 25518461 NR Description: hypothetical protein T14P4.8 - Arabidopsis
  misc_feature (49)..(790): Homolog of NCBI NO: 18025342 NR Description: beta-D-xylosidase [Hordeum vulgare]
  misc_feature (193)..(791): Homolog of NCBI NO: 15238197 NR Description: glycosyl hydrolase family 3 [Arabidopsis
  misc_feature (32)..(218): Homolog of NCBI NO: 15238197 NR Description: glycosyl hydrolase family 3 [Arabidopsis
  misc_feature (45)..(793): Homolog of NCBI NO: 18025340 NR Description: alpha-L-arabinofuranosidase/beta-D-xylosidase
  misc_feature (32)..(792): Homolog of NCBI NO: 15239867 NR Description: glycosyl hydrolase family 3 [Arabidopsis
  misc_feature (34)..(793): Homolog of NCBI NO: 32481073 NR Description: auxin-induced beta-glucosidase [Chenopodium
  misc_feature (35)..(793): Homolog of NCBI NO: 15230897 NR Description: glycosyl hydrolase family 3 [Arabidopsis thaliana]
  misc_feature (35)..(793): Homolog of NCBI NO: 25453520 NR Description: beta-1,4-xylosidase [imported] - Arabidopsis
  misc_feature (45)..(793): Homolog of NCBI NO: 18025340 NR Description: alpha-L-arabinofuranosidase/beta-D-xylosidase
  misc_feature (32)..(792): Homolog of NCBI NO: 15239867 NR Description: glycosyl hydrolase family 3 [Arabidopsis
  misc_feature (34)..(793): Homolog of NCBI NO: 32481073 NR Description: auxin-induced beta-glucosidase [Chenopodium
  misc_feature (35)..(793): Homolog of NCBI NO: 15230897 NR Description: glycosyl hydrolase family 3 [Arabidopsis thaliana]
  misc_feature (35)..(793): Homolog of NCBI NO: 25453520 NR Description: beta-1,4-xylosidase [imported] - Arabidopsis
  misc_feature (32)..(792): Homolog of NCBI NO: 18378991 NR Description: glycosyl hydrolase family 3 [Arabidopsis
  misc_feature (32)..(792): Homolog of NCBI NO: 25518461 NR Description: hypothetical protein T14P4.8 - Arabidopsis
  misc_feature (193)..(791): Homolog of NCBI NO: 15238197 NR Description: glycosyl hydrolase family 3 [Arabidopsis
  misc_feature (35)..(793): Homolog of NCBI NO: 25453520 NR Description: beta-1,4-xylosidase [imported] - Arabidopsis
  misc_feature (35)..(793): Homolog of NCBI NO: 15230897 NR Description: glycosyl hydrolase family 3 [Arabidopsis thaliana]
  misc_feature (34)..(793): Homolog of NCBI NO: 32481073 NR Description: auxin-induced beta-glucosidase [Chenopodium
  misc_feature (32)..(792): Homolog of NCBI NO: 15239867 NR Description: glycosyl hydrolase family 3 [Arabidopsis
  misc_feature (45)..(793): Homolog of NCBI NO: 18025340 NR Description: alpha-L-arabinofuranosidase/beta-D-xylosidase

SEQ ID NO: 46214 - protein, 784 aa, Arabidopsis thaliana; identical to SEQ ID NO: 45657
  peptide (1)..(784): Ceres Seq. ID no. 13592203
  misc_feature (414)..(644): Pfam Name: Glycosyl hydrolase family 3 C terminal domain Pfam Description: Glycosyl hydrolase family 3 C terminal domain
  misc_feature (414)..(644): Pfam Name: Glycosyl hydrolase family 3 C terminal domain Pfam Description: Glycosyl hydrolase family 3 C terminal domain
  misc_feature (414)..(644): Pfam Name: Glycosyl hydrolase family 3 C terminal domain Pfam Description: Glycosyl hydrolase family 3 C terminal domain
  misc_feature (23)..(209): Homolog of NCBI NO: 15238197 NR Description: glycosyl hydrolase family 3 [Arabidopsis
  misc_feature (184)..(782): Homolog of NCBI NO: 15238197 NR Description: glycosyl hydrolase family 3 [Arabidopsis
  misc_feature (40)..(781): Homolog of NCBI NO: 18025342 NR Description: beta-D-xylosidase [Hordeum vulgare]
  misc_feature (23)..(783): Homolog of NCBI NO: 25518461 NR Description: hypothetical protein T14P4.8 - Arabidopsis
  misc_feature (23)..(783): Homolog of NCBI NO: 18378991 NR Description: glycosyl hydrolase family 3 [Arabidopsis
  misc_feature (23)..(209): Homolog of NCBI NO: 15238197 NR Description: glycosyl hydrolase family 3 [Arabidopsis
  misc_feature (40)..(781): Homolog of NCBI NO: 18025342 NR Description: beta-D-xylosidase [Hordeum vulgare]
  misc_feature (23)..(783): Homolog of NCBI NO: 18378991 NR Description: glycosyl hydrolase family 3 [Arabidopsis
  misc_feature (23)..(783): Homolog of NCBI NO: 25518461 NR Description: hypothetical protein T14P4.8 - Arabidopsis
  misc_feature (40)..(781): Homolog of NCBI NO: 18025342 NR Description: beta-D-xylosidase [Hordeum vulgare]
  misc_feature (184)..(782): Homolog of NCBI NO: 15238197 NR Description: glycosyl hydrolase family 3 [Arabidopsis
  misc_feature (23)..(209): Homolog of NCBI NO: 15238197 NR Description: glycosyl hydrolase family 3 [Arabidopsis
  misc_feature (36)..(784): Homolog of NCBI NO: 18025340 NR Description: alpha-L-arabinofuranosidase/beta-D-xylosidase
  misc_feature (23)..(783): Homolog of NCBI NO: 15239867 NR Description: glycosyl hydrolase family 3 [Arabidopsis
  misc_feature (25)..(784): Homolog of NCBI NO: 32481073 NR Description: auxin-induced beta-glucosidase [Chenopodium
  misc_feature (26)..(784): Homolog of NCBI NO: 15230897 NR Description: glycosyl hydrolase family 3 [Arabidopsis thaliana]
  misc_feature (26)..(784): Homolog of NCBI NO: 25453520 NR Description: beta-1,4-xylosidase [imported] - Arabidopsis
  misc_feature (36)..(784): Homolog of NCBI NO: 18025340 NR Description: alpha-L-arabinofuranosidase/beta-D-xylosidase
  misc_feature (23)..(783): Homolog of NCBI NO: 15239867 NR Description: glycosyl hydrolase family 3 [Arabidopsis
  misc_feature (25)..(784): Homolog of NCBI NO: 32481073 NR Description: auxin-induced beta-glucosidase [Chenopodium
  misc_feature (26)..(784): Homolog of NCBI NO: 15230897 NR Description: glycosyl hydrolase family 3 [Arabidopsis thaliana]
  misc_feature (26)..(784): Homolog of NCBI NO: 25453520 NR Description: beta-1,4-xylosidase [imported] - Arabidopsis
  misc_feature (23)..(783): Homolog of NCBI NO: 18378991 NR Description: glycosyl hydrolase family 3 [Arabidopsis
  misc_feature (23)..(783): Homolog of NCBI NO: 25518461 NR Description: hypothetical protein T14P4.8 - Arabidopsis
  misc_feature (184)..(782): Homolog of NCBI NO: 15238197 NR Description: glycosyl hydrolase family 3 [Arabidopsis
  misc_feature (26)..(784): Homolog of NCBI NO: 25453520 NR Description: beta-1,4-xylosidase [imported] - Arabidopsis
  misc_feature (26)..(784): Homolog of NCBI NO: 15230897 NR Description: glycosyl hydrolase family 3 [Arabidopsis thaliana]
  misc_feature (25)..(784): Homolog of NCBI NO: 32481073 NR Description: auxin-induced beta-glucosidase [Chenopodium
  misc_feature (23)..(783): Homolog of NCBI NO: 15239867 NR Description: glycosyl hydrolase family 3 [Arabidopsis
  misc_feature (36)..(784): Homolog of NCBI NO: 18025340 NR Description: alpha-L-arabinofuranosidase/beta-D-xylosidase

SEQ ID NO: 46215 - protein, 626 aa, Arabidopsis thaliana; identical to SEQ ID NO: 45658
  peptide (1)..(626): Ceres Seq. ID no. 13592204
  misc_feature (256)..(486): Pfam Name: Glycosyl hydrolase family 3 C terminal domain Pfam Description: Glycosyl hydrolase family 3 C terminal domain
  misc_feature (256)..(486): Pfam Name: Glycosyl hydrolase family 3 C terminal domain Pfam Description: Glycosyl hydrolase family 3 C terminal domain
  misc_feature (256)..(486): Pfam Name: Glycosyl hydrolase family 3 C terminal domain Pfam Description: Glycosyl hydrolase family 3 C terminal domain
  misc_feature (1)..(51): Homolog of NCBI NO: 15238197 NR Description: glycosyl hydrolase family 3 [Arabidopsis
  misc_feature (26)..(624): Homolog of NCBI NO: 15238197 NR Description: glycosyl hydrolase family 3 [Arabidopsis
  misc_feature (1)..(623): Homolog of NCBI NO: 18025342 NR Description: beta-D-xylosidase [Hordeum vulgare]
  misc_feature (1)..(625): Homolog of NCBI NO: 25518461 NR Description: hypothetical protein T14P4.8 - Arabidopsis
  misc_feature (1)..(625): Homolog of NCBI NO: 18378991 NR Description: glycosyl hydrolase family 3 [Arabidopsis
  misc_feature (1)..(51): Homolog of NCBI NO: 15238197 NR Description: glycosyl hydrolase family 3 [Arabidopsis
  misc_feature (1)..(623): Homolog of NCBI NO: 18025342 NR Description: beta-D-xylosidase [Hordeum vulgare]
  misc_feature (1)..(625): Homolog of NCBI NO: 18378991 NR Description: glycosyl hydrolase family 3 [Arabidopsis
  misc_feature (1)..(625): Homolog of NCBI NO: 25518461 NR Description: hypothetical protein T14P4.8 - Arabidopsis
  misc_feature (1)..(623): Homolog of NCBI NO: 18025342 NR Description: beta-D-xylosidase [Hordeum vulgare]
  misc_feature (26)..(624): Homolog of NCBI NO: 15238197 NR Description: glycosyl hydrolase family 3 [Arabidopsis
  misc_feature (1)..(51): Homolog of NCBI NO: 15238197 NR Description: glycosyl hydrolase family 3 [Arabidopsis
  misc_feature (1)..(626): Homolog of NCBI NO: 18025340 NR Description: alpha-L-arabinofuranosidase/beta-D-xylosidase
  misc_feature (1)..(625): Homolog of NCBI NO: 15239867 NR Description: glycosyl hydrolase family 3 [Arabidopsis
  misc_feature (1)..(626): Homolog of NCBI NO: 32481073 NR Description: auxin-induced beta-glucosidase [Chenopodium
  misc_feature (1)..(626): Homolog of NCBI NO: 15230897 NR Description: glycosyl hydrolase family 3 [Arabidopsis thaliana]
  misc_feature (1)..(626): Homolog of NCBI NO: 25453520 NR Description: beta-1,4-xylosidase [imported] - Arabidopsis
  misc_feature (1)..(626): Homolog of NCBI NO: 18025340 NR Description: alpha-L-arabinofuranosidase/beta-D-xylosidase
  misc_feature (1)..(625): Homolog of NCBI NO: 15239867 NR Description: glycosyl hydrolase family 3 [Arabidopsis
  misc_feature (1)..(626): Homolog of NCBI NO: 32481073 NR Description: auxin-induced beta-glucosidase [Chenopodium
  misc_feature (1)..(626): Homolog of NCBI NO: 15230897 NR Description: glycosyl hydrolase family 3 [Arabidopsis thaliana]
  misc_feature (1)..(626): Homolog of NCBI NO: 25453520 NR Description: beta-1,4-xylosidase [imported] - Arabidopsis
  misc_feature (1)..(625): Homolog of NCBI NO: 18378991 NR Description: glycosyl hydrolase family 3 [Arabidopsis
  misc_feature (1)..(625): Homolog of NCBI NO: 25518461 NR Description: hypothetical protein T14P4.8 - Arabidopsis
  misc_feature (26)..(624): Homolog of NCBI NO: 15238197 NR Description: glycosyl hydrolase family 3 [Arabidopsis
  misc_feature (1)..(626): Homolog of NCBI NO: 25453520 NR Description: beta-1,4-xylosidase [imported] - Arabidopsis
  misc_feature (1)..(626): Homolog of NCBI NO: 15230897 NR Description: glycosyl hydrolase family 3 [Arabidopsis thaliana]
  misc_feature (1)..(626): Homolog of NCBI NO: 32481073 NR Description: auxin-induced beta-glucosidase [Chenopodium
  misc_feature (1)..(625): Homolog of NCBI NO: 15239867 NR Description: glycosyl hydrolase family 3 [Arabidopsis
  misc_feature (1)..(626): Homolog of NCBI NO: 18025340 NR Description: alpha-L-arabinofuranosidase/beta-D-xylosidase

SEQ ID NO: 46216 - DNA, 1247 bp, Arabidopsis thaliana
  misc_feature (1)..(1247): Ceres Seq. ID no. 13578669
  misc_feature: MA Experiment ID: 108435 Result: Down-regulated in Transcription
  misc_feature: MA Experiment 108435 PARAMETER Experiment Name: At_stm_Mutants_cDNA_P Parameter: Plant Line Value: wt Landsburg vs stm
  misc_feature: MA Experiment 108435 PARAMETER Experiment Name: At_stm_Mutants_cDNA_P Parameter: Tissue Value: Shoot Apical Meristem Region
  misc_feature: MA Experiment ID: 108462 Result: Up-regulated in Transcription
  misc_feature: MA Experiment 108462 PARAMETER Experiment Name: At_Germinating_Seeds_cDNA_P Parameter: Age (day) Value: 2 vs. 0
  misc_feature: MA Experiment 108462 PARAMETER Experiment Name: At_Germinating_Seeds_cDNA_P Parameter: Tissue Value: Germinating Seeds
  misc_feature: MA Experiment ID: 108463 Result: Up-regulated in Transcription
  misc_feature: MA Experiment 108463 PARAMETER Experiment Name: At_Germinating_Seeds_cDNA_P Parameter: Age (day) Value: 3 vs. 0
  misc_feature: MA Experiment 108463 PARAMETER Experiment Name: At_Germinating_Seeds_cDNA_P Parameter: Tissue Value: Germinating Seeds
  misc_feature: MA Experiment ID: 108464 Result: Up-regulated in Transcription
  misc_feature: MA Experiment 108464 PARAMETER Experiment Name: At_Germinating_Seeds_cDNA_P Parameter: Age (day) Value: 4 vs. 0
  misc_feature: MA Experiment 108464 PARAMETER Experiment Name: At_Germinating_Seeds_cDNA_P Parameter: Tissue Value: Germinating Seeds
  misc_feature: MA Experiment ID: 108501 Result: Down-regulated in Transcription
  misc_feature: MA Experiment 108501 PARAMETER Experiment Name: At_ap2_floral_buds_cDNA_P Parameter: Plant Line Value: ap2 (Ler.)
  misc_feature: MA Experiment 108501 PARAMETER Experiment Name: At_ap2_floral_buds_cDNA_P Parameter: Tissue Value: Closed Flower
  misc_feature: MA Experiment ID: 108579 Result: Down-regulated in Transcription
  misc_feature: MA Experiment 108579 PARAMETER Experiment Name: At_4deg_Cold_cDNA_P Parameter: Temperature (deg C) Value: 4 vs. 22
  misc_feature: MA Experiment 108579 PARAMETER Experiment Name: At_4deg_Cold_cDNA_P Parameter: Timepoint (hr) Value: 6
  misc_feature: MA Experiment 108579 PARAMETER Experiment Name: At_4deg_Cold_cDNA_P Parameter: Tissue Value: Aerial
  misc_feature: MA Experiment ID: 108595 Result: Down-regulated in Transcription
  misc_feature: MA Experiment 108595 PARAMETER Experiment Name: At_Ler-pi_Ovule_cDNA_P Parameter: Plant Line Value: null
  misc_feature: MA Experiment ID: 108608 Result: Down-regulated in Transcription
  misc_feature: MA Experiment 108608 PARAMETER Experiment Name: At_100uM_ABA_cDNA_P Parameter: Timepoint (hr) Value: 1
  misc_feature: MA Experiment 108608 PARAMETER Experiment Name: At_100uM_ABA_cDNA_P Parameter: Tissue Value: Aerial
  misc_feature: MA Experiment 108608 PARAMETER Experiment Name: At_100uM_ABA_cDNA_P Parameter: Treatment Value: 100uM ABA vs. No Treatment
  misc_feature: MA Experiment ID: 20000069 Result: Down-regulated in Transcription
  misc_feature: MA Experiment 20000069 PARAMETER Experiment Name: At_100uM_ABA_Mutants_cDNA_P Parameter: Plant Line Value: CS23
  misc_feature: MA Experiment 20000069 PARAMETER Experiment Name: At_100uM_ABA_Mutants_cDNA_P Parameter: Timepoint (hr) Value: 6
  misc_feature: MA Experiment 20000069 PARAMETER Experiment Name: At_100uM_ABA_Mutants_cDNA_P Parameter: Tissue Value: Aerial
  misc_feature: MA Experiment 20000069 PARAMETER Experiment Name: At_100uM_ABA_Mutants_cDNA_P Parameter: Treatment Value: 100uM ABA vs. No Treatment
  misc_feature: MA Experiment ID: 20000070 Result: Down-regulated in Transcription
  misc_feature: MA Experiment 20000070 PARAMETER Experiment Name: At_100uM_ABA_Mutants_cDNA_P Parameter: Plant Line Value: CS24
  misc_feature: MA Experiment 20000070 PARAMETER Experiment Name: At_100uM_ABA_Mutants_cDNA_P Parameter: Timepoint (hr) Value: 6
  misc_feature: MA Experiment 20000070 PARAMETER Experiment Name: At_100uM_ABA_Mutants_cDNA_P Parameter: Tissue Value: Aerial
  misc_feature: MA Experiment 20000070 PARAMETER Experiment Name: At_100uM_ABA_Mutants_cDNA_P Parameter: Treatment Value: 100uM ABA vs. No Treatment
  misc_feature: MA Experiment ID: 20000071 Result: Down-regulated in Transcription
  misc_feature: MA Experiment 20000071 PARAMETER Experiment Name: At_100uM_ABA_Mutants_cDNA_P Parameter: Plant Line Value: CS8104
  misc_feature: MA Experiment 20000071 PARAMETER Experiment Name: At_100uM_ABA_Mutants_cDNA_P Parameter: Timepoint (hr) Value: 6
  misc_feature: MA Experiment 20000071 PARAMETER Experiment Name: At_100uM_ABA_Mutants_cDNA_P Parameter: Tissue Value: Aerial
  misc_feature: MA Experiment 20000071 PARAMETER Experiment Name: At_100uM_ABA_Mutants_cDNA_P Parameter: Treatment Value: 100uM ABA vs. No Treatment
  misc_feature: MA Experiment ID: 20000072 Result: Down-regulated in Transcription
  misc_feature: MA Experiment 20000072 PARAMETER Experiment Name: At_100uM_ABA_Mutants_cDNA_P Parameter: Plant Line Value: CS8105
  misc_feature: MA Experiment 20000072 PARAMETER Experiment Name: At_100uM_ABA_Mutants_cDNA_P Parameter: Timepoint (hr) Value: 6
  misc_feature: MA Experiment 20000072 PARAMETER Experiment Name: At_100uM_ABA_Mutants_cDNA_P Parameter: Tissue Value: Aerial
  misc_feature: MA Experiment 20000072 PARAMETER Experiment Name: At_100uM_ABA_Mutants_cDNA_P Parameter: Treatment Value: 100uM ABA vs. No Treatment
  misc_feature: MA Experiment ID: 20000086 Result: Down-regulated in Transcription
  misc_feature: MA Experiment 20000086 PARAMETER Experiment Name: At_100uM_ABA_Mutants_cDNA_P Parameter: Plant Line Value: CS22
  misc_feature: MA Experiment 20000086 PARAMETER Experiment Name: At_100uM_ABA_Mutants_cDNA_P Parameter: Timepoint (hr) Value: 6
  misc_feature: MA Experiment 20000086 PARAMETER Experiment Name: At_100uM_ABA_Mutants_cDNA_P Parameter: Tissue Value: Aerial
  misc_feature: MA Experiment 20000086 PARAMETER Experiment Name: At_100uM_ABA_Mutants_cDNA_P Parameter: Treatment Value: 100uM ABA vs. No Treatment
  misc_feature: MA Experiment ID: 20000087 Result: Down-regulated in Transcription
  misc_feature: MA Experiment 20000087 PARAMETER Experiment Name: At_100uM_ABA_Mutants_cDNA_P Parameter: Plant Line Value: WS
  misc_feature: MA Experiment 20000087 PARAMETER Experiment Name: At_100uM_ABA_Mutants_cDNA_P Parameter: Timepoint (hr) Value: 6
  misc_feature: MA Experiment 20000087 PARAMETER Experiment Name: At_100uM_ABA_Mutants_cDNA_P Parameter: Tissue Value: Aerial
  misc_feature: MA Experiment 20000087 PARAMETER Experiment Name: At_100uM_ABA_Mutants_cDNA_P Parameter: Treatment Value: 100uM ABA vs. No Treatment
  misc_feature: MA Experiment ID: 20000088 Result: Down-regulated in Transcription
  misc_feature: MA Experiment 20000088 PARAMETER Experiment Name: At_100uM_ABA_Mutants_cDNA_P Parameter: Plant Line Value: Landsberg
  misc_feature: MA Experiment 20000088 PARAMETER Experiment Name: At_100uM_ABA_Mutants_cDNA_P Parameter: Timepoint (hr) Value: 6
  misc_feature: MA Experiment 20000088 PARAMETER Experiment Name: At_100uM_ABA_Mutants_cDNA_P Parameter: Tissue Value: Aerial
  misc_feature: MA Experiment 20000088 PARAMETER Experiment Name: At_100uM_ABA_Mutants_cDNA_P Parameter: Treatment Value: 100uM ABA vs. No Treatment
  misc_feature: MA Experiment ID: 20000113 Result: Up-regulated in Transcription
  misc_feature: MA Experiment 20000113 PARAMETER Experiment Name: At_42deg_Heat_cDNA_P Parameter: Temperature (deg C) Value: 42 vs. 22
  misc_feature: MA Experiment 20000113 PARAMETER Experiment Name: At_42deg_Heat_cDNA_P Parameter: Timepoint (hr) Value: 8
  misc_feature: MA Experiment 20000113 PARAMETER Experiment Name: At_42deg_Heat_cDNA_P Parameter: Tissue Value: Aerial
  misc_feature: MA Experiment ID: 20000117 Result: Down-regulated in Transcription
  misc_feature: MA Experiment 20000117 PARAMETER Experiment Name: At_100uM_ABA_Mutants_cDNA_P Parameter: Plant Line Value: Columbia
  misc_feature: MA Experiment 20000117 PARAMETER Experiment Name: At_100uM_ABA_Mutants_cDNA_P Parameter: Timepoint (hr) Value: 6
  misc_feature: MA Experiment 20000117 PARAMETER Experiment Name: At_100uM_ABA_Mutants_cDNA_P Parameter: Tissue Value: Aerial
  misc_feature: MA Experiment 20000117 PARAMETER Experiment Name: At_100uM_ABA_Mutants_cDNA_P Parameter: Treatment Value: 100uM ABA vs. No Treatment
  misc_feature: MA Experiment ID: 20000166 Result: Down-regulated in Transcription
  misc_feature: MA Experiment 20000166 PARAMETER Experiment Name: At_100uM_ABA_P Parameter: Age (day) Value: 14
  misc_feature: MA Experiment 20000166 PARAMETER Experiment Name: At_100uM_ABA_P Parameter: Organism Value: A. thaliana
  misc_feature: MA Experiment 20000166 PARAMETER Experiment Name: At_100uM_ABA_P Parameter: Plant Line Value: WS
  misc_feature: MA Experiment 20000166 PARAMETER Experiment Name: At_100uM_ABA_P Parameter: Timepoint (hr) Value: 1
  misc_feature: MA Experiment 20000166 PARAMETER Experiment Name: At_100uM_ABA_P Parameter: Tissue Value: Aerial
  misc_feature: MA Experiment 20000166 PARAMETER Experiment Name: At_100uM_ABA_P Parameter: Treatment Value: 100uM ABA vs. No Treatment
  misc_feature: MA Experiment ID: 20000171 Result: Down-regulated in Transcription
  misc_feature: MA Experiment 20000171 PARAMETER Experiment Name: At_42deg_Heat_P Parameter: Age (day) Value: 14
  misc_feature: MA Experiment 20000171 PARAMETER Experiment Name: At_42deg_Heat_P Parameter: Organism Value: A. thaliana
  misc_feature: MA Experiment 20000171 PARAMETER Experiment Name: At_42deg_Heat_P Parameter: Plant Line Value: WS
  misc_feature: MA Experiment 20000171 PARAMETER Experiment Name: At_42deg_Heat_P Parameter: Temperature (deg C) Value: 42 vs. 22
  misc_feature: MA Experiment 20000171 PARAMETER Experiment Name: At_42deg_Heat_P Parameter: Timepoint (hr) Value: 1
  misc_feature: MA Experiment 20000171 PARAMETER Experiment Name: At_42deg_Heat_P Parameter: Tissue Value: Aerial
  misc_feature: MA Experiment ID: 20000179 Result: Up-regulated in Transcription
  misc_feature: MA Experiment 20000179 PARAMETER Experiment Name: At_Germinating_Seeds_P Parameter: Age (hr) Value: 6 vs. 0
  misc_feature: MA Experiment 20000179 PARAMETER Experiment Name: At_Germinating_Seeds_P Parameter: Tissue Value: Germinating Seeds
  misc_feature: MA Experiment ID: 20000180 Result: Up-regulated in Transcription
  misc_feature: MA Experiment 20000180 PARAMETER Experiment Name: At_Germinating_Seeds_P Parameter: Age (hr) Value: 24 vs. 0
  misc_feature: MA Experiment 20000180 PARAMETER Experiment Name: At_Germinating_Seeds_P Parameter: Tissue Value: Germinating Seeds
  misc_feature: MA Experiment ID: 20000185 Result: Down-regulated in Transcription
  misc_feature: MA Experiment 20000185 PARAMETER Experiment Name: At_Roots__P Parameter: Age (day) Value: 7 vs. 21
  misc_feature: MA Experiment 20000185 PARAMETER Experiment Name: At_Roots__P Parameter: Organism Value: A. thaliana
  misc_feature: MA Experiment 20000185 PARAMETER Experiment Name: At_Roots__P Parameter: Tissue Value: Roots vs. Whole Plant
  misc_feature: MA Experiment ID: 20000234 Result: Down-regulated in Transcription
  misc_feature: MA Experiment 20000234 PARAMETER Experiment Name: At_Siliques_P Parameter: Age (day) Value: 21
  misc_feature: MA Experiment 20000234 PARAMETER Experiment Name: At_Siliques_P Parameter: Organism Value: A. thaliana
  misc_feature: MA Experiment 20000234 PARAMETER Experiment Name: At_Siliques_P Parameter: Plant Line Value: WS
  misc_feature: MA Experiment 20000234 PARAMETER Experiment Name: At_Siliques_P Parameter: Tissue Value: Less Than 5mm Siliques vs. Whole Plant
  misc_feature: MA Experiment ID: 20000235 Result: Down-regulated in Transcription
  misc_feature: MA Experiment 20000235 PARAMETER Experiment Name: At_Siliques_P Parameter: Age (day) Value: 21
  misc_feature: MA Experiment 20000235 PARAMETER Experiment Name: At_Siliques_P Parameter: Organism Value: A. thaliana
  misc_feature: MA Experiment 20000235 PARAMETER Experiment Name: At_Siliques_P Parameter: Plant Line Value: WS
  misc_feature: MA Experiment 20000235 PARAMETER Experiment Name: At_Siliques_P Parameter: Tissue Value: 5-10mm Siliques vs. Whole Plant
  misc_feature: MA Experiment ID: 20000264 Result: Down-regulated in Transcription
  misc_feature: MA Experiment 20000264 PARAMETER Experiment Name: At_Open_Flower_P Parameter: Age (day) Value: 21
  misc_feature: MA Experiment 20000264 PARAMETER Experiment Name: At_Open_Flower_P Parameter: Plant Line Value: WS
  misc_feature: MA Experiment 20000264 PARAMETER Experiment Name: At_Open_Flower_P Parameter: Tissue Value: Open Flower vs. Whole Plant
  misc_feature: MA Experiment ID: 20000265 Result: Down-regulated in Transcription
  misc_feature: MA Experiment 20000265 PARAMETER Experiment Name: At_Open_Flower_P Parameter: Age (day) Value: 21
  misc_feature: MA Experiment 20000265 PARAMETER Experiment Name: At_Open_Flower_P Parameter: Plant Line Value: WS
  misc_feature: MA Experiment 20000265 PARAMETER Experiment Name: At_Open_Flower_P Parameter: Tissue Value: Closed Flower vs. Whole Plant
  misc_feature: MA Experiment ID: 20000286 Result: Down-regulated in Transcription
  misc_feature: MA Experiment 20000286 PARAMETER Experiment Name: At_Open_Flower_P Parameter: Age (day) Value: 21
  misc_feature: MA Experiment 20000286 PARAMETER Experiment Name: At_Open_Flower_P Parameter: Plant Line Value: WS
  misc_feature: MA Experiment 20000286 PARAMETER Experiment Name: At_Open_Flower_P Parameter: Tissue Value: Half Open vs. Whole Plant
  misc_feature: MA Experiment ID: 20000308 Result: Down-regulated in Transcription
  misc_feature: MA Experiment 20000308 PARAMETER Experiment Name: At_100mM_NaCl__P Parameter: Age (day) Value: 17
  misc_feature: MA Experiment 20000308 PARAMETER Experiment Name: At_100mM_NaCl__P Parameter: Organism Value: A. thaliana
  misc_feature: MA Experiment 20000308 PARAMETER Experiment Name: At_100mM_NaCl__P Parameter: Plant Line Value: WS
  misc_feature: MA Experiment 20000308 PARAMETER Experiment Name: At_100mM_NaCl__P Parameter: Timepoint (hr) Value: 72
  misc_feature: MA Experiment 20000308 PARAMETER Experiment Name: At_100mM_NaCl__P Parameter: Tissue Value: Whole Plant
  misc_feature: MA Experiment 20000308 PARAMETER Experiment Name: At_100mM_NaCl__P Parameter: Treatment Value: 100mM NaCl vs. No Treatment
  misc_feature: MA Experiment ID: 20000436 Result: Down-regulated in Transcription
  misc_feature: MA Experiment 20000436 PARAMETER Experiment Name: At_Drought_P Parameter: Age (day) Value: 7
  misc_feature: MA Experiment 20000436 PARAMETER Experiment Name: At_Drought_P Parameter: Organism Value: A. thaliana
  misc_feature: MA Experiment 20000436 PARAMETER Experiment Name: At_Drought_P Parameter: Plant Line Value: WS
  misc_feature: MA Experiment 20000436 PARAMETER Experiment Name: At_Drought_P Parameter: Timepoint (hr) Value: 12
  misc_feature: MA Experiment 20000436 PARAMETER Experiment Name: At_Drought_P Parameter: Tissue Value: Whole Plant
  misc_feature: MA Experiment 20000436 PARAMETER Experiment Name: At_Drought_P Parameter: Treatment Value: Drought vs. No Drought
  misc_feature: MA Experiment ID: 20000437 Result: Down-regulated in Transcription
  misc_feature: MA Experiment 20000437 PARAMETER Experiment Name: At_Drought_P Parameter: Age (day) Value: 8
  misc_feature: MA Experiment 20000437 PARAMETER Experiment Name: At_Drought_P Parameter: Organism Value: A. thaliana
  misc_feature: MA Experiment 20000437 PARAMETER Experiment Name: At_Drought_P Parameter: Plant Line Value: WS
  misc_feature: MA Experiment 20000437 PARAMETER Experiment Name: At_Drought_P Parameter: Timepoint (hr) Value: 24
  misc_feature: MA Experiment 20000437 PARAMETER Experiment Name: At_Drought_P Parameter: Tissue Value: Whole Plant
  misc_feature: MA Experiment 20000437 PARAMETER Experiment Name: At_Drought_P Parameter: Treatment Value: Drought vs. No Drought
  misc_feature: MA Experiment ID: 20000439 Result: Down-regulated in Transcription
  misc_feature: MA Experiment 20000439 PARAMETER Experiment Name: At_Roots__P Parameter: Age (day) Value: 14 vs. 21
  misc_feature: MA Experiment 20000439 PARAMETER Experiment Name: At_Roots__P Parameter: Organism Value: A. thaliana
  misc_feature: MA Experiment 20000439 PARAMETER Experiment Name: At_Roots__P Parameter: Tissue Value: Roots vs. Whole Plant
  misc_feature: MA Experiment ID: 20000441 Result: Up-regulated in Transcription
  misc_feature: MA Experiment 20000441 PARAMETER Experiment Name: At_1uM_BR-BRZ__P Parameter: Tissue Value: Shoot Apices
  misc_feature: MA Experiment 20000441 PARAMETER Experiment Name: At_1uM_BR-BRZ__P Parameter: Treatment Value: 1uM BR vs. No Treatment
  misc_feature: MA Experiment ID: 20000444 Result: Up-regulated in Transcription
  misc_feature: MA Experiment 20000444 PARAMETER Experiment Name: At_100uM_NAA__P Parameter: Age (day) Value: 14
  misc_feature: MA Experiment 20000444 PARAMETER Experiment Name: At_100uM_NAA__P Parameter: Organism Value: A. thaliana
  misc_feature: MA Experiment 20000444 PARAMETER Experiment Name: At_100uM_NAA__P Parameter: Plant Line Value: WS
  misc_feature: MA Experiment 20000444 PARAMETER Experiment Name: At_100uM_NAA__P Parameter: Timepoint (hr) Value: 1
  misc_feature: MA Experiment 20000444 PARAMETER Experiment Name: At_100uM_NAA__P Parameter: Tissue Value: Aerial
  misc_feature: MA Experiment 20000444 PARAMETER Experiment Name: At_100uM_NAA__P Parameter: Treatment Value: 100uM NAA vs. No Treatment
  misc_feature: MA Experiment ID: 20000445 Result: Up-regulated in Transcription
  misc_feature: MA Experiment 20000445 PARAMETER Experiment Name: At_100uM_NAA__P Parameter: Age (day) Value: 14
  misc_feature: MA Experiment 20000445 PARAMETER Experiment Name: At_100uM_NAA__P Parameter: Organism Value: A. thaliana
  misc_feature: MA Experiment 20000445 PARAMETER Experiment Name: At_100uM_NAA__P Parameter: Plant Line Value: WS
  misc_feature: MA Experiment 20000445 PARAMETER Experiment Name: At_100uM_NAA__P Parameter: Timepoint (hr) Value: 6
  misc_feature: MA Experiment 20000445 PARAMETER Experiment Name: At_100uM_NAA__P Parameter: Tissue Value: Aerial
  misc_feature: MA Experiment 20000445 PARAMETER Experiment Name: At_100uM_NAA__P Parameter: Treatment Value: 100uM NAA vs. No Treatment
  misc_feature: MA Experiment ID: 20000452 Result: Down-regulated in Transcription
  misc_feature: MA Experiment 20000452 PARAMETER Experiment Name: At_CS6879_Shoots-Roots_P Parameter: Age (day) Value: 14
  misc_feature: MA Experiment 20000452 PARAMETER Experiment Name: At_CS6879_Shoots-Roots_P Parameter: Organism Value: A. thaliana
  misc_feature: MA Experiment 20000452 PARAMETER Experiment Name: At_CS6879_Shoots-Roots_P Parameter: Plant Line Value: CS6879 vs. WS
  misc_feature: MA Experiment 20000452 PARAMETER Experiment Name: At_CS6879_Shoots-Roots_P Parameter: Tissue Value: Shoots
  misc_feature: MA Experiment ID: 20000794 Result: Down-regulated in Transcription
  misc_feature: MA Experiment 20000794 PARAMETER Experiment Name: At_Petals_P Parameter: Age (day) Value: 23-25 days
  misc_feature: MA Experiment 20000794 PARAMETER Experiment Name: At_Petals_P Parameter: Plant Line Value: WS
  misc_feature: MA Experiment 20000794 PARAMETER Experiment Name: At_Petals_P Parameter: Tissue Value: Petals vs. Whole plant
  misc_feature: MA Experiment ID: 20001247 Result: Up-regulated in Transcription
  misc_feature: MA Experiment 20001247 PARAMETER Experiment Name: At_Far-red-induction_P Parameter: Age (day) Value: 7
  misc_feature: MA Experiment 20001247 PARAMETER Experiment Name: At_Far-red-induction_P Parameter: Light Value: Far-red vs. White
  misc_feature: MA Experiment 20001247 PARAMETER Experiment Name: At_Far-red-induction_P Parameter: Organism Value: A. thaliana
  misc_feature: MA Experiment 20001247 PARAMETER Experiment Name: At_Far-red-induction_P Parameter: Plant Line Value: Columbia
  misc_feature: MA Experiment 20001247 PARAMETER Experiment Name: At_Far-red-induction_P Parameter: Timepoint (hr) Value: 1
  misc_feature: MA Experiment 20001247 PARAMETER Experiment Name: At_Far-red-induction_P Parameter: Tissue Value: Whole Plant
  misc_feature: MA Experiment ID: 20001248 Result: Up-regulated in Transcription
  misc_feature: MA Experiment 20001248 PARAMETER Experiment Name: At_Far-red-induction_P Parameter: Age (day) Value: 7
  misc_feature: MA Experiment 20001248 PARAMETER Experiment Name: At_Far-red-induction_P Parameter: Light Value: Far-red vs. White
  misc_feature: MA Experiment 20001248 PARAMETER Experiment Name: At_Far-red-induction_P Parameter: Organism Value: A. thaliana
  misc_feature: MA Experiment 20001248 PARAMETER Experiment Name: At_Far-red-induction_P Parameter: Plant Line Value: Columbia
  misc_feature: MA Experiment 20001248 PARAMETER Experiment Name: At_Far-red-induction_P Parameter: Timepoint (hr) Value: 4
  misc_feature: MA Experiment 20001248 PARAMETER Experiment Name: At_Far-red-induction_P Parameter: Tissue Value: Whole Plant
  misc_feature: MA Experiment ID: 20001450 Result: Up-regulated in Transcription
  misc_feature: MA Experiment 20001450 PARAMETER Experiment Name: At_Far-red-induction_P Parameter: Age (day) Value: 7
  misc_feature: MA Experiment 20001450 PARAMETER Experiment Name: At_Far-red-induction_P Parameter: Light Value: Far-red vs. White
  misc_feature: MA Experiment 20001450 PARAMETER Experiment Name: At_Far-red-induction_P Parameter: Organism Value: A. thaliana
  misc_feature: MA Experiment 20001450 PARAMETER Experiment Name: At_Far-red-induction_P Parameter: Plant Line Value: Columbia
  misc_feature: MA Experiment 20001450 PARAMETER Experiment Name: At_Far-red-induction_P Parameter: Timepoint (hr) Value: 8
  misc_feature: MA Experiment 20001450 PARAMETER Experiment Name: At_Far-red-induction_P Parameter: Tissue Value: Whole Plant
  misc_feature: MA Experiment ID: 20001451 Result: Up-regulated in Transcription
  misc_feature: MA Experiment 20001451 PARAMETER Experiment Name: At_Far-red-induction_P Parameter: Age (day) Value: 7
  misc_feature: MA Experiment 20001451 PARAMETER Experiment Name: At_Far-red-induction_P Parameter: Light Value: Far-red vs. White
  misc_feature: MA Experiment 20001451 PARAMETER Experiment Name: At_Far-red-induction_P Parameter: Organism Value: A. thaliana
  misc_feature: MA Experiment 20001451 PARAMETER Experiment Name: At_Far-red-induction_P Parameter: Plant Line Value: Columbia
  misc_feature: MA Experiment 20001451 PARAMETER Experiment Name: At_Far-red-induction_P Parameter: Timepoint (hr) Value: 24
  misc_feature: MA Experiment 20001451 PARAMETER Experiment Name: At_Far-red-induction_P Parameter: Tissue Value: Whole Plant
  misc_feature: MA Experiment ID: 20001757 Result: Up-regulated in Transcription
  misc_feature: MA Experiment 20001757 PARAMETER Experiment Name: At_50mM_NH4NO3_L-to-H_P Parameter: Timepoint (hr) Value: 6
  misc_feature: MA Experiment 20001757 PARAMETER Experiment Name: At_50mM_NH4NO3_L-to-H_P Parameter: Tissue Value: Leaf
  misc_feature: MA Experiment 20001757 PARAMETER Experiment Name: At_50mM_NH4NO3_L-to-H_P Parameter: Treatment Value: 50mM NH4NO3 vs 100mM Mannitol
  misc_feature: MA Experiment ID: 20001768 Result: Up-regulated in Transcription
  misc_feature: MA Experiment 20001768 PARAMETER Experiment Name: At_Far-red-enriched-adult_P Parameter: Age (day) Value: 28
  misc_feature: MA Experiment 20001768 PARAMETER Experiment Name: At_Far-red-enriched-adult_P Parameter: Light Value: Far-red enriched vs. White
  misc_feature: MA Experiment 20001768 PARAMETER Experiment Name: At_Far-red-enriched-adult_P Parameter: Organism Value: A. thaliana
  misc_feature: MA Experiment 20001768 PARAMETER Experiment Name: At_Far-red-enriched-adult_P Parameter: Plant Line Value: Columbia
  misc_feature: MA Experiment 20001768 PARAMETER Experiment Name: At_Far-red-enriched-adult_P Parameter: Timepoint (hr) Value: 1
  misc_feature: MA Experiment 20001768 PARAMETER Experiment Name: At_Far-red-enriched-adult_P Parameter: Tissue Value: Aerial
  misc_feature: MA Experiment ID: 20001769 Result: Up-regulated in Transcription
  misc_feature: MA Experiment 20001769 PARAMETER Experiment Name: At_Far-red-enriched-adult_P Parameter: Age (day) Value: 28
  misc_feature: MA Experiment 20001769 PARAMETER Experiment Name: At_Far-red-enriched-adult_P Parameter: Light Value: Far-red enriched vs. White
  misc_feature: MA Experiment 20001769 PARAMETER Experiment Name: At_Far-red-enriched-adult_P Parameter: Organism Value: A. thaliana
  misc_feature: MA Experiment 20001769 PARAMETER Experiment Name: At_Far-red-enriched-adult_P Parameter: Plant Line Value: Columbia
  misc_feature: MA Experiment 20001769 PARAMETER Experiment Name: At_Far-red-enriched-adult_P Parameter: Timepoint (hr) Value: 4
  misc_feature: MA Experiment 20001769 PARAMETER Experiment Name: At_Far-red-enriched-adult_P Parameter: Tissue Value: Aerial
  misc_feature: MA Experiment ID: 20001770 Result: Up-regulated in Transcription
  misc_feature: MA Experiment 20001770 PARAMETER Experiment Name: At_Far-red-enriched-adult_P Parameter: Age (day) Value: 28
  misc_feature: MA Experiment 20001770 PARAMETER Experiment Name: At_Far-red-enriched-adult_P Parameter: Light Value: Far-red enriched vs. White
  misc_feature: MA Experiment 20001770 PARAMETER Experiment Name: At_Far-red-enriched-adult_P Parameter: Organism Value: A. thaliana
  misc_feature: MA Experiment 20001770 PARAMETER Experiment Name: At_Far-red-enriched-adult_P Parameter: Plant Line Value: Columbia
  misc_feature: MA Experiment 20001770 PARAMETER Experiment Name: At_Far-red-enriched-adult_P Parameter: Timepoint (hr) Value: 8
  misc_feature: MA Experiment 20001770 PARAMETER Experiment Name: At_Far-red-enriched-adult_P Parameter: Tissue Value: Aerial
ttgttttgtctcaaacaaatttctctgcacacactcaacaacatatcccataacaaaaaaaagctattaaaaaaaaagagaagcagccatggaagaaggtaagcaagaagcttcaatgccactagttccaattgacagcttctcttacagttggttagttaactttccttctttagaagctaccattgatgatcatcatcaaacatacgaagattcatcttcttcttcttccttcattgagatggatccaagattgcctccttctagaagattcttcatcaaaacatctcatgaaagtagcttcaagttcgataacttcgtctctttctccgacgaagatcactctttagttcacgccgacgagctcttccgtgacggctacgttatgccttatcgattaaagcccacgtccgcggctaccgaggaagaatctgagccgttggatacaacaacatcggagaagattgatacacgtggccttaacagcaagccttctcctacttcttcaagaaagctgaggagagtgtccaaatgggttttgctgaagtatcttgatttcttgacgccattgtgtaagagattaaggagatgtagatccgctgtaacaacgggaagtatcggtatggattcgaggatccgtgtaacgacttcgtgtaggagcagagtttattctgatgaaatgacgtcgtcgccaagaataagtgttgctgatgattattattggagaaggtcttgtgactctgagagctctatatacgaagccgttcttcattgcaagaaatcattcgagaaataagaagaataatccatggaagaggagcagttagaagtagagatggagaatattaagcttgagagaataagcaaattgcattaacacgttacacatggagtgggagagaaagagagggagcaacttgtgatgtgtctttttgttgattctctctcttgaattaaagagattgatgtgaatgatccatgtgaatgtgtcatctgatgtggatcaagaatgtttttgtttttttacatgagtgggcacatttatagaaatatatatggggctgcaagcagaatcaagaaaatattttcagattttcttggctatttttttttctccatatgtgtatattccaatcatgtaagttaaatagtttctttttatatatggggtaaaaactataagtgcctacccatgtttacttttaatttctggtccaattgtgtttgaatattcttactttttgtgc

SEQ ID NO: 46217 - protein, 235 aa, Arabidopsis thaliana
  peptide (1)..(235): Ceres Seq. ID no. 13578670
  misc_feature (1)..(235): Homolog of NCBI NO: 21553508 NR Description: unknown [Arabidopsis thaliana]
  misc_feature (1)..(233): Homolog of NCBI NO: 10177104 NR Description: gene_id:MXC20.13~unknown protein [Arabidopsis
  misc_feature (1)..(235): Homolog of NCBI NO: 18423445 NR Description: expressed protein [Arabidopsis thaliana]
MEEGKQEASMPLVPIDSFSYSWLVNFPSLEATIDDHHQTYEDSSSSSSFIEMDPRLPPSRRFFIKTSHESSFKFDNFVSFSDEDHSLVHADELFRDGYVMPYRLKPTSAATEEESEPLDTTTSEKIDTRGLNSKPSPTSSRKLRRVSKWVLLKYLDFLTPLCKRLRRCRSAVTTGSIGMDSRIRVTTSCRSRVYSDEMTSSPRISVADDYYWRRSCDSESSIYEAVLHCKKSFEK

SEQ ID NO: 46218 - protein, 226 aa, Arabidopsis thaliana
  peptide (1)..(226): Ceres Seq. ID no. 13578671
  misc_feature (1)..(226): Homolog of NCBI NO: 21553508 NR Description: unknown [Arabidopsis thaliana]
  misc_feature (1)..(224): Homolog of NCBI NO: 10177104 NR Description: gene_id:MXC20.13~unknown protein [Arabidopsis
  misc_feature (1)..(226): Homolog of NCBI NO: 18423445 NR Description: expressed protein [Arabidopsis thaliana]
MPLVPIDSFSYSWLVNFPSLEATIDDHHQTYEDSSSSSSFIEMDPRLPPSRRFFIKTSHESSFKFDNFVSFSDEDHSLVHADELFRDGYVMPYRLKPTSAATEEESEPLDTTTSEKIDTRGLNSKPSPTSSRKLRRVSKWVLLKYLDFLTPLCKRLRRCRSAVTTGSIGMDSRIRVTTSCRSRVYSDEMTSSPRISVADDYYWRRSCDSESSIYEAVLHCKKSFEK

SEQ ID NO: 46219 - protein, 184 aa, Arabidopsis thaliana; identical to SEQ ID NO: 42522
  peptide (1)..(184): Ceres Seq. ID no. 13578672
  misc_feature (1)..(184): Homolog of NCBI NO: 21553508 NR Description: unknown [Arabidopsis thaliana]
  misc_feature (1)..(182): Homolog of NCBI NO: 10177104 NR Description: gene_id:MXC20.13~unknown protein [Arabidopsis
  misc_feature (1)..(184): Homolog of NCBI NO: 18423445 NR Description: expressed protein [Arabidopsis thaliana]

SEQ ID NO: 46220 - DNA, 1831 bp, Arabidopsis thaliana
  misc_feature (1)..(1831): Ceres Seq. ID no. 14315800
  misc_feature: MA Experiment ID: 108462 Result: Up-regulated in Transcription
  misc_feature: MA Experiment 108462 PARAMETER Experiment Name: At_Germinating_Seeds_cDNA_P Parameter: Age (day) Value: 2 vs. 0
  misc_feature: MA Experiment 108462 PARAMETER Experiment Name: At_Germinating_Seeds_cDNA_P Parameter: Tissue Value: Germinating Seeds
  misc_feature: MA Experiment ID: 108464 Result: Up-regulated in Transcription
  misc_feature: MA Experiment 108464 PARAMETER Experiment Name: At_Germinating_Seeds_cDNA_P Parameter: Age (day) Value: 4 vs. 0
  misc_feature: MA Experiment 108464 PARAMETER Experiment Name: At_Germinating_Seeds_cDNA_P Parameter: Tissue Value: Germinating Seeds
  misc_feature: MA Experiment ID: 108569 Result: Up-regulated in Transcription
  misc_feature: MA Experiment 108569 PARAMETER Experiment Name: At_0.001%_MeJA__cDNA_P Parameter: Timepoint (hr) Value: 6
  misc_feature: MA Experiment 108569 PARAMETER Experiment Name: At_0.001%_MeJA__cDNA_P Parameter: Tissue Value: Aerial
  misc_feature: MA Experiment 108569 PARAMETER Experiment Name: At_0.001%_MeJA__cDNA_P Parameter: Treatment Value: 0.001% MeJA vs. No Treatment
  misc_feature: MA Experiment ID: 108573 Result: Up-regulated in Transcription
  misc_feature: MA Experiment 108573 PARAMETER Experiment Name: At_Drought_cDNA_P Parameter: Timepoint (hr) Value: 6
  misc_feature: MA Experiment 108573 PARAMETER Experiment Name: At_Drought_cDNA_P Parameter: Tissue Value: Aerial
  misc_feature: MA Experiment 108573 PARAMETER Experiment Name: At_Drought_cDNA_P Parameter: Treatment Value: Drought vs. No Drought
  misc_feature: MA Experiment ID: 108574 Result: Up-regulated in Transcription
  misc_feature: MA Experiment 108574 PARAMETER Experiment Name: At_Wounding__cDNA_P Parameter: Timepoint (hr) Value: 1
  misc_feature: MA Experiment 108574 PARAMETER Experiment Name: At_Wounding__cDNA_P Parameter: Tissue Value: Aerial
  misc_feature: MA Experiment 108574 PARAMETER Experiment Name: At_Wounding__cDNA_P Parameter: Treatment Value: Wounding vs. No Wounding
  misc_feature: MA Experiment ID: 20000180 Result: Up-regulated in Transcription
  misc_feature: MA Experiment 20000180 PARAMETER Experiment Name: At_Germinating_Seeds_P Parameter: Age (hr) Value: 24 vs. 0
  misc_feature: MA Experiment 20000180 PARAMETER Experiment Name: At_Germinating_Seeds_P Parameter: Tissue Value: Germinating Seeds
  misc_feature: MA Experiment ID: 20000496 Result: Up-regulated in Transcription
  misc_feature: MA Experiment 20000496 PARAMETER Experiment Name: At_Guard_Cells_P Parameter: Harvest Date Value: 7/19/2002
  misc_feature: MA Experiment 20000496 PARAMETER Experiment Name: At_Guard_Cells_P Parameter: Organism Value: Canola
  misc_feature: MA Experiment 20000496 PARAMETER Experiment Name: At_Guard_Cells_P Parameter: Tissue Value: Guard Cells vs. Leaves
ggttgcttcaaattacgcattcgaatctgatcttcgttgatctctgtggaagaaacagataagagaaaatcgcatgaatttttttagaaaactatgttttaattcttcgattgcaagctacttcactaatacgagtcttctgatctcaattcttagtttttctcctcaattgccgatttctctctttcttttcgagcagaaatcgttagatcctttatcgctgtgtaatagtaatactaattttaataatcttgagaataattactccgttcattgttgaatcatggagtccggaggcaaaactaatcgtcagctgcgtaaagctatttgcgtctcaacagacgagaagatgaagaagaagagatcaccttcagtgatagtaattggaggtggtatggctggaatttcagctgctcgcactcttcaagatgcttcctttcaggttgttgtattggagtctcgtgacagaattggtggacgagttcacactgattactcattcggttttccagttgatctcggtgcatcttggttgcatggtgtctgtaaagagaatcctttggctgcagtaattggtagattaggattacctctttatcgtactagcggtgacaattcggttttgtatgatcacgatcttgagagttatgctctgttcgacaaggctggtaaccaagtttctcaagagttggtgacaaaagttggcgaaaattttgagcacattctggaagagatctgtaaagtcagggatgagcaggacgaagacatgtcaatagctcaagccttttctattgtatttaagaggaaccctgaattgaggttggagggacttgcccataatgtgcttcagtggtacttgtgccgcatggaaggatggtttgctgctgatgctgaaaccatctcggcaaagtgttgggatcaggaagaactgttgcccggtggacatggtcttatggttagagggtatcgccctgtaatcaacactctctcgaaaggtcttgatatacgactaagccacagagttaccaagatttcaaggcgctacagtggtgtgaaggtgactacagagaaaggagacacgtttgttgcggatgctgcagtcattgctcttcctctaggagtcttaaagtcaggaatgataacattcgaaccaaagcttccacagtggaaacaagaagctatcaacgatctcggtgttggaatcgagaacaagatcatattgaattttgacaacgtcttttggccaaacgtagagtttttaggagtcgttgcagaaacttcctacggatgcagttatttcttgaacctgcataaagccacaagccatcctgtccttgtttacatgccggctggtcagctcgctagagacatcgagaaaaagtccgatgaagcagctgcaaattttgccttttcgcaactacagaaaattcttccagatgcctcttcaccgataaattatttggtatcaaggtggggatcagacatcaattcaatgggatcatatagctatgaaattgtgaacaaacctcacgacctctatgagagactgagagtgccattggataatctattctttgcgggggaagccactagctcgagctacccgggatcagttcacggtgcttattcaaccggagtgctggcagctgaagactgcaggatgcgtgtgcttgagcgctatggagagctcgaacatgagatggaagaggaagctcctgcttctgtccctcttctgatctcccgtatgtaatttaaacctcaggtgttttatatcacctccatatgggaacattgttagatttgattttatgagatttcacgagttggaact

SEQ ID NO: 46221 - protein, 488 aa, Arabidopsis thaliana
  peptide (1)..(488): Ceres Seq. ID no. 14315801
  misc_feature (38)..(459): Pfam Name: Flavin containing amine oxidoreductase Pfam Description: Flavin containing amine oxidoreductase
  misc_feature (373)..(488): Homolog of NCBI NO: 25404949 NR Description: protein F1E22.18 [imported] - Arabidopsis
  misc_feature (21)..(393): Homolog of NCBI NO: 25404949 NR Description: protein F1E22.18 [imported] - Arabidopsis
  misc_feature (29)..(487): Homolog of NCBI NO: 32488409 NR Description: OSJNBa0043A12.39 [Oryza sativa (japonica
  misc_feature (21)..(488): Homolog of NCBI NO: 13877615 NR Description: putative protein kinase gb|AAD22129 [Arabidopsis
  misc_feature (21)..(488): Homolog of NCBI NO: 15218830 NR Description: amine oxidase family [Arabidopsis thaliana]
  misc_feature (24)..(488): Homolog of NCBI NO: 38344167 NR Description: OSJNBa0053K19.6 [Oryza sativa (japonica
  misc_feature (1)..(488): Homolog of NCBI NO: 18650598 NR Description: At2g43020/MFL8.12 [Arabidopsis thaliana]
  misc_feature (1)..(488): Homolog of NCBI NO: 15224204 NR Description: amine oxidase family [Arabidopsis thaliana]
  misc_feature (1)..(488): Homolog of NCBI NO: 21553762 NR Description: putative amine oxidase [Arabidopsis thaliana]
  misc_feature (1)..(488): Homolog of NCBI NO: 15231622 NR Description: amine oxidase family [Arabidopsis thaliana]
MESGGKTNRQLRKAICVSTDEKMKKKRSPSVIVIGGGMAGISAARTLQDASFQVVVLESRDRIGGRVHTDYSFGFPVDLGASWLHGVCKENPLAAVIGRLGLPLYRTSGDNSVLYDHDLESYALFDKAGNQVSQELVTKVGENFEHILEEICKVRDEQDEDMSIAQAFSIVFKRNPELRLEGLAHNVLQWYLCRMEGWFAADAETISAKCWDQEELLPGGHGLMVRGYRPVINTLSKGLDIRLSHRVTKISRRYSGVKVTTEKGDTFVADAAVIALPLGVLKSGMITFEPKLPQWKQEAINDLGVGIENKIILNFDNVFWPNVEFLGVVAETSYGCSYFLNLHKATSHPVLVYMPAGQLARDIEKKSDEAAANFAFSQLQKILPDASSPINYLVSRWGSDINSMGSYSYEIVNKPHDLYERLRVPLDNLFFAGEATSSSYPGSVHGAYSTGVLAAEDCRMRVLERYGELEHEMEEEAPASVPLLISRM

SEQ ID NO: 46222 - protein, 466 aa, Arabidopsis thaliana
  peptide (1)..(466): Ceres Seq. ID no. 14315802
  misc_feature (16)..(437): Pfam Name: Flavin containing amine oxidoreductase Pfam Description: Flavin containing amine oxidoreductase
  misc_feature (351)..(466): Homolog of NCBI NO: 25404949 NR Description: protein F1E22.18 [imported] - Arabidopsis
  misc_feature (1)..(371): Homolog of NCBI NO: 25404949 NR Description: protein F1E22.18 [imported] - Arabidopsis
  misc_feature (7)..(465): Homolog of NCBI NO: 32488409 NR Description: OSJNBa0043A12.39 [Oryza sativa (japonica
  misc_feature (1)..(466): Homolog of NCBI NO: 13877615 NR Description: putative protein kinase gb|AAD22129 [Arabidopsis
  misc_feature (1)..(466): Homolog of NCBI NO: 15218830 NR Description: amine oxidase family [Arabidopsis thaliana]
  misc_feature (2)..(466): Homolog of NCBI NO: 38344167 NR Description: OSJNBa0053K19.6 [Oryza sativa (japonica
  misc_feature (1)..(466): Homolog of NCBI NO: 18650598 NR Description: At2g43020/MFL8.12 [Arabidopsis thaliana]
  misc_feature (1)..(466): Homolog of NCBI NO: 15224204 NR Description: amine oxidase family [Arabidopsis thaliana]
  misc_feature (1)..(466): Homolog of NCBI NO: 21553762 NR Description: putative amine oxidase [Arabidopsis thaliana]
  misc_feature (1)..(466): Homolog of NCBI NO: 15231622 NR Description: amine oxidase family [Arabidopsis thaliana]
MKKKRSPSVIVIGGGMAGISAARTLQDASFQVVVLESRDRIGGRVHTDYSFGFPVDLGASWLHGVCKENPLAAVIGRLGLPLYRTSGDNSVLYDHDLESYALFDKAGNQVSQELVTKVGENFEHILEEICKVRDEQDEDMSIAQAFSIVFKRNPELRLEGLAHNVLQWYLCRMEGWFAADAETISAKCWDQEELLPGGHGLMVRGYRPVINTLSKGLDIRLSHRVTKISRRYSGVKVTTEKGDTFVADAAVIALPLGVLKSGMITFEPKLPQWKQEAINDLGVGIENKIILNFDNVFWPNVEFLGVVAETSYGCSYFLNLHKATSHPVLVYMPAGQLARDIEKKSDEAAANFAFSQLQKILPDASSPINYLVSRWGSDINSMGSYSYEIVNKPHDLYERLRVPLDNLFFAGEATSSSYPGSVHGAYSTGVLAAEDCRMRVLERYGELEHEMEEEAPASVPLLISRM

SEQ ID NO: 46223 - protein, 451 aa, Arabidopsis thaliana
  peptide (1)..(451): Ceres Seq. ID no. 14315803
  misc_feature (1)..(422): Pfam Name: Flavin containing amine oxidoreductase Pfam Description: Flavin containing amine oxidoreductase
  misc_feature (336)..(451): Homolog of NCBI NO: 25404949 NR Description: protein F1E22.18 [imported] - Arabidopsis
  misc_feature (1)..(356): Homolog of NCBI NO: 25404949 NR Description: protein F1E22.18 [imported] - Arabidopsis
  misc_feature (1)..(450): Homolog of NCBI NO: 32488409 NR Description: OSJNBa0043A12.39 [Oryza sativa (japonica
  misc_feature (1)..(451): Homolog of NCBI NO: 13877615 NR Description: putative protein kinase gb|AAD22129 [Arabidopsis
  misc_feature (1)..(451): Homolog of NCBI NO: 15218830 NR Description: amine oxidase family [Arabidopsis thaliana]
  misc_feature (1)..(451): Homolog of NCBI NO: 38344167 NR Description: OSJNBa0053K19.6 [Oryza sativa (japonica
  misc_feature (1)..(451): Homolog of NCBI NO: 18650598 NR Description: At2g43020/MFL8.12 [Arabidopsis thaliana]
  misc_feature (1)..(451): Homolog of NCBI NO: 15224204 NR Description: amine oxidase family [Arabidopsis thaliana]
  misc_feature (1)..(451): Homolog of NCBI NO: 21553762 NR Description: putative amine oxidase [Arabidopsis thaliana]
  misc_feature (1)..(451): Homolog of NCBI NO: 15231622 NR Description: amine oxidase family [Arabidopsis thaliana]
MAGISAARTLQDASFQVVVLESRDRIGGRVHTDYSFGFPVDLGASWLHGVCKENPLAAVIGRLGLPLYRTSGDNSVLYDHDLESYALFDKAGNQVSQELVTKVGENFEHILEEICKVRDEQDEDMSIAQAFSIVFKRNPELRLEGLAHNVLQWYLCRMEGWFAADAETISAKCWDQEELLPGGHGLMVRGYRPVINTLSKGLDIRLSHRVTKISRRYSGVKVTTEKGDTFVADAAVIALPLGVLKSGMITFEPKLPQWKQEAINDLGVGIENKIILNFDNVFWPNVEFLGVVAETSYGCSYFLNLHKATSHPVLVYMPAGQLARDIEKKSDEAAANFAFSQLQKILPDASSPINYLVSRWGSDINSMGSYSYEIVNKPHDLYERLRVPLDNLFFAGEATSSSYPGSVHGAYSTGVLAAEDCRMRVLERYGELEHEMEEEAPASVPLLISRM

SEQ ID NO: 46224 - DNA, 1481 bp, Arabidopsis thaliana
  misc_feature (1)..(1481): Ceres Seq. ID no. 15174935
  misc_feature: MA Experiment ID: 108434 Result: Down-regulated in Transcription
  misc_feature: MA Experiment 108434 PARAMETER Experiment Name: At_Root_Tips_cDNA_P Parameter: Tissue Value: Root Tips
  misc_feature: MA Experiment ID: 108435 Result: Down-regulated in Transcription
  misc_feature: MA Experiment 108435 PARAMETER Experiment Name: At_stm_Mutants_cDNA_P Parameter: Plant Line Value: wt Landsburg vs stm
  misc_feature: MA Experiment 108435 PARAMETER Experiment Name: At_stm_Mutants_cDNA_P Parameter: Tissue Value: Shoot Apical Meristem Region
  misc_feature: MA Experiment ID: 108461 Result: Up-regulated in Transcription
  misc_feature: MA Experiment 108461 PARAMETER Experiment Name: At_Germinating_Seeds_cDNA_P Parameter: Age (day) Value: 1 vs. 0
  misc_feature: MA Experiment 108461 PARAMETER Experiment Name: At_Germinating_Seeds_cDNA_P Parameter: Tissue Value: Germinating Seeds
  misc_feature: MA Experiment ID: 108462 Result: Up-regulated in Transcription
  misc_feature: MA Experiment 108462 PARAMETER Experiment Name: At_Germinating_Seeds_cDNA_P Parameter: Age (day) Value: 2 vs. 0
  misc_feature: MA Experiment 108462 PARAMETER Experiment Name: At_Germinating_Seeds_cDNA_P Parameter: Tissue Value: Germinating Seeds
  misc_feature: MA Experiment ID: 108463 Result: Up-regulated in Transcription
  misc_feature: MA Experiment 108463 PARAMETER Experiment Name: At_Germinating_Seeds_cDNA_P Parameter: Age (day) Value: 3 vs. 0
  misc_feature: MA Experiment 108463 PARAMETER Experiment Name: At_Germinating_Seeds_cDNA_P Parameter: Tissue Value: Germinating Seeds
  misc_feature: MA Experiment ID: 108464 Result: Up-regulated in Transcription
  misc_feature: MA Experiment 108464 PARAMETER Experiment Name: At_Germinating_Seeds_cDNA_P Parameter: Age (day) Value: 4 vs. 0
  misc_feature: MA Experiment 108464 PARAMETER Experiment Name: At_Germinating_Seeds_cDNA_P Parameter: Tissue Value: Germinating Seeds
  misc_feature: MA Experiment ID: 108488 Result: Up-regulated in Transcription
  misc_feature: MA Experiment ID: 108561 Result: Down-regulated in Transcription
  misc_feature: MA Experiment 108561 PARAMETER Experiment Name: At_100uM_ABA_cDNA_P Parameter: Timepoint (hr) Value: 6
  misc_feature: MA Experiment 108561 PARAMETER Experiment Name: At_100uM_ABA_cDNA_P Parameter: Tissue Value: Aerial
  misc_feature: MA Experiment 108561 PARAMETER Experiment Name: At_100uM_ABA_cDNA_P Parameter: Treatment Value: 100uM ABA vs. No Treatment
  misc_feature: MA Experiment ID: 108579 Result: Up-regulated in Transcription
  misc_feature: MA Experiment 108579 PARAMETER Experiment Name: At_4deg_Cold_cDNA_P Parameter: Temperature (deg C) Value: 4 vs. 22
  misc_feature: MA Experiment 108579 PARAMETER Experiment Name: At_4deg_Cold_cDNA_P Parameter: Timepoint (hr) Value: 6
  misc_feature: MA Experiment 108579 PARAMETER Experiment Name: At_4deg_Cold_cDNA_P Parameter: Tissue Value: Aerial
  misc_feature: MA Experiment ID: 108594 Result: Down-regulated in Transcription
  misc_feature: MA Experiment 108594 PARAMETER Experiment Name: At_Ler-rhl_Root_cDNA_P Parameter: Plant Line Value: null
  misc_feature: MA Experiment ID: 108595 Result: Down-regulated in Transcription
  misc_feature: MA Experiment 108595 PARAMETER Experiment Name: At_Ler-pi_Ovule_cDNA_P Parameter: Plant Line Value: null
  misc_feature: MA Experiment ID: 20000069 Result: Down-regulated in Transcription
  misc_feature: MA Experiment 20000069 PARAMETER Experiment Name: At_100uM_ABA_Mutants_cDNA_P Parameter: Plant Line Value: CS23
  misc_feature: MA Experiment 20000069 PARAMETER Experiment Name: At_100uM_ABA_Mutants_cDNA_P Parameter: Timepoint (hr) Value: 6
  misc_feature: MA Experiment 20000069 PARAMETER Experiment Name: At_100uM_ABA_Mutants_cDNA_P Parameter: Tissue Value: Aerial
  misc_feature: MA Experiment 20000069 PARAMETER Experiment Name: At_100uM_ABA_Mutants_cDNA_P Parameter: Treatment Value: 100uM ABA vs. No Treatment
  misc_feature: MA Experiment ID: 20000070 Result: Down-regulated in Transcription
  misc_feature: MA Experiment 20000070 PARAMETER Experiment Name: At_100uM_ABA_Mutants_cDNA_P Parameter: Plant Line Value: CS24
  misc_feature: MA Experiment 20000070 PARAMETER Experiment Name: At_100uM_ABA_Mutants_cDNA_P Parameter: Timepoint (hr) Value: 6
  misc_feature: MA Experiment 20000070 PARAMETER Experiment Name: At_100uM_ABA_Mutants_cDNA_P Parameter: Tissue Value: Aerial
  misc_feature: MA Experiment 20000070 PARAMETER Experiment Name: At_100uM_ABA_Mutants_cDNA_P Parameter: Treatment Value: 100uM ABA vs. No Treatment
  misc_feature: MA Experiment ID: 20000071 Result: Down-regulated in Transcription
  misc_feature: MA Experiment 20000071 PARAMETER Experiment Name: At_100uM_ABA_Mutants_cDNA_P Parameter: Plant Line Value: CS8104
  misc_feature: MA Experiment 20000071 PARAMETER Experiment Name: At_100uM_ABA_Mutants_cDNA_P Parameter: Timepoint (hr) Value: 6
  misc_feature: MA Experiment 20000071 PARAMETER Experiment Name: At_100uM_ABA_Mutants_cDNA_P Parameter: Tissue Value: Aerial
  misc_feature: MA Experiment 20000071 PARAMETER Experiment Name: At_100uM_ABA_Mutants_cDNA_P Parameter: Treatment Value: 100uM ABA vs. No Treatment
  misc_feature: MA Experiment ID: 20000086 Result: Down-regulated in Transcription
  misc_feature: MA Experiment 20000086 PARAMETER Experiment Name: At_100uM_ABA_Mutants_cDNA_P Parameter: Plant Line Value: CS22
  misc_feature: MA Experiment 20000086 PARAMETER Experiment Name: At_100uM_ABA_Mutants_cDNA_P Parameter: Timepoint (hr) Value: 6
  misc_feature: MA Experiment 20000086 PARAMETER Experiment Name: At_100uM_ABA_Mutants_cDNA_P Parameter: Tissue Value: Aerial
  misc_feature: MA Experiment 20000086 PARAMETER Experiment Name: At_100uM_ABA_Mutants_cDNA_P Parameter: Treatment Value: 100uM ABA vs. No Treatment
  misc_feature: MA Experiment ID: 20000087 Result: Down-regulated in Transcription
  misc_feature: MA Experiment 20000087 PARAMETER Experiment Name: At_100uM_ABA_Mutants_cDNA_P Parameter: Plant Line Value: WS
  misc_feature: MA Experiment 20000087 PARAMETER Experiment Name: At_100uM_ABA_Mutants_cDNA_P Parameter: Timepoint (hr) Value: 6
  misc_feature: MA Experiment 20000087 PARAMETER Experiment Name: At_100uM_ABA_Mutants_cDNA_P Parameter: Tissue Value: Aerial
  misc_feature: MA Experiment 20000087 PARAMETER Experiment Name: At_100uM_ABA_Mutants_cDNA_P Parameter: Treatment Value: 100uM ABA vs. No Treatment
  misc_feature: MA Experiment ID: 20000088 Result: Down-regulated in Transcription
  misc_feature: MA Experiment 20000088 PARAMETER Experiment Name: At_100uM_ABA_Mutants_cDNA_P Parameter: Plant Line Value: Landsberg
  misc_feature: MA Experiment 20000088 PARAMETER Experiment Name: At_100uM_ABA_Mutants_cDNA_P Parameter: Timepoint (hr) Value: 6
  misc_feature: MA Experiment 20000088 PARAMETER Experiment Name: At_100uM_ABA_Mutants_cDNA_P Parameter: Tissue Value: Aerial
  misc_feature: MA Experiment 20000088 PARAMETER Experiment Name: At_100uM_ABA_Mutants_cDNA_P Parameter: Treatment Value: 100uM ABA vs. No Treatment
  misc_feature: MA Experiment ID: 20000090 Result: Down-regulated in Transcription
  misc_feature: MA Experiment ID: 20000117 Result: Down-regulated in Transcription
  misc_feature: MA Experiment 20000117 PARAMETER Experiment Name: At_100uM_ABA_Mutants_cDNA_P Parameter: Plant Line Value: Columbia
  misc_feature: MA Experiment 20000117 PARAMETER Experiment Name: At_100uM_ABA_Mutants_cDNA_P Parameter: Timepoint (hr) Value: 6
  misc_feature: MA Experiment 20000117 PARAMETER Experiment Name: At_100uM_ABA_Mutants_cDNA_P Parameter: Tissue Value: Aerial
  misc_feature: MA Experiment 20000117 PARAMETER Experiment Name: At_100uM_ABA_Mutants_cDNA_P Parameter: Treatment Value: 100uM ABA vs. No Treatment
  misc_feature: MA Experiment ID: 20000180 Result: Up-regulated in Transcription
  misc_feature: MA Experiment 20000180 PARAMETER Experiment Name: At_Germinating_Seeds_P Parameter: Age (hr) Value: 24 vs. 0
  misc_feature: MA Experiment 20000180 PARAMETER Experiment Name: At_Germinating_Seeds_P Parameter: Tissue Value: Germinating Seeds
  misc_feature: MA Experiment ID: 20000184 Result: Up-regulated in Transcription
  misc_feature: MA Experiment 20000184 PARAMETER Experiment Name: At_Shoots__P Parameter: Age (day) Value: 7
  misc_feature: MA Experiment 20000184 PARAMETER Experiment Name: At_Shoots__P Parameter: Tissue Value: Shoots vs. Whole Plant
  misc_feature: MA Experiment ID: 20000185 Result: Down-regulated in Transcription
  misc_feature: MA Experiment 20000185 PARAMETER Experiment Name: At_Roots__P Parameter: Age (day) Value: 7 vs. 21
  misc_feature: MA Experiment 20000185 PARAMETER Experiment Name: At_Roots__P Parameter: Organism Value: A. thaliana
  misc_feature: MA Experiment 20000185 PARAMETER Experiment Name: At_Roots__P Parameter: Tissue Value: Roots vs. Whole Plant
  misc_feature: MA Experiment ID: 20000437 Result: Down-regulated in Transcription
  misc_feature: MA Experiment 20000437 PARAMETER Experiment Name: At_Drought_P Parameter: Age (day) Value: 8
  misc_feature: MA Experiment 20000437 PARAMETER Experiment Name: At_Drought_P Parameter: Organism Value: A. thaliana
  misc_feature: MA Experiment 20000437 PARAMETER Experiment Name: At_Drought_P Parameter: Plant Line Value: WS
  misc_feature: MA Experiment 20000437 PARAMETER Experiment Name: At_Drought_P Parameter: Timepoint (hr) Value: 24
  misc_feature: MA Experiment 20000437 PARAMETER Experiment Name: At_Drought_P Parameter: Tissue Value: Whole Plant
  misc_feature: MA Experiment 20000437 PARAMETER Experiment Name: At_Drought_P Parameter: Treatment Value: Drought vs. No Drought
  misc_feature: MA Experiment ID: 20000438 Result: Up-regulated in Transcription
  misc_feature: MA Experiment 20000438 PARAMETER Experiment Name: At_Shoots__P Parameter: Age (day) Value: 14
  misc_feature: MA Experiment 20000438 PARAMETER Experiment Name: At_Shoots__P Parameter: Tissue Value: Shoots vs. Whole Plant
  misc_feature: MA Experiment ID: 20000439 Result: Down-regulated in Transcription
  misc_feature: MA Experiment 20000439 PARAMETER Experiment Name: At_Roots__P Parameter: Age (day) Value: 14 vs. 21
  misc_feature: MA Experiment 20000439 PARAMETER Experiment Name: At_Roots__P Parameter: Organism Value: A. thaliana
  misc_feature: MA Experiment 20000439 PARAMETER Experiment Name: At_Roots__P Parameter: Tissue Value: Roots vs. Whole Plant
  misc_feature: MA Experiment ID: 20000495 Result: Down-regulated in Transcription
  misc_feature: MA Experiment 20000495 PARAMETER Experiment Name: At_Guard_Cells_P Parameter: Harvest Date Value: 8/2/2002
  misc_feature: MA Experiment 20000495 PARAMETER Experiment Name: At_Guard_Cells_P Parameter: Organism Value: A. thaliana
  misc_feature: MA Experiment 20000495 PARAMETER Experiment Name: At_Guard_Cells_P Parameter: Tissue Value: Guard Cells vs. Leaves
  misc_feature: MA Experiment ID: 20000794 Result: Down-regulated in Transcription
  misc_feature: MA Experiment 20000794 PARAMETER Experiment Name: At_Petals_P Parameter: Age (day) Value: 23-25 days
  misc_feature: MA Experiment 20000794 PARAMETER Experiment Name: At_Petals_P Parameter: Plant Line Value: WS
  misc_feature: MA Experiment 20000794 PARAMETER Experiment Name: At_Petals_P Parameter: Tissue Value: Petals vs. Whole plant
  misc_feature: MA Experiment ID: 20001248 Result: Down-regulated in Transcription
  misc_feature: MA Experiment 20001248 PARAMETER Experiment Name: At_Far-red-induction_P Parameter: Age (day) Value: 7
  misc_feature: MA Experiment 20001248 PARAMETER Experiment Name: At_Far-red-induction_P Parameter: Light Value: Far-red vs. White
  misc_feature: MA Experiment 20001248 PARAMETER Experiment Name: At_Far-red-induction_P Parameter: Organism Value: A. thaliana
  misc_feature: MA Experiment 20001248 PARAMETER Experiment Name: At_Far-red-induction_P Parameter: Plant Line Value: Columbia
  misc_feature: MA Experiment 20001248 PARAMETER Experiment Name: At_Far-red-induction_P Parameter: Timepoint (hr) Value: 4
  misc_feature: MA Experiment 20001248 PARAMETER Experiment Name: At_Far-red-induction_P Parameter: Tissue Value: Whole Plant
  misc_feature: MA Experiment ID: 20001450 Result: Down-regulated in Transcription
  misc_feature: MA Experiment 20001450 PARAMETER Experiment Name: At_Far-red-induction_P Parameter: Age (day) Value: 7
  misc_feature: MA Experiment 20001450 PARAMETER Experiment Name: At_Far-red-induction_P Parameter: Light Value: Far-red vs. White
  misc_feature: MA Experiment 20001450 PARAMETER Experiment Name: At_Far-red-induction_P Parameter: Organism Value: A. thaliana
  misc_feature: MA Experiment 20001450 PARAMETER Experiment Name: At_Far-red-induction_P Parameter: Plant Line Value: Columbia
  misc_feature: MA Experiment 20001450 PARAMETER Experiment Name: At_Far-red-induction_P Parameter: Timepoint (hr) Value: 8
  misc_feature: MA Experiment 20001450 PARAMETER Experiment Name: At_Far-red-induction_P Parameter: Tissue Value: Whole Plant
  misc_feature: MA Experiment ID: 20001557 Result: Down-regulated in Transcription
  misc_feature: MA Experiment 20001557 PARAMETER Experiment Name: At_Drought_Soil_Dry_P Parameter: Age (day) Value: 27
  misc_feature: MA Experiment 20001557 PARAMETER Experiment Name: At_Drought_Soil_Dry_P Parameter: Organism Value: A. thaliana
  misc_feature: MA Experiment 20001557 PARAMETER Experiment Name: At_Drought_Soil_Dry_P Parameter: Plant Line Value: WS
  misc_feature: MA Experiment 20001557 PARAMETER Experiment Name: At_Drought_Soil_Dry_P Parameter: Post Timepoint (hr) Value: 3
  misc_feature: MA Experiment 20001557 PARAMETER Experiment Name: At_Drought_Soil_Dry_P Parameter: Post-Treatment Value: Re-Water vs. No Drought
  misc_feature: MA Experiment 20001557 PARAMETER Experiment Name: At_Drought_Soil_Dry_P Parameter: Timepoint (day) Value: 13
  misc_feature: MA Experiment 20001557 PARAMETER Experiment Name: At_Drought_Soil_Dry_P Parameter: Treatment Value: Drought vs. No Drought
  misc_feature: MA Experiment ID: 20001904 Result: Down-regulated in Transcription
  misc_feature: MA Experiment 20001904 PARAMETER Experiment Name: At_Drought_Reproduction_P Parameter: Age (day) Value: 37
  misc_feature: MA Experiment 20001904 PARAMETER Experiment Name: At_Drought_Reproduction_P Parameter: Organism Value: A. thaliana
  misc_feature: MA Experiment 20001904 PARAMETER Experiment Name: At_Drought_Reproduction_P Parameter: Plant Line Value: WS
  misc_feature: MA Experiment 20001904 PARAMETER Experiment Name: At_Drought_Reproduction_P Parameter: Timepoint (day) Value: 7
  misc_feature: MA Experiment 20001904 PARAMETER Experiment Name: At_Drought_Reproduction_P Parameter: Tissue Value: Rosettes
  misc_feature: MA Experiment 20001904 PARAMETER Experiment Name: At_Drought_Reproduction_P Parameter: Treatment Value: Drought vs. No Drought
  misc_feature: MA Experiment ID: 20001905 Result: Down-regulated in Transcription
  misc_feature: MA Experiment 20001905 PARAMETER Experiment Name: At_Drought_Reproduction_P Parameter: Age (day) Value: 40
  misc_feature: MA Experiment 20001905 PARAMETER Experiment Name: At_Drought_Reproduction_P Parameter: Organism Value: A. thaliana
  misc_feature: MA Experiment 20001905 PARAMETER Experiment Name: At_Drought_Reproduction_P Parameter: Plant Line Value: WS
  misc_feature: MA Experiment 20001905 PARAMETER Experiment Name: At_Drought_Reproduction_P Parameter: Timepoint (day) Value: 10
  misc_feature: MA Experiment 20001905 PARAMETER Experiment Name: At_Drought_Reproduction_P Parameter: Tissue Value: Rosettes
  misc_feature: MA Experiment 20001905 PARAMETER Experiment Name: At_Drought_Reproduction_P Parameter: Treatment Value: Drought vs. No Drought
gatccagaatctcatcttctttgcctccaactcagcaattcatattttcctatattacaactctctgcctcttctgcttacatcatacaacaagcttctctctctggtagccatggcttcggctactttctctgtggccaaaccatctcttcagggtttttctgagttctcaggacttcgaaactcctctgctcttccctttgccaagagatcttcttccgatgagtttgtttccttcgtcagtttccaaacttctgcaatgagaagcaatggtggatacaggaaaggggtgaccgaggccaagataaaggtagcaatcaatgggttcggtaggattggtaggaacttcttgaggtgttggcatggtcgtaaggactctcctcttgatgtcgttgtcattaacgacactggtggtgttaaacaagcatcacatctcctcaaatacgactcaactcttggaatctttgacgctgatgtcaaaccttcaggagactcagctctctctgttgatggaaagatcatcaagattgtatctgatcgtaacccatctaatctcccctggggggaactaggcattgacttagttatcgaaggaaccggagtgtttgttgacagagacggtgctgggaagcaccttcaggctggagccaagaaggttcttatcactgcacctggaaaaggtgacatcccaacttatgtcgttggtgtcaatgctgaactttacagccatgaagatacgatcatcagcaatgcgtcttgtactactaactgtctcgctccattcgtcaaggttcttgaccagaaatttgggatcataaagggtacaatgacaactactcactcatacactggtgaccaaaggttgttagatgcgagccaccgtgatctaaggagagcaagagcagcagctttgaacattgttccaacatctacaggagcagccaaagctgtggctcttgtgcttcctaacctcaaaggaaaacttaacggaattgcattgcgtgtgccaactccaaacgtttcagtggttgacttagtcgtgcaagtctccaagaaaacttttgctgaagaagtcaatgctgctttcagagatgcagctgagaaagagcttaaaggtatccttgacgtctgtgatgagcctcttgtctctgttgacttcaggtgctctgatgtatcctccactattgattcttccctcacaatggttatgggagatgatatggttaaagtgattgcttggtatgacaatgaatggggttactcacagagagtcgttgatttggctgacattgttgccaataactggaagtgaagactcaacaacctcttgatgtctgctccattattttttactgttacatgattcggaatgtataattgtagttcctgagtttattatgtatttgtgctctataatttatagtaataaacttgattcaaacatattacatcctctgcttaatacacaactctggtttggg

SEQ ID NO: 46225 - protein, 436 aa, Arabidopsis thaliana
  peptide (1)..(436): Ceres Seq. ID no. 15174936
  misc_feature (254)..(414): Pfam Name: Glyceraldehyde 3-phosphate dehydrogenase, Pfam Description: Glyceraldehyde 3-phosphate dehydrogenase,
  misc_feature (87)..(436): Homolog of NCBI NO: 166702 NR Description: glyceraldehyde 3-phosphate dehydrogenase A
  misc_feature (55)..(436): Homolog of NCBI NO: 22240 NR Description: GADPH (383 AA) [Zea mays]
  misc_feature (38)..(436): Homolog of NCBI NO: 120657 NR Description: Glyceraldehyde 3-phosphate dehydrogenase A, precursor (NADP-dependent glyceraldehydephosphate dehydrogenase
  misc_feature (38)..(436): Homolog of NCBI NO: 21740910 NR Description: OSJNBa0036B21.24 [Oryza sativa (japonica
  misc_feature (38)..(436): Homolog of NCBI NO: 20455487 NR Description: Glyceraldehyde 3-phosphate dehydrogenase A, precursor (NADP-dependent glyceraldehydephosphate dehydrogenase
  misc_feature (38)..(436): Homolog of NCBI NO: 20729 NR Description: unnamed protein product [Pisum sativum]
  misc_feature (38)..(436): Homolog of NCBI NO: 120658 NR Description: Glyceraldehyde 3-phosphate dehydrogenase A, precursor (NADP-dependent glyceraldehydephosphate dehydrogenase
  misc_feature (38)..(436): Homolog of NCBI NO: 30688425 NR Description: glyceraldehyde 3-phosphate dehydrogenase A
  misc_feature (38)..(436): Homolog of NCBI NO: 2117520 NR Description: glyceraldehyde-3-phosphate dehydrogenase (NADP)
  misc_feature (38)..(436): Homolog of NCBI NO: 15222111 NR Description: calcium-binding protein, calreticulin -related
IQNLIFFASNSAIHIFLYYNSLPLLLTSYNKLLSLVAMASATFSVAKPSLQGFSEFSGLRNSSALPFAKRSSSDEFVSFVSFQTSAMRSNGGYRKGVTEAKIKVAINGFGRIGRNFLRCWHGRKDSPLDVVVINDTGGVKQASHLLKYDSTLGIFDADVKPSGDSALSVDGKIIKIVSDRNPSNLPWGELGIDLVIEGTGVFVDRDGAGKHLQAGAKKVLITAPGKGDIPTYVVGVNAELYSHEDTIISNASCTTNCLAPFVKVLDQKFGIIKGTMTTTHSYTGDQRLLDASHRDLRRARAAALNIVPTSTGAAKAVALVLPNLKGKLNGIALRVPTPNVSVVDLVVQVSKKTFAEEVNAAFRDAAEKELKGILDVCDEPLVSVDFRCSDVSSTIDSSLTMVMGDDMVKVIAWYDNEWGYSQRVVDLADIVANNWK

SEQ ID NO: 46226 - protein, 399 aa, Arabidopsis thaliana
  peptide (1)..(399): Ceres Seq. ID no. 15174937
  misc_feature (217)..(377): Pfam Name: Glyceraldehyde 3-phosphate dehydrogenase, Pfam Description: Glyceraldehyde 3-phosphate dehydrogenase,
  misc_feature (50)..(399): Homolog of NCBI NO: 166702 NR Description: glyceraldehyde 3-phosphate dehydrogenase A
  misc_feature (18)..(399): Homolog of NCBI NO: 22240 NR Description: GADPH (383 AA) [Zea mays]
  misc_feature (1)..(399): Homolog of NCBI NO: 120657 NR Description: Glyceraldehyde 3-phosphate dehydrogenase A, precursor (NADP-dependent glyceraldehydephosphate dehydrogenase
  misc_feature (1)..(399): Homolog of NCBI NO: 21740910 NR Description: OSJNBa0036B21.24 [Oryza sativa (japonica
  misc_feature (1)..(399): Homolog of NCBI NO: 20455487 NR Description: Glyceraldehyde 3-phosphate dehydrogenase A, precursor (NADP-dependent glyceraldehydephosphate dehydrogenase
  misc_feature (1)..(399): Homolog of NCBI NO: 20729 NR Description: unnamed protein product [Pisum sativum]
  misc_feature (1)..(399): Homolog of NCBI NO: 120658 NR Description: Glyceraldehyde 3-phosphate dehydrogenase A, precursor (NADP-dependent glyceraldehydephosphate dehydrogenase
  misc_feature (1)..(399): Homolog of NCBI NO: 30688425 NR Description: glyceraldehyde 3-phosphate dehydrogenase A
  misc_feature (1)..(399): Homolog of NCBI NO: 2117520 NR Description: glyceraldehyde-3-phosphate dehydrogenase (NADP)
  misc_feature (1)..(399): Homolog of NCBI NO: 15222111 NR Description: calcium-binding protein, calreticulin -related
MASATFSVAKPSLQGFSEFSGLRNSSALPFAKRSSSDEFVSFVSFQTSAMRSNGGYRKGVTEAKIKVAINGFGRIGRNFLRCWHGRKDSPLDVVVINDTGGVKQASHLLKYDSTLGIFDADVKPSGDSALSVDGKIIKIVSDRNPSNLPWGELGIDLVIEGTGVFVDRDGAGKHLQAGAKKVLITAPGKGDIPTYVVGVNAELYSHEDTIISNASCTTNCLAPFVKVLDQKFGIIKGTMTTTHSYTGDQRLLDASHRDLRRARAAALNIVPTSTGAAKAVALVLPNLKGKLNGIALRVPTPNVSVVDLVVQVSKKTFAEEVNAAFRDAAEKELKGILDVCDEPLVSVDFRCSDVSSTIDSSLTMVMGDDMVKVIAWYDNEWGYSQRVVDLADIVANNWK

SEQ ID NO: 46227 - protein, 350 aa, Arabidopsis thaliana
  peptide (1)..(350): Ceres Seq. ID no. 15174938
  misc_feature (168)..(328): Pfam Name: Glyceraldehyde 3-phosphate dehydrogenase, Pfam Description: Glyceraldehyde 3-phosphate dehydrogenase,
  misc_feature (1)..(350): Homolog of NCBI NO: 166702 NR Description: glyceraldehyde 3-phosphate dehydrogenase A
  misc_feature (1)..(350): Homolog of NCBI NO: 22240 NR Description: GADPH (383 AA) [Zea mays]
  misc_feature (1)..(350): Homolog of NCBI NO: 120657 NR Description: Glyceraldehyde 3-phosphate dehydrogenase A, precursor (NADP-dependent glyceraldehydephosphate dehydrogenase
  misc_feature (1)..(350): Homolog of NCBI NO: 21740910 NR Description: OSJNBa0036B21.24 [Oryza sativa (japonica
  misc_feature (1)..(350): Homolog of NCBI NO: 20455487 NR Description: Glyceraldehyde 3-phosphate dehydrogenase A, precursor (NADP-dependent glyceraldehydephosphate dehydrogenase
  misc_feature (1)..(350): Homolog of NCBI NO: 20729 NR Description: unnamed protein product [Pisum sativum]
  misc_feature (1)..(350): Homolog of NCBI NO: 120658 NR Description: Glyceraldehyde 3-phosphate dehydrogenase A, precursor (NADP-dependent glyceraldehydephosphate dehydrogenase
  misc_feature (1)..(350): Homolog of NCBI NO: 30688425 NR Description: glyceraldehyde 3-phosphate dehydrogenase A
  misc_feature (1)..(350): Homolog of NCBI NO: 2117520 NR Description: glyceraldehyde-3-phosphate dehydrogenase (NADP)
  misc_feature (1)..(350): Homolog of NCBI NO: 15222111 NR Description: calcium-binding protein, calreticulin -related
MRSNGGYRKGVTEAKIKVAINGFGRIGRNFLRCWHGRKDSPLDVVVINDTGGVKQASHLLKYDSTLGIFDADVKPSGDSALSVDGKIIKIVSDRNPSNLPWGELGIDLVIEGTGVFVDRDGAGKHLQAGAKKVLITAPGKGDIPTYVVGVNAELYSHEDTIISNASCTTNCLAPFVKVLDQKFGIIKGTMTTTHSYTGDQRLLDASHRDLRRARAAALNIVPTSTGAAKAVALVLPNLKGKLNGIALRVPTPNVSVVDLVVQVSKKTFAEEVNAAFRDAAEKELKGILDVCDEPLVSVDFRCSDVSSTIDSSLTMVMGDDMVKVIAWYDNEWGYSQRVVDLADIVANNWK

SEQ ID NO: 46228 - DNA, 1670 bp, Arabidopsis thaliana
  misc_feature (1)..(1670): Ceres Seq. ID no. 12575864
  misc_feature: MA Experiment ID: 20000179 Result: Up-regulated in Transcription
  misc_feature: MA Experiment 20000179 PARAMETER Experiment Name: At_Germinating_Seeds_P Parameter: Age (hr) Value: 6 vs. 0
  misc_feature: MA Experiment 20000179 PARAMETER Experiment Name: At_Germinating_Seeds_P Parameter: Tissue Value: Germinating Seeds
  misc_feature: MA Experiment ID: 20000185 Result: Up-regulated in Transcription
  misc_feature: MA Experiment 20000185 PARAMETER Experiment Name: At_Roots__P Parameter: Age (day) Value: 7 vs. 21
  misc_feature: MA Experiment 20000185 PARAMETER Experiment Name: At_Roots__P Parameter: Organism Value: A. thaliana
  misc_feature: MA Experiment 20000185 PARAMETER Experiment Name: At_Roots__P Parameter: Tissue Value: Roots vs. Whole Plant
  misc_feature: MA Experiment ID: 20000227 Result: Down-regulated in Transcription
  misc_feature: MA Experiment 20000227 PARAMETER Experiment Name: At_Root-Tips-vs-Tops_P Parameter: Tissue Value: Root Tips vs. Root Tops
  misc_feature: MA Experiment ID: 20000439 Result: Up-regulated in Transcription
  misc_feature: MA Experiment 20000439 PARAMETER Experiment Name: At_Roots__P Parameter: Age (day) Value: 14 vs. 21
  misc_feature: MA Experiment 20000439 PARAMETER Experiment Name: At_Roots__P Parameter: Organism Value: A. thaliana
  misc_feature: MA Experiment 20000439 PARAMETER Experiment Name: At_Roots__P Parameter: Tissue Value: Roots vs. Whole Plant
  misc_feature: MA Experiment ID: 20000573 Result: Down-regulated in Transcription
  misc_feature: MA Experiment 20000573 PARAMETER Experiment Name: At_100uM_ABA_Mutants__P Parameter: Organism Value: A. thaliana
  misc_feature: MA Experiment 20000573 PARAMETER Experiment Name: At_100uM_ABA_Mutants__P Parameter: Plant Line Value: CS22 vs. Ler wt
  misc_feature: MA Experiment 20000573 PARAMETER Experiment Name: At_100uM_ABA_Mutants__P Parameter: Timepoint (hr) Value: N/A
  misc_feature: MA Experiment 20000573 PARAMETER Experiment Name: At_100uM_ABA_Mutants__P Parameter: Tissue Value: Whole Plant
  misc_feature: MA Experiment 20000573 PARAMETER Experiment Name: At_100uM_ABA_Mutants__P Parameter: Treatment Value: None
  misc_feature: MA Experiment ID: 20000794 Result: Down-regulated in Transcription
  misc_feature: MA Experiment 20000794 PARAMETER Experiment Name: At_Petals_P Parameter: Age (day) Value: 23-25 days
  misc_feature: MA Experiment 20000794 PARAMETER Experiment Name: At_Petals_P Parameter: Plant Line Value: WS
  misc_feature: MA Experiment 20000794 PARAMETER Experiment Name: At_Petals_P Parameter: Tissue Value: Petals vs. Whole plant
  misc_feature: MA Experiment ID: 20001248 Result: Down-regulated in Transcription
  misc_feature: MA Experiment 20001248 PARAMETER Experiment Name: At_Far-red-induction_P Parameter: Age (day) Value: 7
  misc_feature: MA Experiment 20001248 PARAMETER Experiment Name: At_Far-red-induction_P Parameter: Light Value: Far-red vs. White
  misc_feature: MA Experiment 20001248 PARAMETER Experiment Name: At_Far-red-induction_P Parameter: Organism Value: A. thaliana
  misc_feature: MA Experiment 20001248 PARAMETER Experiment Name: At_Far-red-induction_P Parameter: Plant Line Value: Columbia
  misc_feature: MA Experiment 20001248 PARAMETER Experiment Name: At_Far-red-induction_P Parameter: Timepoint (hr) Value: 4
  misc_feature: MA Experiment 20001248 PARAMETER Experiment Name: At_Far-red-induction_P Parameter: Tissue Value: Whole Plant
  misc_feature: MA Experiment ID: 20001450 Result: Down-regulated in Transcription
  misc_feature: MA Experiment 20001450 PARAMETER Experiment Name: At_Far-red-induction_P Parameter: Age (day) Value: 7
  misc_feature: MA Experiment 20001450 PARAMETER Experiment Name: At_Far-red-induction_P Parameter: Light Value: Far-red vs. White
  misc_feature: MA Experiment 20001450 PARAMETER Experiment Name: At_Far-red-induction_P Parameter: Organism Value: A. thaliana
  misc_feature: MA Experiment 20001450 PARAMETER Experiment Name: At_Far-red-induction_P Parameter: Plant Line Value: Columbia
  misc_feature: MA Experiment 20001450 PARAMETER Experiment Name: At_Far-red-induction_P Parameter: Timepoint (hr) Value: 8
  misc_feature: MA Experiment 20001450 PARAMETER Experiment Name: At_Far-red-induction_P Parameter: Tissue Value: Whole Plant
  misc_feature: MA Experiment ID: 20001451 Result: Down-regulated in Transcription
  misc_feature: MA Experiment 20001451 PARAMETER Experiment Name: At_Far-red-induction_P Parameter: Age (day) Value: 7
  misc_feature: MA Experiment 20001451 PARAMETER Experiment Name: At_Far-red-induction_P Parameter: Light Value: Far-red vs. White
  misc_feature: MA Experiment 20001451 PARAMETER Experiment Name: At_Far-red-induction_P Parameter: Organism Value: A. thaliana
  misc_feature: MA Experiment 20001451 PARAMETER Experiment Name: At_Far-red-induction_P Parameter: Plant Line Value: Columbia
  misc_feature: MA Experiment 20001451 PARAMETER Experiment Name: At_Far-red-induction_P Parameter: Timepoint (hr) Value: 24
  misc_feature: MA Experiment 20001451 PARAMETER Experiment Name: At_Far-red-induction_P Parameter: Tissue Value: Whole Plant
  misc_feature: MA Experiment ID: 20001459 Result: Up-regulated in Transcription
  misc_feature: MA Experiment 20001459 PARAMETER Experiment Name: At_50mM_NH4NO3_L-to-H_P Parameter: Age (day) Value: Undefined
  misc_feature: MA Experiment 20001459 PARAMETER Experiment Name: At_50mM_NH4NO3_L-to-H_P Parameter: Organism Value: Undefined
  misc_feature: MA Experiment 20001459 PARAMETER Experiment Name: At_50mM_NH4NO3_L-to-H_P Parameter: Plant Line Value: Undefined
  misc_feature: MA Experiment 20001459 PARAMETER Experiment Name: At_50mM_NH4NO3_L-to-H_P Parameter: Timepoint (hr) Value: 4
  misc_feature: MA Experiment 20001459 PARAMETER Experiment Name: At_50mM_NH4NO3_L-to-H_P Parameter: Tissue Value: Siliques
  misc_feature: MA Experiment 20001459 PARAMETER Experiment Name: At_50mM_NH4NO3_L-to-H_P Parameter: Treatment Value: 50mM NH4NO3 vs. 100mM Manitol
  misc_feature: MA Experiment ID: 20001558 Result: Down-regulated in Transcription
  misc_feature: MA Experiment 20001558 PARAMETER Experiment Name: At_Drought_Soil_Dry_P Parameter: Age (day) Value: 27
  misc_feature: MA Experiment 20001558 PARAMETER Experiment Name: At_Drought_Soil_Dry_P Parameter: Organism Value: A. thaliana
  misc_feature: MA Experiment 20001558 PARAMETER Experiment Name: At_Drought_Soil_Dry_P Parameter: Plant Line Value: WS
  misc_feature: MA Experiment 20001558 PARAMETER Experiment Name: At_Drought_Soil_Dry_P Parameter: Post Timepoint (hr) Value: 6
  misc_feature: MA Experiment 20001558 PARAMETER Experiment Name: At_Drought_Soil_Dry_P Parameter: Post-Treatment Value: Re-Water vs. No Drought
  misc_feature: MA Experiment 20001558 PARAMETER Experiment Name: At_Drought_Soil_Dry_P Parameter: Timepoint (day) Value: 13
  misc_feature: MA Experiment 20001558 PARAMETER Experiment Name: At_Drought_Soil_Dry_P Parameter: Treatment Value: Drought vs. No Drought
  misc_feature: MA Experiment ID: 20001756 Result: Up-regulated in Transcription
  misc_feature: MA Experiment 20001756 PARAMETER Experiment Name: At_50mM_NH4NO3_L-to-H_P Parameter: Timepoint (hr) Value: 4
  misc_feature: MA Experiment 20001756 PARAMETER Experiment Name: At_50mM_NH4NO3_L-to-H_P Parameter: Tissue Value: Leaf
  misc_feature: MA Experiment 20001756 PARAMETER Experiment Name: At_50mM_NH4NO3_L-to-H_P Parameter: Treatment Value: 50mM NH4NO3 vs 100mM Mannitol
  misc_feature: MA Experiment ID: 20001757 Result: Up-regulated in Transcription
  misc_feature: MA Experiment 20001757 PARAMETER Experiment Name: At_50mM_NH4NO3_L-to-H_P Parameter: Timepoint (hr) Value: 6
  misc_feature: MA Experiment 20001757 PARAMETER Experiment Name: At_50mM_NH4NO3_L-to-H_P Parameter: Tissue Value: Leaf
  misc_feature: MA Experiment 20001757 PARAMETER Experiment Name: At_50mM_NH4NO3_L-to-H_P Parameter: Treatment Value: 50mM NH4NO3 vs 100mM Mannitol
  misc_feature: MA Experiment ID: 20001905 Result: Down-regulated in Transcription
  misc_feature: MA Experiment 20001905 PARAMETER Experiment Name: At_Drought_Reproduction_P Parameter: Age (day) Value: 40
  misc_feature: MA Experiment 20001905 PARAMETER Experiment Name: At_Drought_Reproduction_P Parameter: Organism Value: A. thaliana
  misc_feature: MA Experiment 20001905 PARAMETER Experiment Name: At_Drought_Reproduction_P Parameter: Plant Line Value: WS
  misc_feature: MA Experiment 20001905 PARAMETER Experiment Name: At_Drought_Reproduction_P Parameter: Timepoint (day) Value: 10
  misc_feature: MA Experiment 20001905 PARAMETER Experiment Name: At_Drought_Reproduction_P Parameter: Tissue Value: Rosettes
  misc_feature: MA Experiment 20001905 PARAMETER Experiment Name: At_Drought_Reproduction_P Parameter: Treatment Value: Drought vs. No Drought
  misc_feature: MA Experiment ID: 20001906 Result: Down-regulated in Transcription
  misc_feature: MA Experiment 20001906 PARAMETER Experiment Name: At_Drought_Reproduction_P Parameter: Age (day) Value: 35
  misc_feature: MA Experiment 20001906 PARAMETER Experiment Name: At_Drought_Reproduction_P Parameter: Organism Value: A. thaliana
  misc_feature: MA Experiment 20001906 PARAMETER Experiment Name: At_Drought_Reproduction_P Parameter: Plant Line Value: WS
  misc_feature: MA Experiment 20001906 PARAMETER Experiment Name: At_Drought_Reproduction_P Parameter: Timepoint (day) Value: 5
  misc_feature: MA Experiment 20001906 PARAMETER Experiment Name: At_Drought_Reproduction_P Parameter: Tissue Value: Siliques
  misc_feature: MA Experiment 20001906 PARAMETER Experiment Name: At_Drought_Reproduction_P Parameter: Treatment Value: Drought vs. No Drought
  misc_feature: MA Experiment ID: 20001908 Result: Down-regulated in Transcription
  misc_feature: MA Experiment 20001908 PARAMETER Experiment Name: At_Drought_Reproduction_P Parameter: Age (day) Value: 40
  misc_feature: MA Experiment 20001908 PARAMETER Experiment Name: At_Drought_Reproduction_P Parameter: Organism Value: A. thaliana
  misc_feature: MA Experiment 20001908 PARAMETER Experiment Name: At_Drought_Reproduction_P Parameter: Plant Line Value: WS
  misc_feature: MA Experiment 20001908 PARAMETER Experiment Name: At_Drought_Reproduction_P Parameter: Timepoint (day) Value: 10
  misc_feature: MA Experiment 20001908 PARAMETER Experiment Name: At_Drought_Reproduction_P Parameter: Tissue Value: Siliques
  misc_feature: MA Experiment 20001908 PARAMETER Experiment Name: At_Drought_Reproduction_P Parameter: Treatment Value: Drought vs. No Drought
  misc_feature: MA Experiment ID: 20001911 Result: Down-regulated in Transcription
  misc_feature: MA Experiment 20001911 PARAMETER Experiment Name: At_Drought_Reproduction_P Parameter: Age (day) Value: 40
  misc_feature: MA Experiment 20001911 PARAMETER Experiment Name: At_Drought_Reproduction_P Parameter: Organism Value: A. thaliana
  misc_feature: MA Experiment 20001911 PARAMETER Experiment Name: At_Drought_Reproduction_P Parameter: Plant Line Value: WS
  misc_feature: MA Experiment 20001911 PARAMETER Experiment Name: At_Drought_Reproduction_P Parameter: Timepoint (day) Value: 10
  misc_feature: MA Experiment 20001911 PARAMETER Experiment Name: At_Drought_Reproduction_P Parameter: Tissue Value: Flowers
  misc_feature: MA Experiment 20001911 PARAMETER Experiment Name: At_Drought_Reproduction_P Parameter: Treatment Value: Drought vs. No Drought
agaggaagagagagatatccagaaaagctactggatggagcattctagtgatttgactgttgaagctatgatgcttgactctaaagcttctgatcttgacaaagaagaacgtcctgaggtactctctttaatcccaccatatgaagggaaatctgtgcttgaacttggagctggtattggtcgtttcactggtgaattggctcaaaaggctggtgaagttatcgctcttgacttcatcgaaagcgcgattcagaagaatgaaagtgttaatgggcattacaagaacatcaagtttatgtgtgctgatgtaacatctccagacttgaaaatcaaagatggatctatcgacttgattttctcaaactggttgctcatgtatctctctgataaagaggtggaactaatggcagagagaatgattggatgggtcaagccagggggatacattttcttcagagaatcttgcttccatcaatctggggacagcaagcgaaagtcaaaccccactcactaccgtgaacccagattctacacaaaggttttccaggaatgtcagacacgtgatgcttctggcaattcatttgagctctctatggttggctgcaaatgcattggggcttatgtgaagaacaagaagaatcagaatcagatttgctggatatggcaaaaagtcagcgtggagaatgacaaggatttccagcgtttcttggacaatgttcaatacaagtctagtgggatcttgcgctatgagcgtgtctttggggaaggatatgtgagcactggtggatttgagacaactaaagaatttgtggcgaagatggaccttaaaccgggacagaaagtcctagatgttggttgtggtatcggtggaggtgacttctacatggctgagaatttcgatgttcatgttgttggaatcgatctgtcggtcaacatgatctctttcgcactggagcgggccattggactcaaatgctcagtcgagtttgaagtcgctgattgcaccaccaaaacatatcccgataattcctttgatgtcatttacagccgtgacactattctgcacatccaagacaagccagctctattcaggacattcttcaagtggcttaaaccagggggtaaagttctcatcactgactattgcagaagtgctgaaactccgtctcctgaattcgcagagtacataaaacaaagaggatatgatctacatgatgttcaagcttacggacagatgctgaaagacgcaggctttgacgacgttatcgctgaggaccgtactgatcagtttgtacaagtcctcaggcgtgaattagaaaaagtggagaaagaaaaggaagaattcatcagcgacttctcagaagaggattacaatgacattgttggaggatggtcggcaaagcttgaaaggactgcatctggtgaacagaaatggggattattcatagccgacaagaagtaaaatccatgtttttatcccaaaactctggtgattcatttcccttcaataaaaccgttcctttggaggacaatatctgcttgtttactatcatggaactgcaaatcaaaagataaactcatgtgttgtttcgattcttactcgagtcgttgtgccacataaaacctgcattgctttgattttccattaaatatctgcataacattcaagg

SEQ ID NO: 46229 - protein, 486 aa, Arabidopsis thaliana
  peptide (1)..(486): Ceres Seq. ID no. 12575865
  misc_feature (246)..(388): Pfam Name: Tellurite resistance protein TehB Pfam Description: Tellurite resistance protein TehB
  misc_feature (2)..(485): Homolog of NCBI NO: 34911440 NR Description: putative phosphoethanolamine methyltransferase
  misc_feature (2)..(486): Homolog of NCBI NO: 28804509 NR Description: phosphoethanolamine N-methyltransferase [Aster
  misc_feature (2)..(486): Homolog of NCBI NO: 28436074 NR Description: phosphoethanolamine N-methyltransferase [Suaeda
  misc_feature (2)..(485): Homolog of NCBI NO: 24212082 NR Description: Phosphoethanolamine N-methyltransferase
  misc_feature (2)..(485): Homolog of NCBI NO: 24212080 NR Description: Putative phosphoethanolamine N-methyltransferase 3
  misc_feature (2)..(485): Homolog of NCBI NO: 15219502 NR Description: phosphoethanolamine N-methyltransferase, putative
  misc_feature (1)..(485): Homolog of NCBI NO: 9294501 NR Description: methyl transferase-like protein [Arabidopsis
  misc_feature (1)..(485): Homolog of NCBI NO: 20260388 NR Description: unknown protein [Arabidopsis thaliana]
  misc_feature (1)..(485): Homolog of NCBI NO: 30684743 NR Description: phosphoethanolamine N-methyltransferase, putative
  misc_feature (12)..(486): Homolog of NCBI NO: 15221909 NR Description: phosphoethanolamine N-methyltransferase, putative
EEERDIQKSYWMEHSSDLTVEAMMLDSKASDLDKEERPEVLSLIPPYEGKSVLELGAGIGRFTGELAQKAGEVIALDFIESAIQKNESVNGHYKNIKFMCADVTSPDLKIKDGSIDLIFSNWLLMYLSDKEVELMAERMIGWVKPGGYIFFRESCFHQSGDSKRKSNPTHYREPRFYTKVFQECQTRDASGNSFELSMVGCKCIGAYVKNKKNQNQICWIWQKVSVENDKDFQRFLDNVQYKSSGILRYERVFGEGYVSTGGFETTKEFVAKMDLKPGQKVLDVGCGIGGGDFYMAENFDVHVVGIDLSVNMISFALERAIGLKCSVEFEVADCTTKTYPDNSFDVIYSRDTILHIQDKPALFRTFFKWLKPGGKVLITDYCRSAETPSPEFAEYIKQRGYDLHDVQAYGQMLKDAGFDDVIAEDRTDQFVQVLRRELEKVEKEKEEFISDFSEEDYNDIVGGWSAKLERTASGEQKWGLFIADKK

SEQ ID NO: 46230 - protein, 475 aa, Arabidopsis thaliana
  peptide (1)..(475): Ceres Seq. ID no. 12575866
  misc_feature (235)..(377): Pfam Name: Tellurite resistance protein TehB Pfam Description: Tellurite resistance protein TehB
  misc_feature (1)..(474): Homolog of NCBI NO: 34911440 NR Description: putative phosphoethanolamine methyltransferase
  misc_feature (1)..(475): Homolog of NCBI NO: 28804509 NR Description: phosphoethanolamine N-methyltransferase [Aster
  misc_feature (1)..(475): Homolog of NCBI NO: 28436074 NR Description: phosphoethanolamine N-methyltransferase [Suaeda
  misc_feature (1)..(474): Homolog of NCBI NO: 24212082 NR Description: Phosphoethanolamine N-methyltransferase
  misc_feature (1)..(474): Homolog of NCBI NO: 24212080 NR Description: Putative phosphoethanolamine N-methyltransferase 3
  misc_feature (1)..(474): Homolog of NCBI NO: 15219502 NR Description: phosphoethanolamine N-methyltransferase, putative
  misc_feature (1)..(474): Homolog of NCBI NO: 9294501 NR Description: methyl transferase-like protein [Arabidopsis
  misc_feature (1)..(474): Homolog of NCBI NO: 20260388 NR Description: unknown protein [Arabidopsis thaliana]
  misc_feature (1)..(474): Homolog of NCBI NO: 30684743 NR Description: phosphoethanolamine N-methyltransferase, putative
  misc_feature (1)..(475): Homolog of NCBI NO: 15221909 NR Description: phosphoethanolamine N-methyltransferase, putative
MEHSSDLTVEAMMLDSKASDLDKEERPEVLSLIPPYEGKSVLELGAGIGRFTGELAQKAGEVIALDFIESAIQKNESVNGHYKNIKFMCADVTSPDLKIKDGSIDLIFSNWLLMYLSDKEVELMAERMIGWVKPGGYIFFRESCFHQSGDSKRKSNPTHYREPRFYTKVFQECQTRDASGNSFELSMVGCKCIGAYVKNKKNQNQICWIWQKVSVENDKDFQRFLDNVQYKSSGILRYERVFGEGYVSTGGFETTKEFVAKMDLKPGQKVLDVGCGIGGGDFYMAENFDVHVVGIDLSVNMISFALERAIGLKCSVEFEVADCTTKTYPDNSFDVIYSRDTILHIQDKPALFRTFFKWLKPGGKVLITDYCRSAETPSPEFAEYIKQRGYDLHDVQAYGQMLKDAGFDDVIAEDRTDQFVQVLRRELEKVEKEKEEFISDFSEEDYNDIVGGWSAKLERTASGEQKWGLFIADKK

SEQ ID NO: 46231 - protein, 464 aa, Arabidopsis thaliana
  peptide (1)..(464): Ceres Seq. ID no. 12575867
  misc_feature (224)..(366): Pfam Name: Tellurite resistance protein TehB Pfam Description: Tellurite resistance protein TehB
  misc_feature (1)..(463): Homolog of NCBI NO: 34911440 NR Description: putative phosphoethanolamine methyltransferase
  misc_feature (1)..(464): Homolog of NCBI NO: 28804509 NR Description: phosphoethanolamine N-methyltransferase [Aster
  misc_feature (1)..(464): Homolog of NCBI NO: 28436074 NR Description: phosphoethanolamine N-methyltransferase [Suaeda
  misc_feature (1)..(463): Homolog of NCBI NO: 24212082 NR Description: Phosphoethanolamine N-methyltransferase
  misc_feature (1)..(463): Homolog of NCBI NO: 24212080 NR Description: Putative phosphoethanolamine N-methyltransferase 3
  misc_feature (1)..(463): Homolog of NCBI NO: 15219502 NR Description: phosphoethanolamine N-methyltransferase, putative
  misc_feature (1)..(463): Homolog of NCBI NO: 9294501 NR Description: methyl transferase-like protein [Arabidopsis
  misc_feature (1)..(463): Homolog of NCBI NO: 20260388 NR Description: unknown protein [Arabidopsis thaliana]
  misc_feature (1)..(463): Homolog of NCBI NO: 30684743 NR Description: phosphoethanolamine N-methyltransferase, putative
  misc_feature (1)..(464): Homolog of NCBI NO: 15221909 NR Description: phosphoethanolamine N-methyltransferase, putative
MMLDSKASDLDKEERPEVLSLIPPYEGKSVLELGAGIGRFTGELAQKAGEVIALDFIESAIQKNESVNGHYKNIKFMCADVTSPDLKIKDGSIDLIFSNWLLMYLSDKEVELMAERMIGWVKPGGYIFFRESCFHQSGDSKRKSNPTHYREPRFYTKVFQECQTRDASGNSFELSMVGCKCIGAYVKNKKNQNQICWIWQKVSVENDKDFQRFLDNVQYKSSGILRYERVFGEGYVSTGGFETTKEFVAKMDLKPGQKVLDVGCGIGGGDFYMAENFDVHVVGIDLSVNMISFALERAIGLKCSVEFEVADCTTKTYPDNSFDVIYSRDTILHIQDKPALFRTFFKWLKPGGKVLITDYCRSAETPSPEFAEYIKQRGYDLHDVQAYGQMLKDAGFDDVIAEDRTDQFVQVLRRELEKVEKEKEEFISDFSEEDYNDIVGGWSAKLERTASGEQKWGLFIADKK

SEQ ID NO: 46232 - DNA, 1528 bp, Arabidopsis thaliana
  misc_feature (1)..(1528): Ceres Seq. ID no. 12601699
  misc_feature: MA Experiment ID: 20000169 Result: Up-regulated in Transcription
  misc_feature: MA Experiment 20000169 PARAMETER Experiment Name: At_100uM_ABA_P Parameter: Age (day) Value: 14
  misc_feature: MA Experiment 20000169 PARAMETER Experiment Name: At_100uM_ABA_P Parameter: Organism Value: A. thaliana
  misc_feature: MA Experiment 20000169 PARAMETER Experiment Name: At_100uM_ABA_P Parameter: Plant Line Value: WS
  misc_feature: MA Experiment 20000169 PARAMETER Experiment Name: At_100uM_ABA_P Parameter: Timepoint (hr) Value: 6
  misc_feature: MA Experiment 20000169 PARAMETER Experiment Name: At_100uM_ABA_P Parameter: Tissue Value: Aerial
  misc_feature: MA Experiment 20000169 PARAMETER Experiment Name: At_100uM_ABA_P Parameter: Treatment Value: 100uM ABA vs. No Treatment
  misc_feature: MA Experiment ID: 20000173 Result: Down-regulated in Transcription
  misc_feature: MA Experiment 20000173 PARAMETER Experiment Name: At_42deg_Heat_P Parameter: Age (day) Value: 14
  misc_feature: MA Experiment 20000173 PARAMETER Experiment Name: At_42deg_Heat_P Parameter: Organism Value: A. thaliana
  misc_feature: MA Experiment 20000173 PARAMETER Experiment Name: At_42deg_Heat_P Parameter: Plant Line Value: WS
  misc_feature: MA Experiment 20000173 PARAMETER Experiment Name: At_42deg_Heat_P Parameter: Temperature (deg C) Value: 42 vs. 22
  misc_feature: MA Experiment 20000173 PARAMETER Experiment Name: At_42deg_Heat_P Parameter: Timepoint (hr) Value: 6
  misc_feature: MA Experiment 20000173 PARAMETER Experiment Name: At_42deg_Heat_P Parameter: Tissue Value: Aerial
  misc_feature: MA Experiment ID: 20000182 Result: Down-regulated in Transcription
  misc_feature: MA Experiment 20000182 PARAMETER Experiment Name: At_2mM_SA_P Parameter: Age (day) Value: 14
  misc_feature: MA Experiment 20000182 PARAMETER Experiment Name: At_2mM_SA_P Parameter: Organism Value: A. thaliana
  misc_feature: MA Experiment 20000182 PARAMETER Experiment Name: At_2mM_SA_P Parameter: Plant Line Value: WS
  misc_feature: MA Experiment 20000182 PARAMETER Experiment Name: At_2mM_SA_P Parameter: Timepoint (hr) Value: 6
  misc_feature: MA Experiment 20000182 PARAMETER Experiment Name: At_2mM_SA_P Parameter: Tissue Value: Aerial
  misc_feature: MA Experiment 20000182 PARAMETER Experiment Name: At_2mM_SA_P Parameter: Treatment Value: 2mM SA vs. No Treatment
  misc_feature: MA Experiment ID: 20000184 Result: Up-regulated in Transcription
  misc_feature: MA Experiment 20000184 PARAMETER Experiment Name: At_Shoots__P Parameter: Age (day) Value: 7
  misc_feature: MA Experiment 20000184 PARAMETER Experiment Name: At_Shoots__P Parameter: Tissue Value: Shoots vs. Whole Plant
  misc_feature: MA Experiment ID: 20000185 Result: Down-regulated in Transcription
  misc_feature: MA Experiment 20000185 PARAMETER Experiment Name: At_Roots__P Parameter: Age (day) Value: 7 vs. 21
  misc_feature: MA Experiment 20000185 PARAMETER Experiment Name: At_Roots__P Parameter: Organism Value: A. thaliana
  misc_feature: MA Experiment 20000185 PARAMETER Experiment Name: At_Roots__P Parameter: Tissue Value: Roots vs. Whole Plant
  misc_feature: MA Experiment ID: 20000213 Result: Down-regulated in Transcription
  misc_feature: MA Experiment 20000213 PARAMETER Experiment Name: At_4deg_Cold_P Parameter: Timepoint (hr) Value: 2
  misc_feature: MA Experiment ID: 20000234 Result: Down-regulated in Transcription
  misc_feature: MA Experiment 20000234 PARAMETER Experiment Name: At_Siliques_P Parameter: Age (day) Value: 21
  misc_feature: MA Experiment 20000234 PARAMETER Experiment Name: At_Siliques_P Parameter: Organism Value: A. thaliana
  misc_feature: MA Experiment 20000234 PARAMETER Experiment Name: At_Siliques_P Parameter: Plant Line Value: WS
  misc_feature: MA Experiment 20000234 PARAMETER Experiment Name: At_Siliques_P Parameter: Tissue Value: Less Than 5mm Siliques vs. Whole Plant
  misc_feature: MA Experiment ID: 20000267 Result: Up-regulated in Transcription
  misc_feature: MA Experiment 20000267 PARAMETER Experiment Name: At_Drought_P Parameter: Age (day) Value: 7
  misc_feature: MA Experiment 20000267 PARAMETER Experiment Name: At_Drought_P Parameter: Organism Value: A. thaliana
  misc_feature: MA Experiment 20000267 PARAMETER Experiment Name: At_Drought_P Parameter: Plant Line Value: WS
  misc_feature: MA Experiment 20000267 PARAMETER Experiment Name: At_Drought_P Parameter: Timepoint (hr) Value: 6
  misc_feature: MA Experiment 20000267 PARAMETER Experiment Name: At_Drought_P Parameter: Tissue Value: Whole Plant
  misc_feature: MA Experiment 20000267 PARAMETER Experiment Name: At_Drought_P Parameter: Treatment Value: Drought vs. No Drought
  misc_feature: MA Experiment ID: 20000436 Result: Up-regulated in Transcription
  misc_feature: MA Experiment 20000436 PARAMETER Experiment Name: At_Drought_P Parameter: Age (day) Value: 7
  misc_feature: MA Experiment 20000436 PARAMETER Experiment Name: At_Drought_P Parameter: Organism Value: A. thaliana
  misc_feature: MA Experiment 20000436 PARAMETER Experiment Name: At_Drought_P Parameter: Plant Line Value: WS
  misc_feature: MA Experiment 20000436 PARAMETER Experiment Name: At_Drought_P Parameter: Timepoint (hr) Value: 12
  misc_feature: MA Experiment 20000436 PARAMETER Experiment Name: At_Drought_P Parameter: Tissue Value: Whole Plant
  misc_feature: MA Experiment 20000436 PARAMETER Experiment Name: At_Drought_P Parameter: Treatment Value: Drought vs. No Drought
  misc_feature: MA Experiment ID: 20000437 Result: Up-regulated in Transcription
  misc_feature: MA Experiment 20000437 PARAMETER Experiment Name: At_Drought_P Parameter: Age (day) Value: 8
  misc_feature: MA Experiment 20000437 PARAMETER Experiment Name: At_Drought_P Parameter: Organism Value: A. thaliana
  misc_feature: MA Experiment 20000437 PARAMETER Experiment Name: At_Drought_P Parameter: Plant Line Value: WS
  misc_feature: MA Experiment 20000437 PARAMETER Experiment Name: At_Drought_P Parameter: Timepoint (hr) Value: 24
  misc_feature: MA Experiment 20000437 PARAMETER Experiment Name: At_Drought_P Parameter: Tissue Value: Whole Plant
  misc_feature: MA Experiment 20000437 PARAMETER Experiment Name: At_Drought_P Parameter: Treatment Value: Drought vs. No Drought
  misc_feature: MA Experiment ID: 20000438 Result: Up-regulated in Transcription
  misc_feature: MA Experiment 20000438 PARAMETER Experiment Name: At_Shoots__P Parameter: Age (day) Value: 14
  misc_feature: MA Experiment 20000438 PARAMETER Experiment Name: At_Shoots__P Parameter: Tissue Value: Shoots vs. Whole Plant
  misc_feature: MA Experiment ID: 20000439 Result: Down-regulated in Transcription
  misc_feature: MA Experiment 20000439 PARAMETER Experiment Name: At_Roots__P Parameter: Age (day) Value: 14 vs. 21
  misc_feature: MA Experiment 20000439 PARAMETER Experiment Name: At_Roots__P Parameter: Organism Value: A. thaliana
  misc_feature: MA Experiment 20000439 PARAMETER Experiment Name: At_Roots__P Parameter: Tissue Value: Roots vs. Whole Plant
  misc_feature: MA Experiment ID: 20000441 Result: Up-regulated in Transcription
  misc_feature: MA Experiment 20000441 PARAMETER Experiment Name: At_1uM_BR-BRZ__P Parameter: Tissue Value: Shoot Apices
  misc_feature: MA Experiment 20000441 PARAMETER Experiment Name: At_1uM_BR-BRZ__P Parameter: Treatment Value: 1uM BR vs. No Treatment
  misc_feature: MA Experiment ID: 20000443 Result: Up-regulated in Transcription
  misc_feature: MA Experiment 20000443 PARAMETER Experiment Name: At_1uM_BR-BRZ__P Parameter: Tissue Value: Shoot Apices
  misc_feature: MA Experiment 20000443 PARAMETER Experiment Name: At_1uM_BR-BRZ__P Parameter: Treatment Value: 1uM BRZ vs. No Treatment
  misc_feature: MA Experiment ID: 20000445 Result: Up-regulated in Transcription
  misc_feature: MA Experiment 20000445 PARAMETER Experiment Name: At_100uM_NAA__P Parameter: Age (day) Value: 14
  misc_feature: MA Experiment 20000445 PARAMETER Experiment Name: At_100uM_NAA__P Parameter: Organism Value: A. thaliana
  misc_feature: MA Experiment 20000445 PARAMETER Experiment Name: At_100uM_NAA__P Parameter: Plant Line Value: WS
  misc_feature: MA Experiment 20000445 PARAMETER Experiment Name: At_100uM_NAA__P Parameter: Timepoint (hr) Value: 6
  misc_feature: MA Experiment 20000445 PARAMETER Experiment Name: At_100uM_NAA__P Parameter: Tissue Value: Aerial
  misc_feature: MA Experiment 20000445 PARAMETER Experiment Name: At_100uM_NAA__P Parameter: Treatment Value: 100uM NAA vs. No Treatment
  misc_feature: MA Experiment ID: 20000452 Result: Down-regulated in Transcription
  misc_feature: MA Experiment 20000452 PARAMETER Experiment Name: At_CS6879_Shoots-Roots_P Parameter: Age (day) Value: 14
  misc_feature: MA Experiment 20000452 PARAMETER Experiment Name: At_CS6879_Shoots-Roots_P Parameter: Organism Value: A. thaliana
  misc_feature: MA Experiment 20000452 PARAMETER Experiment Name: At_CS6879_Shoots-Roots_P Parameter: Plant Line Value: CS6879 vs. WS
  misc_feature: MA Experiment 20000452 PARAMETER Experiment Name: At_CS6879_Shoots-Roots_P Parameter: Tissue Value: Shoots
  misc_feature: MA Experiment ID: 20000456 Result: Down-regulated in Transcription
  misc_feature: MA Experiment 20000456 PARAMETER Experiment Name: At_100uM_BA_P Parameter: Age (day) Value: 14
  misc_feature: MA Experiment 20000456 PARAMETER Experiment Name: At_100uM_BA_P Parameter: Organism Value: A. thaliana
  misc_feature: MA Experiment 20000456 PARAMETER Experiment Name: At_100uM_BA_P Parameter: Plant Line Value: WS
  misc_feature: MA Experiment 20000456 PARAMETER Experiment Name: At_100uM_BA_P Parameter: Timepoint (hr) Value: 6
  misc_feature: MA Experiment 20000456 PARAMETER Experiment Name: At_100uM_BA_P Parameter: Tissue Value: Aerial
  misc_feature: MA Experiment 20000456 PARAMETER Experiment Name: At_100uM_BA_P Parameter: Treatment Value: 100uM BA vs. No Treatment
  misc_feature: MA Experiment ID: 20000575 Result: Up-regulated in Transcription
  misc_feature: MA Experiment 20000575 PARAMETER Experiment Name: At_100uM_ABA_Mutants__P Parameter: Organism Value: A. thaliana
  misc_feature: MA Experiment 20000575 PARAMETER Experiment Name: At_100uM_ABA_Mutants__P Parameter: Plant Line Value: CS22
  misc_feature: MA Experiment 20000575 PARAMETER Experiment Name: At_100uM_ABA_Mutants__P Parameter: Timepoint (hr) Value: 6
  misc_feature: MA Experiment 20000575 PARAMETER Experiment Name: At_100uM_ABA_Mutants__P Parameter: Tissue Value: Whole Plant
  misc_feature: MA Experiment 20000575 PARAMETER Experiment Name: At_100uM_ABA_Mutants__P Parameter: Treatment Value: 1uM ABA vs. No Treatment
  misc_feature: MA Experiment ID: 20001247 Result: Up-regulated in Transcription
  misc_feature: MA Experiment 20001247 PARAMETER Experiment Name: At_Far-red-induction_P Parameter: Age (day) Value: 7
  misc_feature: MA Experiment 20001247 PARAMETER Experiment Name: At_Far-red-induction_P Parameter: Light Value: Far-red vs. White
  misc_feature: MA Experiment 20001247 PARAMETER Experiment Name: At_Far-red-induction_P Parameter: Organism Value: A. thaliana
  misc_feature: MA Experiment 20001247 PARAMETER Experiment Name: At_Far-red-induction_P Parameter: Plant Line Value: Columbia
  misc_feature: MA Experiment 20001247 PARAMETER Experiment Name: At_Far-red-induction_P Parameter: Timepoint (hr) Value: 1
  misc_feature: MA Experiment 20001247 PARAMETER Experiment Name: At_Far-red-induction_P Parameter: Tissue Value: Whole Plant
  misc_feature: MA Experiment ID: 20001248 Result: Up-regulated in Transcription
  misc_feature: MA Experiment 20001248 PARAMETER Experiment Name: At_Far-red-induction_P Parameter: Age (day) Value: 7
  misc_feature: MA Experiment 20001248 PARAMETER Experiment Name: At_Far-red-induction_P Parameter: Light Value: Far-red vs. White
  misc_feature: MA Experiment 20001248 PARAMETER Experiment Name: At_Far-red-induction_P Parameter: Organism Value: A. thaliana
  misc_feature: MA Experiment 20001248 PARAMETER Experiment Name: At_Far-red-induction_P Parameter: Plant Line Value: Columbia
  misc_feature: MA Experiment 20001248 PARAMETER Experiment Name: At_Far-red-induction_P Parameter: Timepoint (hr) Value: 4
  misc_feature: MA Experiment 20001248 PARAMETER Experiment Name: At_Far-red-induction_P Parameter: Tissue Value: Whole Plant
  misc_feature: MA Experiment ID: 20001450 Result: Up-regulated in Transcription
  misc_feature: MA Experiment 20001450 PARAMETER Experiment Name: At_Far-red-induction_P Parameter: Age (day) Value: 7
  misc_feature: MA Experiment 20001450 PARAMETER Experiment Name: At_Far-red-induction_P Parameter: Light Value: Far-red vs. White
  misc_feature: MA Experiment 20001450 PARAMETER Experiment Name: At_Far-red-induction_P Parameter: Organism Value: A. thaliana
  misc_feature: MA Experiment 20001450 PARAMETER Experiment Name: At_Far-red-induction_P Parameter: Plant Line Value: Columbia
  misc_feature: MA Experiment 20001450 PARAMETER Experiment Name: At_Far-red-induction_P Parameter: Timepoint (hr) Value: 8
  misc_feature: MA Experiment 20001450 PARAMETER Experiment Name: At_Far-red-induction_P Parameter: Tissue Value: Whole Plant
  misc_feature: MA Experiment ID: 20001451 Result: Up-regulated in Transcription
  misc_feature: MA Experiment 20001451 PARAMETER Experiment Name: At_Far-red-induction_P Parameter: Age (day) Value: 7
  misc_feature: MA Experiment 20001451 PARAMETER Experiment Name: At_Far-red-induction_P Parameter: Light Value: Far-red vs. White
  misc_feature: MA Experiment 20001451 PARAMETER Experiment Name: At_Far-red-induction_P Parameter: Organism Value: A. thaliana
  misc_feature: MA Experiment 20001451 PARAMETER Experiment Name: At_Far-red-induction_P Parameter: Plant Line Value: Columbia
  misc_feature: MA Experiment 20001451 PARAMETER Experiment Name: At_Far-red-induction_P Parameter: Timepoint (hr) Value: 24
  misc_feature: MA Experiment 20001451 PARAMETER Experiment Name: At_Far-red-induction_P Parameter: Tissue Value: Whole Plant
  misc_feature: MA Experiment ID: 20001555 Result: Down-regulated in Transcription
  misc_feature: MA Experiment 20001555 PARAMETER Experiment Name: At_Drought_Soil_Dry_P Parameter: Age (day) Value: 24
  misc_feature: MA Experiment 20001555 PARAMETER Experiment Name: At_Drought_Soil_Dry_P Parameter: Organism Value: A. thaliana
  misc_feature: MA Experiment 20001555 PARAMETER Experiment Name: At_Drought_Soil_Dry_P Parameter: Plant Line Value: WS
  misc_feature: MA Experiment 20001555 PARAMETER Experiment Name: At_Drought_Soil_Dry_P Parameter: Post Timepoint (hr) Value: None
  misc_feature: MA Experiment 20001555 PARAMETER Experiment Name: At_Drought_Soil_Dry_P Parameter: Post-Treatment Value: None
  misc_feature: MA Experiment 20001555 PARAMETER Experiment Name: At_Drought_Soil_Dry_P Parameter: Timepoint (day) Value: 10
  misc_feature: MA Experiment 20001555 PARAMETER Experiment Name: At_Drought_Soil_Dry_P Parameter: Treatment Value: Drought vs. No Drought
  misc_feature: MA Experiment ID: 20001556 Result: Down-regulated in Transcription
  misc_feature: MA Experiment 20001556 PARAMETER Experiment Name: At_Drought_Soil_Dry_P Parameter: Age (day) Value: 26
  misc_feature: MA Experiment 20001556 PARAMETER Experiment Name: At_Drought_Soil_Dry_P Parameter: Organism Value: A. thaliana
  misc_feature: MA Experiment 20001556 PARAMETER Experiment Name: At_Drought_Soil_Dry_P Parameter: Plant Line Value: WS
  misc_feature: MA Experiment 20001556 PARAMETER Experiment Name: At_Drought_Soil_Dry_P Parameter: Post Timepoint (hr) Value: None
  misc_feature: MA Experiment 20001556 PARAMETER Experiment Name: At_Drought_Soil_Dry_P Parameter: Post-Treatment Value: None
  misc_feature: MA Experiment 20001556 PARAMETER Experiment Name: At_Drought_Soil_Dry_P Parameter: Timepoint (day) Value: 12
  misc_feature: MA Experiment 20001556 PARAMETER Experiment Name: At_Drought_Soil_Dry_P Parameter: Treatment Value: Drought vs. No Drought
  misc_feature: MA Experiment ID: 20001557 Result: Down-regulated in Transcription
  misc_feature: MA Experiment 20001557 PARAMETER Experiment Name: At_Drought_Soil_Dry_P Parameter: Age (day) Value: 27
  misc_feature: MA Experiment 20001557 PARAMETER Experiment Name: At_Drought_Soil_Dry_P Parameter: Organism Value: A. thaliana
  misc_feature: MA Experiment 20001557 PARAMETER Experiment Name: At_Drought_Soil_Dry_P Parameter: Plant Line Value: WS
  misc_feature: MA Experiment 20001557 PARAMETER Experiment Name: At_Drought_Soil_Dry_P Parameter: Post Timepoint (hr) Value: 3
  misc_feature: MA Experiment 20001557 PARAMETER Experiment Name: At_Drought_Soil_Dry_P Parameter: Post-Treatment Value: Re-Water vs. No Drought
  misc_feature: MA Experiment 20001557 PARAMETER Experiment Name: At_Drought_Soil_Dry_P Parameter: Timepoint (day) Value: 13
  misc_feature: MA Experiment 20001557 PARAMETER Experiment Name: At_Drought_Soil_Dry_P Parameter: Treatment Value: Drought vs. No Drought
  misc_feature: MA Experiment ID: 20001558 Result: Down-regulated in Transcription
  misc_feature: MA Experiment 20001558 PARAMETER Experiment Name: At_Drought_Soil_Dry_P Parameter: Age (day) Value: 27
  misc_feature: MA Experiment 20001558 PARAMETER Experiment Name: At_Drought_Soil_Dry_P Parameter: Organism Value: A. thaliana
  misc_feature: MA Experiment 20001558 PARAMETER Experiment Name: At_Drought_Soil_Dry_P Parameter: Plant Line Value: WS
  misc_feature: MA Experiment 20001558 PARAMETER Experiment Name: At_Drought_Soil_Dry_P Parameter: Post Timepoint (hr) Value: 6
  misc_feature: MA Experiment 20001558 PARAMETER Experiment Name: At_Drought_Soil_Dry_P Parameter: Post-Treatment Value: Re-Water vs. No Drought
  misc_feature: MA Experiment 20001558 PARAMETER Experiment Name: At_Drought_Soil_Dry_P Parameter: Timepoint (day) Value: 13
  misc_feature: MA Experiment 20001558 PARAMETER Experiment Name: At_Drought_Soil_Dry_P Parameter: Treatment Value: Drought vs. No Drought
  misc_feature: MA Experiment ID: 20001560 Result: Down-regulated in Transcription
  misc_feature: MA Experiment 20001560 PARAMETER Experiment Name: At_Drought_Soil_Dry_P Parameter: Age (day) Value: 28
  misc_feature: MA Experiment 20001560 PARAMETER Experiment Name: At_Drought_Soil_Dry_P Parameter: Organism Value: A. thaliana
  misc_feature: MA Experiment 20001560 PARAMETER Experiment Name: At_Drought_Soil_Dry_P Parameter: Plant Line Value: WS
  misc_feature: MA Experiment 20001560 PARAMETER Experiment Name: At_Drought_Soil_Dry_P Parameter: Post Timepoint (hr) Value: None
  misc_feature: MA Experiment 20001560 PARAMETER Experiment Name: At_Drought_Soil_Dry_P Parameter: Post-Treatment Value: None
  misc_feature: MA Experiment 20001560 PARAMETER Experiment Name: At_Drought_Soil_Dry_P Parameter: Timepoint (day) Value: 14
  misc_feature: MA Experiment 20001560 PARAMETER Experiment Name: At_Drought_Soil_Dry_P Parameter: Treatment Value: Drought vs. No Drought
  misc_feature: MA Experiment ID: 20001769 Result: Up-regulated in Transcription
  misc_feature: MA Experiment 20001769 PARAMETER Experiment Name: At_Far-red-enriched-adult_P Parameter: Age (day) Value: 28
  misc_feature: MA Experiment 20001769 PARAMETER Experiment Name: At_Far-red-enriched-adult_P Parameter: Light Value: Far-red enriched vs. White
  misc_feature: MA Experiment 20001769 PARAMETER Experiment Name: At_Far-red-enriched-adult_P Parameter: Organism Value: A. thaliana
  misc_feature: MA Experiment 20001769 PARAMETER Experiment Name: At_Far-red-enriched-adult_P Parameter: Plant Line Value: Columbia
  misc_feature: MA Experiment 20001769 PARAMETER Experiment Name: At_Far-red-enriched-adult_P Parameter: Timepoint (hr) Value: 4
  misc_feature: MA Experiment 20001769 PARAMETER Experiment Name: At_Far-red-enriched-adult_P Parameter: Tissue Value: Aerial
  misc_feature: MA Experiment ID: 20001770 Result: Up-regulated in Transcription
  misc_feature: MA Experiment 20001770 PARAMETER Experiment Name: At_Far-red-enriched-adult_P Parameter: Age (day) Value: 28
  misc_feature: MA Experiment 20001770 PARAMETER Experiment Name: At_Far-red-enriched-adult_P Parameter: Light Value: Far-red enriched vs. White
  misc_feature: MA Experiment 20001770 PARAMETER Experiment Name: At_Far-red-enriched-adult_P Parameter: Organism Value: A. thaliana
  misc_feature: MA Experiment 20001770 PARAMETER Experiment Name: At_Far-red-enriched-adult_P Parameter: Plant Line Value: Columbia
  misc_feature: MA Experiment 20001770 PARAMETER Experiment Name: At_Far-red-enriched-adult_P Parameter: Timepoint (hr) Value: 8
  misc_feature: MA Experiment 20001770 PARAMETER Experiment Name: At_Far-red-enriched-adult_P Parameter: Tissue Value: Aerial
  misc_feature: MA Experiment ID: 20001771 Result: Up-regulated in Transcription
  misc_feature: MA Experiment 20001771 PARAMETER Experiment Name: At_Far-red-enriched-adult_P Parameter: Age (day) Value: 28
  misc_feature: MA Experiment 20001771 PARAMETER Experiment Name: At_Far-red-enriched-adult_P Parameter: Light Value: Far-red enriched vs. White
  misc_feature: MA Experiment 20001771 PARAMETER Experiment Name: At_Far-red-enriched-adult_P Parameter: Organism Value: A. thaliana
  misc_feature: MA Experiment 20001771 PARAMETER Experiment Name: At_Far-red-enriched-adult_P Parameter: Plant Line Value: Columbia
  misc_feature: MA Experiment 20001771 PARAMETER Experiment Name: At_Far-red-enriched-adult_P Parameter: Timepoint (hr) Value: 16
  misc_feature: MA Experiment 20001771 PARAMETER Experiment Name: At_Far-red-enriched-adult_P Parameter: Tissue Value: Aerial
  misc_feature: MA Experiment ID: 20001904 Result: Down-regulated in Transcription
  misc_feature: MA Experiment 20001904 PARAMETER Experiment Name: At_Drought_Reproduction_P Parameter: Age (day) Value: 37
  misc_feature: MA Experiment 20001904 PARAMETER Experiment Name: At_Drought_Reproduction_P Parameter: Organism Value: A. thaliana
  misc_feature: MA Experiment 20001904 PARAMETER Experiment Name: At_Drought_Reproduction_P Parameter: Plant Line Value: WS
  misc_feature: MA Experiment 20001904 PARAMETER Experiment Name: At_Drought_Reproduction_P Parameter: Timepoint (day) Value: 7
  misc_feature: MA Experiment 20001904 PARAMETER Experiment Name: At_Drought_Reproduction_P Parameter: Tissue Value: Rosettes
  misc_feature: MA Experiment 20001904 PARAMETER Experiment Name: At_Drought_Reproduction_P Parameter: Treatment Value: Drought vs. No Drought
  misc_feature: MA Experiment ID: 20001905 Result: Down-regulated in Transcription
  misc_feature: MA Experiment 20001905 PARAMETER Experiment Name: At_Drought_Reproduction_P Parameter: Age (day) Value: 40
  misc_feature: MA Experiment 20001905 PARAMETER Experiment Name: At_Drought_Reproduction_P Parameter: Organism Value: A. thaliana
  misc_feature: MA Experiment 20001905 PARAMETER Experiment Name: At_Drought_Reproduction_P Parameter: Plant Line Value: WS
  misc_feature: MA Experiment 20001905 PARAMETER Experiment Name: At_Drought_Reproduction_P Parameter: Timepoint (day) Value: 10
  misc_feature: MA Experiment 20001905 PARAMETER Experiment Name: At_Drought_Reproduction_P Parameter: Tissue Value: Rosettes
  misc_feature: MA Experiment 20001905 PARAMETER Experiment Name: At_Drought_Reproduction_P Parameter: Treatment Value: Drought vs. No Drought
atcccacacttatctcttcctatctctctctcattcaaacccaaataggaaacaaatacacaaaagtataataaaaagtctttctctcatctttcgccacgtagacatggacgtcgaacatcacaaatccggccacatcagtagaccaacggtggatattccaccgaggaagcttctttcctccgccaagtctccgtcgtcagtttcaagtccccttcgcgactataaagaacagaaagactattgttacgactctgactctgaggatccttacgctggagaccatttccggatgtacgaattcaagatccgacggtgcacgcgtagccgtagccatgactggaccgactgtcctttctctcatcccggtgaaaaggctcgtcgccgtgaccctcgccggtttcactacaccggagaagtatgccctgagtttagccgtcacggtgattgtagccgtggtgatgaatgcggtttcgctcacggggttttcgagtgttggcttcatccgagtcgttaccgtacggaagcttgtaaagacggtaagcattgtaagaggaaagtttgtttctttgctcattctccacgtcagctgagagttcttccaccgtccccggagaatcatatttccggtggttgcggtggatcaccgtcgtcatcccctgcatcggttttaagcaataaaaataatcgatgttgcttgttttgttcccattctccgacgagtactctcttgaatttatcacgatcaccttcatcgtctccgcctttgtctccagctgataaagccgatgcattttcacggctgagccgccgtcgcaccgccgtactaaacgaactgattagttctttagattccttaagtctcacggaagcacttgcagcttcttcatcgtctcccgttaccatgcccatttccacggcgacgatgatcgcttcatcgaatctaagcagcaaccaccaccaccaccgtcttccgccgtggcttgatgtcggagacagagatctccaattacaacagagtagtcctctacgatttgctctttcaccttcttcaactccaagttacctccatggccagcttcagccaccaccgtcgagcttctttggcgatgaattcacaccacgtggtggccggctaagcgatttctcggtggctgcagctgcggcggcccaagctagggataaaaatagctttgaagtcggttctagtggcgatcttgatctaggatgggtgaacgatcttttgacatgaacagtatgacatcaactgtgaactacttgagatctttcccgacgggaataattatacggcggcgccgcggcggaggtccgtcgtggtacattgtttattaaaaaagtatttacgattttttccacgagagctaattaagagtctgtagtactatgtcgtgctttaaaaatatatttttactgtattttttgttaaataagagagtccataacttctattgttatattgatctcttggaacttgtaatatctactacattgtgatcgaattcctatg

SEQ ID NO: 46233 - protein, 416 aa, Arabidopsis thaliana
  peptide (1)..(416): Ceres Seq. ID no. 12601700
  misc_feature (136)..(162): Pfam Name: Zinc finger C-x8-C-x5-C-x3-H type (and similar) Pfam Description: Zinc finger C-x8-C-x5-C-x3-H type (and similar)
  misc_feature (7)..(259): Homolog of NCBI NO: 20466590 NR Description: zinc finger transcription factor-like protein
  misc_feature (7)..(259): Homolog of NCBI NO: 15239917 NR Description: zinc finger transcription factor -like protein
  misc_feature (89)..(225): Homolog of NCBI NO: 15233491 NR Description: putative protein
  misc_feature (89)..(218): Homolog of NCBI NO: 21593538 NR Description: putative CCCH-type zinc finger protein
  misc_feature (89)..(218): Homolog of NCBI NO: 15225213 NR Description: putative CCCH-type zinc finger protein
  misc_feature (89)..(205): Homolog of NCBI NO: 15224852 NR Description: putative CCCH-type zinc finger protein
  misc_feature (68)..(415): Homolog of NCBI NO: 34906436 NR Description: putative zinc finger transcription factor
  misc_feature (76)..(416): Homolog of NCBI NO: 26449538 NR Description: unknown protein [Arabidopsis thaliana]
  misc_feature (76)..(416): Homolog of NCBI NO: 15219557 NR Description: hypothetical protein; protein id: At1g03790.1
  misc_feature (36)..(416): Homolog of NCBI NO: 15241451 NR Description: putative protein
SHTYLFLSLSHSNPNRKQIHKSIIKSLSLIFRHVDMDVEHHKSGHISRPTVDIPPRKLLSSAKSPSSVSSPLRDYKEQKDYCYDSDSEDPYAGDHFRMYEFKIRRCTRSRSHDWTDCPFSHPGEKARRRDPRRFHYTGEVCPEFSRHGDCSRGDECGFAHGVFECWLHPSRYRTEACKDGKHCKRKVCFFAHSPRQLRVLPPSPENHISGGCGGSPSSSPASVLSNKNNRCCLFCSHSPTSTLLNLSRSPSSSPPLSPADKADAFSRLSRRRTAVLNELISSLDSLSLTEALAASSSSPVTMPISTATMIASSNLSSNHHHHRLPPWLDVGDRDLQLQQSSPLRFALSPSSTPSYLHGQLQPPPSSFFGDEFTPRGGRLSDFSVAAAAAAQARDKNSFEVGSSGDLDLGWVNDLLT

SEQ ID NO: 46234 - protein, 381 aa, Arabidopsis thaliana
  peptide (1)..(381): Ceres Seq. ID no. 12601701
  misc_feature (101)..(127): Pfam Name: Zinc finger C-x8-C-x5-C-x3-H type (and similar) Pfam Description: Zinc finger C-x8-C-x5-C-x3-H type (and similar)
  misc_feature (1)..(224): Homolog of NCBI NO: 20466590 NR Description: zinc finger transcription factor-like protein
  misc_feature (1)..(224): Homolog of NCBI NO: 15239917 NR Description: zinc finger transcription factor -like protein
  misc_feature (54)..(190): Homolog of NCBI NO: 15233491 NR Description: putative protein
  misc_feature (54)..(183): Homolog of NCBI NO: 21593538 NR Description: putative CCCH-type zinc finger protein
  misc_feature (54)..(183): Homolog of NCBI NO: 15225213 NR Description: putative CCCH-type zinc finger protein
  misc_feature (54)..(170): Homolog of NCBI NO: 15224852 NR Description: putative CCCH-type zinc finger protein
  misc_feature (33)..(380): Homolog of NCBI NO: 34906436 NR Description: putative zinc finger transcription factor
  misc_feature (41)..(381): Homolog of NCBI NO: 26449538 NR Description: unknown protein [Arabidopsis thaliana]
  misc_feature (41)..(381): Homolog of NCBI NO: 15219557 NR Description: hypothetical protein; protein id: At1g03790.1
  misc_feature (1)..(381): Homolog of NCBI NO: 15241451 NR Description: putative protein
MDVEHHKSGHISRPTVDIPPRKLLSSAKSPSSVSSPLRDYKEQKDYCYDSDSEDPYAGDHFRMYEFKIRRCTRSRSHDWTDCPFSHPGEKARRRDPRRFHYTGEVCPEFSRHGDCSRGDECGFAHGVFECWLHPSRYRTEACKDGKHCKRKVCFFAHSPRQLRVLPPSPENHISGGCGGSPSSSPASVLSNKNNRCCLFCSHSPTSTLLNLSRSPSSSPPLSPADKADAFSRLSRRRTAVLNELISSLDSLSLTEALAASSSSPVTMPISTATMIASSNLSSNHHHHRLPPWLDVGDRDLQLQQSSPLRFALSPSSTPSYLHGQLQPPPSSFFGDEFTPRGGRLSDFSVAAAAAAQARDKNSFEVGSSGDLDLGWVNDLLT

SEQ ID NO: 46235 - protein, 319 aa, Arabidopsis thaliana
  peptide (1)..(319): Ceres Seq. ID no. 12601702
  misc_feature (39)..(65): Pfam Name: Zinc finger C-x8-C-x5-C-x3-H type (and similar) Pfam Description: Zinc finger C-x8-C-x5-C-x3-H type (and similar)
  misc_feature (1)..(162): Homolog of NCBI NO: 20466590 NR Description: zinc finger transcription factor-like protein
  misc_feature (1)..(162): Homolog of NCBI NO: 15239917 NR Description: zinc finger transcription factor -like protein
  misc_feature (1)..(128): Homolog of NCBI NO: 15233491 NR Description: putative protein
  misc_feature (1)..(121): Homolog of NCBI NO: 21593538 NR Description: putative CCCH-type zinc finger protein
  misc_feature (1)..(121): Homolog of NCBI NO: 15225213 NR Description: putative CCCH-type zinc finger protein
  misc_feature (1)..(108): Homolog of NCBI NO: 15224852 NR Description: putative CCCH-type zinc finger protein
  misc_feature (1)..(318): Homolog of NCBI NO: 34906436 NR Description: putative zinc finger transcription factor
  misc_feature (1)..(319): Homolog of NCBI NO: 26449538 NR Description: unknown protein [Arabidopsis thaliana]
  misc_feature (1)..(319): Homolog of NCBI NO: 15219557 NR Description: hypothetical protein; protein id: At1g03790.1
  misc_feature (1)..(319): Homolog of NCBI NO: 15241451 NR Description: putative protein
MYEFKIRRCTRSRSHDWTDCPFSHPGEKARRRDPRRFHYTGEVCPEFSRHGDCSRGDECGFAHGVFECWLHPSRYRTEACKDGKHCKRKVCFFAHSPRQLRVLPPSPENHISGGCGGSPSSSPASVLSNKNNRCCLFCSHSPTSTLLNLSRSPSSSPPLSPADKADAFSRLSRRRTAVLNELISSLDSLSLTEALAASSSSPVTMPISTATMIASSNLSSNHHHHRLPPWLDVGDRDLQLQQSSPLRFALSPSSTPSYLHGQLQPPPSSFFGDEFTPRGGRLSDFSVAAAAAAQARDKNSFEVGSSGDLDLGWVNDLLT

SEQ ID NO: 46236 - DNA, 2833 bp, Arabidopsis thaliana
  misc_feature (1)..(2833): Ceres Seq. ID no. 12575868
  misc_feature: MA Experiment ID: 20000180 Result: Down-regulated in Transcription
  misc_feature: MA Experiment 20000180 PARAMETER Experiment Name: At_Germinating_Seeds_P Parameter: Age (hr) Value: 24 vs. 0
  misc_feature: MA Experiment 20000180 PARAMETER Experiment Name: At_Germinating_Seeds_P Parameter: Tissue Value: Germinating Seeds
  misc_feature: MA Experiment ID: 20000286 Result: Up-regulated in Transcription
  misc_feature: MA Experiment 20000286 PARAMETER Experiment Name: At_Open_Flower_P Parameter: Age (day) Value: 21
  misc_feature: MA Experiment 20000286 PARAMETER Experiment Name: At_Open_Flower_P Parameter: Plant Line Value: WS
  misc_feature: MA Experiment 20000286 PARAMETER Experiment Name: At_Open_Flower_P Parameter: Tissue Value: Half Open vs. Whole Plant
  misc_feature: MA Experiment ID: 20000794 Result: Up-regulated in Transcription
  misc_feature: MA Experiment 20000794 PARAMETER Experiment Name: At_Petals_P Parameter: Age (day) Value: 23-25 days
  misc_feature: MA Experiment 20000794 PARAMETER Experiment Name: At_Petals_P Parameter: Plant Line Value: WS
  misc_feature: MA Experiment 20000794 PARAMETER Experiment Name: At_Petals_P Parameter: Tissue Value: Petals vs. Whole plant
gtttcttcatacgtttcgttcccaaaaaattgacacagaagagagaaaaccaaattaacaaaaaacaatttctcgcctctactcgcaaaaaccctaatttcatcatcttcctatctgattccaattatttcttctacaagtttccttcttcttataatccatcgtttcttccttctatcgcgtttcacaaagcttgtcgtttttctctccttgtgggttggttaggccaatttgtttcgattgagcgattgaatctacgagacgcaacaatctctttctgggttagggtttcttcacataaccttttgtggtttcttgttttgggcggagtttggtggtttctggaaccctagatagagaggagccttagggtggttaatattggcactggtgatttagatatagagaaagagatttgagagatatatgtgtaggtgttagggttttcattacttgtgaattgtggctgtggcattgaatagaggtgtttggggttttgtccctttggtaaaggatgagtgttctctagtgtgaagctaaattggtcttctaagccatctgtgtgagggatggaagtgtagaaggtgctgaaacaactcatttggattagggattggaattggattcgtcttgtggcctttaccgtggtagggatttagatggtagagaaagctagggtagattaaattttttgtaagaggagctttctctgttgttgttggtggggggtgaagaaggttagagagagtgtgtgttctttcttgtatctgatgaggtacagctttcctaatggacaaaggtgaacactctttagctccggaatggttgagaagttcagggcatgcttctggtggtgggagttcaaaccacctccttgtatcatcctcttctcattcagattctgcatctttacaatataatagcaggaataggaactctaggagcaaaagtgacgttgattcaattcattctccttttctggatcgatcttcttctactaattcaaggaggggctctagtaatggttctgcaaaacatgcatatagtagtttcaactttaataggagtcaaagggataaggaccgcagcagagacaaggatagggtaagctatgtggatccatgggaccttgacacttctatccctcttagaactatcttgactggtagggatccggatccattgagacgatcacattcaatggttacaaggaaacagggagaacacctgtctcgaggattaacagtgggcttgaataatggtggcagtagtaatagttacaacggaaatggactactttctggacctagcattgggaatagctttcagagaactgggtttgataaggattttccttctcttggagctgaagagaagcaaaatgggcaagatgttgtacgagtctcatctcctggtataagttcagttgttcagaacttgccagttggtaactcagctttgattggtggggaaggttggacgtctgctctggcagaggttcccaatgtcatcgagaaggcttgtactgggtcattaacgtctccaaaagctaatgctgttagcgcgggaactttaactggcccaagtggtcttaacatggctgaagcattggtgcaggctccagcaagaactcacacccctccccaaggatctgtgaagacacaacggctcgaggatttggcaatcaagcagtcaaggcaattgataccggttgtgccttcagcaccaaagggcttgagtctgaattcttctgataaatccaagacaaagcaagtggttcgaactggtgaaacttgccttgctccctcaagaaatgccctacaacagcccgctgtcctacttgggagtttccagtctaatcctagtggtcaaatcaaacctgagaagaagctgttggttctcaaaccggctagggaaaatggtgtcagtgctgttaaagaatctggaagcccaagtgctaatacaaacactcgagctgcctctagccagctgatgtccaatactcaatcaacccaatctgctcctgtgagaagtacaaacagcccaaaggagctcaagggagccagtgccttctccatgatatctggccaaacaatcgaaaagaaaccttccgctgctcaagctcagagcaggagtgcattttacagtgctctgaagcagaaacaaactgcatcaacaagcatcaccaccgatcctgttagctcttcaaccagtgcctcttcttctgttgaggtaaaactcaacagctcaaaggatcttatagctagtgacccttcaagttcacaggcaacaagtggcgtcgaagtgactgacagtgtccaggtagcttctcatactagtggctttgaagcaactgacactccagatgaggaagaggcacagttccttagatcactcggctgggttgaaaacaatggtgaagaatatctcacagaggaggagatagattcctttttggaacagtacaaggagctgaggccgttatttccggagagactatccatgatacatgaagcaagagaggatgtagcttaagactcctgaacccaactttacaaaactgaagaaagtactggtttttggaaagatagtttctaatttcttttttaatatatttttcttcttttggtctttttgttcctgagaaaagcttagctactactttggcaatgggagaggagaaaggcagggaggggtttttgtttgtttgttttgatgatttgcaaatagtgcaaataaagctgatgaggctttgagttgccatatgagtgtcctgccctcttcagactttgtagatctttctttggtctgaaaaaaaaatggctcagctctc

SEQ ID NO: 46237 - protein, 581 aa, Arabidopsis thaliana
  peptide (1)..(581): Ceres Seq. ID no. 12575869
  misc_feature (15)..(541): Homolog of NCBI NO: 15991793 NR Description: platelet binding protein GspB [Streptococcus
  misc_feature (220)..(554): Homolog of NCBI NO: 19113482 NR Description: hypothetical serine-rich secreted protein
  misc_feature (10)..(117): Homolog of NCBI NO: 19112670 NR Description: hypothetical serine-rich repeat protein
  misc_feature (380)..(531): Homolog of NCBI NO: 19112670 NR Description: hypothetical serine-rich repeat protein
  misc_feature (31)..(524): Homolog of NCBI NO: 15925644 NR Description: hypothetical protein [Staphylococcus aureus
  misc_feature (15)..(541): Homolog of NCBI NO: 8885520 NR Description: streptococcal hemagglutinin [Streptococcus
  misc_feature (20)..(561): Homolog of NCBI NO: 18072158 NR Description: serine-threonine rich antigen [Staphylococcus
  misc_feature (1)..(559): Homolog of NCBI NO: 38344828 NR Description: OSJNBa0064H22.9 [Oryza sativa (japonica
  misc_feature (1)..(573): Homolog of NCBI NO: 15236516 NR Description: hypothetical protein; protein id: At4g08510.1
  misc_feature (1)..(581): Homolog of NCBI NO: 15221236 NR Description: hypothetical protein
MDKGEHSLAPEWLRSSGHASGGGSSNHLLVSSSSHSDSASLQYNSRNRNSRSKSDVDSIHSPFLDRSSSTNSRRGSSNGSAKHAYSSFNFNRSQRDKDRSRDKDRVSYVDPWDLDTSIPLRTILTGRDPDPLRRSHSMVTRKQGEHLSRGLTVGLNNGGSSNSYNGNGLLSGPSIGNSFQRTGFDKDFPSLGAEEKQNGQDVVRVSSPGISSVVQNLPVGNSALIGGEGWTSALAEVPNVIEKACTGSLTSPKANAVSAGTLTGPSGLNMAEALVQAPARTHTPPQGSVKTQRLEDLAIKQSRQLIPVVPSAPKGLSLNSSDKSKTKQVVRTGETCLAPSRNALQQPAVLLGSFQSNPSGQIKPEKKLLVLKPARENGVSAVKESGSPSANTNTRAASSQLMSNTQSTQSAPVRSTNSPKELKGASAFSMISGQTIEKKPSAAQAQSRSAFYSALKQKQTASTSITTDPVSSSTSASSSVEVKLNSSKDLIASDPSSSQATSGVEVTDSVQVASHTSGFEATDTPDEEEAQFLRSLGWVENNGEEYLTEEEIDSFLEQYKELRPLFPERLSMIHEAREDVA

SEQ ID NO: 46238 - protein, 444 aa, Arabidopsis thaliana
  peptide (1)..(444): Ceres Seq. ID no. 12575870
  misc_feature (1)..(384): Homolog of NCBI NO: 15925644 NR Description: hypothetical protein [Staphylococcus aureus
  misc_feature (1)..(404): Homolog of NCBI NO: 15991793 NR Description: platelet binding protein GspB [Streptococcus
  misc_feature (83)..(417): Homolog of NCBI NO: 19113482 NR Description: hypothetical serine-rich secreted protein
  misc_feature (243)..(394): Homolog of NCBI NO: 19112670 NR Description: hypothetical serine-rich repeat protein
  misc_feature (1)..(387): Homolog of NCBI NO: 15925644 NR Description: hypothetical protein [Staphylococcus aureus
  misc_feature (1)..(404): Homolog of NCBI NO: 8885520 NR Description: streptococcal hemagglutinin [Streptococcus
  misc_feature (1)..(424): Homolog of NCBI NO: 18072158 NR Description: serine-threonine rich antigen [Staphylococcus
  misc_feature (1)..(422): Homolog of NCBI NO: 38344828 NR Description: OSJNBa0064H22.9 [Oryza sativa (japonica
  misc_feature (1)..(436): Homolog of NCBI NO: 15236516 NR Description: hypothetical protein; protein id: At4g08510.1
  misc_feature (1)..(444): Homolog of NCBI NO: 15221236 NR Description: hypothetical protein
MVTRKQGEHLSRGLTVGLNNGGSSNSYNGNGLLSGPSIGNSFQRTGFDKDFPSLGAEEKQNGQDVVRVSSPGISSVVQNLPVGNSALIGGEGWTSALAEVPNVIEKACTGSLTSPKANAVSAGTLTGPSGLNMAEALVQAPARTHTPPQGSVKTQRLEDLAIKQSRQLIPVVPSAPKGLSLNSSDKSKTKQVVRTGETCLAPSRNALQQPAVLLGSFQSNPSGQIKPEKKLLVLKPARENGVSAVKESGSPSANTNTRAASSQLMSNTQSTQSAPVRSTNSPKELKGASAFSMISGQTIEKKPSAAQAQSRSAFYSALKQKQTASTSITTDPVSSSTSASSSVEVKLNSSKDLIASDPSSSQATSGVEVTDSVQVASHTSGFEATDTPDEEEAQFLRSLGWVENNGEEYLTEEEIDSFLEQYKELRPLFPERLSMIHEAREDVA

SEQ ID NO: 46239 - protein, 312 aa, Arabidopsis thaliana
  peptide (1)..(312): Ceres Seq. ID no. 12575871
  misc_feature (1)..(252): Homolog of NCBI NO: 15925644 NR Description: hypothetical protein [Staphylococcus aureus
  misc_feature (1)..(272): Homolog of NCBI NO: 15991793 NR Description: platelet binding protein GspB [Streptococcus
  misc_feature (1)..(285): Homolog of NCBI NO: 19113482 NR Description: hypothetical serine-rich secreted protein
  misc_feature (111)..(262): Homolog of NCBI NO: 19112670 NR Description: hypothetical serine-rich repeat protein
  misc_feature (1)..(255): Homolog of NCBI NO: 15925644 NR Description: hypothetical protein [Staphylococcus aureus
  misc_feature (1)..(272): Homolog of NCBI NO: 8885520 NR Description: streptococcal hemagglutinin [Streptococcus
  misc_feature (1)..(292): Homolog of NCBI NO: 18072158 NR Description: serine-threonine rich antigen [Staphylococcus
  misc_feature (1)..(290): Homolog of NCBI NO: 38344828 NR Description: OSJNBa0064H22.9 [Oryza sativa (japonica
  misc_feature (1)..(304): Homolog of NCBI NO: 15236516 NR Description: hypothetical protein; protein id: At4g08510.1
  misc_feature (1)..(312): Homolog of NCBI NO: 15221236 NR Description: hypothetical protein
MAEALVQAPARTHTPPQGSVKTQRLEDLAIKQSRQLIPVVPSAPKGLSLNSSDKSKTKQVVRTGETCLAPSRNALQQPAVLLGSFQSNPSGQIKPEKKLLVLKPARENGVSAVKESGSPSANTNTRAASSQLMSNTQSTQSAPVRSTNSPKELKGASAFSMISGQTIEKKPSAAQAQSRSAFYSALKQKQTASTSITTDPVSSSTSASSSVEVKLNSSKDLIASDPSSSQATSGVEVTDSVQVASHTSGFEATDTPDEEEAQFLRSLGWVENNGEEYLTEEEIDSFLEQYKELRPLFPERLSMIHEAREDVA

SEQ ID NO: 46240 - DNA, 1404 bp, Arabidopsis thaliana
  misc_feature (1)..(1404): Ceres Seq. ID no. 12600840
  misc_feature: MA Experiment ID: 108433 Result: Down-regulated in Transcription
  misc_feature: MA Experiment 108433 PARAMETER Experiment Name: At_rhl_Mutant2_cDNA_P Parameter: Age (day) Value: 7
  misc_feature: MA Experiment 108433 PARAMETER Experiment Name: At_rhl_Mutant2_cDNA_P Parameter: Organism Value: A. thaliana
  misc_feature: MA Experiment 108433 PARAMETER Experiment Name: At_rhl_Mutant2_cDNA_P Parameter: Plant Line Value: rhl Mutant vs. wt landsburg
  misc_feature: MA Experiment 108433 PARAMETER Experiment Name: At_rhl_Mutant2_cDNA_P Parameter: Tissue Value: Roots
  misc_feature: MA Experiment ID: 108461 Result: Down-regulated in Transcription
  misc_feature: MA Experiment 108461 PARAMETER Experiment Name: At_Germinating_Seeds_cDNA_P Parameter: Age (day) Value: 1 vs. 0
  misc_feature: MA Experiment 108461 PARAMETER Experiment Name: At_Germinating_Seeds_cDNA_P Parameter: Tissue Value: Germinating Seeds
  misc_feature: MA Experiment ID: 108474 Result: Up-regulated in Transcription
  misc_feature: MA Experiment 108474 PARAMETER Experiment Name: At_Drought_Flowers_cDNA_P Parameter: Timepoint (hr) Value: null
  misc_feature: MA Experiment 108474 PARAMETER Experiment Name: At_Drought_Flowers_cDNA_P Parameter: Treatment Value: Drought vs. No Drought
  misc_feature: MA Experiment ID: 108489 Result: Up-regulated in Transcription
  misc_feature: MA Experiment ID: 20000179 Result: Down-regulated in Transcription
  misc_feature: MA Experiment 20000179 PARAMETER Experiment Name: At_Germinating_Seeds_P Parameter: Age (hr) Value: 6 vs. 0
  misc_feature: MA Experiment 20000179 PARAMETER Experiment Name: At_Germinating_Seeds_P Parameter: Tissue Value: Germinating Seeds
  misc_feature: MA Experiment ID: 20000224 Result: Down-regulated in Transcription
  misc_feature: MA Experiment ID: 20000234 Result: Down-regulated in Transcription
  misc_feature: MA Experiment 20000234 PARAMETER Experiment Name: At_Siliques_P Parameter: Age (day) Value: 21
  misc_feature: MA Experiment 20000234 PARAMETER Experiment Name: At_Siliques_P Parameter: Organism Value: A. thaliana
  misc_feature: MA Experiment 20000234 PARAMETER Experiment Name: At_Siliques_P Parameter: Plant Line Value: WS
  misc_feature: MA Experiment 20000234 PARAMETER Experiment Name: At_Siliques_P Parameter: Tissue Value: Less Than 5mm Siliques vs. Whole Plant
  misc_feature: MA Experiment ID: 20000264 Result: Down-regulated in Transcription
  misc_feature: MA Experiment 20000264 PARAMETER Experiment Name: At_Open_Flower_P Parameter: Age (day) Value: 21
  misc_feature: MA Experiment 20000264 PARAMETER Experiment Name: At_Open_Flower_P Parameter: Plant Line Value: WS
  misc_feature: MA Experiment 20000264 PARAMETER Experiment Name: At_Open_Flower_P Parameter: Tissue Value: Open Flower vs. Whole Plant
  misc_feature: MA Experiment ID: 20000265 Result: Down-regulated in Transcription
  misc_feature: MA Experiment 20000265 PARAMETER Experiment Name: At_Open_Flower_P Parameter: Age (day) Value: 21
  misc_feature: MA Experiment 20000265 PARAMETER Experiment Name: At_Open_Flower_P Parameter: Plant Line Value: WS
  misc_feature: MA Experiment 20000265 PARAMETER Experiment Name: At_Open_Flower_P Parameter: Tissue Value: Closed Flower vs. Whole Plant
  misc_feature: MA Experiment ID: 20000286 Result: Down-regulated in Transcription
  misc_feature: MA Experiment 20000286 PARAMETER Experiment Name: At_Open_Flower_P Parameter: Age (day) Value: 21
  misc_feature: MA Experiment 20000286 PARAMETER Experiment Name: At_Open_Flower_P Parameter: Plant Line Value: WS
  misc_feature: MA Experiment 20000286 PARAMETER Experiment Name: At_Open_Flower_P Parameter: Tissue Value: Half Open vs. Whole Plant
  misc_feature: MA Experiment ID: 20000709 Result: Up-regulated in Transcription
  misc_feature: MA Experiment 20000709 PARAMETER Experiment Name: At_15mM_NH4NO3_L-to-H_P Parameter: Age (hr) Value: 14
  misc_feature: MA Experiment 20000709 PARAMETER Experiment Name: At_15mM_NH4NO3_L-to-H_P Parameter: Organism Value: A. thaliana
  misc_feature: MA Experiment 20000709 PARAMETER Experiment Name: At_15mM_NH4NO3_L-to-H_P Parameter: Plant Line Value: WS
  misc_feature: MA Experiment 20000709 PARAMETER Experiment Name: At_15mM_NH4NO3_L-to-H_P Parameter: Timepoint (hr) Value: 4
  misc_feature: MA Experiment 20000709 PARAMETER Experiment Name: At_15mM_NH4NO3_L-to-H_P Parameter: Tissue Value: Aerial
  misc_feature: MA Experiment 20000709 PARAMETER Experiment Name: At_15mM_NH4NO3_L-to-H_P Parameter: Treatment Value: 15mM NH4NO3 vs. 30mM Mannitol
  misc_feature: MA Experiment ID: 20000794 Result: Down-regulated in Transcription
  misc_feature: MA Experiment 20000794 PARAMETER Experiment Name: At_Petals_P Parameter: Age (day) Value: 23-25 days
  misc_feature: MA Experiment 20000794 PARAMETER Experiment Name: At_Petals_P Parameter: Plant Line Value: WS
  misc_feature: MA Experiment 20000794 PARAMETER Experiment Name: At_Petals_P Parameter: Tissue Value: Petals vs. Whole plant
  misc_feature: MA Experiment ID: 20001450 Result: Up-regulated in Transcription
  misc_feature: MA Experiment 20001450 PARAMETER Experiment Name: At_Far-red-induction_P Parameter: Age (day) Value: 7
  misc_feature: MA Experiment 20001450 PARAMETER Experiment Name: At_Far-red-induction_P Parameter: Light Value: Far-red vs. White
  misc_feature: MA Experiment 20001450 PARAMETER Experiment Name: At_Far-red-induction_P Parameter: Organism Value: A. thaliana
  misc_feature: MA Experiment 20001450 PARAMETER Experiment Name: At_Far-red-induction_P Parameter: Plant Line Value: Columbia
  misc_feature: MA Experiment 20001450 PARAMETER Experiment Name: At_Far-red-induction_P Parameter: Timepoint (hr) Value: 8
  misc_feature: MA Experiment 20001450 PARAMETER Experiment Name: At_Far-red-induction_P Parameter: Tissue Value: Whole Plant
  misc_feature: MA Experiment ID: 20001457 Result: Up-regulated in Transcription
  misc_feature: MA Experiment 20001457 PARAMETER Experiment Name: At_50mM_NH4NO3_L-to-H_P Parameter: Age (day) Value: Undefined
  misc_feature: MA Experiment 20001457 PARAMETER Experiment Name: At_50mM_NH4NO3_L-to-H_P Parameter: Organism Value: Undefined
  misc_feature: MA Experiment 20001457 PARAMETER Experiment Name: At_50mM_NH4NO3_L-to-H_P Parameter: Plant Line Value: Undefined
  misc_feature: MA Experiment 20001457 PARAMETER Experiment Name: At_50mM_NH4NO3_L-to-H_P Parameter: Timepoint (hr) Value: 0.5
  misc_feature: MA Experiment 20001457 PARAMETER Experiment Name: At_50mM_NH4NO3_L-to-H_P Parameter: Tissue Value: Siliques
  misc_feature: MA Experiment 20001457 PARAMETER Experiment Name: At_50mM_NH4NO3_L-to-H_P Parameter: Treatment Value: 50mM NH4NO3 vs. 100mM Manitol
  misc_feature: MA Experiment ID: 20001458 Result: Up-regulated in Transcription
  misc_feature: MA Experiment 20001458 PARAMETER Experiment Name: At_50mM_NH4NO3_L-to-H_P Parameter: Age (day) Value: Undefined
  misc_feature: MA Experiment 20001458 PARAMETER Experiment Name: At_50mM_NH4NO3_L-to-H_P Parameter: Organism Value: Undefined
  misc_feature: MA Experiment 20001458 PARAMETER Experiment Name: At_50mM_NH4NO3_L-to-H_P Parameter: Plant Line Value: Undefined
  misc_feature: MA Experiment 20001458 PARAMETER Experiment Name: At_50mM_NH4NO3_L-to-H_P Parameter: Timepoint (hr) Value: 2
  misc_feature: MA Experiment 20001458 PARAMETER Experiment Name: At_50mM_NH4NO3_L-to-H_P Parameter: Tissue Value: Siliques
  misc_feature: MA Experiment 20001458 PARAMETER Experiment Name: At_50mM_NH4NO3_L-to-H_P Parameter: Treatment Value: 50mM NH4NO3 vs. 100mM Manitol
  misc_feature: MA Experiment ID: 20001459 Result: Up-regulated in Transcription
  misc_feature: MA Experiment 20001459 PARAMETER Experiment Name: At_50mM_NH4NO3_L-to-H_P Parameter: Age (day) Value: Undefined
  misc_feature: MA Experiment 20001459 PARAMETER Experiment Name: At_50mM_NH4NO3_L-to-H_P Parameter: Organism Value: Undefined
  misc_feature: MA Experiment 20001459 PARAMETER Experiment Name: At_50mM_NH4NO3_L-to-H_P Parameter: Plant Line Value: Undefined
  misc_feature: MA Experiment 20001459 PARAMETER Experiment Name: At_50mM_NH4NO3_L-to-H_P Parameter: Timepoint (hr) Value: 4
  misc_feature: MA Experiment 20001459 PARAMETER Experiment Name: At_50mM_NH4NO3_L-to-H_P Parameter: Tissue Value: Siliques
  misc_feature: MA Experiment 20001459 PARAMETER Experiment Name: At_50mM_NH4NO3_L-to-H_P Parameter: Treatment Value: 50mM NH4NO3 vs. 100mM Manitol
  misc_feature: MA Experiment ID: 20001756 Result: Up-regulated in Transcription
  misc_feature: MA Experiment 20001756 PARAMETER Experiment Name: At_50mM_NH4NO3_L-to-H_P Parameter: Timepoint (hr) Value: 4
  misc_feature: MA Experiment 20001756 PARAMETER Experiment Name: At_50mM_NH4NO3_L-to-H_P Parameter: Tissue Value: Leaf
  misc_feature: MA Experiment 20001756 PARAMETER Experiment Name: At_50mM_NH4NO3_L-to-H_P Parameter: Treatment Value: 50mM NH4NO3 vs 100mM Mannitol
  misc_feature: MA Experiment ID: 20001757 Result: Up-regulated in Transcription
  misc_feature: MA Experiment 20001757 PARAMETER Experiment Name: At_50mM_NH4NO3_L-to-H_P Parameter: Timepoint (hr) Value: 6
  misc_feature: MA Experiment 20001757 PARAMETER Experiment Name: At_50mM_NH4NO3_L-to-H_P Parameter: Tissue Value: Leaf
  misc_feature: MA Experiment 20001757 PARAMETER Experiment Name: At_50mM_NH4NO3_L-to-H_P Parameter: Treatment Value: 50mM NH4NO3 vs 100mM Mannitol
  misc_feature: MA Experiment ID: 20001759 Result: Up-regulated in Transcription
  misc_feature: MA Experiment 20001759 PARAMETER Experiment Name: At_50mM_NH4NO3_L-to-H_P Parameter: Timepoint (hr) Value: 1
  misc_feature: MA Experiment 20001759 PARAMETER Experiment Name: At_50mM_NH4NO3_L-to-H_P Parameter: Tissue Value: Siliques
  misc_feature: MA Experiment 20001759 PARAMETER Experiment Name: At_50mM_NH4NO3_L-to-H_P Parameter: Treatment Value: 50mM NH4NO3 vs 100mM Mannitol
gatcatcttcacgatattactattttacccttctcttccaaaagagaaaaaaacattttaactctcaaagattcgttttaggtacgcgacggcccgacctcgattctcttccacttctttcttgttccaaaaacctaaaccctctctctctctctctatctcttgaaaaatcaacaaaacattggaatcaatttctctatgntttgattctattttaaagatccaatattctttctccattgagattaagcttctttctcgctgtcgtctctctatagatcttggntcttagtcccttttgaataataatgatggtggagatggattacgctaagaaaatgcagaaatgtcatgaatacgttgaagcacttgaagaagaacagaagaaaatccaagtctttcaacgcgagcttcctttatgtttagagcttgtcactcaagcgatcgaagcttgtcggaaggagttatctggtacgacgacaactacatcagaacagtgttcagaacagaccacaagtgtttgtggtggtcctgtctttgaagagtttattcctatcaagaaaattagttccttgtgtgaagaagtacaagaagaagaagaagaagatggtgaacatgaatcttctccagaacttgtgaataataagaaatcagattggcttagatctgttcagctatggaatcattcaccggatctaaatccaaaagaggagcgtgtagctaagaaagcgaaagtggtggaggtgaaaccaaaaagcggtgcgtttcagccgtttcaaaagcgcgttttggagactgatttgcaaccggcggtgaaagtagctagttcgatgccagcgacgacgacgagttctacgacggaaacttgtggtggtaaaagtgatttgattaaagctggagatgaggaaagacggatagagcagcagcaatcgcagtcgcatacgcatagaaaacaaaggcggtgctggtcgccggaattacaccgtcgattcctaaacgcgcttcagcagcttggaggatctcatgttgctacaccaaagcaaatcagggatcacatgaaggttgatggattaacaaacgacgaagttaaaagccatttacagaaatatagacttcacacaagaaggccagcagcaacatccgtggcggcacaaagtaccgggaatcagcaacaaccacaatttgtggtggttggaggcatatgggtaccatcgtcacaagattttccaccaccgtccgatgtagccaacaagggtggtgtatatgctccggttgcggtggcgcaatctccaaaacgttcgttggagagaagttgcaactcgccggcggcatcttcctctacaaatacaaatacttctactcctgtgtcataatctgatagtcatactataatcatctcctgat

SEQ ID NO: 46241 - protein, 354 aa, Arabidopsis thaliana; identical to SEQ ID NO: 25269
  peptide (1)..(354): Ceres Seq. ID no. 12600841
  misc_feature (217)..(268): Pfam Name: Myb-like DNA-binding domain Pfam Description: Myb-like DNA-binding domain
  misc_feature (214)..(328): Homolog of NCBI NO: 18404660 NR Description: expressed protein
  misc_feature (9)..(146): Homolog of NCBI NO: 18404660 NR Description: expressed protein
  misc_feature (190)..(303): Homolog of NCBI NO: 18391499 NR Description: expressed protein
  misc_feature (5)..(140): Homolog of NCBI NO: 18391499 NR Description: expressed protein
  misc_feature (11)..(352): Homolog of NCBI NO: 21554044 NR Description: unknown [Arabidopsis thaliana]
  misc_feature (4)..(352): Homolog of NCBI NO: 25513742 NR Description: 38.7K hypothetical protein F2J7.21 - Arabidopsis
  misc_feature (4)..(352): Homolog of NCBI NO: 18395724 NR Description: expressed protein
  misc_feature (11)..(354): Homolog of NCBI NO: 21593572 NR Description: unknown [Arabidopsis thaliana]
  misc_feature (2)..(354): Homolog of NCBI NO: 25404762 NR Description: F24J5.9 [imported] - Arabidopsis thaliana
  misc_feature (1)..(354): Homolog of NCBI NO: 18409089 NR Description: expressed protein

SEQ ID NO: 46242 - protein, 353 aa, Arabidopsis thaliana; identical to SEQ ID NO: 25270
  peptide (1)..(353): Ceres Seq. ID no. 12600842
  misc_feature (216)..(267): Pfam Name: Myb-like DNA-binding domain Pfam Description: Myb-like DNA-binding domain
  misc_feature (213)..(327): Homolog of NCBI NO: 18404660 NR Description: expressed protein
  misc_feature (8)..(145): Homolog of NCBI NO: 18404660 NR Description: expressed protein
  misc_feature (189)..(302): Homolog of NCBI NO: 18391499 NR Description: expressed protein
  misc_feature (4)..(139): Homolog of NCBI NO: 18391499 NR Description: expressed protein
  misc_feature (10)..(351): Homolog of NCBI NO: 21554044 NR Description: unknown [Arabidopsis thaliana]
  misc_feature (3)..(351): Homolog of NCBI NO: 25513742 NR Description: 38.7K hypothetical protein F2J7.21 - Arabidopsis
  misc_feature (3)..(351): Homolog of NCBI NO: 18395724 NR Description: expressed protein
  misc_feature (10)..(353): Homolog of NCBI NO: 21593572 NR Description: unknown [Arabidopsis thaliana]
  misc_feature (1)..(353): Homolog of NCBI NO: 25404762 NR Description: F24J5.9 [imported] - Arabidopsis thaliana
  misc_feature (1)..(353): Homolog of NCBI NO: 18409089 NR Description: expressed protein

SEQ ID NO: 46243 - protein, 350 aa, Arabidopsis thaliana; identical to SEQ ID NO: 25271
  peptide (1)..(350): Ceres Seq. ID no. 12600843
  misc_feature (213)..(264): Pfam Name: Myb-like DNA-binding domain Pfam Description: Myb-like DNA-binding domain
  misc_feature (210)..(324): Homolog of NCBI NO: 18404660 NR Description: expressed protein
  misc_feature (5)..(142): Homolog of NCBI NO: 18404660 NR Description: expressed protein
  misc_feature (186)..(299): Homolog of NCBI NO: 18391499 NR Description: expressed protein
  misc_feature (1)..(136): Homolog of NCBI NO: 18391499 NR Description: expressed protein
  misc_feature (7)..(348): Homolog of NCBI NO: 21554044 NR Description: unknown [Arabidopsis thaliana]
  misc_feature (1)..(348): Homolog of NCBI NO: 25513742 NR Description: 38.7K hypothetical protein F2J7.21 - Arabidopsis
  misc_feature (1)..(348): Homolog of NCBI NO: 18395724 NR Description: expressed protein
  misc_feature (7)..(350): Homolog of NCBI NO: 21593572 NR Description: unknown [Arabidopsis thaliana]
  misc_feature (1)..(350): Homolog of NCBI NO: 25404762 NR Description: F24J5.9 [imported] - Arabidopsis thaliana
  misc_feature (1)..(350): Homolog of NCBI NO: 18409089 NR Description: expressed protein

SEQ ID NO: 46244 - DNA, 2532 bp, Arabidopsis thaliana; identical to SEQ ID NO: 45523
  misc_feature (1)..(2532): Ceres Seq. ID no. 13647179
  misc_feature: MA Experiment ID: 20000179 Result: Up-regulated in Transcription
  misc_feature: MA Experiment 20000179 PARAMETER Experiment Name: At_Germinating_Seeds_P Parameter: Age (hr) Value: 6 vs. 0
  misc_feature: MA Experiment 20000179 PARAMETER Experiment Name: At_Germinating_Seeds_P Parameter: Tissue Value: Germinating Seeds
  misc_feature: MA Experiment ID: 20000180 Result: Up-regulated in Transcription
  misc_feature: MA Experiment 20000180 PARAMETER Experiment Name: At_Germinating_Seeds_P Parameter: Age (hr) Value: 24 vs. 0
  misc_feature: MA Experiment 20000180 PARAMETER Experiment Name: At_Germinating_Seeds_P Parameter: Tissue Value: Germinating Seeds
  misc_feature: MA Experiment ID: 20000184 Result: Up-regulated in Transcription
  misc_feature: MA Experiment 20000184 PARAMETER Experiment Name: At_Shoots__P Parameter: Age (day) Value: 7
  misc_feature: MA Experiment 20000184 PARAMETER Experiment Name: At_Shoots__P Parameter: Tissue Value: Shoots vs. Whole Plant
  misc_feature: MA Experiment ID: 20000185 Result: Down-regulated in Transcription
  misc_feature: MA Experiment 20000185 PARAMETER Experiment Name: At_Roots__P Parameter: Age (day) Value: 7 vs. 21
  misc_feature: MA Experiment 20000185 PARAMETER Experiment Name: At_Roots__P Parameter: Organism Value: A. thaliana
  misc_feature: MA Experiment 20000185 PARAMETER Experiment Name: At_Roots__P Parameter: Tissue Value: Roots vs. Whole Plant
  misc_feature: MA Experiment ID: 20000438 Result: Up-regulated in Transcription
  misc_feature: MA Experiment 20000438 PARAMETER Experiment Name: At_Shoots__P Parameter: Age (day) Value: 14
  misc_feature: MA Experiment 20000438 PARAMETER Experiment Name: At_Shoots__P Parameter: Tissue Value: Shoots vs. Whole Plant
  misc_feature: MA Experiment ID: 20000439 Result: Down-regulated in Transcription
  misc_feature: MA Experiment 20000439 PARAMETER Experiment Name: At_Roots__P Parameter: Age (day) Value: 14 vs. 21
  misc_feature: MA Experiment 20000439 PARAMETER Experiment Name: At_Roots__P Parameter: Organism Value: A. thaliana
  misc_feature: MA Experiment 20000439 PARAMETER Experiment Name: At_Roots__P Parameter: Tissue Value: Roots vs. Whole Plant
  misc_feature: MA Experiment ID: 20000495 Result: Down-regulated in Transcription
  misc_feature: MA Experiment 20000495 PARAMETER Experiment Name: At_Guard_Cells_P Parameter: Harvest Date Value: 8/2/2002
  misc_feature: MA Experiment 20000495 PARAMETER Experiment Name: At_Guard_Cells_P Parameter: Organism Value: A. thaliana
  misc_feature: MA Experiment 20000495 PARAMETER Experiment Name: At_Guard_Cells_P Parameter: Tissue Value: Guard Cells vs. Leaves
  misc_feature: MA Experiment ID: 20001560 Result: Down-regulated in Transcription
  misc_feature: MA Experiment 20001560 PARAMETER Experiment Name: At_Drought_Soil_Dry_P Parameter: Age (day) Value: 28
  misc_feature: MA Experiment 20001560 PARAMETER Experiment Name: At_Drought_Soil_Dry_P Parameter: Organism Value: A. thaliana
  misc_feature: MA Experiment 20001560 PARAMETER Experiment Name: At_Drought_Soil_Dry_P Parameter: Plant Line Value: WS
  misc_feature: MA Experiment 20001560 PARAMETER Experiment Name: At_Drought_Soil_Dry_P Parameter: Post Timepoint (hr) Value: None
  misc_feature: MA Experiment 20001560 PARAMETER Experiment Name: At_Drought_Soil_Dry_P Parameter: Post-Treatment Value: None
  misc_feature: MA Experiment 20001560 PARAMETER Experiment Name: At_Drought_Soil_Dry_P Parameter: Timepoint (day) Value: 14
  misc_feature: MA Experiment 20001560 PARAMETER Experiment Name: At_Drought_Soil_Dry_P Parameter: Treatment Value: Drought vs. No Drought

SEQ ID NO: 46245 - protein, 716 aa, Arabidopsis thaliana; identical to SEQ ID NO: 45524
  peptide (1)..(716): Ceres Seq. ID no. 13647180
  misc_feature (490)..(705): Pfam Name: Peptidase family M41 Pfam Description: Peptidase family M41
  misc_feature (490)..(705): Pfam Name: Peptidase family M41 Pfam Description: Peptidase family M41
  misc_feature (132)..(705): Homolog of NCBI NO: 30684767 NR Description: FtsH protease (VAR2) [Arabidopsis thaliana]
  misc_feature (110)..(705): Homolog of NCBI NO: 33240371 NR Description: Cell division protein FtsH
  misc_feature (111)..(707): Homolog of NCBI NO: 33239707 NR Description: Cell division protein FtsH
  misc_feature (129)..(705): Homolog of NCBI NO: 23129565 NR Description: hypothetical protein [Nostoc punctiforme]
  misc_feature (129)..(712): Homolog of NCBI NO: 17228756 NR Description: cell division protein [Nostoc sp. PCC 7120]
  misc_feature (132)..(705): Homolog of NCBI NO: 30684767 NR Description: FtsH protease (VAR2) [Arabidopsis thaliana]
  misc_feature (111)..(707): Homolog of NCBI NO: 33239707 NR Description: Cell division protein FtsH
  misc_feature (129)..(712): Homolog of NCBI NO: 17228756 NR Description: cell division protein [Nostoc sp. PCC 7120]
  misc_feature (1)..(716): Homolog of NCBI NO: 18422193 NR Description: FtsH protease, putative [Arabidopsis thaliana]
  misc_feature (73)..(701): Homolog of NCBI NO: 2077957 NR Description: ATPase [Arabidopsis thaliana]
  misc_feature (3)..(716): Homolog of NCBI NO: 17865457 NR Description: Cell division protein ftsH homolog, chloroplast
  misc_feature (1)..(716): Homolog of NCBI NO: 17865463 NR Description: Cell division protein ftsH homolog, chloroplast
  misc_feature (36)..(694): Homolog of NCBI NO: 2492515 NR Description: Cell division protein ftsH homolog, chloroplast
  misc_feature (129)..(705): Homolog of NCBI NO: 23129565 NR Description: hypothetical protein [Nostoc punctiforme]
  misc_feature (110)..(705): Homolog of NCBI NO: 33240371 NR Description: Cell division protein FtsH
  misc_feature (36)..(694): Homolog of NCBI NO: 2492515 NR Description: Cell division protein ftsH homolog, chloroplast
  misc_feature (1)..(716): Homolog of NCBI NO: 17865463 NR Description: Cell division protein ftsH homolog, chloroplast
  misc_feature (3)..(716): Homolog of NCBI NO: 17865457 NR Description: Cell division protein ftsH homolog, chloroplast
  misc_feature (73)..(701): Homolog of NCBI NO: 2077957 NR Description: ATPase [Arabidopsis thaliana]
  misc_feature (1)..(716): Homolog of NCBI NO: 18422193 NR Description: FtsH protease, putative [Arabidopsis thaliana]

SEQ ID NO: 46246 - protein, 531 aa, Arabidopsis thaliana; identical to SEQ ID NO: 45525
  peptide (1)..(531): Ceres Seq. ID no. 13647181
  misc_feature (305)..(520): Pfam Name: Peptidase family M41 Pfam Description: Peptidase family M41
  misc_feature (305)..(520): Pfam Name: Peptidase family M41 Pfam Description: Peptidase family M41
  misc_feature (1)..(520): Homolog of NCBI NO: 30684767 NR Description: FtsH protease (VAR2) [Arabidopsis thaliana]
  misc_feature (1)..(520): Homolog of NCBI NO: 33240371 NR Description: Cell division protein FtsH
  misc_feature (1)..(522): Homolog of NCBI NO: 33239707 NR Description: Cell division protein FtsH
  misc_feature (1)..(520): Homolog of NCBI NO: 23129565 NR Description: hypothetical protein [Nostoc punctiforme]
  misc_feature (1)..(527): Homolog of NCBI NO: 17228756 NR Description: cell division protein [Nostoc sp. PCC 7120]
  misc_feature (1)..(520): Homolog of NCBI NO: 30684767 NR Description: FtsH protease (VAR2) [Arabidopsis thaliana]
  misc_feature (1)..(522): Homolog of NCBI NO: 33239707 NR Description: Cell division protein FtsH
  misc_feature (1)..(527): Homolog of NCBI NO: 17228756 NR Description: cell division protein [Nostoc sp. PCC 7120]
  misc_feature (1)..(531): Homolog of NCBI NO: 18422193 NR Description: FtsH protease, putative [Arabidopsis thaliana]
  misc_feature (1)..(516): Homolog of NCBI NO: 2077957 NR Description: ATPase [Arabidopsis thaliana]
  misc_feature (1)..(531): Homolog of NCBI NO: 17865457 NR Description: Cell division protein ftsH homolog, chloroplast
  misc_feature (1)..(531): Homolog of NCBI NO: 17865463 NR Description: Cell division protein ftsH homolog, chloroplast
  misc_feature (1)..(509): Homolog of NCBI NO: 2492515 NR Description: Cell division protein ftsH homolog, chloroplast
  misc_feature (1)..(520): Homolog of NCBI NO: 23129565 NR Description: hypothetical protein [Nostoc punctiforme]
  misc_feature (1)..(520): Homolog of NCBI NO: 33240371 NR Description: Cell division protein FtsH
  misc_feature (1)..(509): Homolog of NCBI NO: 2492515 NR Description: Cell division protein ftsH homolog, chloroplast
  misc_feature (1)..(531): Homolog of NCBI NO: 17865463 NR Description: Cell division protein ftsH homolog, chloroplast
  misc_feature (1)..(531): Homolog of NCBI NO: 17865457 NR Description: Cell division protein ftsH homolog, chloroplast
  misc_feature (1)..(516): Homolog of NCBI NO: 2077957 NR Description: ATPase [Arabidopsis thaliana]
  misc_feature (1)..(531): Homolog of NCBI NO: 18422193 NR Description: FtsH protease, putative [Arabidopsis thaliana]

SEQ ID NO: 46247 - protein, 475 aa, Arabidopsis thaliana; identical to SEQ ID NO: 45526
  peptide (1)..(475): Ceres Seq. ID no. 13647182
  misc_feature (249)..(464): Pfam Name: Peptidase family M41 Pfam Description: Peptidase family M41
  misc_feature (249)..(464): Pfam Name: Peptidase family M41 Pfam Description: Peptidase family M41
  misc_feature (1)..(464): Homolog of NCBI NO: 30684767 NR Description: FtsH protease (VAR2) [Arabidopsis thaliana]
  misc_feature (1)..(464): Homolog of NCBI NO: 33240371 NR Description: Cell division protein FtsH
  misc_feature (1)..(466): Homolog of NCBI NO: 33239707 NR Description: Cell division protein FtsH
  misc_feature (1)..(464): Homolog of NCBI NO: 23129565 NR Description: hypothetical protein [Nostoc punctiforme]
  misc_feature (1)..(471): Homolog of NCBI NO: 17228756 NR Description: cell division protein [Nostoc sp. PCC 7120]
  misc_feature (1)..(464): Homolog of NCBI NO: 30684767 NR Description: FtsH protease (VAR2) [Arabidopsis thaliana]
  misc_feature (1)..(466): Homolog of NCBI NO: 33239707 NR Description: Cell division protein FtsH
  misc_feature (1)..(471): Homolog of NCBI NO: 17228756 NR Description: cell division protein [Nostoc sp. PCC 7120]
  misc_feature (1)..(475): Homolog of NCBI NO: 18422193 NR Description: FtsH protease, putative [Arabidopsis thaliana]
  misc_feature (1)..(460): Homolog of NCBI NO: 2077957 NR Description: ATPase [Arabidopsis thaliana]
  misc_feature (1)..(475): Homolog of NCBI NO: 17865457 NR Description: Cell division protein ftsH homolog, chloroplast
  misc_feature (1)..(475): Homolog of NCBI NO: 17865463 NR Description: Cell division protein ftsH homolog, chloroplast
  misc_feature (1)..(453): Homolog of NCBI NO: 2492515 NR Description: Cell division protein ftsH homolog, chloroplast
  misc_feature (1)..(464): Homolog of NCBI NO: 23129565 NR Description: hypothetical protein [Nostoc punctiforme]
  misc_feature (1)..(464): Homolog of NCBI NO: 33240371 NR Description: Cell division protein FtsH
  misc_feature (1)..(453): Homolog of NCBI NO: 2492515 NR Description: Cell division protein ftsH homolog, chloroplast
  misc_feature (1)..(475): Homolog of NCBI NO: 17865463 NR Description: Cell division protein ftsH homolog, chloroplast
  misc_feature (1)..(475): Homolog of NCBI NO: 17865457 NR Description: Cell division protein ftsH homolog, chloroplast
  misc_feature (1)..(460): Homolog of NCBI NO: 2077957 NR Description: ATPase [Arabidopsis thaliana]
  misc_feature (1)..(475): Homolog of NCBI NO: 18422193 NR Description: FtsH protease, putative [Arabidopsis thaliana]

SEQ ID NO: 46248 - DNA, 1379 bp, Arabidopsis thaliana
  misc_feature (1)..(1379): Ceres Seq. ID no. 13579157
  misc_feature: MA Experiment ID: 20000180 Result: Up-regulated in Transcription
  misc_feature: MA Experiment 20000180 PARAMETER Experiment Name: At_Germinating_Seeds_P Parameter: Age (hr) Value: 24 vs. 0
  misc_feature: MA Experiment 20000180 PARAMETER Experiment Name: At_Germinating_Seeds_P Parameter: Tissue Value: Germinating Seeds
  misc_feature: MA Experiment ID: 20000184 Result: Up-regulated in Transcription
  misc_feature: MA Experiment 20000184 PARAMETER Experiment Name: At_Shoots__P Parameter: Age (day) Value: 7
  misc_feature: MA Experiment 20000184 PARAMETER Experiment Name: At_Shoots__P Parameter: Tissue Value: Shoots vs. Whole Plant
  misc_feature: MA Experiment ID: 20000185 Result: Up-regulated in Transcription
  misc_feature: MA Experiment 20000185 PARAMETER Experiment Name: At_Roots__P Parameter: Age (day) Value: 7 vs. 21
  misc_feature: MA Experiment 20000185 PARAMETER Experiment Name: At_Roots__P Parameter: Organism Value: A. thaliana
  misc_feature: MA Experiment 20000185 PARAMETER Experiment Name: At_Roots__P Parameter: Tissue Value: Roots vs. Whole Plant
  misc_feature: MA Experiment ID: 20000438 Result: Up-regulated in Transcription
  misc_feature: MA Experiment 20000438 PARAMETER Experiment Name: At_Shoots__P Parameter: Age (day) Value: 14
  misc_feature: MA Experiment 20000438 PARAMETER Experiment Name: At_Shoots__P Parameter: Tissue Value: Shoots vs. Whole Plant
  misc_feature: MA Experiment ID: 20000439 Result: Up-regulated in Transcription
  misc_feature: MA Experiment 20000439 PARAMETER Experiment Name: At_Roots__P Parameter: Age (day) Value: 14 vs. 21
  misc_feature: MA Experiment 20000439 PARAMETER Experiment Name: At_Roots__P Parameter: Organism Value: A. thaliana
  misc_feature: MA Experiment 20000439 PARAMETER Experiment Name: At_Roots__P Parameter: Tissue Value: Roots vs. Whole Plant
  misc_feature: MA Experiment ID: 20000460 Result: Down-regulated in Transcription
  misc_feature: MA Experiment 20000460 PARAMETER Experiment Name: At_10percent_PEG_P Parameter: Age (day) Value: 12
  misc_feature: MA Experiment 20000460 PARAMETER Experiment Name: At_10percent_PEG_P Parameter: Organism Value: A. thaliana
  misc_feature: MA Experiment 20000460 PARAMETER Experiment Name: At_10percent_PEG_P Parameter: Plant Line Value: WS
  misc_feature: MA Experiment 20000460 PARAMETER Experiment Name: At_10percent_PEG_P Parameter: Timepoint (day) Value: 12
  misc_feature: MA Experiment 20000460 PARAMETER Experiment Name: At_10percent_PEG_P Parameter: Tissue Value: Whole Plant
  misc_feature: MA Experiment 20000460 PARAMETER Experiment Name: At_10percent_PEG_P Parameter: Treatment Value: 10percent PEG vs. No Treatment
  misc_feature: MA Experiment ID: 20000495 Result: Up-regulated in Transcription
  misc_feature: MA Experiment 20000495 PARAMETER Experiment Name: At_Guard_Cells_P Parameter: Harvest Date Value: 8/2/2002
  misc_feature: MA Experiment 20000495 PARAMETER Experiment Name: At_Guard_Cells_P Parameter: Organism Value: A. thaliana
  misc_feature: MA Experiment 20000495 PARAMETER Experiment Name: At_Guard_Cells_P Parameter: Tissue Value: Guard Cells vs. Leaves
  misc_feature: MA Experiment ID: 20001247 Result: Down-regulated in Transcription
  misc_feature: MA Experiment 20001247 PARAMETER Experiment Name: At_Far-red-induction_P Parameter: Age (day) Value: 7
  misc_feature: MA Experiment 20001247 PARAMETER Experiment Name: At_Far-red-induction_P Parameter: Light Value: Far-red vs. White
  misc_feature: MA Experiment 20001247 PARAMETER Experiment Name: At_Far-red-induction_P Parameter: Organism Value: A. thaliana
  misc_feature: MA Experiment 20001247 PARAMETER Experiment Name: At_Far-red-induction_P Parameter: Plant Line Value: Columbia
  misc_feature: MA Experiment 20001247 PARAMETER Experiment Name: At_Far-red-induction_P Parameter: Timepoint (hr) Value: 1
  misc_feature: MA Experiment 20001247 PARAMETER Experiment Name: At_Far-red-induction_P Parameter: Tissue Value: Whole Plant
  misc_feature: MA Experiment ID: 20001248 Result: Down-regulated in Transcription
  misc_feature: MA Experiment 20001248 PARAMETER Experiment Name: At_Far-red-induction_P Parameter: Age (day) Value: 7
  misc_feature: MA Experiment 20001248 PARAMETER Experiment Name: At_Far-red-induction_P Parameter: Light Value: Far-red vs. White
  misc_feature: MA Experiment 20001248 PARAMETER Experiment Name: At_Far-red-induction_P Parameter: Organism Value: A. thaliana
  misc_feature: MA Experiment 20001248 PARAMETER Experiment Name: At_Far-red-induction_P Parameter: Plant Line Value: Columbia
  misc_feature: MA Experiment 20001248 PARAMETER Experiment Name: At_Far-red-induction_P Parameter: Timepoint (hr) Value: 4
  misc_feature: MA Experiment 20001248 PARAMETER Experiment Name: At_Far-red-induction_P Parameter: Tissue Value: Whole Plant
acattctcgactttgctatttcattgagcttgaataaccaattttaagacgccattgctaaaacatgaaagctctatcatcttcttctccaatattaggtgctagccagccggcgacggcgactgcgcttatcgcgcgatctggtcgttctgaatggcagagctcctgcgctattctaacaagcaaggttatttctcaagaagaatctgaatccttacctgtgcctccagtttccggcggagttgatcatctcaacggccataacagcgccgccgcacgagttccaggaatgaatcttgttccgattgagaaatctgatagcaatccgttggttccacagcatcgtcataatccactgaaaccccttagcatgacggatctctcgccggctccgatgcacggatctaatctacgcgtcgcttatcaaggtgttcccggtgcttactctgaagcagccgctggtaaagcttatcctaattgtcaagctataccttgcgatcaatttgaggttgcgtttcaagcggtggagctttggatcgcagatcgtgctgttttaccggtggagaactctctcggcggttctatccaccgtaattacgatctcctcctccgtcaccgtcttcatatagtcggcgaagttcaactccctgttcatcactgtttactggctcttcccggcgttcgtaaagagtttctcacacgtgtgatctcacaccctcaaggtctcgctcagtgtgagcacacgctcacaaagctcggacttaatgtcgcacgtgaggcagttgatgacaccgcaggagccgctgagttcatcgcctctaacaacctccgcgacacagccgctatcgcgagtgcacgcgccgccgagatatacgggttggagattttggaagatgggattcaggacgacgtgagtaacgtgacgcgcttcgtgatgctggcgcgtgagccaatcatacctagaacagatagaccgttcaagactagcattgtctttgcgcacgagaaaggaaccagcgtgcttttcaaggtgctctctgctttcgccttcagagacattagcttgacgaagatcgaatcgaggccgaatcacaaccgtccgatcagggtcgtggatgatgccaatgtcgggacggcgaagcattttgagtacatgttttatgttgacttcgaggcctcgatggcggaggcgcgtgctcagaacgcgcttgccgaggttcaggagtttacatcgttcttgcgggtgcttgggagttatcccatggatatgactccttggtcaccaacatcatcaacttcatcgtaaccatactatagtctatacacacatgaaaatgtaaattttggagaagataacaaagttttatatttactgatcc

SEQ ID NO: 46249 - protein, 413 aa, Arabidopsis thaliana
  peptide (1)..(413): Ceres Seq. ID no. 13579158
  misc_feature (118)..(297): Pfam Name: Prephenate dehydratase Pfam Description: Prephenate dehydratase
  misc_feature (118)..(297): Pfam Name: Prephenate dehydratase Pfam Description: Prephenate dehydratase
  misc_feature (99)..(402): Homolog of NCBI NO: 15221096 NR Description: prephenate dehydratase family [Arabidopsis
  misc_feature (67)..(403): Homolog of NCBI NO: 21537054 NR Description: putative P-protein: chorismate mutase, prephenate
  misc_feature (67)..(403): Homolog of NCBI NO: 15231489 NR Description: prephenate dehydratase family [Arabidopsis
  misc_feature (81)..(403): Homolog of NCBI NO: 34394031 NR Description: putative prephenate dehydratase
  misc_feature (57)..(410): Homolog of NCBI NO: 15242928 NR Description: prephenate dehydratase family [Arabidopsis
  misc_feature (99)..(402): Homolog of NCBI NO: 15221096 NR Description: prephenate dehydratase family [Arabidopsis
  misc_feature (67)..(403): Homolog of NCBI NO: 15231489 NR Description: prephenate dehydratase family [Arabidopsis
  misc_feature (57)..(410): Homolog of NCBI NO: 15242928 NR Description: prephenate dehydratase family [Arabidopsis
  misc_feature (1)..(413): Homolog of NCBI NO: 18390869 NR Description: prephenate dehydratase family [Arabidopsis
  misc_feature (26)..(413): Homolog of NCBI NO: 15226259 NR Description: prephenate dehydratase family [Arabidopsis
  misc_feature (26)..(413): Homolog of NCBI NO: 21593283 NR Description: putative chorismate mutase/prephenate dehydratase
  misc_feature (27)..(412): Homolog of NCBI NO: 38347597 NR Description: OSJNBa0042I15.10 [Oryza sativa (japonica
  misc_feature (28)..(410): Homolog of NCBI NO: 15230489 NR Description: prephenate dehydratase family [Arabidopsis
  misc_feature (81)..(403): Homolog of NCBI NO: 34394031 NR Description: putative prephenate dehydratase
  misc_feature (67)..(403): Homolog of NCBI NO: 21537054 NR Description: putative P-protein: chorismate mutase, prephenate
  misc_feature (28)..(410): Homolog of NCBI NO: 15230489 NR Description: prephenate dehydratase family [Arabidopsis
  misc_feature (27)..(412): Homolog of NCBI NO: 38347597 NR Description: OSJNBa0042I15.10 [Oryza sativa (japonica
  misc_feature (26)..(413): Homolog of NCBI NO: 21593283 NR Description: putative chorismate mutase/prephenate dehydratase
  misc_feature (26)..(413): Homolog of NCBI NO: 15226259 NR Description: prephenate dehydratase family [Arabidopsis
  misc_feature (1)..(413): Homolog of NCBI NO: 18390869 NR Description: prephenate dehydratase family [Arabidopsis
MKALSSSSPILGASQPATATALIARSGRSEWQSSCAILTSKVISQEESESLPVPPVSGGVDHLNGHNSAAARVPGMNLVPIEKSDSNPLVPQHRHNPLKPLSMTDLSPAPMHGSNLRVAYQGVPGAYSEAAAGKAYPNCQAIPCDQFEVAFQAVELWIADRAVLPVENSLGGSIHRNYDLLLRHRLHIVGEVQLPVHHCLLALPGVRKEFLTRVISHPQGLAQCEHTLTKLGLNVAREAVDDTAGAAEFIASNNLRDTAAIASARAAEIYGLEILEDGIQDDVSNVTRFVMLAREPIIPRTDRPFKTSIVFAHEKGTSVLFKVLSAFAFRDISLTKIESRPNHNRPIRVVDDANVGTAKHFEYMFYVDFEASMAEARAQNALAEVQEFTSFLRVLGSYPMDMTPWSPTSSTSS

SEQ ID NO: 46250 - protein, 338 aa, Arabidopsis thaliana
  peptide (1)..(338): Ceres Seq. ID no. 13579159
  misc_feature (43)..(222): Pfam Name: Prephenate dehydratase Pfam Description: Prephenate dehydratase
  misc_feature (43)..(222): Pfam Name: Prephenate dehydratase Pfam Description: Prephenate dehydratase
  misc_feature (24)..(327): Homolog of NCBI NO: 15221096 NR Description: prephenate dehydratase family [Arabidopsis
  misc_feature (1)..(328): Homolog of NCBI NO: 21537054 NR Description: putative P-protein: chorismate mutase, prephenate
  misc_feature (1)..(328): Homolog of NCBI NO: 15231489 NR Description: prephenate dehydratase family [Arabidopsis
  misc_feature (6)..(328): Homolog of NCBI NO: 34394031 NR Description: putative prephenate dehydratase
  misc_feature (1)..(335): Homolog of NCBI NO: 15242928 NR Description: prephenate dehydratase family [Arabidopsis
  misc_feature (24)..(327): Homolog of NCBI NO: 15221096 NR Description: prephenate dehydratase family [Arabidopsis
  misc_feature (1)..(328): Homolog of NCBI NO: 15231489 NR Description: prephenate dehydratase family [Arabidopsis
  misc_feature (1)..(335): Homolog of NCBI NO: 15242928 NR Description: prephenate dehydratase family [Arabidopsis
  misc_feature (1)..(338): Homolog of NCBI NO: 18390869 NR Description: prephenate dehydratase family [Arabidopsis
  misc_feature (1)..(338): Homolog of NCBI NO: 15226259 NR Description: prephenate dehydratase family [Arabidopsis
  misc_feature (1)..(338): Homolog of NCBI NO: 21593283 NR Description: putative chorismate mutase/prephenate dehydratase
  misc_feature (1)..(337): Homolog of NCBI NO: 38347597 NR Description: OSJNBa0042I15.10 [Oryza sativa (japonica
  misc_feature (1)..(335): Homolog of NCBI NO: 15230489 NR Description: prephenate dehydratase family [Arabidopsis
  misc_feature (6)..(328): Homolog of NCBI NO: 34394031 NR Description: putative prephenate dehydratase
  misc_feature (1)..(328): Homolog of NCBI NO: 21537054 NR Description: putative P-protein: chorismate mutase, prephenate
  misc_feature (1)..(335): Homolog of NCBI NO: 15230489 NR Description: prephenate dehydratase family [Arabidopsis
  misc_feature (1)..(337): Homolog of NCBI NO: 38347597 NR Description: OSJNBa0042I15.10 [Oryza sativa (japonica
  misc_feature (1)..(338): Homolog of NCBI NO: 21593283 NR Description: putative chorismate mutase/prephenate dehydratase
  misc_feature (1)..(338): Homolog of NCBI NO: 15226259 NR Description: prephenate dehydratase family [Arabidopsis
  misc_feature (1)..(338): Homolog of NCBI NO: 18390869 NR Description: prephenate dehydratase family [Arabidopsis
MNLVPIEKSDSNPLVPQHRHNPLKPLSMTDLSPAPMHGSNLRVAYQGVPGAYSEAAAGKAYPNCQAIPCDQFEVAFQAVELWIADRAVLPVENSLGGSIHRNYDLLLRHRLHIVGEVQLPVHHCLLALPGVRKEFLTRVISHPQGLAQCEHTLTKLGLNVAREAVDDTAGAAEFIASNNLRDTAAIASARAAEIYGLEILEDGIQDDVSNVTRFVMLAREPIIPRTDRPFKTSIVFAHEKGTSVLFKVLSAFAFRDISLTKIESRPNHNRPIRVVDDANVGTAKHFEYMFYVDFEASMAEARAQNALAEVQEFTSFLRVLGSYPMDMTPWSPTSSTSS

SEQ ID NO: 46251 - protein, 311 aa, Arabidopsis thaliana
  peptide (1)..(311): Ceres Seq. ID no. 13579160
  misc_feature (16)..(195): Pfam Name: Prephenate dehydratase Pfam Description: Prephenate dehydratase
  misc_feature (16)..(195): Pfam Name: Prephenate dehydratase Pfam Description: Prephenate dehydratase
  misc_feature (1)..(300): Homolog of NCBI NO: 15221096 NR Description: prephenate dehydratase family [Arabidopsis
  misc_feature (1)..(301): Homolog of NCBI NO: 21537054 NR Description: putative P-protein: chorismate mutase, prephenate
  misc_feature (1)..(301): Homolog of NCBI NO: 15231489 NR Description: prephenate dehydratase family [Arabidopsis
  misc_feature (1)..(301): Homolog of NCBI NO: 34394031 NR Description: putative prephenate dehydratase
  misc_feature (1)..(308): Homolog of NCBI NO: 15242928 NR Description: prephenate dehydratase family [Arabidopsis
  misc_feature (1)..(300): Homolog of NCBI NO: 15221096 NR Description: prephenate dehydratase family [Arabidopsis
  misc_feature (1)..(301): Homolog of NCBI NO: 15231489 NR Description: prephenate dehydratase family [Arabidopsis
  misc_feature (1)..(308): Homolog of NCBI NO: 15242928 NR Description: prephenate dehydratase family [Arabidopsis
  misc_feature (1)..(311): Homolog of NCBI NO: 18390869 NR Description: prephenate dehydratase family [Arabidopsis
  misc_feature (1)..(311): Homolog of NCBI NO: 15226259 NR Description: prephenate dehydratase family [Arabidopsis
  misc_feature (1)..(311): Homolog of NCBI NO: 21593283 NR Description: putative chorismate mutase/prephenate dehydratase
  misc_feature (1)..(310): Homolog of NCBI NO: 38347597 NR Description: OSJNBa0042I15.10 [Oryza sativa (japonica
  misc_feature (1)..(308): Homolog of NCBI NO: 15230489 NR Description: prephenate dehydratase family [Arabidopsis
  misc_feature (1)..(301): Homolog of NCBI NO: 34394031 NR Description: putative prephenate dehydratase
  misc_feature (1)..(301): Homolog of NCBI NO: 21537054 NR Description: putative P-protein: chorismate mutase, prephenate
  misc_feature (1)..(308): Homolog of NCBI NO: 15230489 NR Description: prephenate dehydratase family [Arabidopsis
  misc_feature (1)..(310): Homolog of NCBI NO: 38347597 NR Description: OSJNBa0042I15.10 [Oryza sativa (japonica
  misc_feature (1)..(311): Homolog of NCBI NO: 21593283 NR Description: putative chorismate mutase/prephenate dehydratase
  misc_feature (1)..(311): Homolog of NCBI NO: 15226259 NR Description: prephenate dehydratase family [Arabidopsis
  misc_feature (1)..(311): Homolog of NCBI NO: 18390869 NR Description: prephenate dehydratase family [Arabidopsis
MTDLSPAPMHGSNLRVAYQGVPGAYSEAAAGKAYPNCQAIPCDQFEVAFQAVELWIADRAVLPVENSLGGSIHRNYDLLLRHRLHIVGEVQLPVHHCLLALPGVRKEFLTRVISHPQGLAQCEHTLTKLGLNVAREAVDDTAGAAEFIASNNLRDTAAIASARAAEIYGLEILEDGIQDDVSNVTRFVMLAREPIIPRTDRPFKTSIVFAHEKGTSVLFKVLSAFAFRDISLTKIESRPNHNRPIRVVDDANVGTAKHFEYMFYVDFEASMAEARAQNALAEVQEFTSFLRVLGSYPMDMTPWSPTSSTSS

SEQ ID NO: 46252 - DNA, 1993 bp, Arabidopsis thaliana
  misc_feature (1)..(1993): Ceres Seq. ID no. 15168615
  misc_feature: MA Experiment ID: 108573 Result: Up-regulated in Transcription
  misc_feature: MA Experiment 108573 PARAMETER Experiment Name: At_Drought_cDNA_P Parameter: Timepoint (hr) Value: 6
  misc_feature: MA Experiment 108573 PARAMETER Experiment Name: At_Drought_cDNA_P Parameter: Tissue Value: Aerial
  misc_feature: MA Experiment 108573 PARAMETER Experiment Name: At_Drought_cDNA_P Parameter: Treatment Value: Drought vs. No Drought
  misc_feature: MA Experiment ID: 108585 Result: Up-regulated in Transcription
  misc_feature: MA Experiment 108585 PARAMETER Experiment Name: At_5mM_NaNP_cDNA_P Parameter: Timepoint (hr) Value: 6
  misc_feature: MA Experiment 108585 PARAMETER Experiment Name: At_5mM_NaNP_cDNA_P Parameter: Tissue Value: Aerial
  misc_feature: MA Experiment 108585 PARAMETER Experiment Name: At_5mM_NaNP_cDNA_P Parameter: Treatment Value: null
  misc_feature: MA Experiment ID: 20000179 Result: Down-regulated in Transcription
  misc_feature: MA Experiment 20000179 PARAMETER Experiment Name: At_Germinating_Seeds_P Parameter: Age (hr) Value: 6 vs. 0
  misc_feature: MA Experiment 20000179 PARAMETER Experiment Name: At_Germinating_Seeds_P Parameter: Tissue Value: Germinating Seeds
  misc_feature: MA Experiment ID: 20000180 Result: Down-regulated in Transcription
  misc_feature: MA Experiment 20000180 PARAMETER Experiment Name: At_Germinating_Seeds_P Parameter: Age (hr) Value: 24 vs. 0
  misc_feature: MA Experiment 20000180 PARAMETER Experiment Name: At_Germinating_Seeds_P Parameter: Tissue Value: Germinating Seeds
  misc_feature: MA Experiment ID: 20001247 Result: Up-regulated in Transcription
  misc_feature: MA Experiment 20001247 PARAMETER Experiment Name: At_Far-red-induction_P Parameter: Age (day) Value: 7
  misc_feature: MA Experiment 20001247 PARAMETER Experiment Name: At_Far-red-induction_P Parameter: Light Value: Far-red vs. White
  misc_feature: MA Experiment 20001247 PARAMETER Experiment Name: At_Far-red-induction_P Parameter: Organism Value: A. thaliana
  misc_feature: MA Experiment 20001247 PARAMETER Experiment Name: At_Far-red-induction_P Parameter: Plant Line Value: Columbia
  misc_feature: MA Experiment 20001247 PARAMETER Experiment Name: At_Far-red-induction_P Parameter: Timepoint (hr) Value: 1
  misc_feature: MA Experiment 20001247 PARAMETER Experiment Name: At_Far-red-induction_P Parameter: Tissue Value: Whole Plant
ggagacgacggtggcgatcgaaaccctgtgccctaatttaaacggaaacttggttcgccgccgttctgcgtcgcccggcggcggaaatgtgcgcttggggcgatgcgtttaattctcaccgtcatgtgctcattcattccttacctttattcatcttctcctcaccgtccttgctcttccccaatctctcgtcctcctcctcgaatccgtccttgtcgtctcagtcgtttcgccaccgcattagtcgctacctccgctcttcttctcgcttccgtcgcttggctttctctcgtcttctcaccaaccacttcccgttgttggcatcttcttaaagattgggaagacaatcatctctggaacaaacggtaccatcatccaattgtaactcctcctccgccgccgccgtcgccgccgtctcttccagctcttccgttattcgatcatgaatttagaaatcgtagtctctcagagattgataaacttgatctgtctatgaatcacttgatgtttggtattgctggatcttcacagctttgggaacgtcgtaaggaacttgtgagattatggtggaaaccttctcagatgcgtggacatgtctggcttgaagagcaagtttctcctgaggaaggtgatgattctcttcctcctataattgtctctgaagacagctctcgttttcgttacactaatcctactggtcatccttctggacttcgaatctctcgtattgctatggagtcttttcgtctctctctccctaatgttcggtggtttgttcttggtgatgatgatactatcttcaatgttcataatcttcttgctgtgttaagcaagtatgatccttcggagatggtttatattggaaacccctcggagagccactctgctaactcttactttagtcataacatggcttttggaggcggtggcattgccattagctaccctttagcggaagctctctcccggattcacgacgattgtctcgatagatacccgaagctatacggtagtgatgatcgtctccacgcctgcatcactgaactcggagttcctttgtccagagagcctggctttcaccagtgggatattaagggaaatgctcatggtctcttgtcctctcatcctattgcaccatttgtctcaattcatcacgttgaagctgttaatcctctctatccgggattatctacattagatagtttgaaactcttgacaagagctatgagtttggatcctaggagtgttttgcagcgatcgatctgctatgatcatactcacaaactgacatttgcgatatctcttggttatgttgtacaagttttcccaagtattctcctaccacgggatcttgagcgagctgaactttctttctctgcttggaacgggataagtcaacccagtgagtttgatcttgacataaagcttccaatttcgtctctctgtaagaagcctatcctcttcttcttgaaagaggttggccaagaaggtaatgctacacttggaacgtactcaagatccttggtaaaggatgatttgaagacgaagcttctatgttttccacgctctctacctctgcacaaagtggataaaatccaggtctcagggtttcctctgagtaaaaattggcacttggcgccgagacggttgtgttgcagagcaaccccaactactactaacgagcctctcagattaacagttgggcagtgtggaagataattttgggttccacgattagttctcaatgaacacttatggtgaatactggatctctctaagcatgttgtttcagctctatcctgtacttgtacataggtaagatccagaaccttgactgttgtctgacctagaatgctaatatgcccaaaattgaatttgtcactcttttgtttgttccatgttccactttctttttttgtacatctgagatttcacgaactcaacatttcctgttgagaaacgagtgtaatgtgtacaacaacaaatctttacc

SEQ ID NO: 46253 - protein, 538 aa, Arabidopsis thaliana
  peptide (1)..(538): Ceres Seq. ID no. 15168616
  misc_feature (262)..(519): Pfam Name: Protein of unknown function, DUF604 Pfam Description: Protein of unknown function, DUF604
  misc_feature (124)..(238): Homolog of NCBI NO: 7485555 NR Description: hypothetical protein F16G20.190 - Arabidopsis
  misc_feature (246)..(471): Homolog of NCBI NO: 7485555 NR Description: hypothetical protein F16G20.190 - Arabidopsis
  misc_feature (130)..(194): Homolog of NCBI NO: 15223021 NR Description: fringe-related protein [Arabidopsis thaliana]
  misc_feature (184)..(516): Homolog of NCBI NO: 15223021 NR Description: fringe-related protein [Arabidopsis thaliana]
  misc_feature (98)..(536): Homolog of NCBI NO: 37536418 NR Description: hypothetical protein [Oryza sativa (japonica
  misc_feature (44)..(536): Homolog of NCBI NO: 15238082 NR Description: fringe-related protein [Arabidopsis thaliana]
  misc_feature (124)..(536): Homolog of NCBI NO: 15529153 NR Description: AT4g23490/F16G20_190 [Arabidopsis thaliana]
  misc_feature (124)..(536): Homolog of NCBI NO: 18416156 NR Description: fringe-related protein [Arabidopsis thaliana]
  misc_feature (129)..(511): Homolog of NCBI NO: 37536074 NR Description: hypothetical protein [Oryza sativa (japonica
  misc_feature (1)..(538): Homolog of NCBI NO: 15217473 NR Description: fringe-related protein [Arabidopsis thaliana]
MRLILTVMCSFIPYLYSSSPHRPCSSPISRPPPRIRPCRLSRFATALVATSALLLASVAWLSLVFSPTTSRCWHLLKDWEDNHLWNKRYHHPIVTPPPPPPSPPSLPALPLFDHEFRNRSLSEIDKLDLSMNHLMFGIAGSSQLWERRKELVRLWWKPSQMRGHVWLEEQVSPEEGDDSLPPIIVSEDSSRFRYTNPTGHPSGLRISRIAMESFRLSLPNVRWFVLGDDDTIFNVHNLLAVLSKYDPSEMVYIGNPSESHSANSYFSHNMAFGGGGIAISYPLAEALSRIHDDCLDRYPKLYGSDDRLHACITELGVPLSREPGFHQWDIKGNAHGLLSSHPIAPFVSIHHVEAVNPLYPGLSTLDSLKLLTRAMSLDPRSVLQRSICYDHTHKLTFAISLGYVVQVFPSILLPRDLERAELSFSAWNGISQPSEFDLDIKLPISSLCKKPILFFLKEVGQEGNATLGTYSRSLVKDDLKTKLLCFPRSLPLHKVDKIQVSGFPLSKNWHLAPRRLCCRATPTTTNEPLRLTVGQCGR

SEQ ID NO: 46254 - protein, 531 aa, Arabidopsis thaliana
  peptide (1)..(531): Ceres Seq. ID no. 15168617
  misc_feature (255)..(512): Pfam Name: Protein of unknown function, DUF604 Pfam Description: Protein of unknown function, DUF604
  misc_feature (117)..(231): Homolog of NCBI NO: 7485555 NR Description: hypothetical protein F16G20.190 - Arabidopsis
  misc_feature (239)..(464): Homolog of NCBI NO: 7485555 NR Description: hypothetical protein F16G20.190 - Arabidopsis
  misc_feature (123)..(187): Homolog of NCBI NO: 15223021 NR Description: fringe-related protein [Arabidopsis thaliana]
  misc_feature (177)..(509): Homolog of NCBI NO: 15223021 NR Description: fringe-related protein [Arabidopsis thaliana]
  misc_feature (91)..(529): Homolog of NCBI NO: 37536418 NR Description: hypothetical protein [Oryza sativa (japonica
  misc_feature (37)..(529): Homolog of NCBI NO: 15238082 NR Description: fringe-related protein [Arabidopsis thaliana]
  misc_feature (117)..(529): Homolog of NCBI NO: 15529153 NR Description: AT4g23490/F16G20_190 [Arabidopsis thaliana]
  misc_feature (117)..(529): Homolog of NCBI NO: 18416156 NR Description: fringe-related protein [Arabidopsis thaliana]
  misc_feature (122)..(504): Homolog of NCBI NO: 37536074 NR Description: hypothetical protein [Oryza sativa (japonica
  misc_feature (1)..(531): Homolog of NCBI NO: 15217473 NR Description: fringe-related protein [Arabidopsis thaliana]
MCSFIPYLYSSSPHRPCSSPISRPPPRIRPCRLSRFATALVATSALLLASVAWLSLVFSPTTSRCWHLLKDWEDNHLWNKRYHHPIVTPPPPPPSPPSLPALPLFDHEFRNRSLSEIDKLDLSMNHLMFGIAGSSQLWERRKELVRLWWKPSQMRGHVWLEEQVSPEEGDDSLPPIIVSEDSSRFRYTNPTGHPSGLRISRIAMESFRLSLPNVRWFVLGDDDTIFNVHNLLAVLSKYDPSEMVYIGNPSESHSANSYFSHNMAFGGGGIAISYPLAEALSRIHDDCLDRYPKLYGSDDRLHACITELGVPLSREPGFHQWDIKGNAHGLLSSHPIAPFVSIHHVEAVNPLYPGLSTLDSLKLLTRAMSLDPRSVLQRSICYDHTHKLTFAISLGYVVQVFPSILLPRDLERAELSFSAWNGISQPSEFDLDIKLPISSLCKKPILFFLKEVGQEGNATLGTYSRSLVKDDLKTKLLCFPRSLPLHKVDKIQVSGFPLSKNWHLAPRRLCCRATPTTTNEPLRLTVGQCGR

SEQ ID NO: 46255 - protein, 408 aa, Arabidopsis thaliana
  peptide (1)..(408): Ceres Seq. ID no. 15168618
  misc_feature (132)..(389): Pfam Name: Protein of unknown function, DUF604 Pfam Description: Protein of unknown function, DUF604
  misc_feature (1)..(108): Homolog of NCBI NO: 7485555 NR Description: hypothetical protein F16G20.190 - Arabidopsis
  misc_feature (116)..(341): Homolog of NCBI NO: 7485555 NR Description: hypothetical protein F16G20.190 - Arabidopsis
  misc_feature (1)..(64): Homolog of NCBI NO: 15223021 NR Description: fringe-related protein [Arabidopsis thaliana]
  misc_feature (54)..(386): Homolog of NCBI NO: 15223021 NR Description: fringe-related protein [Arabidopsis thaliana]
  misc_feature (1)..(406): Homolog of NCBI NO: 37536418 NR Description: hypothetical protein [Oryza sativa (japonica
  misc_feature (1)..(406): Homolog of NCBI NO: 15238082 NR Description: fringe-related protein [Arabidopsis thaliana]
  misc_feature (1)..(406): Homolog of NCBI NO: 15529153 NR Description: AT4g23490/F16G20_190 [Arabidopsis thaliana]
  misc_feature (1)..(406): Homolog of NCBI NO: 18416156 NR Description: fringe-related protein [Arabidopsis thaliana]
  misc_feature (1)..(381): Homolog of NCBI NO: 37536074 NR Description: hypothetical protein [Oryza sativa (japonica
  misc_feature (1)..(408): Homolog of NCBI NO: 15217473 NR Description: fringe-related protein [Arabidopsis thaliana]
MNHLMFGIAGSSQLWERRKELVRLWWKPSQMRGHVWLEEQVSPEEGDDSLPPIIVSEDSSRFRYTNPTGHPSGLRISRIAMESFRLSLPNVRWFVLGDDDTIFNVHNLLAVLSKYDPSEMVYIGNPSESHSANSYFSHNMAFGGGGIAISYPLAEALSRIHDDCLDRYPKLYGSDDRLHACITELGVPLSREPGFHQWDIKGNAHGLLSSHPIAPFVSIHHVEAVNPLYPGLSTLDSLKLLTRAMSLDPRSVLQRSICYDHTHKLTFAISLGYVVQVFPSILLPRDLERAELSFSAWNGISQPSEFDLDIKLPISSLCKKPILFFLKEVGQEGNATLGTYSRSLVKDDLKTKLLCFPRSLPLHKVDKIQVSGFPLSKNWHLAPRRLCCRATPTTTNEPLRLTVGQCGR

SEQ ID NO: 46256 - DNA, 2042 bp, Arabidopsis thaliana
  misc_feature (1)..(2042): Ceres Seq. ID no. 15168607
  misc_feature: MA Experiment ID: 108435 Result: Down-regulated in Transcription
  misc_feature: MA Experiment 108435 PARAMETER Experiment Name: At_stm_Mutants_cDNA_P Parameter: Plant Line Value: wt Landsburg vs stm
  misc_feature: MA Experiment 108435 PARAMETER Experiment Name: At_stm_Mutants_cDNA_P Parameter: Tissue Value: Shoot Apical Meristem Region
  misc_feature: MA Experiment ID: 108461 Result: Up-regulated in Transcription
  misc_feature: MA Experiment 108461 PARAMETER Experiment Name: At_Germinating_Seeds_cDNA_P Parameter: Age (day) Value: 1 vs. 0
  misc_feature: MA Experiment 108461 PARAMETER Experiment Name: At_Germinating_Seeds_cDNA_P Parameter: Tissue Value: Germinating Seeds
  misc_feature: MA Experiment ID: 108462 Result: Up-regulated in Transcription
  misc_feature: MA Experiment 108462 PARAMETER Experiment Name: At_Germinating_Seeds_cDNA_P Parameter: Age (day) Value: 2 vs. 0
  misc_feature: MA Experiment 108462 PARAMETER Experiment Name: At_Germinating_Seeds_cDNA_P Parameter: Tissue Value: Germinating Seeds
  misc_feature: MA Experiment ID: 108463 Result: Up-regulated in Transcription
  misc_feature: MA Experiment 108463 PARAMETER Experiment Name: At_Germinating_Seeds_cDNA_P Parameter: Age (day) Value: 3 vs. 0
  misc_feature: MA Experiment 108463 PARAMETER Experiment Name: At_Germinating_Seeds_cDNA_P Parameter: Tissue Value: Germinating Seeds
  misc_feature: MA Experiment ID: 108464 Result: Up-regulated in Transcription
  misc_feature: MA Experiment 108464 PARAMETER Experiment Name: At_Germinating_Seeds_cDNA_P Parameter: Age (day) Value: 4 vs. 0
  misc_feature: MA Experiment 108464 PARAMETER Experiment Name: At_Germinating_Seeds_cDNA_P Parameter: Tissue Value: Germinating Seeds
  misc_feature: MA Experiment ID: 108488 Result: Up-regulated in Transcription
  misc_feature: MA Experiment ID: 108577 Result: Up-regulated in Transcription
  misc_feature: MA Experiment 108577 PARAMETER Experiment Name: At_42deg_Heat_cDNA_P Parameter: Temperature (deg C) Value: 42 vs. 22
  misc_feature: MA Experiment 108577 PARAMETER Experiment Name: At_42deg_Heat_cDNA_P Parameter: Timepoint (hr) Value: 6
  misc_feature: MA Experiment 108577 PARAMETER Experiment Name: At_42deg_Heat_cDNA_P Parameter: Tissue Value: Aerial
  misc_feature: MA Experiment ID: 108594 Result: Down-regulated in Transcription
  misc_feature: MA Experiment 108594 PARAMETER Experiment Name: At_Ler-rhl_Root_cDNA_P Parameter: Plant Line Value: null
  misc_feature: MA Experiment ID: 20000088 Result: Down-regulated in Transcription
  misc_feature: MA Experiment 20000088 PARAMETER Experiment Name: At_100uM_ABA_Mutants_cDNA_P Parameter: Plant Line Value: Landsberg
  misc_feature: MA Experiment 20000088 PARAMETER Experiment Name: At_100uM_ABA_Mutants_cDNA_P Parameter: Timepoint (hr) Value: 6
  misc_feature: MA Experiment 20000088 PARAMETER Experiment Name: At_100uM_ABA_Mutants_cDNA_P Parameter: Tissue Value: Aerial
  misc_feature: MA Experiment 20000088 PARAMETER Experiment Name: At_100uM_ABA_Mutants_cDNA_P Parameter: Treatment Value: 100uM ABA vs. No Treatment
  misc_feature: MA Experiment ID: 20000113 Result: Up-regulated in Transcription
  misc_feature: MA Experiment 20000113 PARAMETER Experiment Name: At_42deg_Heat_cDNA_P Parameter: Temperature (deg C) Value: 42 vs. 22
  misc_feature: MA Experiment 20000113 PARAMETER Experiment Name: At_42deg_Heat_cDNA_P Parameter: Timepoint (hr) Value: 8
  misc_feature: MA Experiment 20000113 PARAMETER Experiment Name: At_42deg_Heat_cDNA_P Parameter: Tissue Value: Aerial
  misc_feature: MA Experiment ID: 20000117 Result: Down-regulated in Transcription
  misc_feature: MA Experiment 20000117 PARAMETER Experiment Name: At_100uM_ABA_Mutants_cDNA_P Parameter: Plant Line Value: Columbia
  misc_feature: MA Experiment 20000117 PARAMETER Experiment Name: At_100uM_ABA_Mutants_cDNA_P Parameter: Timepoint (hr) Value: 6
  misc_feature: MA Experiment 20000117 PARAMETER Experiment Name: At_100uM_ABA_Mutants_cDNA_P Parameter: Tissue Value: Aerial
  misc_feature: MA Experiment 20000117 PARAMETER Experiment Name: At_100uM_ABA_Mutants_cDNA_P Parameter: Treatment Value: 100uM ABA vs. No Treatment
  misc_feature: MA Experiment ID: 20000180 Result: Up-regulated in Transcription
  misc_feature: MA Experiment 20000180 PARAMETER Experiment Name: At_Germinating_Seeds_P Parameter: Age (hr) Value: 24 vs. 0
  misc_feature: MA Experiment 20000180 PARAMETER Experiment Name: At_Germinating_Seeds_P Parameter: Tissue Value: Germinating Seeds
  misc_feature: MA Experiment ID: 20000185 Result: Down-regulated in Transcription
  misc_feature: MA Experiment 20000185 PARAMETER Experiment Name: At_Roots__P Parameter: Age (day) Value: 7 vs. 21
  misc_feature: MA Experiment 20000185 PARAMETER Experiment Name: At_Roots__P Parameter: Organism Value: A. thaliana
  misc_feature: MA Experiment 20000185 PARAMETER Experiment Name: At_Roots__P Parameter: Tissue Value: Roots vs. Whole Plant
  misc_feature: MA Experiment ID: 20000264 Result: Down-regulated in Transcription
  misc_feature: MA Experiment 20000264 PARAMETER Experiment Name: At_Open_Flower_P Parameter: Age (day) Value: 21
  misc_feature: MA Experiment 20000264 PARAMETER Experiment Name: At_Open_Flower_P Parameter: Plant Line Value: WS
  misc_feature: MA Experiment 20000264 PARAMETER Experiment Name: At_Open_Flower_P Parameter: Tissue Value: Open Flower vs. Whole Plant
  misc_feature: MA Experiment ID: 20000286 Result: Down-regulated in Transcription
  misc_feature: MA Experiment 20000286 PARAMETER Experiment Name: At_Open_Flower_P Parameter: Age (day) Value: 21
  misc_feature: MA Experiment 20000286 PARAMETER Experiment Name: At_Open_Flower_P Parameter: Plant Line Value: WS
  misc_feature: MA Experiment 20000286 PARAMETER Experiment Name: At_Open_Flower_P Parameter: Tissue Value: Half Open vs. Whole Plant
  misc_feature: MA Experiment ID: 20000308 Result: Down-regulated in Transcription
  misc_feature: MA Experiment 20000308 PARAMETER Experiment Name: At_100mM_NaCl__P Parameter: Age (day) Value: 17
  misc_feature: MA Experiment 20000308 PARAMETER Experiment Name: At_100mM_NaCl__P Parameter: Organism Value: A. thaliana
  misc_feature: MA Experiment 20000308 PARAMETER Experiment Name: At_100mM_NaCl__P Parameter: Plant Line Value: WS
  misc_feature: MA Experiment 20000308 PARAMETER Experiment Name: At_100mM_NaCl__P Parameter: Timepoint (hr) Value: 72
  misc_feature: MA Experiment 20000308 PARAMETER Experiment Name: At_100mM_NaCl__P Parameter: Tissue Value: Whole Plant
  misc_feature: MA Experiment 20000308 PARAMETER Experiment Name: At_100mM_NaCl__P Parameter: Treatment Value: 100mM NaCl vs. No Treatment
  misc_feature: MA Experiment ID: 20000438 Result: Up-regulated in Transcription
  misc_feature: MA Experiment 20000438 PARAMETER Experiment Name: At_Shoots__P Parameter: Age (day) Value: 14
  misc_feature: MA Experiment 20000438 PARAMETER Experiment Name: At_Shoots__P Parameter: Tissue Value: Shoots vs. Whole Plant
  misc_feature: MA Experiment ID: 20000439 Result: Down-regulated in Transcription
  misc_feature: MA Experiment 20000439 PARAMETER Experiment Name: At_Roots__P Parameter: Age (day) Value: 14 vs. 21
  misc_feature: MA Experiment 20000439 PARAMETER Experiment Name: At_Roots__P Parameter: Organism Value: A. thaliana
  misc_feature: MA Experiment 20000439 PARAMETER Experiment Name: At_Roots__P Parameter: Tissue Value: Roots vs. Whole Plant
  misc_feature: MA Experiment ID: 20000794 Result: Down-regulated in Transcription
  misc_feature: MA Experiment 20000794 PARAMETER Experiment Name: At_Petals_P Parameter: Age (day) Value: 23-25 days
  misc_feature: MA Experiment 20000794 PARAMETER Experiment Name: At_Petals_P Parameter: Plant Line Value: WS
  misc_feature: MA Experiment 20000794 PARAMETER Experiment Name: At_Petals_P Parameter: Tissue Value: Petals vs. Whole plant
  misc_feature: MA Experiment ID: 20001557 Result: Down-regulated in Transcription
  misc_feature: MA Experiment 20001557 PARAMETER Experiment Name: At_Drought_Soil_Dry_P Parameter: Age (day) Value: 27
  misc_feature: MA Experiment 20001557 PARAMETER Experiment Name: At_Drought_Soil_Dry_P Parameter: Organism Value: A. thaliana
  misc_feature: MA Experiment 20001557 PARAMETER Experiment Name: At_Drought_Soil_Dry_P Parameter: Plant Line Value: WS
  misc_feature: MA Experiment 20001557 PARAMETER Experiment Name: At_Drought_Soil_Dry_P Parameter: Post Timepoint (hr) Value: 3
  misc_feature: MA Experiment 20001557 PARAMETER Experiment Name: At_Drought_Soil_Dry_P Parameter: Post-Treatment Value: Re-Water vs. No Drought
  misc_feature: MA Experiment 20001557 PARAMETER Experiment Name: At_Drought_Soil_Dry_P Parameter: Timepoint (day) Value: 13
  misc_feature: MA Experiment 20001557 PARAMETER Experiment Name: At_Drought_Soil_Dry_P Parameter: Treatment Value: Drought vs. No Drought
  misc_feature: MA Experiment ID: 20001560 Result: Down-regulated in Transcription
  misc_feature: MA Experiment 20001560 PARAMETER Experiment Name: At_Drought_Soil_Dry_P Parameter: Age (day) Value: 28
  misc_feature: MA Experiment 20001560 PARAMETER Experiment Name: At_Drought_Soil_Dry_P Parameter: Organism Value: A. thaliana
  misc_feature: MA Experiment 20001560 PARAMETER Experiment Name: At_Drought_Soil_Dry_P Parameter: Plant Line Value: WS
  misc_feature: MA Experiment 20001560 PARAMETER Experiment Name: At_Drought_Soil_Dry_P Parameter: Post Timepoint (hr) Value: None
  misc_feature: MA Experiment 20001560 PARAMETER Experiment Name: At_Drought_Soil_Dry_P Parameter: Post-Treatment Value: None
  misc_feature: MA Experiment 20001560 PARAMETER Experiment Name: At_Drought_Soil_Dry_P Parameter: Timepoint (day) Value: 14
  misc_feature: MA Experiment 20001560 PARAMETER Experiment Name: At_Drought_Soil_Dry_P Parameter: Treatment Value: Drought vs. No Drought
  misc_feature: MA Experiment ID: 20001905 Result: Down-regulated in Transcription
  misc_feature: MA Experiment 20001905 PARAMETER Experiment Name: At_Drought_Reproduction_P Parameter: Age (day) Value: 40
  misc_feature: MA Experiment 20001905 PARAMETER Experiment Name: At_Drought_Reproduction_P Parameter: Organism Value: A. thaliana
  misc_feature: MA Experiment 20001905 PARAMETER Experiment Name: At_Drought_Reproduction_P Parameter: Plant Line Value: WS
  misc_feature: MA Experiment 20001905 PARAMETER Experiment Name: At_Drought_Reproduction_P Parameter: Timepoint (day) Value: 10
  misc_feature: MA Experiment 20001905 PARAMETER Experiment Name: At_Drought_Reproduction_P Parameter: Tissue Value: Rosettes
  misc_feature: MA Experiment 20001905 PARAMETER Experiment Name: At_Drought_Reproduction_P Parameter: Treatment Value: Drought vs. No Drought
accacatttttattctcttcaaaaattatctgcttctatttttataattaagcaagaacggtcttcgtagcataaaaacgagacacggatatagagatatcgtgaattgacttttgtctgacaaatcctcttcgtcaatttcagtggctctgctgcttcctttgttgtgaagccacatagattagattgaggaatgatccaaactcatgtcatacacacatttgtaatctgctacacaaaatacttttaaaatcacacacactaatattttaactctccccactctttgccttgcccttggctctagaaccgaacgtgactctccagatagacttttggagtcacaacattgagtttgaagaggagggaagaagtgagctagggattggttcagagtgaacataaatggctctcaaggcattagactacgatactctgaatgaaaacgtcaagaagtgtcagtatgccgtaagaggtgaactttatctccgagcttctgagctgcagaaagaaggcaaaaagattattttcacaaacgttgggaaccctcatgctttaggacagaagccattgacatttcctcgccaggtggttgcgctttgccaagctccgtttctactagatgacccaaatgttggaatgctatttccagctgatgctattgcaagagctaaacattatctttccttgacttcaggcggtttaggtgcttacagtgattcaagaggccttccaggagttaggaaagaggttgctgagttcattcaacggcgtgatgggtatccaagtgacccagaactcatctttctcactgatggagctagcaaaggtgtgatgcaaatcttgaattgtgttatacgcggtaatggagatgggattctagttccggttccacagtatccactttactcagctaccatatcactgttaggtggtactcttgttccttactatcttgatgagtctgaaaactggggacttgatgttgctaaccttcgacaatccgttgctcaggctcgttctcaagggataacagtaagggcaatggtgatcattaaccctgggaacccaactggccagtgtctaagcgaagctaacataagagagatattgaagttctgttataacgagaaactggttcttctgggagacgaggtttatcagcagaacatataccaggatgagcgtccctttatcagctccaagaaggttttgatggaaatgggttcgccgttcagcaaggaagttcagcttgtatcttttcacacagtctctaaaggatattggggtgaatgtggacagcgaggtggatactttgagatgaccaacctccctccaagggttgttgaggagatatacaaggttgcatcaattgccctcagccctaatgtctctgcgcaaatctttatgggtttgatggttaatcctccaaagcctggagacatttcatatgaccagttcgcccgtgaaagcaaggggattcttgaatctttgagaagaagagcaaggctcatgacagatggattcaacagctgcaaaaacgtcgtgtgcaatttcacagaaggtgcaatgtattcgtttcctcaaatacggttaccaacgggagctctccaagctgcaaaacaagctggaaaagtgccagacgttttctactgtctcaagctcttagaagccacaggaatctccacagtacctggctctggatttggacagaaagaaggtgtgttccatctgaggacaacaatcctgccagcagaagatgagatgccggagatcatggatagcttcaagaagttcaacgacgagttcatgactcagtatgataataactttggttattcgaaaatgtgattacttcttcttctgaacgactattgtgttctgctacactctttaaagctaaatctctgtagtacactctttctctttgccctattctataaaccatatctctctctttgtgtctctttttttttgggtgtaaactctctcttgtgtctctatttctattttcaattggaaactgattaagatcttttctc

SEQ ID NO: 46257 - protein, 481 aa, Arabidopsis thaliana; identical to SEQ ID NO: 28645
  peptide (1)..(481): Ceres Seq. ID no. 15168608
  misc_feature (118)..(465): Pfam Name: Aminotransferase class I and II Pfam Description: Aminotransferase class I and II
  misc_feature (9)..(472): Homolog of NCBI NO: 21954071 NR Description: putative alanine aminotransferase [Arabidopsis
  misc_feature (4)..(472): Homolog of NCBI NO: 7434113 NR Description: alanine transaminase (EC 2.6.1.2) - Chlamydomonas
  misc_feature (103)..(481): Homolog of NCBI NO: 14596229 NR Description: alanine aminotransferase-like protein
  misc_feature (4)..(481): Homolog of NCBI NO: 34899390 NR Description: putative alanine aminotransferase
  misc_feature (4)..(481): Homolog of NCBI NO: 29569153 NR Description: alanine aminotransferase [Oryza sativa (indica
  misc_feature (1)..(481): Homolog of NCBI NO: 21537112 NR Description: putative alanine aminotransferase [Arabidopsis
  misc_feature (1)..(481): Homolog of NCBI NO: 15223186 NR Description: alanine aminotransferase, putative [Arabidopsis
  misc_feature (1)..(481): Homolog of NCBI NO: 13430566 NR Description: putative alanine aminotransferase [Arabidopsis
  misc_feature (1)..(481): Homolog of NCBI NO: 16604499 NR Description: At1g23310/F26F24_4 [Arabidopsis thaliana]
  misc_feature (1)..(481): Homolog of NCBI NO: 30688330 NR Description: alanine aminotransferase -related [Arabidopsis

SEQ ID NO: 46258 - protein, 403 aa, Arabidopsis thaliana; identical to SEQ ID NO: 28646
  peptide (1)..(403): Ceres Seq. ID no. 15168609
  misc_feature (40)..(387): Pfam Name: Aminotransferase class I and II Pfam Description: Aminotransferase class I and II
  misc_feature (1)..(394): Homolog of NCBI NO: 21954071 NR Description: putative alanine aminotransferase [Arabidopsis
  misc_feature (1)..(394): Homolog of NCBI NO: 7434113 NR Description: alanine transaminase (EC 2.6.1.2) - Chlamydomonas
  misc_feature (25)..(403): Homolog of NCBI NO: 14596229 NR Description: alanine aminotransferase-like protein
  misc_feature (1)..(403): Homolog of NCBI NO: 34899390 NR Description: putative alanine aminotransferase
  misc_feature (1)..(403): Homolog of NCBI NO: 29569153 NR Description: alanine aminotransferase [Oryza sativa (indica
  misc_feature (1)..(403): Homolog of NCBI NO: 21537112 NR Description: putative alanine aminotransferase [Arabidopsis
  misc_feature (1)..(403): Homolog of NCBI NO: 15223186 NR Description: alanine aminotransferase, putative [Arabidopsis
  misc_feature (1)..(403): Homolog of NCBI NO: 13430566 NR Description: putative alanine aminotransferase [Arabidopsis
  misc_feature (1)..(403): Homolog of NCBI NO: 16604499 NR Description: At1g23310/F26F24_4 [Arabidopsis thaliana]
  misc_feature (1)..(403): Homolog of NCBI NO: 30688330 NR Description: alanine aminotransferase -related [Arabidopsis

SEQ ID NO: 46259 - protein, 338 aa, Arabidopsis thaliana; identical to SEQ ID NO: 28647
  peptide (1)..(338): Ceres Seq. ID no. 15168610
  misc_feature (1)..(322): Pfam Name: Aminotransferase class I and II Pfam Description: Aminotransferase class I and II
  misc_feature (1)..(329): Homolog of NCBI NO: 21954071 NR Description: putative alanine aminotransferase [Arabidopsis
  misc_feature (1)..(329): Homolog of NCBI NO: 7434113 NR Description: alanine transaminase (EC 2.6.1.2) - Chlamydomonas
  misc_feature (1)..(338): Homolog of NCBI NO: 14596229 NR Description: alanine aminotransferase-like protein
  misc_feature (1)..(338): Homolog of NCBI NO: 34899390 NR Description: putative alanine aminotransferase
  misc_feature (1)..(338): Homolog of NCBI NO: 29569153 NR Description: alanine aminotransferase [Oryza sativa (indica
  misc_feature (1)..(338): Homolog of NCBI NO: 21537112 NR Description: putative alanine aminotransferase [Arabidopsis
  misc_feature (1)..(338): Homolog of NCBI NO: 15223186 NR Description: alanine aminotransferase, putative [Arabidopsis
  misc_feature (1)..(338): Homolog of NCBI NO: 13430566 NR Description: putative alanine aminotransferase [Arabidopsis
  misc_feature (1)..(338): Homolog of NCBI NO: 16604499 NR Description: At1g23310/F26F24_4 [Arabidopsis thaliana]
  misc_feature (1)..(338): Homolog of NCBI NO: 30688330 NR Description: alanine aminotransferase -related [Arabidopsis

SEQ ID NO: 46260 - DNA, 2256 bp, Arabidopsis thaliana; identical to SEQ ID NO: 22038
  misc_feature (1)..(2256): Ceres Seq. ID no. 13646318
  misc_feature: MA Experiment ID: 108434 Result: Up-regulated in Transcription
  misc_feature: MA Experiment 108434 PARAMETER Experiment Name: At_Root_Tips_cDNA_P Parameter: Tissue Value: Root Tips
  misc_feature: MA Experiment ID: 108462 Result: Down-regulated in Transcription
  misc_feature: MA Experiment 108462 PARAMETER Experiment Name: At_Germinating_Seeds_cDNA_P Parameter: Age (day) Value: 2 vs. 0
  misc_feature: MA Experiment 108462 PARAMETER Experiment Name: At_Germinating_Seeds_cDNA_P Parameter: Tissue Value: Germinating Seeds
  misc_feature: MA Experiment ID: 108463 Result: Down-regulated in Transcription
  misc_feature: MA Experiment 108463 PARAMETER Experiment Name: At_Germinating_Seeds_cDNA_P Parameter: Age (day) Value: 3 vs. 0
  misc_feature: MA Experiment 108463 PARAMETER Experiment Name: At_Germinating_Seeds_cDNA_P Parameter: Tissue Value: Germinating Seeds
  misc_feature: MA Experiment ID: 108464 Result: Down-regulated in Transcription
  misc_feature: MA Experiment 108464 PARAMETER Experiment Name: At_Germinating_Seeds_cDNA_P Parameter: Age (day) Value: 4 vs. 0
  misc_feature: MA Experiment 108464 PARAMETER Experiment Name: At_Germinating_Seeds_cDNA_P Parameter: Tissue Value: Germinating Seeds
  misc_feature: MA Experiment ID: 108501 Result: Up-regulated in Transcription
  misc_feature: MA Experiment 108501 PARAMETER Experiment Name: At_ap2_floral_buds_cDNA_P Parameter: Plant Line Value: ap2 (Ler.)
  misc_feature: MA Experiment 108501 PARAMETER Experiment Name: At_ap2_floral_buds_cDNA_P Parameter: Tissue Value: Closed Flower
  misc_feature: MA Experiment ID: 108573 Result: Up-regulated in Transcription
  misc_feature: MA Experiment 108573 PARAMETER Experiment Name: At_Drought_cDNA_P Parameter: Timepoint (hr) Value: 6
  misc_feature: MA Experiment 108573 PARAMETER Experiment Name: At_Drought_cDNA_P Parameter: Tissue Value: Aerial
  misc_feature: MA Experiment 108573 PARAMETER Experiment Name: At_Drought_cDNA_P Parameter: Treatment Value: Drought vs. No Drought
  misc_feature: MA Experiment ID: 108576 Result: Up-regulated in Transcription
  misc_feature: MA Experiment 108576 PARAMETER Experiment Name: At_42deg_Heat_cDNA_P Parameter: Temperature (deg C) Value: 42 vs. 22
  misc_feature: MA Experiment 108576 PARAMETER Experiment Name: At_42deg_Heat_cDNA_P Parameter: Timepoint (hr) Value: 1
  misc_feature: MA Experiment 108576 PARAMETER Experiment Name: At_42deg_Heat_cDNA_P Parameter: Tissue Value: Aerial
  misc_feature: MA Experiment ID: 108577 Result: Up-regulated in Transcription
  misc_feature: MA Experiment 108577 PARAMETER Experiment Name: At_42deg_Heat_cDNA_P Parameter: Temperature (deg C) Value: 42 vs. 22
  misc_feature: MA Experiment 108577 PARAMETER Experiment Name: At_42deg_Heat_cDNA_P Parameter: Timepoint (hr) Value: 6
  misc_feature: MA Experiment 108577 PARAMETER Experiment Name: At_42deg_Heat_cDNA_P Parameter: Tissue Value: Aerial
  misc_feature: MA Experiment ID: 108585 Result: Up-regulated in Transcription
  misc_feature: MA Experiment 108585 PARAMETER Experiment Name: At_5mM_NaNP_cDNA_P Parameter: Timepoint (hr) Value: 6
  misc_feature: MA Experiment 108585 PARAMETER Experiment Name: At_5mM_NaNP_cDNA_P Parameter: Tissue Value: Aerial
  misc_feature: MA Experiment 108585 PARAMETER Experiment Name: At_5mM_NaNP_cDNA_P Parameter: Treatment Value: null
  misc_feature: MA Experiment ID: 108595 Result: Down-regulated in Transcription
  misc_feature: MA Experiment 108595 PARAMETER Experiment Name: At_Ler-pi_Ovule_cDNA_P Parameter: Plant Line Value: null
  misc_feature: MA Experiment ID: 20000069 Result: Down-regulated in Transcription
  misc_feature: MA Experiment 20000069 PARAMETER Experiment Name: At_100uM_ABA_Mutants_cDNA_P Parameter: Plant Line Value: CS23
  misc_feature: MA Experiment 20000069 PARAMETER Experiment Name: At_100uM_ABA_Mutants_cDNA_P Parameter: Timepoint (hr) Value: 6
  misc_feature: MA Experiment 20000069 PARAMETER Experiment Name: At_100uM_ABA_Mutants_cDNA_P Parameter: Tissue Value: Aerial
  misc_feature: MA Experiment 20000069 PARAMETER Experiment Name: At_100uM_ABA_Mutants_cDNA_P Parameter: Treatment Value: 100uM ABA vs. No Treatment
  misc_feature: MA Experiment ID: 20000087 Result: Down-regulated in Transcription
  misc_feature: MA Experiment 20000087 PARAMETER Experiment Name: At_100uM_ABA_Mutants_cDNA_P Parameter: Plant Line Value: WS
  misc_feature: MA Experiment 20000087 PARAMETER Experiment Name: At_100uM_ABA_Mutants_cDNA_P Parameter: Timepoint (hr) Value: 6
  misc_feature: MA Experiment 20000087 PARAMETER Experiment Name: At_100uM_ABA_Mutants_cDNA_P Parameter: Tissue Value: Aerial
  misc_feature: MA Experiment 20000087 PARAMETER Experiment Name: At_100uM_ABA_Mutants_cDNA_P Parameter: Treatment Value: 100uM ABA vs. No Treatment
  misc_feature: MA Experiment ID: 20000111 Result: Up-regulated in Transcription
  misc_feature: MA Experiment 20000111 PARAMETER Experiment Name: At_42deg_Heat_cDNA_P Parameter: Temperature (deg C) Value: 42 vs. 22
  misc_feature: MA Experiment 20000111 PARAMETER Experiment Name: At_42deg_Heat_cDNA_P Parameter: Timepoint (hr) Value: 6
  misc_feature: MA Experiment 20000111 PARAMETER Experiment Name: At_42deg_Heat_cDNA_P Parameter: Tissue Value: Aerial
  misc_feature: MA Experiment ID: 20000112 Result: Up-regulated in Transcription
  misc_feature: MA Experiment 20000112 PARAMETER Experiment Name: At_42deg_Heat_cDNA_P Parameter: Temperature (deg C) Value: 42 vs. 22
  misc_feature: MA Experiment 20000112 PARAMETER Experiment Name: At_42deg_Heat_cDNA_P Parameter: Timepoint (hr) Value: 2
  misc_feature: MA Experiment 20000112 PARAMETER Experiment Name: At_42deg_Heat_cDNA_P Parameter: Tissue Value: Aerial
  misc_feature: MA Experiment ID: 20000113 Result: Up-regulated in Transcription
  misc_feature: MA Experiment 20000113 PARAMETER Experiment Name: At_42deg_Heat_cDNA_P Parameter: Temperature (deg C) Value: 42 vs. 22
  misc_feature: MA Experiment 20000113 PARAMETER Experiment Name: At_42deg_Heat_cDNA_P Parameter: Timepoint (hr) Value: 8
  misc_feature: MA Experiment 20000113 PARAMETER Experiment Name: At_42deg_Heat_cDNA_P Parameter: Tissue Value: Aerial
  misc_feature: MA Experiment ID: 20000144 Result: Up-regulated in Transcription
  misc_feature: MA Experiment 20000144 PARAMETER Experiment Name: At_42deg_Heat_cDNA_P Parameter: Temperature (deg C) Value: 42 vs. 22
  misc_feature: MA Experiment 20000144 PARAMETER Experiment Name: At_42deg_Heat_cDNA_P Parameter: Timepoint (hr) Value: 1
  misc_feature: MA Experiment 20000144 PARAMETER Experiment Name: At_42deg_Heat_cDNA_P Parameter: Tissue Value: Aerial
  misc_feature: MA Experiment ID: 20000314 Result: Down-regulated in Transcription
  misc_feature: MA Experiment 20000314 PARAMETER Experiment Name: At_14day_Shoots-Roots_Sub_P Parameter: Age (day) Value: 14
  misc_feature: MA Experiment 20000314 PARAMETER Experiment Name: At_14day_Shoots-Roots_Sub_P Parameter: Organism Value: A. thaliana
  misc_feature: MA Experiment 20000314 PARAMETER Experiment Name: At_14day_Shoots-Roots_Sub_P Parameter: Plant Line Value: WS
  misc_feature: MA Experiment 20000314 PARAMETER Experiment Name: At_14day_Shoots-Roots_Sub_P Parameter: Tissue Value: Roots vs. Whole Plant
  misc_feature: MA Experiment ID: 20000327 Result: Up-regulated in Transcription
  misc_feature: MA Experiment 20000327 PARAMETER Experiment Name: At_42deg_Heat_Sub_P Parameter: Age (day) Value: 14
  misc_feature: MA Experiment 20000327 PARAMETER Experiment Name: At_42deg_Heat_Sub_P Parameter: Organism Value: A. thaliana
  misc_feature: MA Experiment 20000327 PARAMETER Experiment Name: At_42deg_Heat_Sub_P Parameter: Plant Line Value: WS
  misc_feature: MA Experiment 20000327 PARAMETER Experiment Name: At_42deg_Heat_Sub_P Parameter: Temperature (deg C) Value: 42 vs. 22
  misc_feature: MA Experiment 20000327 PARAMETER Experiment Name: At_42deg_Heat_Sub_P Parameter: Timepoint (hr) Value: 1
  misc_feature: MA Experiment 20000327 PARAMETER Experiment Name: At_42deg_Heat_Sub_P Parameter: Tissue Value: Aerial
  misc_feature: MA Experiment ID: 20000328 Result: Up-regulated in Transcription
  misc_feature: MA Experiment 20000328 PARAMETER Experiment Name: At_42deg_Heat_Sub_P Parameter: Age (day) Value: 14
  misc_feature: MA Experiment 20000328 PARAMETER Experiment Name: At_42deg_Heat_Sub_P Parameter: Organism Value: A. thaliana
  misc_feature: MA Experiment 20000328 PARAMETER Experiment Name: At_42deg_Heat_Sub_P Parameter: Plant Line Value: WS
  misc_feature: MA Experiment 20000328 PARAMETER Experiment Name: At_42deg_Heat_Sub_P Parameter: Temperature (deg C) Value: 42 vs. 22
  misc_feature: MA Experiment 20000328 PARAMETER Experiment Name: At_42deg_Heat_Sub_P Parameter: Timepoint (hr) Value: 6
  misc_feature: MA Experiment 20000328 PARAMETER Experiment Name: At_42deg_Heat_Sub_P Parameter: Tissue Value: Aerial
  misc_feature: MA Experiment ID: 20000355 Result: Down-regulated in Transcription
  misc_feature: MA Experiment 20000355 PARAMETER Experiment Name: At_Siliques_Sub_P Parameter: Age (day) Value: 21
  misc_feature: MA Experiment 20000355 PARAMETER Experiment Name: At_Siliques_Sub_P Parameter: Organism Value: A. thaliana
  misc_feature: MA Experiment 20000355 PARAMETER Experiment Name: At_Siliques_Sub_P Parameter: Plant Line Value: WS
  misc_feature: MA Experiment 20000355 PARAMETER Experiment Name: At_Siliques_Sub_P Parameter: Tissue Value: Less Than 5mm Siliques vs. Whole Plant
  misc_feature: MA Experiment ID: 20001807 Result: Up-regulated in Transcription
  misc_feature: MA Experiment 20001807 PARAMETER Experiment Name: At_50mM_NH4NO3_L-to-H_Sub_P Parameter: Timepoint (hr) Value: 6
  misc_feature: MA Experiment 20001807 PARAMETER Experiment Name: At_50mM_NH4NO3_L-to-H_Sub_P Parameter: Tissue Value: Leaf
  misc_feature: MA Experiment 20001807 PARAMETER Experiment Name: At_50mM_NH4NO3_L-to-H_Sub_P Parameter: Treatment Value: 50mM NH4NO3 vs 100mM Mannitol

SEQ ID NO: 46261 - protein, 651 aa, Arabidopsis thaliana; identical to SEQ ID NO: 22039
  peptide (1)..(651): Ceres Seq. ID no. 13646319
  misc_feature (124)..(646): Homolog of NCBI NO: 4164594 NR Description: heat shock protein 70 [Paracoccidioides
  misc_feature (1)..(635): Homolog of NCBI NO: 23480384 NR Description: heat shock protein [Plasmodium yoelii yoelii]
  misc_feature (3)..(635): Homolog of NCBI NO: 29539338 NR Description: Heat shock 70 kDa protein [Cyanidioschyzon
  misc_feature (1)..(626): Homolog of NCBI NO: 481576 NR Description: dnaK-type molecular chaperone GRP78/BiP -
  misc_feature (3)..(635): Homolog of NCBI NO: 1037176 NR Description: immunoglobulin heavy chain binding protein
  misc_feature (1)..(635): Homolog of NCBI NO: 6016151 NR Description: Luminal binding protein 3 precursor (BiP3)
  misc_feature (8)..(651): Homolog of NCBI NO: 14423732 NR Description: Heat shock 70 kDa protein
  misc_feature (6)..(626): Homolog of NCBI NO: 21263753 NR Description: Heat shock cognate 71 kDa protein (Hsc70.1)
  misc_feature (124)..(646): Homolog of NCBI NO: 4164594 NR Description: heat shock protein 70 [Paracoccidioides
  misc_feature (1)..(635): Homolog of NCBI NO: 23480384 NR Description: heat shock protein [Plasmodium yoelii yoelii]
  misc_feature (3)..(635): Homolog of NCBI NO: 29539338 NR Description: Heat shock 70 kDa protein [Cyanidioschyzon
  misc_feature (1)..(626): Homolog of NCBI NO: 481576 NR Description: dnaK-type molecular chaperone GRP78/BiP -
  misc_feature (3)..(635): Homolog of NCBI NO: 1037176 NR Description: immunoglobulin heavy chain binding protein
  misc_feature (1)..(635): Homolog of NCBI NO: 6016151 NR Description: Luminal binding protein 3 precursor (BiP3)
  misc_feature (8)..(651): Homolog of NCBI NO: 14423732 NR Description: Heat shock 70 kDa protein
  misc_feature (6)..(626): Homolog of NCBI NO: 21263753 NR Description: Heat shock cognate 71 kDa protein (Hsc70.1)
  misc_feature (124)..(646): Homolog of NCBI NO: 4164594 NR Description: heat shock protein 70 [Paracoccidioides
  misc_feature (1)..(635): Homolog of NCBI NO: 23480384 NR Description: heat shock protein [Plasmodium yoelii yoelii]
  misc_feature (3)..(635): Homolog of NCBI NO: 29539338 NR Description: Heat shock 70 kDa protein [Cyanidioschyzon
  misc_feature (1)..(626): Homolog of NCBI NO: 481576 NR Description: dnaK-type molecular chaperone GRP78/BiP -
  misc_feature (3)..(635): Homolog of NCBI NO: 1037176 NR Description: immunoglobulin heavy chain binding protein
  misc_feature (1)..(635): Homolog of NCBI NO: 6016151 NR Description: Luminal binding protein 3 precursor (BiP3)
  misc_feature (8)..(651): Homolog of NCBI NO: 14423732 NR Description: Heat shock 70 kDa protein
  misc_feature (6)..(626): Homolog of NCBI NO: 21263753 NR Description: Heat shock cognate 71 kDa protein (Hsc70.1)
  misc_feature (124)..(646): Homolog of NCBI NO: 4164594 NR Description: heat shock protein 70 [Paracoccidioides
  misc_feature (1)..(635): Homolog of NCBI NO: 23480384 NR Description: heat shock protein [Plasmodium yoelii yoelii]
  misc_feature (3)..(635): Homolog of NCBI NO: 29539338 NR Description: Heat shock 70 kDa protein [Cyanidioschyzon
  misc_feature (1)..(626): Homolog of NCBI NO: 481576 NR Description: dnaK-type molecular chaperone GRP78/BiP -
  misc_feature (3)..(635): Homolog of NCBI NO: 1037176 NR Description: immunoglobulin heavy chain binding protein
  misc_feature (1)..(635): Homolog of NCBI NO: 6016151 NR Description: Luminal binding protein 3 precursor (BiP3)
  misc_feature (8)..(651): Homolog of NCBI NO: 14423732 NR Description: Heat shock 70 kDa protein
  misc_feature (6)..(626): Homolog of NCBI NO: 21263753 NR Description: Heat shock cognate 71 kDa protein (Hsc70.1)
  misc_feature (124)..(646): Homolog of NCBI NO: 4164594 NR Description: heat shock protein 70 [Paracoccidioides
  misc_feature (1)..(635): Homolog of NCBI NO: 23480384 NR Description: heat shock protein [Plasmodium yoelii yoelii]
  misc_feature (3)..(635): Homolog of NCBI NO: 29539338 NR Description: Heat shock 70 kDa protein [Cyanidioschyzon
  misc_feature (1)..(626): Homolog of NCBI NO: 481576 NR Description: dnaK-type molecular chaperone GRP78/BiP -
  misc_feature (3)..(635): Homolog of NCBI NO: 1037176 NR Description: immunoglobulin heavy chain binding protein
  misc_feature (1)..(635): Homolog of NCBI NO: 6016151 NR Description: Luminal binding protein 3 precursor (BiP3)
  misc_feature (8)..(651): Homolog of NCBI NO: 14423732 NR Description: Heat shock 70 kDa protein
  misc_feature (6)..(626): Homolog of NCBI NO: 21263753 NR Description: Heat shock cognate 71 kDa protein (Hsc70.1)
  misc_feature (124)..(646): Homolog of NCBI NO: 4164594 NR Description: heat shock protein 70 [Paracoccidioides
  misc_feature (1)..(635): Homolog of NCBI NO: 23480384 NR Description: heat shock protein [Plasmodium yoelii yoelii]
  misc_feature (3)..(635): Homolog of NCBI NO: 29539338 NR Description: Heat shock 70 kDa protein [Cyanidioschyzon
  misc_feature (1)..(626): Homolog of NCBI NO: 481576 NR Description: dnaK-type molecular chaperone GRP78/BiP -
  misc_feature (3)..(635): Homolog of NCBI NO: 1037176 NR Description: immunoglobulin heavy chain binding protein
  misc_feature (1)..(635): Homolog of NCBI NO: 6016151 NR Description: Luminal binding protein 3 precursor (BiP3)
  misc_feature (8)..(651): Homolog of NCBI NO: 14423732 NR Description: Heat shock 70 kDa protein
  misc_feature (6)..(626): Homolog of NCBI NO: 21263753 NR Description: Heat shock cognate 71 kDa protein (Hsc70.1)
  misc_feature (124)..(646): Homolog of NCBI NO: 4164594 NR Description: heat shock protein 70 [Paracoccidioides
  misc_feature (1)..(635): Homolog of NCBI NO: 23480384 NR Description: heat shock protein [Plasmodium yoelii yoelii]
  misc_feature (3)..(635): Homolog of NCBI NO: 29539338 NR Description: Heat shock 70 kDa protein [Cyanidioschyzon
  misc_feature (1)..(626): Homolog of NCBI NO: 481576 NR Description: dnaK-type molecular chaperone GRP78/BiP -
  misc_feature (3)..(635): Homolog of NCBI NO: 1037176 NR Description: immunoglobulin heavy chain binding protein
  misc_feature (1)..(635): Homolog of NCBI NO: 6016151 NR Description: Luminal binding protein 3 precursor (BiP3)
  misc_feature (8)..(651): Homolog of NCBI NO: 14423732 NR Description: Heat shock 70 kDa protein
  misc_feature (6)..(626): Homolog of NCBI NO: 21263753 NR Description: Heat shock cognate 71 kDa protein (Hsc70.1)

SEQ ID NO: 46262 - protein, 588 aa, Arabidopsis thaliana; identical to SEQ ID NO: 22040
  peptide (1)..(588): Ceres Seq. ID no. 13646320
  misc_feature (61)..(583): Homolog of NCBI NO: 4164594 NR Description: heat shock protein 70 [Paracoccidioides
  misc_feature (1)..(572): Homolog of NCBI NO: 23480384 NR Description: heat shock protein [Plasmodium yoelii yoelii]
  misc_feature (1)..(572): Homolog of NCBI NO: 29539338 NR Description: Heat shock 70 kDa protein [Cyanidioschyzon
  misc_feature (1)..(563): Homolog of NCBI NO: 481576 NR Description: dnaK-type molecular chaperone GRP78/BiP -
  misc_feature (1)..(572): Homolog of NCBI NO: 1037176 NR Description: immunoglobulin heavy chain binding protein
  misc_feature (1)..(572): Homolog of NCBI NO: 6016151 NR Description: Luminal binding protein 3 precursor (BiP3)
  misc_feature (1)..(588): Homolog of NCBI NO: 14423732 NR Description: Heat shock 70 kDa protein
  misc_feature (1)..(563): Homolog of NCBI NO: 21263753 NR Description: Heat shock cognate 71 kDa protein (Hsc70.1)
  misc_feature (61)..(583): Homolog of NCBI NO: 4164594 NR Description: heat shock protein 70 [Paracoccidioides
  misc_feature (1)..(572): Homolog of NCBI NO: 23480384 NR Description: heat shock protein [Plasmodium yoelii yoelii]
  misc_feature (1)..(572): Homolog of NCBI NO: 29539338 NR Description: Heat shock 70 kDa protein [Cyanidioschyzon
  misc_feature (1)..(563): Homolog of NCBI NO: 481576 NR Description: dnaK-type molecular chaperone GRP78/BiP -
  misc_feature (1)..(572): Homolog of NCBI NO: 1037176 NR Description: immunoglobulin heavy chain binding protein
  misc_feature (1)..(572): Homolog of NCBI NO: 6016151 NR Description: Luminal binding protein 3 precursor (BiP3)
  misc_feature (1)..(588): Homolog of NCBI NO: 14423732 NR Description: Heat shock 70 kDa protein
  misc_feature (1)..(563): Homolog of NCBI NO: 21263753 NR Description: Heat shock cognate 71 kDa protein (Hsc70.1)
  misc_feature (61)..(583): Homolog of NCBI NO: 4164594 NR Description: heat shock protein 70 [Paracoccidioides
  misc_feature (1)..(572): Homolog of NCBI NO: 23480384 NR Description: heat shock protein [Plasmodium yoelii yoelii]
  misc_feature (1)..(572): Homolog of NCBI NO: 29539338 NR Description: Heat shock 70 kDa protein [Cyanidioschyzon
  misc_feature (1)..(563): Homolog of NCBI NO: 481576 NR Description: dnaK-type molecular chaperone GRP78/BiP -
  misc_feature (1)..(572): Homolog of NCBI NO: 1037176 NR Description: immunoglobulin heavy chain binding protein
  misc_feature (1)..(572): Homolog of NCBI NO: 6016151 NR Description: Luminal binding protein 3 precursor (BiP3)
  misc_feature (1)..(588): Homolog of NCBI NO: 14423732 NR Description: Heat shock 70 kDa protein
  misc_feature (1)..(563): Homolog of NCBI NO: 21263753 NR Description: Heat shock cognate 71 kDa protein (Hsc70.1)
  misc_feature (61)..(583): Homolog of NCBI NO: 4164594 NR Description: heat shock protein 70 [Paracoccidioides
  misc_feature (1)..(572): Homolog of NCBI NO: 23480384 NR Description: heat shock protein [Plasmodium yoelii yoelii]
  misc_feature (1)..(572): Homolog of NCBI NO: 29539338 NR Description: Heat shock 70 kDa protein [Cyanidioschyzon
  misc_feature (1)..(563): Homolog of NCBI NO: 481576 NR Description: dnaK-type molecular chaperone GRP78/BiP -
  misc_feature (1)..(572): Homolog of NCBI NO: 1037176 NR Description: immunoglobulin heavy chain binding protein
  misc_feature (1)..(572): Homolog of NCBI NO: 6016151 NR Description: Luminal binding protein 3 precursor (BiP3)
  misc_feature (1)..(588): Homolog of NCBI NO: 14423732 NR Description: Heat shock 70 kDa protein
  misc_feature (1)..(563): Homolog of NCBI NO: 21263753 NR Description: Heat shock cognate 71 kDa protein (Hsc70.1)
  misc_feature (61)..(583): Homolog of NCBI NO: 4164594 NR Description: heat shock protein 70 [Paracoccidioides
  misc_feature (1)..(572): Homolog of NCBI NO: 23480384 NR Description: heat shock protein [Plasmodium yoelii yoelii]
  misc_feature (1)..(572): Homolog of NCBI NO: 29539338 NR Description: Heat shock 70 kDa protein [Cyanidioschyzon
  misc_feature (1)..(563): Homolog of NCBI NO: 481576 NR Description: dnaK-type molecular chaperone GRP78/BiP -
  misc_feature (1)..(572): Homolog of NCBI NO: 1037176 NR Description: immunoglobulin heavy chain binding protein
  misc_feature (1)..(572): Homolog of NCBI NO: 6016151 NR Description: Luminal binding protein 3 precursor (BiP3)
  misc_feature (1)..(588): Homolog of NCBI NO: 14423732 NR Description: Heat shock 70 kDa protein
  misc_feature (1)..(563): Homolog of NCBI NO: 21263753 NR Description: Heat shock cognate 71 kDa protein (Hsc70.1)
  misc_feature (61)..(583): Homolog of NCBI NO: 4164594 NR Description: heat shock protein 70 [Paracoccidioides
  misc_feature (1)..(572): Homolog of NCBI NO: 23480384 NR Description: heat shock protein [Plasmodium yoelii yoelii]
  misc_feature (1)..(572): Homolog of NCBI NO: 29539338 NR Description: Heat shock 70 kDa protein [Cyanidioschyzon
  misc_feature (1)..(563): Homolog of NCBI NO: 481576 NR Description: dnaK-type molecular chaperone GRP78/BiP -
  misc_feature (1)..(572): Homolog of NCBI NO: 1037176 NR Description: immunoglobulin heavy chain binding protein
  misc_feature (1)..(572): Homolog of NCBI NO: 6016151 NR Description: Luminal binding protein 3 precursor (BiP3)
  misc_feature (1)..(588): Homolog of NCBI NO: 14423732 NR Description: Heat shock 70 kDa protein
  misc_feature (1)..(563): Homolog of NCBI NO: 21263753 NR Description: Heat shock cognate 71 kDa protein (Hsc70.1)
  misc_feature (61)..(583): Homolog of NCBI NO: 4164594 NR Description: heat shock protein 70 [Paracoccidioides
  misc_feature (1)..(572): Homolog of NCBI NO: 23480384 NR Description: heat shock protein [Plasmodium yoelii yoelii]
  misc_feature (1)..(572): Homolog of NCBI NO: 29539338 NR Description: Heat shock 70 kDa protein [Cyanidioschyzon
  misc_feature (1)..(563): Homolog of NCBI NO: 481576 NR Description: dnaK-type molecular chaperone GRP78/BiP -
  misc_feature (1)..(572): Homolog of NCBI NO: 1037176 NR Description: immunoglobulin heavy chain binding protein
  misc_feature (1)..(572): Homolog of NCBI NO: 6016151 NR Description: Luminal binding protein 3 precursor (BiP3)
  misc_feature (1)..(588): Homolog of NCBI NO: 14423732 NR Description: Heat shock 70 kDa protein
  misc_feature (1)..(563): Homolog of NCBI NO: 21263753 NR Description: Heat shock cognate 71 kDa protein (Hsc70.1)

SEQ ID NO: 46263 - protein, 562 aa, Arabidopsis thaliana; identical to SEQ ID NO: 22041
  peptide (1)..(562): Ceres Seq. ID no. 13646321
  misc_feature (35)..(557): Homolog of NCBI NO: 4164594 NR Description: heat shock protein 70 [Paracoccidioides
  misc_feature (1)..(546): Homolog of NCBI NO: 23480384 NR Description: heat shock protein [Plasmodium yoelii yoelii]
  misc_feature (1)..(546): Homolog of NCBI NO: 29539338 NR Description: Heat shock 70 kDa protein [Cyanidioschyzon
  misc_feature (1)..(537): Homolog of NCBI NO: 481576 NR Description: dnaK-type molecular chaperone GRP78/BiP -
  misc_feature (1)..(546): Homolog of NCBI NO: 1037176 NR Description: immunoglobulin heavy chain binding protein
  misc_feature (1)..(546): Homolog of NCBI NO: 6016151 NR Description: Luminal binding protein 3 precursor (BiP3)
  misc_feature (1)..(562): Homolog of NCBI NO: 14423732 NR Description: Heat shock 70 kDa protein
  misc_feature (1)..(537): Homolog of NCBI NO: 21263753 NR Description: Heat shock cognate 71 kDa protein (Hsc70.1)
  misc_feature (35)..(557): Homolog of NCBI NO: 4164594 NR Description: heat shock protein 70 [Paracoccidioides
  misc_feature (1)..(546): Homolog of NCBI NO: 23480384 NR Description: heat shock protein [Plasmodium yoelii yoelii]
  misc_feature (1)..(546): Homolog of NCBI NO: 29539338 NR Description: Heat shock 70 kDa protein [Cyanidioschyzon
  misc_feature (1)..(537): Homolog of NCBI NO: 481576 NR Description: dnaK-type molecular chaperone GRP78/BiP -
  misc_feature (1)..(546): Homolog of NCBI NO: 1037176 NR Description: immunoglobulin heavy chain binding protein
  misc_feature (1)..(546): Homolog of NCBI NO: 6016151 NR Description: Luminal binding protein 3 precursor (BiP3)
  misc_feature (1)..(562): Homolog of NCBI NO: 14423732 NR Description: Heat shock 70 kDa protein
  misc_feature (1)..(537): Homolog of NCBI NO: 21263753 NR Description: Heat shock cognate 71 kDa protein (Hsc70.1)
  misc_feature (35)..(557): Homolog of NCBI NO: 4164594 NR Description: heat shock protein 70 [Paracoccidioides
  misc_feature (1)..(546): Homolog of NCBI NO: 23480384 NR Description: heat shock protein [Plasmodium yoelii yoelii]
  misc_feature (1)..(546): Homolog of NCBI NO: 29539338 NR Description: Heat shock 70 kDa protein [Cyanidioschyzon
  misc_feature (1)..(537): Homolog of NCBI NO: 481576 NR Description: dnaK-type molecular chaperone GRP78/BiP -
  misc_feature (1)..(546): Homolog of NCBI NO: 1037176 NR Description: immunoglobulin heavy chain binding protein
  misc_feature (1)..(546): Homolog of NCBI NO: 6016151 NR Description: Luminal binding protein 3 precursor (BiP3)
  misc_feature (1)..(562): Homolog of NCBI NO: 14423732 NR Description: Heat shock 70 kDa protein
  misc_feature (1)..(537): Homolog of NCBI NO: 21263753 NR Description: Heat shock cognate 71 kDa protein (Hsc70.1)
  misc_feature (35)..(557): Homolog of NCBI NO: 4164594 NR Description: heat shock protein 70 [Paracoccidioides
  misc_feature (1)..(546): Homolog of NCBI NO: 23480384 NR Description: heat shock protein [Plasmodium yoelii yoelii]
  misc_feature (1)..(546): Homolog of NCBI NO: 29539338 NR Description: Heat shock 70 kDa protein [Cyanidioschyzon
  misc_feature (1)..(537): Homolog of NCBI NO: 481576 NR Description: dnaK-type molecular chaperone GRP78/BiP -
  misc_feature (1)..(546): Homolog of NCBI NO: 1037176 NR Description: immunoglobulin heavy chain binding protein
  misc_feature (1)..(546): Homolog of NCBI NO: 6016151 NR Description: Luminal binding protein 3 precursor (BiP3)
  misc_feature (1)..(562): Homolog of NCBI NO: 14423732 NR Description: Heat shock 70 kDa protein
  misc_feature (1)..(537): Homolog of NCBI NO: 21263753 NR Description: Heat shock cognate 71 kDa protein (Hsc70.1)
  misc_feature (35)..(557): Homolog of NCBI NO: 4164594 NR Description: heat shock protein 70 [Paracoccidioides
  misc_feature (1)..(546): Homolog of NCBI NO: 23480384 NR Description: heat shock protein [Plasmodium yoelii yoelii]
  misc_feature (1)..(546): Homolog of NCBI NO: 29539338 NR Description: Heat shock 70 kDa protein [Cyanidioschyzon
  misc_feature (1)..(537): Homolog of NCBI NO: 481576 NR Description: dnaK-type molecular chaperone GRP78/BiP -
  misc_feature (1)..(546): Homolog of NCBI NO: 1037176 NR Description: immunoglobulin heavy chain binding protein
  misc_feature (1)..(546): Homolog of NCBI NO: 6016151 NR Description: Luminal binding protein 3 precursor (BiP3)
  misc_feature (1)..(562): Homolog of NCBI NO: 14423732 NR Description: Heat shock 70 kDa protein
  misc_feature (1)..(537): Homolog of NCBI NO: 21263753 NR Description: Heat shock cognate 71 kDa protein (Hsc70.1)
  misc_feature (1)..(546): Homolog of NCBI NO: 29539338 NR Description: Heat shock 70 kDa protein [Cyanidioschyzon
  misc_feature (1)..(537): Homolog of NCBI NO: 481576 NR Description: dnaK-type molecular chaperone GRP78/BiP -
  misc_feature (1)..(546): Homolog of NCBI NO: 1037176 NR Description: immunoglobulin heavy chain binding protein
  misc_feature (1)..(546): Homolog of NCBI NO: 6016151 NR Description: Luminal binding protein 3 precursor (BiP3)
  misc_feature (1)..(562): Homolog of NCBI NO: 14423732 NR Description: Heat shock 70 kDa protein
  misc_feature (1)..(537): Homolog of NCBI NO: 21263753 NR Description: Heat shock cognate 71 kDa protein (Hsc70.1)
  misc_feature (35)..(557): Homolog of NCBI NO: 4164594 NR Description: heat shock protein 70 [Paracoccidioides
  misc_feature (1)..(546): Homolog of NCBI NO: 23480384 NR Description: heat shock protein [Plasmodium yoelii yoelii]
  misc_feature (35)..(557): Homolog of NCBI NO: 4164594 NR Description: heat shock protein 70 [Paracoccidioides
  misc_feature (1)..(546): Homolog of NCBI NO: 23480384 NR Description: heat shock protein [Plasmodium yoelii yoelii]
  misc_feature (1)..(546): Homolog of NCBI NO: 29539338 NR Description: Heat shock 70 kDa protein [Cyanidioschyzon
  misc_feature (1)..(537): Homolog of NCBI NO: 481576 NR Description: dnaK-type molecular chaperone GRP78/BiP -
  misc_feature (1)..(546): Homolog of NCBI NO: 1037176 NR Description: immunoglobulin heavy chain binding protein
  misc_feature (1)..(546): Homolog of NCBI NO: 6016151 NR Description: Luminal binding protein 3 precursor (BiP3)
  misc_feature (1)..(562): Homolog of NCBI NO: 14423732 NR Description: Heat shock 70 kDa protein
  misc_feature (1)..(537): Homolog of NCBI NO: 21263753 NR Description: Heat shock cognate 71 kDa protein (Hsc70.1)

SEQ ID NO: 46264 - DNA, 1607 bp, Arabidopsis thaliana
  misc_feature (1)..(1607): Ceres Seq. ID no. 14315782
  misc_feature: MA Experiment ID: 108462 Result: Down-regulated in Transcription
  misc_feature: MA Experiment 108462 PARAMETER Experiment Name: At_Germinating_Seeds_cDNA_P Parameter: Age (day) Value: 2 vs. 0
  misc_feature: MA Experiment 108462 PARAMETER Experiment Name: At_Germinating_Seeds_cDNA_P Parameter: Tissue Value: Germinating Seeds
  misc_feature: MA Experiment ID: 108463 Result: Down-regulated in Transcription
  misc_feature: MA Experiment 108463 PARAMETER Experiment Name: At_Germinating_Seeds_cDNA_P Parameter: Age (day) Value: 3 vs. 0
  misc_feature: MA Experiment 108463 PARAMETER Experiment Name: At_Germinating_Seeds_cDNA_P Parameter: Tissue Value: Germinating Seeds
  misc_feature: MA Experiment ID: 108573 Result: Up-regulated in Transcription
  misc_feature: MA Experiment 108573 PARAMETER Experiment Name: At_Drought_cDNA_P Parameter: Timepoint (hr) Value: 6
  misc_feature: MA Experiment 108573 PARAMETER Experiment Name: At_Drought_cDNA_P Parameter: Tissue Value: Aerial
  misc_feature: MA Experiment 108573 PARAMETER Experiment Name: At_Drought_cDNA_P Parameter: Treatment Value: Drought vs. No Drought
  misc_feature: MA Experiment ID: 108577 Result: Up-regulated in Transcription
  misc_feature: MA Experiment 108577 PARAMETER Experiment Name: At_42deg_Heat_cDNA_P Parameter: Temperature (deg C) Value: 42 vs. 22
  misc_feature: MA Experiment 108577 PARAMETER Experiment Name: At_42deg_Heat_cDNA_P Parameter: Timepoint (hr) Value: 6
  misc_feature: MA Experiment 108577 PARAMETER Experiment Name: At_42deg_Heat_cDNA_P Parameter: Tissue Value: Aerial
  misc_feature: MA Experiment ID: 20000087 Result: Down-regulated in Transcription
  misc_feature: MA Experiment 20000087 PARAMETER Experiment Name: At_100uM_ABA_Mutants_cDNA_P Parameter: Plant Line Value: WS
  misc_feature: MA Experiment 20000087 PARAMETER Experiment Name: At_100uM_ABA_Mutants_cDNA_P Parameter: Timepoint (hr) Value: 6
  misc_feature: MA Experiment 20000087 PARAMETER Experiment Name: At_100uM_ABA_Mutants_cDNA_P Parameter: Tissue Value: Aerial
  misc_feature: MA Experiment 20000087 PARAMETER Experiment Name: At_100uM_ABA_Mutants_cDNA_P Parameter: Treatment Value: 100uM ABA vs. No Treatment
  misc_feature: MA Experiment ID: 20000111 Result: Up-regulated in Transcription
  misc_feature: MA Experiment 20000111 PARAMETER Experiment Name: At_42deg_Heat_cDNA_P Parameter: Temperature (deg C) Value: 42 vs. 22
  misc_feature: MA Experiment 20000111 PARAMETER Experiment Name: At_42deg_Heat_cDNA_P Parameter: Timepoint (hr) Value: 6
  misc_feature: MA Experiment 20000111 PARAMETER Experiment Name: At_42deg_Heat_cDNA_P Parameter: Tissue Value: Aerial
  misc_feature: MA Experiment ID: 20000113 Result: Up-regulated in Transcription
  misc_feature: MA Experiment 20000113 PARAMETER Experiment Name: At_42deg_Heat_cDNA_P Parameter: Temperature (deg C) Value: 42 vs. 22
  misc_feature: MA Experiment 20000113 PARAMETER Experiment Name: At_42deg_Heat_cDNA_P Parameter: Timepoint (hr) Value: 8
  misc_feature: MA Experiment 20000113 PARAMETER Experiment Name: At_42deg_Heat_cDNA_P Parameter: Tissue Value: Aerial
  misc_feature: MA Experiment ID: 20000173 Result: Up-regulated in Transcription
  misc_feature: MA Experiment 20000173 PARAMETER Experiment Name: At_42deg_Heat_P Parameter: Age (day) Value: 14
  misc_feature: MA Experiment 20000173 PARAMETER Experiment Name: At_42deg_Heat_P Parameter: Organism Value: A. thaliana
  misc_feature: MA Experiment 20000173 PARAMETER Experiment Name: At_42deg_Heat_P Parameter: Plant Line Value: WS
  misc_feature: MA Experiment 20000173 PARAMETER Experiment Name: At_42deg_Heat_P Parameter: Temperature (deg C) Value: 42 vs. 22
  misc_feature: MA Experiment 20000173 PARAMETER Experiment Name: At_42deg_Heat_P Parameter: Timepoint (hr) Value: 6
  misc_feature: MA Experiment 20000173 PARAMETER Experiment Name: At_42deg_Heat_P Parameter: Tissue Value: Aerial
  misc_feature: MA Experiment ID: 20000179 Result: Down-regulated in Transcription
  misc_feature: MA Experiment 20000179 PARAMETER Experiment Name: At_Germinating_Seeds_P Parameter: Age (hr) Value: 6 vs. 0
  misc_feature: MA Experiment 20000179 PARAMETER Experiment Name: At_Germinating_Seeds_P Parameter: Tissue Value: Germinating Seeds
  misc_feature: MA Experiment ID: 20000180 Result: Down-regulated in Transcription
  misc_feature: MA Experiment 20000180 PARAMETER Experiment Name: At_Germinating_Seeds_P Parameter: Age (hr) Value: 24 vs. 0
  misc_feature: MA Experiment 20000180 PARAMETER Experiment Name: At_Germinating_Seeds_P Parameter: Tissue Value: Germinating Seeds
  misc_feature: MA Experiment ID: 20001557 Result: Up-regulated in Transcription
  misc_feature: MA Experiment 20001557 PARAMETER Experiment Name: At_Drought_Soil_Dry_P Parameter: Age (day) Value: 27
  misc_feature: MA Experiment 20001557 PARAMETER Experiment Name: At_Drought_Soil_Dry_P Parameter: Organism Value: A. thaliana
  misc_feature: MA Experiment 20001557 PARAMETER Experiment Name: At_Drought_Soil_Dry_P Parameter: Plant Line Value: WS
  misc_feature: MA Experiment 20001557 PARAMETER Experiment Name: At_Drought_Soil_Dry_P Parameter: Post Timepoint (hr) Value: 3
  misc_feature: MA Experiment 20001557 PARAMETER Experiment Name: At_Drought_Soil_Dry_P Parameter: Post-Treatment Value: Re-Water vs. No Drought
  misc_feature: MA Experiment 20001557 PARAMETER Experiment Name: At_Drought_Soil_Dry_P Parameter: Timepoint (day) Value: 13
  misc_feature: MA Experiment 20001557 PARAMETER Experiment Name: At_Drought_Soil_Dry_P Parameter: Treatment Value: Drought vs. No Drought
ggggaaatcaatcgaaaaccctaggagagataaaaacaaaaatctagacggagatttatggcgacagcgaatcctggccgtggaggtggtagaagaggcggtggagctatggatgacgataagttggtcttcgagactaccgatggaattgagcccatcacgagcttcaatgatatgggcattaaggaagatgtgcttcgcggtgtctacgaatatggattcgagaagccttccgcgattcagcagagggctgttatgccgattcttcaaggacgtgatgttattgctcaagctcagtccggtaccgggaagacatctatgattgctctctccgtttgtcaagtcgttgatacttcttctagagaggttcaggccttgatattatccccaacaagagagctggctacacaaacagagaagacgatacaagctattggattacatgccaatattcaggcacatgcttgcatcggtgggaatagtgttggagaagacatcaggaagctggagcatggtgttcatgttgtgtctgggacacctggtcgtgtctgtgacatgataaagaggagaagtcttcgtaccagagctattaaacttctgattcttgatgaatcagatgaaatgctgagcagagggttcaaggaccagatctatgatgtttacagatatcttccaccagatcttcaggtttgcttggtttctgcaactcttcctcacgagattttggagatgacatccaagtttatgacagaaccagtgaagatacttgtgaagcgtgatgagttgactcttgaaggaatcaaacaattttttgttgctgattgagaaggaagagtggaaatttgatacactctgtgatctttatgacacgcttactatcactcaagctgttatcttctgcaatactaaacgaaaggtggattatcttagtgagaaaatgagaagtcacaacttcactgtctcatcaatgcatggagacatgcctcagaaggagagagacgccatcatgaatgagtttcggtcaggtgatagtcgtgttttgataacaacagatgtatgggcacgtgggattgatgtgcaacaagtttctcttgttatcaattatgatctccccaacaaccgtgagctctacatccatcgtattgggcggtctggtcgattcgggcgtaagggtgttgcaatcaactttgttaaaagcgacgacatcaagattctcagagacattgagcagtactacagtacccagattgatgagatgccaatgaatgtagctgatcttatctaaaagagcttgtctgagatttttgtgctttcagcggggaagtgtctggatgaaaaagtattgttgagcgcttctgtcaaattattgcactatcttaacggtgtatttcctttgatgtttctgtgggctcttttgaacaaacttaaactcgcgtgtggtaaatgtttaatgacttgagaagcgatttaggtttagggtttggaccgtttggtttttcgtttcctcgtaattgattctgggggctttgattgtggtttgtgggtcaaaactctcaactatcactacttgtaagacttttgctcgacagttgaaacggttcattgtt

SEQ ID NO: 46265 - protein, 255 aa, Arabidopsis thaliana
  peptide (1)..(255): Ceres Seq. ID no. 14315783
  misc_feature (48)..(251): Pfam Name: DEAD/DEAH box helicase Pfam Description: DEAD/DEAH box helicase
  misc_feature (32)..(253): Homolog of NCBI NO: 11358803 NR Description: RNA helicase RH23 [imported] - Arabidopsis
  misc_feature (19)..(254): Homolog of NCBI NO: 28277876 NR Description: Unknown (protein for MGC:56139) [Danio rerio]
  misc_feature (12)..(254): Homolog of NCBI NO: 19528517 NR Description: RE50350p [Drosophila melanogaster]
  misc_feature (19)..(254): Homolog of NCBI NO: 31207619 NR Description: ENSANGP00000020417 [Anopheles gambiae]
  misc_feature (12)..(254): Homolog of NCBI NO: 24645031 NR Description: CG7483-PA [Drosophila melanogaster]
  misc_feature (13)..(254): Homolog of NCBI NO: 7443503 NR Description: translation initiation factor - garden pea
  misc_feature (18)..(254): Homolog of NCBI NO: 1170507 NR Description: Eukaryotic initiation factor 4A-3 (eIF-4A-3)
  misc_feature (18)..(254): Homolog of NCBI NO: 11277760 NR Description: RNA helicase RH2 [imported] - Arabidopsis
  misc_feature (1)..(254): Homolog of NCBI NO: 15215678 NR Description: AT3g19760/MMB12_21 [Arabidopsis thaliana]
  misc_feature (1)..(254): Homolog of NCBI NO: 15230945 NR Description: eukaryotic translation initiation factor 4A
MATANPGRGGGRRGGGAMDDDKLVFETTDGIEPITSFNDMGIKEDVLRGVYEYGFEKPSAIQQRAVMPILQGRDVIAQAQSGTGKTSMIALSVCQVVDTSSREVQALILSPTRELATQTEKTIQAIGLHANIQAHACIGGNSVGEDIRKLEHGVHVVSGTPGRVCDMIKRRSLRTRAIKLLILDESDEMLSRGFKDQIYDVYRYLPPDLQVCLVSATLPHEILEMTSKFMTEPVKILVKRDELTLEGIKQFFVAD

SEQ ID NO: 46266 - protein, 238 aa, Arabidopsis thaliana
  peptide (1)..(238): Ceres Seq. ID no. 14315784
  misc_feature (31)..(234): Pfam Name: DEAD/DEAH box helicase Pfam Description: DEAD/DEAH box helicase
  misc_feature (15)..(236): Homolog of NCBI NO: 11358803 NR Description: RNA helicase RH23 [imported] - Arabidopsis
  misc_feature (2)..(237): Homolog of NCBI NO: 28277876 NR Description: Unknown (protein for MGC:56139) [Danio rerio]
  misc_feature (1)..(237): Homolog of NCBI NO: 19528517 NR Description: RE50350p [Drosophila melanogaster]
  misc_feature (2)..(237): Homolog of NCBI NO: 31207619 NR Description: ENSANGP00000020417 [Anopheles gambiae]
  misc_feature (1)..(237): Homolog of NCBI NO: 24645031 NR Description: CG7483-PA [Drosophila melanogaster]
  misc_feature (1)..(237): Homolog of NCBI NO: 7443503 NR Description: translation initiation factor - garden pea
  misc_feature (1)..(237): Homolog of NCBI NO: 1170507 NR Description: Eukaryotic initiation factor 4A-3 (eIF-4A-3)
  misc_feature (1)..(237): Homolog of NCBI NO: 11277760 NR Description: RNA helicase RH2 [imported] - Arabidopsis
  misc_feature (1)..(237): Homolog of NCBI NO: 15215678 NR Description: AT3g19760/MMB12_21 [Arabidopsis thaliana]
  misc_feature (1)..(237): Homolog of NCBI NO: 15230945 NR Description: eukaryotic translation initiation factor 4A
MDDDKLVFETTDGIEPITSFNDMGIKEDVLRGVYEYGFEKPSAIQQRAVMPILQGRDVIAQAQSGTGKTSMIALSVCQVVDTSSREVQALILSPTRELATQTEKTIQAIGLHANIQAHACIGGNSVGEDIRKLEHGVHVVSGTPGRVCDMIKRRSLRTRAIKLLILDESDEMLSRGFKDQIYDVYRYLPPDLQVCLVSATLPHEILEMTSKFMTEPVKILVKRDELTLEGIKQFFVAD

SEQ ID NO: 46267 - protein, 216 aa, Arabidopsis thaliana
  peptide (1)..(216): Ceres Seq. ID no. 14315785
  misc_feature (9)..(212): Pfam Name: DEAD/DEAH box helicase Pfam Description: DEAD/DEAH box helicase
  misc_feature (1)..(214): Homolog of NCBI NO: 11358803 NR Description: RNA helicase RH23 [imported] - Arabidopsis
  misc_feature (1)..(215): Homolog of NCBI NO: 28277876 NR Description: Unknown (protein for MGC:56139) [Danio rerio]
  misc_feature (1)..(215): Homolog of NCBI NO: 19528517 NR Description: RE50350p [Drosophila melanogaster]
  misc_feature (1)..(215): Homolog of NCBI NO: 31207619 NR Description: ENSANGP00000020417 [Anopheles gambiae]
  misc_feature (1)..(215): Homolog of NCBI NO: 24645031 NR Description: CG7483-PA [Drosophila melanogaster]
  misc_feature (1)..(215): Homolog of NCBI NO: 7443503 NR Description: translation initiation factor - garden pea
  misc_feature (1)..(215): Homolog of NCBI NO: 1170507 NR Description: Eukaryotic initiation factor 4A-3 (eIF-4A-3)
  misc_feature (1)..(215): Homolog of NCBI NO: 11277760 NR Description: RNA helicase RH2 [imported] - Arabidopsis
  misc_feature (1)..(215): Homolog of NCBI NO: 15215678 NR Description: AT3g19760/MMB12_21 [Arabidopsis thaliana]
  misc_feature (1)..(215): Homolog of NCBI NO: 15230945 NR Description: eukaryotic translation initiation factor 4A
MGIKEDVLRGVYEYGFEKPSAIQQRAVMPILQGRDVIAQAQSGTGKTSMIALSVCQVVDTSSREVQALILSPTRELATQTEKTIQAIGLHANIQAHACIGGNSVGEDIRKLEHGVHVVSGTPGRVCDMIKRRSLRTRAIKLLILDESDEMLSRGFKDQIYDVYRYLPPDLQVCLVSATLPHEILEMTSKFMTEPVKILVKRDELTLEGIKQFFVAD

SEQ ID NO: 46268 - DNA, 2234 bp, Arabidopsis thaliana
  misc_feature (1)..(2234): Ceres Seq. ID no. 14310012
  misc_feature: MA Experiment ID: 20000173 Result: Down-regulated in Transcription
  misc_feature: MA Experiment 20000173 PARAMETER Experiment Name: At_42deg_Heat_P Parameter: Age (day) Value: 14
  misc_feature: MA Experiment 20000173 PARAMETER Experiment Name: At_42deg_Heat_P Parameter: Organism Value: A. thaliana
  misc_feature: MA Experiment 20000173 PARAMETER Experiment Name: At_42deg_Heat_P Parameter: Plant Line Value: WS
  misc_feature: MA Experiment 20000173 PARAMETER Experiment Name: At_42deg_Heat_P Parameter: Temperature (deg C) Value: 42 vs. 22
  misc_feature: MA Experiment 20000173 PARAMETER Experiment Name: At_42deg_Heat_P Parameter: Timepoint (hr) Value: 6
  misc_feature: MA Experiment 20000173 PARAMETER Experiment Name: At_42deg_Heat_P Parameter: Tissue Value: Aerial
  misc_feature: MA Experiment ID: 20000180 Result: Down-regulated in Transcription
  misc_feature: MA Experiment 20000180 PARAMETER Experiment Name: At_Germinating_Seeds_P Parameter: Age (hr) Value: 24 vs. 0
  misc_feature: MA Experiment 20000180 PARAMETER Experiment Name: At_Germinating_Seeds_P Parameter: Tissue Value: Germinating Seeds
  misc_feature: MA Experiment ID: 20000184 Result: Down-regulated in Transcription
  misc_feature: MA Experiment 20000184 PARAMETER Experiment Name: At_Shoots__P Parameter: Age (day) Value: 7
  misc_feature: MA Experiment 20000184 PARAMETER Experiment Name: At_Shoots__P Parameter: Tissue Value: Shoots vs. Whole Plant
gacccaaaacaacatcttttaagcttctcccgcaaaattcagcaaagctttcggaggaatctcctaacagtcaccaccaccaccaccgtctaggtcaaatctcgtcttcctcacgctctatttctccatagaatatttcctaactcctcctccggtttatcgattttttcaatttttctagggtttcgcgccgggatctaaaaaatcacaatcatgccggtgagtttgactccgaacgcaatcacggcgatacatgacggcgacgtgaatttgaagccgttgttacagattttagaaatcaaaatgataggaagaagtcaagagagaagccaagagaggtatcgtttcctcatttcagatggtgtttctgctcaacatgctatggtcgcggttcagcttaataatcgagtcaagtcaggacaatttgagaaaggatctatcgttcagcttattgattacatttgtagcgacgttaaaggccgcaagcttattgtggtgctgaacatggagacgatagtacaacagtctgaaaccattgggaaccctacaatatttggagaaacagatacagaagcccagaagacattttcaggtacgggcaatataccgcctccgaacagggttgtttttaatgaaccaatggttcagcattctgttaatagagcacctcccaggggtgtaaacattcaaaatcaagccaacaatactccaagcttcaggccatctgttcaaccttcatatcaaccgccagcaagttacagaaatcatggacccatcatgaagaacgaggctccagctcgagtcatccctattgctgctctcaatccataccaaggtcgatgggctattaaggctagagtaactgcgaaaggagatatcagacgatataacaatgcaaaaggagatggaaaggttttctcgtttgatctgcttgactatgatggaggggagattcgggttacgtgctttaatgctcttgttgaccgtttctatgatgttactgaggttggtaaggtatatttgatttcaaagggaagtttgaagcctgcacagaaaaatttcaaccacttaaagaatgaatgggaaattttcttggagtcaacatcgactgtggagctttgccctgatgaagatggctccataccaaagcagcaattctccttccgcccaataagtgacattgagaacgctgagaacaataccatactcgatgtcattggtgtggtgacttctgtgaacccctcggtgccaatcttgagaaagaacgggatggaaacccataggaggatcctgaatctaaaggatgaatcaggaaaggctgtagaggtaacactttggggagaattctgtaaccgagatggtcggcaactggaagagatggttgattcagcttttcacccggttttagcaataaaagctggaaaagtaagcgacttcagtgggaaatcagtagggacaatatcttcaacacagctcttcataaatccagatttccctgaagctcataaactacggacctggttcgattacgggggaaaagacactgcttccttctccatctccagggacactatgcctggaggagtttccaggaacgagataaagaaaaatgtttctcagatcaaagaggaaggtcttggaagatcagataagcctgactggatcactgtgaaagcaaccatatcattcatcaaaacagatagcttctgttatacagcttgtcctttgatgatcggggataaacaatgcaacaagaaggttacacggtctggaacaaacaggtggctctgtgaccggtgcaaccaagagtctgatgaatgcgactatagataccttcttcaggtacagattcaagaccacactgggttgacttggataaccgcgtttcaagaaacaggagaagaaataatgggatgtccggctaagaagctttacgcaatgaaatacgaattggagaaggaggaagagttcgcagagattgttagagacagactgtttcatcagtacatgttgaagctgaagatcaaagaggaatcgtatggggatgaacaaagagtgaagatgactgttgtgaaggttgataaggtgaattatacatccgagagtaaatacatgcttgatttgctcgtaaggtaagttcgttctaggtattacagtgaggtatttcaattaactcagaatatgcaagctcgagtttagtacactattatattatgaattgatgaattctattg

SEQ ID NO: 46269 - protein, 640 aa, Arabidopsis thaliana
  peptide (1)..(640): Ceres Seq. ID no. 14310013
  misc_feature (4)..(103): Pfam Name: Replication factor-A protein 1, N-terminal domain Pfam Description: Replication factor-A protein 1, N-terminal
  misc_feature (4)..(103): Pfam Name: Replication factor-A protein 1, N-terminal domain Pfam Description: Replication factor-A protein 1, N-terminal
  misc_feature (21)..(123): Homolog of NCBI NO: 40742813 NR Description: hypothetical protein AN7423.2 [Aspergillus
  misc_feature (180)..(638): Homolog of NCBI NO: 40742813 NR Description: hypothetical protein AN7423.2 [Aspergillus
  misc_feature (436)..(635): Homolog of NCBI NO: 33086646 NR Description: Cb1-727 [Rattus norvegicus]
  misc_feature (13)..(441): Homolog of NCBI NO: 33086646 NR Description: Cb1-727 [Rattus norvegicus]
  misc_feature (5)..(635): Homolog of NCBI NO: 18390321 NR Description: replication protein A1
  misc_feature (21)..(123): Homolog of NCBI NO: 40742813 NR Description: hypothetical protein AN7423.2 [Aspergillus
  misc_feature (436)..(635): Homolog of NCBI NO: 33086646 NR Description: Cb1-727 [Rattus norvegicus]
  misc_feature (5)..(635): Homolog of NCBI NO: 18390321 NR Description: replication protein A1
  misc_feature (5)..(638): Homolog of NCBI NO: 13536993 NR Description: replication protein A 70kDa
  misc_feature (193)..(640): Homolog of NCBI NO: 7488291 NR Description: replication protein A1 homolog T18B16.100 -
  misc_feature (1)..(116): Homolog of NCBI NO: 7488291 NR Description: replication protein A1 homolog T18B16.100 -
  misc_feature (50)..(638): Homolog of NCBI NO: 15242405 NR Description: replication protein, putative [Arabidopsis
  misc_feature (294)..(640): Homolog of NCBI NO: 18415246 NR Description: replication protein A, putative [Arabidopsis
  misc_feature (13)..(441): Homolog of NCBI NO: 33086646 NR Description: Cb1-727 [Rattus norvegicus]
  misc_feature (180)..(638): Homolog of NCBI NO: 40742813 NR Description: hypothetical protein AN7423.2 [Aspergillus
  misc_feature (294)..(640): Homolog of NCBI NO: 18415246 NR Description: replication protein A, putative [Arabidopsis
  misc_feature (50)..(638): Homolog of NCBI NO: 15242405 NR Description: replication protein, putative [Arabidopsis
  misc_feature (1)..(116): Homolog of NCBI NO: 7488291 NR Description: replication protein A1 homolog T18B16.100 -
  misc_feature (193)..(640): Homolog of NCBI NO: 7488291 NR Description: replication protein A1 homolog T18B16.100 -
  misc_feature (5)..(638): Homolog of NCBI NO: 13536993 NR Description: replication protein A 70kDa
MPVSLTPNAITAIHDGDVNLKPLLQILEIKMIGRSQERSQERYRFLISDGVSAQHAMVAVQLNNRVKSGQFEKGSIVQLIDYICSDVKGRKLIVVLNMETIVQQSETIGNPTIFGETDTEAQKTFSGTGNIPPPNRVVFNEPMVQHSVNRAPPRGVNIQNQANNTPSFRPSVQPSYQPPASYRNHGPIMKNEAPARVIPIAALNPYQGRWAIKARVTAKGDIRRYNNAKGDGKVFSFDLLDYDGGEIRVTCFNALVDRFYDVTEVGKVYLISKGSLKPAQKNFNHLKNEWEIFLESTSTVELCPDEDGSIPKQQFSFRPISDIENAENNTILDVIGVVTSVNPSVPILRKNGMETHRRILNLKDESGKAVEVTLWGEFCNRDGRQLEEMVDSAFHPVLAIKAGKVSDFSGKSVGTISSTQLFINPDFPEAHKLRTWFDYGGKDTASFSISRDTMPGGVSRNEIKKNVSQIKEEGLGRSDKPDWITVKATISFIKTDSFCYTACPLMIGDKQCNKKVTRSGTNRWLCDRCNQESDECDYRYLLQVQIQDHTGLTWITAFQETGEEIMGCPAKKLYAMKYELEKEEEFAEIVRDRLFHQYMLKLKIKEESYGDEQRVKMTVVKVDKVNYTSESKYMLDLLVR

SEQ ID NO: 46270 - protein, 610 aa, Arabidopsis thaliana
  peptide (1)..(610): Ceres Seq. ID no. 14310014
  misc_feature (1)..(73): Pfam Name: Replication factor-A protein 1, N-terminal domain Pfam Description: Replication factor-A protein 1, N-terminal
  misc_feature (1)..(73): Pfam Name: Replication factor-A protein 1, N-terminal domain Pfam Description: Replication factor-A protein 1, N-terminal
  misc_feature (1)..(93): Homolog of NCBI NO: 40742813 NR Description: hypothetical protein AN7423.2 [Aspergillus
  misc_feature (150)..(608): Homolog of NCBI NO: 40742813 NR Description: hypothetical protein AN7423.2 [Aspergillus
  misc_feature (406)..(605): Homolog of NCBI NO: 33086646 NR Description: Cb1-727 [Rattus norvegicus]
  misc_feature (1)..(411): Homolog of NCBI NO: 33086646 NR Description: Cb1-727 [Rattus norvegicus]
  misc_feature (1)..(605): Homolog of NCBI NO: 18390321 NR Description: replication protein A1
  misc_feature (1)..(93): Homolog of NCBI NO: 40742813 NR Description: hypothetical protein AN7423.2 [Aspergillus
  misc_feature (406)..(605): Homolog of NCBI NO: 33086646 NR Description: Cb1-727 [Rattus norvegicus]
  misc_feature (1)..(605): Homolog of NCBI NO: 18390321 NR Description: replication protein A1
  misc_feature (1)..(608): Homolog of NCBI NO: 13536993 NR Description: replication protein A 70kDa
  misc_feature (163)..(610): Homolog of NCBI NO: 7488291 NR Description: replication protein A1 homolog T18B16.100 -
  misc_feature (1)..(86): Homolog of NCBI NO: 7488291 NR Description: replication protein A1 homolog T18B16.100 -
  misc_feature (20)..(608): Homolog of NCBI NO: 15242405 NR Description: replication protein, putative [Arabidopsis
  misc_feature (264)..(610): Homolog of NCBI NO: 18415246 NR Description: replication protein A, putative [Arabidopsis
  misc_feature (1)..(411): Homolog of NCBI NO: 33086646 NR Description: Cb1-727 [Rattus norvegicus]
  misc_feature (150)..(608): Homolog of NCBI NO: 40742813 NR Description: hypothetical protein AN7423.2 [Aspergillus
  misc_feature (264)..(610): Homolog of NCBI NO: 18415246 NR Description: replication protein A, putative [Arabidopsis
  misc_feature (20)..(608): Homolog of NCBI NO: 15242405 NR Description: replication protein, putative [Arabidopsis
  misc_feature (1)..(86): Homolog of NCBI NO: 7488291 NR Description: replication protein A1 homolog T18B16.100 -
  misc_feature (163)..(610): Homolog of NCBI NO: 7488291 NR Description: replication protein A1 homolog T18B16.100 -
  misc_feature (1)..(608): Homolog of NCBI NO: 13536993 NR Description: replication protein A 70kDa
MIGRSQERSQERYRFLISDGVSAQHAMVAVQLNNRVKSGQFEKGSIVQLIDYICSDVKGRKLIVVLNMETIVQQSETIGNPTIFGETDTEAQKTFSGTGNIPPPNRVVFNEPMVQHSVNRAPPRGVNIQNQANNTPSFRPSVQPSYQPPASYRNHGPIMKNEAPARVIPIAALNPYQGRWAIKARVTAKGDIRRYNNAKGDGKVFSFDLLDYDGGEIRVTCFNALVDRFYDVTEVGKVYLISKGSLKPAQKNFNHLKNEWEIFLESTSTVELCPDEDGSIPKQQFSFRPISDIENAENNTILDVIGVVTSVNPSVPILRKNGMETHRRILNLKDESGKAVEVTLWGEFCNRDGRQLEEMVDSAFHPVLAIKAGKVSDFSGKSVGTISSTQLFINPDFPEAHKLRTWFDYGGKDTASFSISRDTMPGGVSRNEIKKNVSQIKEEGLGRSDKPDWITVKATISFIKTDSFCYTACPLMIGDKQCNKKVTRSGTNRWLCDRCNQESDECDYRYLLQVQIQDHTGLTWITAFQETGEEIMGCPAKKLYAMKYELEKEEEFAEIVRDRLFHQYMLKLKIKEESYGDEQRVKMTVVKVDKVNYTSESKYMLDLLVR

SEQ ID NO: 46271 - protein, 584 aa, Arabidopsis thaliana
  peptide (1)..(584): Ceres Seq. ID no. 14310015
  misc_feature (154)..(244): Pfam Name: OB-fold nucleic acid binding domain Pfam Description: OB-fold nucleic acid binding domain
  misc_feature (154)..(244): Pfam Name: OB-fold nucleic acid binding domain Pfam Description: OB-fold nucleic acid binding domain
  misc_feature (1)..(67): Homolog of NCBI NO: 40742813 NR Description: hypothetical protein AN7423.2 [Aspergillus
  misc_feature (124)..(582): Homolog of NCBI NO: 40742813 NR Description: hypothetical protein AN7423.2 [Aspergillus
  misc_feature (380)..(579): Homolog of NCBI NO: 33086646 NR Description: Cb1-727 [Rattus norvegicus]
  misc_feature (1)..(385): Homolog of NCBI NO: 33086646 NR Description: Cb1-727 [Rattus norvegicus]
  misc_feature (1)..(579): Homolog of NCBI NO: 18390321 NR Description: replication protein A1
  misc_feature (1)..(67): Homolog of NCBI NO: 40742813 NR Description: hypothetical protein AN7423.2 [Aspergillus
  misc_feature (380)..(579): Homolog of NCBI NO: 33086646 NR Description: Cb1-727 [Rattus norvegicus]
  misc_feature (1)..(579): Homolog of NCBI NO: 18390321 NR Description: replication protein A1
  misc_feature (1)..(582): Homolog of NCBI NO: 13536993 NR Description: replication protein A 70kDa
  misc_feature (137)..(584): Homolog of NCBI NO: 7488291 NR Description: replication protein A1 homolog T18B16.100 -
  misc_feature (1)..(60): Homolog of NCBI NO: 7488291 NR Description: replication protein A1 homolog T18B16.100 -
  misc_feature (1)..(582): Homolog of NCBI NO: 15242405 NR Description: replication protein, putative [Arabidopsis
  misc_feature (238)..(584): Homolog of NCBI NO: 18415246 NR Description: replication protein A, putative [Arabidopsis
  misc_feature (1)..(385): Homolog of NCBI NO: 33086646 NR Description: Cb1-727 [Rattus norvegicus]
  misc_feature (124)..(582): Homolog of NCBI NO: 40742813 NR Description: hypothetical protein AN7423.2 [Aspergillus
  misc_feature (238)..(584): Homolog of NCBI NO: 18415246 NR Description: replication protein A, putative [Arabidopsis
  misc_feature (1)..(582): Homolog of NCBI NO: 15242405 NR Description: replication protein, putative [Arabidopsis
  misc_feature (1)..(60): Homolog of NCBI NO: 7488291 NR Description: replication protein A1 homolog T18B16.100 -
  misc_feature (137)..(584): Homolog of NCBI NO: 7488291 NR Description: replication protein A1 homolog T18B16.100 -
  misc_feature (1)..(582): Homolog of NCBI NO: 13536993 NR Description: replication protein A 70kDa
MVAVQLNNRVKSGQFEKGSIVQLIDYICSDVKGRKLIVVLNMETIVQQSETIGNPTIFGETDTEAQKTFSGTGNIPPPNRVVFNEPMVQHSVNRAPPRGVNIQNQANNTPSFRPSVQPSYQPPASYRNHGPIMKNEAPARVIPIAALNPYQGRWAIKARVTAKGDIRRYNNAKGDGKVFSFDLLDYDGGEIRVTCFNALVDRFYDVTEVGKVYLISKGSLKPAQKNFNHLKNEWEIFLESTSTVELCPDEDGSIPKQQFSFRPISDIENAENNTILDVIGVVTSVNPSVPILRKNGMETHRRILNLKDESGKAVEVTLWGEFCNRDGRQLEEMVDSAFHPVLAIKAGKVSDFSGKSVGTISSTQLFINPDFPEAHKLRTWFDYGGKDTASFSISRDTMPGGVSRNEIKKNVSQIKEEGLGRSDKPDWITVKATISFIKTDSFCYTACPLMIGDKQCNKKVTRSGTNRWLCDRCNQESDECDYRYLLQVQIQDHTGLTWITAFQETGEEIMGCPAKKLYAMKYELEKEEEFAEIVRDRLFHQYMLKLKIKEESYGDEQRVKMTVVKVDKVNYTSESKYMLDLLVR

SEQ ID NO: 46272 - DNA, 1382 bp, Arabidopsis thaliana
  misc_feature (1)..(1382): Ceres Seq. ID no. 14310020
  misc_feature: MA Experiment ID: 20000180 Result: Up-regulated in Transcription
  misc_feature: MA Experiment 20000180 PARAMETER Experiment Name: At_Germinating_Seeds_P Parameter: Age (hr) Value: 24 vs. 0
  misc_feature: MA Experiment 20000180 PARAMETER Experiment Name: At_Germinating_Seeds_P Parameter: Tissue Value: Germinating Seeds
  misc_feature: MA Experiment ID: 20000496 Result: Down-regulated in Transcription
  misc_feature: MA Experiment 20000496 PARAMETER Experiment Name: At_Guard_Cells_P Parameter: Harvest Date Value: 7/19/2002
  misc_feature: MA Experiment 20000496 PARAMETER Experiment Name: At_Guard_Cells_P Parameter: Organism Value: Canola
  misc_feature: MA Experiment 20000496 PARAMETER Experiment Name: At_Guard_Cells_P Parameter: Tissue Value: Guard Cells vs. Leaves
  misc_feature: MA Experiment ID: 20001451 Result: Down-regulated in Transcription
  misc_feature: MA Experiment 20001451 PARAMETER Experiment Name: At_Far-red-induction_P Parameter: Age (day) Value: 7
  misc_feature: MA Experiment 20001451 PARAMETER Experiment Name: At_Far-red-induction_P Parameter: Light Value: Far-red vs. White
  misc_feature: MA Experiment 20001451 PARAMETER Experiment Name: At_Far-red-induction_P Parameter: Organism Value: A. thaliana
  misc_feature: MA Experiment 20001451 PARAMETER Experiment Name: At_Far-red-induction_P Parameter: Plant Line Value: Columbia
  misc_feature: MA Experiment 20001451 PARAMETER Experiment Name: At_Far-red-induction_P Parameter: Timepoint (hr) Value: 24
  misc_feature: MA Experiment 20001451 PARAMETER Experiment Name: At_Far-red-induction_P Parameter: Tissue Value: Whole Plant
  misc_feature: MA Experiment ID: 20001557 Result: Down-regulated in Transcription
  misc_feature: MA Experiment 20001557 PARAMETER Experiment Name: At_Drought_Soil_Dry_P Parameter: Age (day) Value: 27
  misc_feature: MA Experiment 20001557 PARAMETER Experiment Name: At_Drought_Soil_Dry_P Parameter: Organism Value: A. thaliana
  misc_feature: MA Experiment 20001557 PARAMETER Experiment Name: At_Drought_Soil_Dry_P Parameter: Plant Line Value: WS
  misc_feature: MA Experiment 20001557 PARAMETER Experiment Name: At_Drought_Soil_Dry_P Parameter: Post Timepoint (hr) Value: 3
  misc_feature: MA Experiment 20001557 PARAMETER Experiment Name: At_Drought_Soil_Dry_P Parameter: Post-Treatment Value: Re-Water vs. No Drought
  misc_feature: MA Experiment 20001557 PARAMETER Experiment Name: At_Drought_Soil_Dry_P Parameter: Timepoint (day) Value: 13
  misc_feature: MA Experiment 20001557 PARAMETER Experiment Name: At_Drought_Soil_Dry_P Parameter: Treatment Value: Drought vs. No Drought
  misc_feature: MA Experiment ID: 20001560 Result: Down-regulated in Transcription
  misc_feature: MA Experiment 20001560 PARAMETER Experiment Name: At_Drought_Soil_Dry_P Parameter: Age (day) Value: 28
  misc_feature: MA Experiment 20001560 PARAMETER Experiment Name: At_Drought_Soil_Dry_P Parameter: Organism Value: A. thaliana
  misc_feature: MA Experiment 20001560 PARAMETER Experiment Name: At_Drought_Soil_Dry_P Parameter: Plant Line Value: WS
  misc_feature: MA Experiment 20001560 PARAMETER Experiment Name: At_Drought_Soil_Dry_P Parameter: Post Timepoint (hr) Value: None
  misc_feature: MA Experiment 20001560 PARAMETER Experiment Name: At_Drought_Soil_Dry_P Parameter: Post-Treatment Value: None
  misc_feature: MA Experiment 20001560 PARAMETER Experiment Name: At_Drought_Soil_Dry_P Parameter: Timepoint (day) Value: 14
  misc_feature: MA Experiment 20001560 PARAMETER Experiment Name: At_Drought_Soil_Dry_P Parameter: Treatment Value: Drought vs. No Drought
  misc_feature: MA Experiment ID: 20001911 Result: Up-regulated in Transcription
  misc_feature: MA Experiment 20001911 PARAMETER Experiment Name: At_Drought_Reproduction_P Parameter: Age (day) Value: 40
  misc_feature: MA Experiment 20001911 PARAMETER Experiment Name: At_Drought_Reproduction_P Parameter: Organism Value: A. thaliana
  misc_feature: MA Experiment 20001911 PARAMETER Experiment Name: At_Drought_Reproduction_P Parameter: Plant Line Value: WS
  misc_feature: MA Experiment 20001911 PARAMETER Experiment Name: At_Drought_Reproduction_P Parameter: Timepoint (day) Value: 10
  misc_feature: MA Experiment 20001911 PARAMETER Experiment Name: At_Drought_Reproduction_P Parameter: Tissue Value: Flowers
  misc_feature: MA Experiment 20001911 PARAMETER Experiment Name: At_Drought_Reproduction_P Parameter: Treatment Value: Drought vs. No Drought
tgtgtcttaagttcttgcctacaggaagccagaaacattgaagactttctggagaacttcaaagatgaccccacagtcaaaattcctggagtatacaagaatctttgtggtccgcgggttctggtaatggagtggattgatggtattcggtgcactgacccacaggccatcaaggatgcagggattgatttaaatggattcttgactgttggcgtaagtgctgctctaaggcagctgttggaatttggattgttccatggagatccacatcctggaaatatctttgcaatgcaagatgggcgtatcgcttatgtggacttcggtaatgttgctgtactgagtcagcaaaacaagcaaattttgattgatgctgttgttcatgcggttaatgaggactatggggagatggcaaatgatttcactaggcttgggttcttggccaaggataccgatgtttctcctatcgttccagctttagaagccatctggcagaactctgcagggaaaggacttgcagatttcaatttccgaagtgttacaggacaattcaacaagcttgtgtacgactttcccatccgtatcccagagcggttctctcttgttattcgttctctgcttacgcaggagggtatatgtttcacactgaagcctgattttaaatttctagaggttgcttatccatatgtagcaaaacggctcctaacggatccaaatcctgcacttcgggaacgcttgatacaggttctattcaaagatggtgttttccaatggaaaaggctagaaaaccttttatcacttgcaaaggaaaacgtcgccaagatgagtagcaatcctaatctacgagtaaagcgtgtggagagtaagcttgacttgacagataccattaaggacggagctcgtcttttcctccttgacgaaggcatccgcaggaaacttattcttgcactcacagaggactcgaagcttcatgtagaagagcttgtggacgtatacagattggttgaagacgaagtagatattcccacactggccatgcaagtcgtgcaagatttaccgaatgttttccgagattttgtgttgtcatggagcaactcagtattatccgacagataatgaatcagcttctcacttactttttttggctctttttgaagaggaaagaggtaatatatattacagggagtagatggagaagaaaagcgtagattaatatatagtttaatcttcgatgcatacatgttattaacttatacaccaatccatacatgtaattatataaaagcacacacaaacttcacttcacttgttacccagtttgagtcttggtctcttggacgttgtctactgtagttggatatctaaacacattaatcgacgtcatc

SEQ ID NO: 46273 - protein, 370 aa, Arabidopsis thaliana
  peptide (1)..(370): Ceres Seq. ID no. 14310021
  misc_feature (8)..(270): Homolog of NCBI NO: 23042448 NR Description: hypothetical protein [Trichodesmium erythraeum
  misc_feature (8)..(270): Homolog of NCBI NO: 16331408 NR Description: ABC1-like [Synechocystis sp. PCC 6803]
  misc_feature (7)..(338): Homolog of NCBI NO: 22299203 NR Description: ORF_ID:tlr1660~hypothetical protein
  misc_feature (7)..(337): Homolog of NCBI NO: 16329739 NR Description: ABC1-like [Synechocystis sp. PCC 6803]
  misc_feature (9)..(351): Homolog of NCBI NO: 37523981 NR Description: hypothetical protein gll4412 [Gloeobacter
  misc_feature (7)..(338): Homolog of NCBI NO: 23040126 NR Description: hypothetical protein [Trichodesmium erythraeum
  misc_feature (7)..(351): Homolog of NCBI NO: 17228088 NR Description: hypothetical protein [Nostoc sp. PCC 7120]
  misc_feature (7)..(357): Homolog of NCBI NO: 23129126 NR Description: hypothetical protein [Nostoc punctiforme]
  misc_feature (9)..(224): Homolog of NCBI NO: 7486669 NR Description: hypothetical protein F8F16.210 - Arabidopsis
  misc_feature (9)..(370): Homolog of NCBI NO: 22329052 NR Description: ABC transporter -related [Arabidopsis thaliana]
CVLSSCLQEARNIEDFLENFKDDPTVKIPGVYKNLCGPRVLVMEWIDGIRCTDPQAIKDAGIDLNGFLTVGVSAALRQLLEFGLFHGDPHPGNIFAMQDGRIAYVDFGNVAVLSQQNKQILIDAVVHAVNEDYGEMANDFTRLGFLAKDTDVSPIVPALEAIWQNSAGKGLADFNFRSVTGQFNKLVYDFPIRIPERFSLVIRSLLTQEGICFTLKPDFKFLEVAYPYVAKRLLTDPNPALRERLIQVLFKDGVFQWKRLENLLSLAKENVAKMSSNPNLRVKRVESKLDLTDTIKDGARLFLLDEGIRRKLILALTEDSKLHVEELVDVYRLVEDEVDIPTLAMQVVQDLPNVFRDFVLSWSNSVLSDR

SEQ ID NO: 46274 - protein, 328 aa, Arabidopsis thaliana
  peptide (1)..(328): Ceres Seq. ID no. 14310022
  misc_feature (1)..(228): Homolog of NCBI NO: 23042448 NR Description: hypothetical protein [Trichodesmium erythraeum
  misc_feature (1)..(228): Homolog of NCBI NO: 16331408 NR Description: ABC1-like [Synechocystis sp. PCC 6803]
  misc_feature (1)..(296): Homolog of NCBI NO: 22299203 NR Description: ORF_ID:tlr1660~hypothetical protein
  misc_feature (1)..(295): Homolog of NCBI NO: 16329739 NR Description: ABC1-like [Synechocystis sp. PCC 6803]
  misc_feature (1)..(309): Homolog of NCBI NO: 37523981 NR Description: hypothetical protein gll4412 [Gloeobacter
  misc_feature (1)..(296): Homolog of NCBI NO: 23040126 NR Description: hypothetical protein [Trichodesmium erythraeum
  misc_feature (1)..(309): Homolog of NCBI NO: 17228088 NR Description: hypothetical protein [Nostoc sp. PCC 7120]
  misc_feature (1)..(315): Homolog of NCBI NO: 23129126 NR Description: hypothetical protein [Nostoc punctiforme]
  misc_feature (1)..(182): Homolog of NCBI NO: 7486669 NR Description: hypothetical protein F8F16.210 - Arabidopsis
  misc_feature (1)..(328): Homolog of NCBI NO: 22329052 NR Description: ABC transporter -related [Arabidopsis thaliana]
MEWIDGIRCTDPQAIKDAGIDLNGFLTVGVSAALRQLLEFGLFHGDPHPGNIFAMQDGRIAYVDFGNVAVLSQQNKQILIDAVVHAVNEDYGEMANDFTRLGFLAKDTDVSPIVPALEAIWQNSAGKGLADFNFRSVTGQFNKLVYDFPIRIPERFSLVIRSLLTQEGICFTLKPDFKFLEVAYPYVAKRLLTDPNPALRERLIQVLFKDGVFQWKRLENLLSLAKENVAKMSSNPNLRVKRVESKLDLTDTIKDGARLFLLDEGIRRKLILALTEDSKLHVEELVDVYRLVEDEVDIPTLAMQVVQDLPNVFRDFVLSWSNSVLSDR

SEQ ID NO: 46275 - protein, 274 aa, Arabidopsis thaliana
  peptide (1)..(274): Ceres Seq. ID no. 14310023
  misc_feature (1)..(174): Homolog of NCBI NO: 23042448 NR Description: hypothetical protein [Trichodesmium erythraeum
  misc_feature (1)..(174): Homolog of NCBI NO: 16331408 NR Description: ABC1-like [Synechocystis sp. PCC 6803]
  misc_feature (1)..(242): Homolog of NCBI NO: 22299203 NR Description: ORF_ID:tlr1660~hypothetical protein
  misc_feature (1)..(241): Homolog of NCBI NO: 16329739 NR Description: ABC1-like [Synechocystis sp. PCC 6803]
  misc_feature (1)..(255): Homolog of NCBI NO: 37523981 NR Description: hypothetical protein gll4412 [Gloeobacter
  misc_feature (1)..(242): Homolog of NCBI NO: 23040126 NR Description: hypothetical protein [Trichodesmium erythraeum
  misc_feature (1)..(255): Homolog of NCBI NO: 17228088 NR Description: hypothetical protein [Nostoc sp. PCC 7120]
  misc_feature (1)..(261): Homolog of NCBI NO: 23129126 NR Description: hypothetical protein [Nostoc punctiforme]
  misc_feature (1)..(128): Homolog of NCBI NO: 7486669 NR Description: hypothetical protein F8F16.210 - Arabidopsis
  misc_feature (1)..(274): Homolog of NCBI NO: 22329052 NR Description: ABC transporter -related [Arabidopsis thaliana]
MQDGRIAYVDFGNVAVLSQQNKQILIDAVVHAVNEDYGEMANDFTRLGFLAKDTDVSPIVPALEAIWQNSAGKGLADFNFRSVTGQFNKLVYDFPIRIPERFSLVIRSLLTQEGICFTLKPDFKFLEVAYPYVAKRLLTDPNPALRERLIQVLFKDGVFQWKRLENLLSLAKENVAKMSSNPNLRVKRVESKLDLTDTIKDGARLFLLDEGIRRKLILALTEDSKLHVEELVDVYRLVEDEVDIPTLAMQVVQDLPNVFRDFVLSWSNSVLSDR

SEQ ID NO: 46276 - DNA, 1903 bp, Arabidopsis thaliana; identical to SEQ ID NO: 40379
  misc_feature (1)..(1903): Ceres Seq. ID no. 12336176
  misc_feature: MA Experiment ID: 108579 Result: Down-regulated in Transcription
  misc_feature: MA Experiment 108579 PARAMETER Experiment Name: At_4deg_Cold_cDNA_P Parameter: Temperature (deg C) Value: 4 vs. 22
  misc_feature: MA Experiment 108579 PARAMETER Experiment Name: At_4deg_Cold_cDNA_P Parameter: Timepoint (hr) Value: 6
  misc_feature: MA Experiment 108579 PARAMETER Experiment Name: At_4deg_Cold_cDNA_P Parameter: Tissue Value: Aerial
  misc_feature: MA Experiment ID: 108594 Result: Up-regulated in Transcription
  misc_feature: MA Experiment 108594 PARAMETER Experiment Name: At_Ler-rhl_Root_cDNA_P Parameter: Plant Line Value: null
  misc_feature: MA Experiment ID: 20000307 Result: Up-regulated in Transcription
  misc_feature: MA Experiment 20000307 PARAMETER Experiment Name: At_Germinating_Seeds_Sub_P Parameter: Age (hr) Value: 24 vs. 0
  misc_feature: MA Experiment 20000307 PARAMETER Experiment Name: At_Germinating_Seeds_Sub_P Parameter: Organism Value: A. thaliana
  misc_feature: MA Experiment 20000307 PARAMETER Experiment Name: At_Germinating_Seeds_Sub_P Parameter: Plant Line Value: WS
  misc_feature: MA Experiment 20000307 PARAMETER Experiment Name: At_Germinating_Seeds_Sub_P Parameter: Tissue Value: Germinating Seeds
  misc_feature: MA Experiment ID: 20000440 Result: Up-regulated in Transcription
  misc_feature: MA Experiment 20000440 PARAMETER Experiment Name: At_Closed-Flower__Sub_P Parameter: Tissue Value: Closed Flower vs. Whole Plant
  misc_feature: MA Experiment ID: 20001806 Result: Up-regulated in Transcription
  misc_feature: MA Experiment 20001806 PARAMETER Experiment Name: At_50mM_NH4NO3_L-to-H_Sub_P Parameter: Timepoint (hr) Value: 4
  misc_feature: MA Experiment 20001806 PARAMETER Experiment Name: At_50mM_NH4NO3_L-to-H_Sub_P Parameter: Tissue Value: Leaf
  misc_feature: MA Experiment 20001806 PARAMETER Experiment Name: At_50mM_NH4NO3_L-to-H_Sub_P Parameter: Treatment Value: 50mM NH4NO3 vs 100mM Mannitol
  misc_feature: MA Experiment ID: 20001807 Result: Up-regulated in Transcription
  misc_feature: MA Experiment 20001807 PARAMETER Experiment Name: At_50mM_NH4NO3_L-to-H_Sub_P Parameter: Timepoint (hr) Value: 6
  misc_feature: MA Experiment 20001807 PARAMETER Experiment Name: At_50mM_NH4NO3_L-to-H_Sub_P Parameter: Tissue Value: Leaf
  misc_feature: MA Experiment 20001807 PARAMETER Experiment Name: At_50mM_NH4NO3_L-to-H_Sub_P Parameter: Treatment Value: 50mM NH4NO3 vs 100mM Mannitol

SEQ ID NO: 46277 - protein, 595 aa, Arabidopsis thaliana; identical to SEQ ID NO: 40380
  peptide (1)..(595): Ceres Seq. ID no. 12336177
  misc_feature (56)..(455): Homolog of NCBI NO: 22330822 NR Description: putative cationic amino acid transporter
  misc_feature (119)..(574): Homolog of NCBI NO: 19699365 NR Description: At2g34960/F19I3.19 [Arabidopsis thaliana]
  misc_feature (26)..(574): Homolog of NCBI NO: 15220035 NR Description: putative amino acid transporter
  misc_feature (26)..(580): Homolog of NCBI NO: 34903850 NR Description: unnamed protein product [Oryza sativa (japonica
  misc_feature (26)..(574): Homolog of NCBI NO: 15226868 NR Description: putative amino acid transporter
  misc_feature (61)..(594): Homolog of NCBI NO: 1076291 NR Description: amino acid transport protein AAT1 - Arabidopsis
  misc_feature (26)..(594): Homolog of NCBI NO: 30685317 NR Description: amino acid transport protein AAT1 [Arabidopsis
  misc_feature (28)..(578): Homolog of NCBI NO: 38345948 NR Description: OSJNBb0103I08.20 [Oryza sativa (japonica
  misc_feature (13)..(595): Homolog of NCBI NO: 15228334 NR Description: putative amino acid transporter; protein id:
  misc_feature (13)..(595): Homolog of NCBI NO: 15238312 NR Description: amino acid transport - like protein
  misc_feature (56)..(455): Homolog of NCBI NO: 22330822 NR Description: putative cationic amino acid transporter
  misc_feature (119)..(574): Homolog of NCBI NO: 19699365 NR Description: At2g34960/F19I3.19 [Arabidopsis thaliana]
  misc_feature (26)..(574): Homolog of NCBI NO: 15220035 NR Description: putative amino acid transporter
  misc_feature (26)..(580): Homolog of NCBI NO: 34903850 NR Description: unnamed protein product [Oryza sativa (japonica
  misc_feature (26)..(574): Homolog of NCBI NO: 15226868 NR Description: putative amino acid transporter
  misc_feature (61)..(594): Homolog of NCBI NO: 1076291 NR Description: amino acid transport protein AAT1 - Arabidopsis
  misc_feature (26)..(594): Homolog of NCBI NO: 30685317 NR Description: amino acid transport protein AAT1 [Arabidopsis
  misc_feature (28)..(578): Homolog of NCBI NO: 38345948 NR Description: OSJNBb0103I08.20 [Oryza sativa (japonica
  misc_feature (13)..(595): Homolog of NCBI NO: 15228334 NR Description: putative amino acid transporter; protein id:
  misc_feature (13)..(595): Homolog of NCBI NO: 15238312 NR Description: amino acid transport - like protein
  misc_feature (56)..(455): Homolog of NCBI NO: 22330822 NR Description: putative cationic amino acid transporter
  misc_feature (119)..(574): Homolog of NCBI NO: 19699365 NR Description: At2g34960/F19I3.19 [Arabidopsis thaliana]
  misc_feature (26)..(574): Homolog of NCBI NO: 15220035 NR Description: putative amino acid transporter
  misc_feature (26)..(580): Homolog of NCBI NO: 34903850 NR Description: unnamed protein product [Oryza sativa (japonica
  misc_feature (26)..(574): Homolog of NCBI NO: 15226868 NR Description: putative amino acid transporter
  misc_feature (61)..(594): Homolog of NCBI NO: 1076291 NR Description: amino acid transport protein AAT1 - Arabidopsis
  misc_feature (26)..(594): Homolog of NCBI NO: 30685317 NR Description: amino acid transport protein AAT1 [Arabidopsis
  misc_feature (28)..(578): Homolog of NCBI NO: 38345948 NR Description: OSJNBb0103I08.20 [Oryza sativa (japonica
  misc_feature (13)..(595): Homolog of NCBI NO: 15228334 NR Description: putative amino acid transporter; protein id:
  misc_feature (13)..(595): Homolog of NCBI NO: 15238312 NR Description: amino acid transport - like protein

SEQ ID NO: 46278 - protein, 583 aa, Arabidopsis thaliana; identical to SEQ ID NO: 40381
  peptide (1)..(583): Ceres Seq. ID no. 12336178
  misc_feature (44)..(443): Homolog of NCBI NO: 22330822 NR Description: putative cationic amino acid transporter
  misc_feature (107)..(562): Homolog of NCBI NO: 19699365 NR Description: At2g34960/F19I3.19 [Arabidopsis thaliana]
  misc_feature (14)..(562): Homolog of NCBI NO: 15220035 NR Description: putative amino acid transporter
  misc_feature (14)..(568): Homolog of NCBI NO: 34903850 NR Description: unnamed protein product [Oryza sativa (japonica
  misc_feature (14)..(562): Homolog of NCBI NO: 15226868 NR Description: putative amino acid transporter
  misc_feature (49)..(582): Homolog of NCBI NO: 1076291 NR Description: amino acid transport protein AAT1 - Arabidopsis
  misc_feature (14)..(582): Homolog of NCBI NO: 30685317 NR Description: amino acid transport protein AAT1 [Arabidopsis
  misc_feature (16)..(566): Homolog of NCBI NO: 38345948 NR Description: OSJNBb0103I08.20 [Oryza sativa (japonica
  misc_feature (1)..(583): Homolog of NCBI NO: 15228334 NR Description: putative amino acid transporter; protein id:
  misc_feature (1)..(583): Homolog of NCBI NO: 15238312 NR Description: amino acid transport - like protein
  misc_feature (44)..(443): Homolog of NCBI NO: 22330822 NR Description: putative cationic amino acid transporter
  misc_feature (107)..(562): Homolog of NCBI NO: 19699365 NR Description: At2g34960/F19I3.19 [Arabidopsis thaliana]
  misc_feature (14)..(562): Homolog of NCBI NO: 15220035 NR Description: putative amino acid transporter
  misc_feature (14)..(568): Homolog of NCBI NO: 34903850 NR Description: unnamed protein product [Oryza sativa (japonica
  misc_feature (14)..(562): Homolog of NCBI NO: 15226868 NR Description: putative amino acid transporter
  misc_feature (49)..(582): Homolog of NCBI NO: 1076291 NR Description: amino acid transport protein AAT1 - Arabidopsis
  misc_feature (14)..(582): Homolog of NCBI NO: 30685317 NR Description: amino acid transport protein AAT1 [Arabidopsis
  misc_feature (16)..(566): Homolog of NCBI NO: 38345948 NR Description: OSJNBb0103I08.20 [Oryza sativa (japonica
  misc_feature (1)..(583): Homolog of NCBI NO: 15228334 NR Description: putative amino acid transporter; protein id:
  misc_feature (1)..(583): Homolog of NCBI NO: 15238312 NR Description: amino acid transport - like protein
  misc_feature (44)..(443): Homolog of NCBI NO: 22330822 NR Description: putative cationic amino acid transporter
  misc_feature (107)..(562): Homolog of NCBI NO: 19699365 NR Description: At2g34960/F19I3.19 [Arabidopsis thaliana]
  misc_feature (14)..(562): Homolog of NCBI NO: 15220035 NR Description: putative amino acid transporter
  misc_feature (14)..(568): Homolog of NCBI NO: 34903850 NR Description: unnamed protein product [Oryza sativa (japonica
  misc_feature (14)..(562): Homolog of NCBI NO: 15226868 NR Description: putative amino acid transporter
  misc_feature (49)..(582): Homolog of NCBI NO: 1076291 NR Description: amino acid transport protein AAT1 - Arabidopsis
  misc_feature (14)..(582): Homolog of NCBI NO: 30685317 NR Description: amino acid transport protein AAT1 [Arabidopsis
  misc_feature (16)..(566): Homolog of NCBI NO: 38345948 NR Description: OSJNBb0103I08.20 [Oryza sativa (japonica
  misc_feature (1)..(583): Homolog of NCBI NO: 15228334 NR Description: putative amino acid transporter; protein id:
  misc_feature (1)..(583): Homolog of NCBI NO: 15238312 NR Description: amino acid transport - like protein

SEQ ID NO: 46279 - protein, 538 aa, Arabidopsis thaliana; identical to SEQ ID NO: 40382
  peptide (1)..(538): Ceres Seq. ID no. 12336179
  misc_feature (1)..(398): Homolog of NCBI NO: 22330822 NR Description: putative cationic amino acid transporter
  misc_feature (62)..(517): Homolog of NCBI NO: 19699365 NR Description: At2g34960/F19I3.19 [Arabidopsis thaliana]
  misc_feature (1)..(517): Homolog of NCBI NO: 15220035 NR Description: putative amino acid transporter
  misc_feature (1)..(523): Homolog of NCBI NO: 34903850 NR Description: unnamed protein product [Oryza sativa (japonica
  misc_feature (1)..(517): Homolog of NCBI NO: 15226868 NR Description: putative amino acid transporter
  misc_feature (4)..(537): Homolog of NCBI NO: 1076291 NR Description: amino acid transport protein AAT1 - Arabidopsis
  misc_feature (1)..(537): Homolog of NCBI NO: 30685317 NR Description: amino acid transport protein AAT1 [Arabidopsis
  misc_feature (1)..(521): Homolog of NCBI NO: 38345948 NR Description: OSJNBb0103I08.20 [Oryza sativa (japonica
  misc_feature (1)..(538): Homolog of NCBI NO: 15228334 NR Description: putative amino acid transporter; protein id:
  misc_feature (1)..(538): Homolog of NCBI NO: 15238312 NR Description: amino acid transport - like protein
  misc_feature (1)..(398): Homolog of NCBI NO: 22330822 NR Description: putative cationic amino acid transporter
  misc_feature (62)..(517): Homolog of NCBI NO: 19699365 NR Description: At2g34960/F19I3.19 [Arabidopsis thaliana]
  misc_feature (1)..(517): Homolog of NCBI NO: 15220035 NR Description: putative amino acid transporter
  misc_feature (1)..(523): Homolog of NCBI NO: 34903850 NR Description: unnamed protein product [Oryza sativa (japonica
  misc_feature (1)..(517): Homolog of NCBI NO: 15226868 NR Description: putative amino acid transporter
  misc_feature (4)..(537): Homolog of NCBI NO: 1076291 NR Description: amino acid transport protein AAT1 - Arabidopsis
  misc_feature (1)..(537): Homolog of NCBI NO: 30685317 NR Description: amino acid transport protein AAT1 [Arabidopsis
  misc_feature (1)..(521): Homolog of NCBI NO: 38345948 NR Description: OSJNBb0103I08.20 [Oryza sativa (japonica
  misc_feature (1)..(538): Homolog of NCBI NO: 15228334 NR Description: putative amino acid transporter; protein id:
  misc_feature (1)..(538): Homolog of NCBI NO: 15238312 NR Description: amino acid transport - like protein
  misc_feature (1)..(398): Homolog of NCBI NO: 22330822 NR Description: putative cationic amino acid transporter
  misc_feature (62)..(517): Homolog of NCBI NO: 19699365 NR Description: At2g34960/F19I3.19 [Arabidopsis thaliana]
  misc_feature (1)..(517): Homolog of NCBI NO: 15220035 NR Description: putative amino acid transporter
  misc_feature (1)..(523): Homolog of NCBI NO: 34903850 NR Description: unnamed protein product [Oryza sativa (japonica
  misc_feature (1)..(517): Homolog of NCBI NO: 15226868 NR Description: putative amino acid transporter
  misc_feature (4)..(537): Homolog of NCBI NO: 1076291 NR Description: amino acid transport protein AAT1 - Arabidopsis
  misc_feature (1)..(537): Homolog of NCBI NO: 30685317 NR Description: amino acid transport protein AAT1 [Arabidopsis
  misc_feature (1)..(521): Homolog of NCBI NO: 38345948 NR Description: OSJNBb0103I08.20 [Oryza sativa (japonica
  misc_feature (1)..(538): Homolog of NCBI NO: 15228334 NR Description: putative amino acid transporter; protein id:
  misc_feature (1)..(538): Homolog of NCBI NO: 15238312 NR Description: amino acid transport - like protein

SEQ ID NO: 46280 - DNA, 2256 bp, Arabidopsis thaliana
  misc_feature (1)..(2256): Ceres Seq. ID no. 14309966
  misc_feature: MA Experiment ID: 20000438 Result: Down-regulated in Transcription
  misc_feature: MA Experiment 20000438 PARAMETER Experiment Name: At_Shoots__P Parameter: Age (day) Value: 14
  misc_feature: MA Experiment 20000438 PARAMETER Experiment Name: At_Shoots__P Parameter: Tissue Value: Shoots vs. Whole Plant
  misc_feature: MA Experiment ID: 20000460 Result: Up-regulated in Transcription
  misc_feature: MA Experiment 20000460 PARAMETER Experiment Name: At_10percent_PEG_P Parameter: Age (day) Value: 12
  misc_feature: MA Experiment 20000460 PARAMETER Experiment Name: At_10percent_PEG_P Parameter: Organism Value: A. thaliana
  misc_feature: MA Experiment 20000460 PARAMETER Experiment Name: At_10percent_PEG_P Parameter: Plant Line Value: WS
  misc_feature: MA Experiment 20000460 PARAMETER Experiment Name: At_10percent_PEG_P Parameter: Timepoint (day) Value: 12
  misc_feature: MA Experiment 20000460 PARAMETER Experiment Name: At_10percent_PEG_P Parameter: Tissue Value: Whole Plant
  misc_feature: MA Experiment 20000460 PARAMETER Experiment Name: At_10percent_PEG_P Parameter: Treatment Value: 10percent PEG vs. No Treatment
  misc_feature: MA Experiment ID: 20000527 Result: Up-regulated in Transcription
  misc_feature: MA Experiment 20000527 PARAMETER Experiment Name: At_10percent_PEG_P Parameter: Age (day) Value: 20
  misc_feature: MA Experiment 20000527 PARAMETER Experiment Name: At_10percent_PEG_P Parameter: Organism Value: A. thaliana
  misc_feature: MA Experiment 20000527 PARAMETER Experiment Name: At_10percent_PEG_P Parameter: Plant Line Value: WS
  misc_feature: MA Experiment 20000527 PARAMETER Experiment Name: At_10percent_PEG_P Parameter: Timepoint (day) Value: 20
  misc_feature: MA Experiment 20000527 PARAMETER Experiment Name: At_10percent_PEG_P Parameter: Tissue Value: Whole Plant
  misc_feature: MA Experiment 20000527 PARAMETER Experiment Name: At_10percent_PEG_P Parameter: Treatment Value: 10percent PEG vs. No Treatment
  misc_feature: MA Experiment ID: 20001911 Result: Up-regulated in Transcription
  misc_feature: MA Experiment 20001911 PARAMETER Experiment Name: At_Drought_Reproduction_P Parameter: Age (day) Value: 40
  misc_feature: MA Experiment 20001911 PARAMETER Experiment Name: At_Drought_Reproduction_P Parameter: Organism Value: A. thaliana
  misc_feature: MA Experiment 20001911 PARAMETER Experiment Name: At_Drought_Reproduction_P Parameter: Plant Line Value: WS
  misc_feature: MA Experiment 20001911 PARAMETER Experiment Name: At_Drought_Reproduction_P Parameter: Timepoint (day) Value: 10
  misc_feature: MA Experiment 20001911 PARAMETER Experiment Name: At_Drought_Reproduction_P Parameter: Tissue Value: Flowers
  misc_feature: MA Experiment 20001911 PARAMETER Experiment Name: At_Drought_Reproduction_P Parameter: Treatment Value: Drought vs. No Drought
atcatcgtcctctctgtttaaatcaggagaaagctcacgagaatccctcttcagatcagaacaccacaaaacatggctgcgtgtacactccacgcgctctcagtcaccttattcctccttctcttctttgccgtgtcaccggcgaaagctcagcaaccgtacgtcaacaaccaccagctcgcctgcgaggtccgtgtctacgacaacataaccaacggattcacatgtaacggcccaccttcttgccgctcatacctcactttctggtctcaaccaccgtacaacacggcggactcaatcgccaaactcctcaacgtctccgccgcagagatccaatcaatcaacaacctccccacagccaccaccagaatcccaacccgtgaattagtcgtgatcccagctaactgctcctgctcctcctccagcggaggattttaccaacacaacgccacttacaatctctccggtaacagaggagatgaaacctatttctcagtggctaacgatacttaccaagctttatccacgtgtcaagccatgatgtcacaaaaccgttacggcgagagacaactaacccccggcttaaacctccttgttcctctccgatgtgcttgtcccaccgccaaacaaaccaccgccggatttaaatatctcctgacttacttagtcgccatgggagatagtatctccggcatcgccgagatgttcaacagcacatccgccgccataaccgaaggtaacgagcttacatcagacaatatcttcttcttcacaccggttctagttcctctcacaactgaacctaccaaaatcgttatatctccgtcgcctcctcctccacccgttgttgctacgccgcctcaaacgccagttgatcctccgggatcttcttcttctcacaaatggatctacatcggaattggaatcggagctggtttgcttctcttactctcaatcttagctctctgcttctacaaacgaaggtctaagaagaagtcattaccgtcgtcgttgccggaggagaacaagctctttgattcatcaaccaaacaatctattcccacaacaacaacgactcaatggtcaatagatttatccaattcatcagaagctttcggtttaaaatccgccatagaatctctaacactatacagattcaacgatcttcaatcagctacttcgaatttcagcgacgaaaacagaatcaaaggctctgtttatcgcgcgacaatcaacggcgacgatgccgctgtgaaagtgatcaaaggagatgtttcttcctctgagatcaatcttttgaagaagctaaatcattctaatatcatccgtctctcaggtttctgtatccgtgaaggaacatcgtacctcgtcttcgagtattcagagaatggatcgatcagtgattggcttcactcgtcgggcaagaagagtttgacatggaaacagagagttgaaatagcaagggatgtggcagaggcgttagattatctccataactatataactccacctcatattcataagaacttggaatcaacaaacatacttctggattctaatttcagagccaagattgcgaatttcggtgttgcgaggattcttgatgaaggtgatcttgatcttcagttaacaagacatgttgaaggaacacaaggctacttagctccagagtatgtggagaatggagtcattacttcgaaactagacgtgtttgcttttggagttgcggttcttgagcttctttcggggagagaagcagtaacgatacataagaagaaggaaggagaagaagaagtggagatgttgtgtaaagtgataaacagtgtgcttggaggagagaatgtgagagagaagttaaaagagtttatggatccatctctagggaatgagtatccgttggagctggcttacaccatggctcagcttgctaagagctgtgtcgcaactgatcttaactcgcgtccatctgtcactcaggttctaaccacgctctcaatgatcgtctcctcctccatcgattgggagccttctgatgaccttcttcgttccggctctcttggcaactagttcagttttttttttctattggtagtcaataacaagtatttagactttagataaggaccatacggctaaaaagttgagatctaataagtaccccactgtgaaacatagtaataagaacatatcatagagaaactttatttagattttgacaaaaaaaaaaaaaaaaaaaactcgaggggggcccggtac

SEQ ID NO: 46281 - protein, 664 aa, Arabidopsis thaliana
  peptide (1)..(664): Ceres Seq. ID no. 14309967
  misc_feature (1)..(320): Homolog of NCBI NO: 37651074 NR Description: Nod-factor receptor 5 [Lotus corniculatus var.
  misc_feature (543)..(647): Homolog of NCBI NO: 37651070 NR Description: SYM10 protein [Pisum sativum]
  misc_feature (349)..(508): Homolog of NCBI NO: 37651070 NR Description: SYM10 protein [Pisum sativum]
  misc_feature (1)..(252): Homolog of NCBI NO: 37651070 NR Description: SYM10 protein [Pisum sativum]
  misc_feature (543)..(647): Homolog of NCBI NO: 37651066 NR Description: SYM10 protein [Pisum sativum]
  misc_feature (349)..(508): Homolog of NCBI NO: 37651066 NR Description: SYM10 protein [Pisum sativum]
  misc_feature (1)..(252): Homolog of NCBI NO: 37651066 NR Description: SYM10 protein [Pisum sativum]
  misc_feature (1)..(512): Homolog of NCBI NO: 15224061 NR Description: protein kinase -related [Arabidopsis thaliana]
  misc_feature (113)..(600): Homolog of NCBI NO: 15224061 NR Description: protein kinase -related [Arabidopsis thaliana]
  misc_feature (9)..(654): Homolog of NCBI NO: 5441881 NR Description: Similar to putative receptor kinase. (AC002332)
MAACTLHALSVTLFLLLFFAVSPAKAQQPYVNNHQLACEVRVYDNITNGFTCNGPPSCRSYLTFWSQPPYNTADSIAKLLNVSAAEIQSINNLPTATTRIPTRELVVIPANCSCSSSSGGFYQHNATYNLSGNRGDETYFSVANDTYQALSTCQAMMSQNRYGERQLTPGLNLLVPLRCACPTAKQTTAGFKYLLTYLVAMGDSISGIAEMFNSTSAAITEGNELTSDNIFFFTPVLVPLTTEPTKIVISPSPPPPPVVATPPQTPVDPPGSSSSHKWIYIGIGIGAGLLLLLSILALCFYKRRSKKKSLPSSLPEENKLFDSSTKQSIPTTTTTQWSIDLSNSSEAFGLKSAIESLTLYRFNDLQSATSNFSDENRIKGSVYRATINGDDAAVKVIKGDVSSSEINLLKKLNHSNIIRLSGFCIREGTSYLVFEYSENGSISDWLHSSGKKSLTWKQRVEIARDVAEALDYLHNYITPPHIHKNLESTNILLDSNFRAKIANFGVARILDEGDLDLQLTRHVEGTQGYLAPEYVENGVITSKLDVFAFGVAVLELLSGREAVTIHKKKEGEEEVEMLCKVINSVLGGENVREKLKEFMDPSLGNEYPLELAYTMAQLAKSCVATDLNSRPSVTQVLTTLSMIVSSSIDWEPSDDLLRSGSLGN

SEQ ID NO: 46282 - protein, 509 aa, Arabidopsis thaliana
  peptide (1)..(509): Ceres Seq. ID no. 14309968
  misc_feature (1)..(165): Homolog of NCBI NO: 37651074 NR Description: Nod-factor receptor 5 [Lotus corniculatus var.
  misc_feature (388)..(492): Homolog of NCBI NO: 37651070 NR Description: SYM10 protein [Pisum sativum]
  misc_feature (194)..(353): Homolog of NCBI NO: 37651070 NR Description: SYM10 protein [Pisum sativum]
  misc_feature (1)..(97): Homolog of NCBI NO: 37651070 NR Description: SYM10 protein [Pisum sativum]
  misc_feature (388)..(492): Homolog of NCBI NO: 37651066 NR Description: SYM10 protein [Pisum sativum]
  misc_feature (194)..(353): Homolog of NCBI NO: 37651066 NR Description: SYM10 protein [Pisum sativum]
  misc_feature (1)..(97): Homolog of NCBI NO: 37651066 NR Description: SYM10 protein [Pisum sativum]
  misc_feature (1)..(357): Homolog of NCBI NO: 15224061 NR Description: protein kinase -related [Arabidopsis thaliana]
  misc_feature (1)..(445): Homolog of NCBI NO: 15224061 NR Description: protein kinase -related [Arabidopsis thaliana]
  misc_feature (1)..(499): Homolog of NCBI NO: 5441881 NR Description: Similar to putative receptor kinase. (AC002332)
MMSQNRYGERQLTPGLNLLVPLRCACPTAKQTTAGFKYLLTYLVAMGDSISGIAEMFNSTSAAITEGNELTSDNIFFFTPVLVPLTTEPTKIVISPSPPPPPVVATPPQTPVDPPGSSSSHKWIYIGIGIGAGLLLLLSILALCFYKRRSKKKSLPSSLPEENKLFDSSTKQSIPTTTTTQWSIDLSNSSEAFGLKSAIESLTLYRFNDLQSATSNFSDENRIKGSVYRATINGDDAAVKVIKGDVSSSEINLLKKLNHSNIIRLSGFCIREGTSYLVFEYSENGSISDWLHSSGKKSLTWKQRVEIARDVAEALDYLHNYITPPHIHKNLESTNILLDSNFRAKIANFGVARILDEGDLDLQLTRHVEGTQGYLAPEYVENGVITSKLDVFAFGVAVLELLSGREAVTIHKKKEGEEEVEMLCKVINSVLGGENVREKLKEFMDPSLGNEYPLELAYTMAQLAKSCVATDLNSRPSVTQVLTTLSMIVSSSIDWEPSDDLLRSGSLGN

SEQ ID NO: 46283 - protein, 508 aa, Arabidopsis thaliana
  peptide (1)..(508): Ceres Seq. ID no. 14309969
  misc_feature (1)..(164): Homolog of NCBI NO: 37651074 NR Description: Nod-factor receptor 5 [Lotus corniculatus var.
  misc_feature (387)..(491): Homolog of NCBI NO: 37651070 NR Description: SYM10 protein [Pisum sativum]
  misc_feature (193)..(352): Homolog of NCBI NO: 37651070 NR Description: SYM10 protein [Pisum sativum]
  misc_feature (1)..(96): Homolog of NCBI NO: 37651070 NR Description: SYM10 protein [Pisum sativum]
  misc_feature (387)..(491): Homolog of NCBI NO: 37651066 NR Description: SYM10 protein [Pisum sativum]
  misc_feature (193)..(352): Homolog of NCBI NO: 37651066 NR Description: SYM10 protein [Pisum sativum]
  misc_feature (1)..(96): Homolog of NCBI NO: 37651066 NR Description: SYM10 protein [Pisum sativum]
  misc_feature (1)..(356): Homolog of NCBI NO: 15224061 NR Description: protein kinase -related [Arabidopsis thaliana]
  misc_feature (1)..(444): Homolog of NCBI NO: 15224061 NR Description: protein kinase -related [Arabidopsis thaliana]
  misc_feature (1)..(498): Homolog of NCBI NO: 5441881 NR Description: Similar to putative receptor kinase. (AC002332)
MSQNRYGERQLTPGLNLLVPLRCACPTAKQTTAGFKYLLTYLVAMGDSISGIAEMFNSTSAAITEGNELTSDNIFFFTPVLVPLTTEPTKIVISPSPPPPPVVATPPQTPVDPPGSSSSHKWIYIGIGIGAGLLLLLSILALCFYKRRSKKKSLPSSLPEENKLFDSSTKQSIPTTTTTQWSIDLSNSSEAFGLKSAIESLTLYRFNDLQSATSNFSDENRIKGSVYRATINGDDAAVKVIKGDVSSSEINLLKKLNHSNIIRLSGFCIREGTSYLVFEYSENGSISDWLHSSGKKSLTWKQRVEIARDVAEALDYLHNYITPPHIHKNLESTNILLDSNFRAKIANFGVARILDEGDLDLQLTRHVEGTQGYLAPEYVENGVITSKLDVFAFGVAVLELLSGREAVTIHKKKEGEEEVEMLCKVINSVLGGENVREKLKEFMDPSLGNEYPLELAYTMAQLAKSCVATDLNSRPSVTQVLTTLSMIVSSSIDWEPSDDLLRSGSLGN

SEQ ID NO: 46284 - DNA, 1717 bp, Arabidopsis thaliana
  misc_feature (1)..(1717): Ceres Seq. ID no. 15168623
  misc_feature: MA Experiment ID: 20000445 Result: Up-regulated in Transcription
  misc_feature: MA Experiment 20000445 PARAMETER Experiment Name: At_100uM_NAA__P Parameter: Age (day) Value: 14
  misc_feature: MA Experiment 20000445 PARAMETER Experiment Name: At_100uM_NAA__P Parameter: Organism Value: A. thaliana
  misc_feature: MA Experiment 20000445 PARAMETER Experiment Name: At_100uM_NAA__P Parameter: Plant Line Value: WS
  misc_feature: MA Experiment 20000445 PARAMETER Experiment Name: At_100uM_NAA__P Parameter: Timepoint (hr) Value: 6
  misc_feature: MA Experiment 20000445 PARAMETER Experiment Name: At_100uM_NAA__P Parameter: Tissue Value: Aerial
  misc_feature: MA Experiment 20000445 PARAMETER Experiment Name: At_100uM_NAA__P Parameter: Treatment Value: 100uM NAA vs. No Treatment
gaaaaataaaaaagagagcgaaggattgcatcaagtaatcgccgtgtaactaactacttttgcattcaccatcgctcttacgtttgaatctatccagatccaaagctcttcttcttcccggcaattctgagatctcattttcaccggcgacgagctttaatcggagaacgatgaagcagcttcacaagcaaatgagctcgaagcgtgatgaagaaaccattcccatgagccaatccagtccttactctcccaaaactttaaagcatcccagatctcttcccagatcgcttcactatctctttcgtgaacaacgactcctctttatcctcgtcgggatcttgatcggatccactttcttcatcctccagccttctctctctcgtttaggcgccgctgagtccacctcgttaatcaccagatctgtttcctacgccgtcaccgattccccgccttccaggtcgacttttaattccggaggcggcggaggtagaaccggtcgtgttcccgtcggtatcggacggaagagactgaggattgttgtcaccggagctggtttcgtcggtagtcatcttgttgataagcttatcggtaggggagatgaagtgatcgtgattgataacttcttcactggtaggaaggagaatttggttcatctattctcgaatcctaggtttgagctaattcgacacgatgttgttgagccaatcctccttgaggtcgatcagatttaccatttagcttgtccagcttcacctgttcattacaagtataatccagtcaagactatcaagacaaatgtaatgggcactctcaaaatgttgggtcttgcaaagagagttggggcaaggtttctgctcaccagcacaagtgaagtctatggagatccccttgagcatccacagaaagagacttactggggaaacgtgaatccaatcggtgagaggagttgctatgatgaaggaaagcgtactgcagaaaccctggccatggattatcaccgaggtgcaggttagaattgctcgtattttcaacacatatgggcccagaatgtgccttgatgatgggcgtgttgttagtaactttgttgcccagaccattcgcaaacacccaatgactgtttatggtgatggaaaacagactcgtagctttcaatatgtttctgacttggtggagggacttgtagctttaatggaaaacgatcatgtaggacccttcaaccttggtaaccctggagaattcacaatgcttgaacttgcagaggtggttaaggaggtgatcgacccaagcgcgaccatagagttcaaaccaaacacagcagacgatcctcacaagaggaaaccagacataagcaaagcaaaggaacagttgaactgggaaccaaagatatctctgagggagggactgcctcgcatggttagtgacttccgtaaccgaatcttaaacgaagacgaaggtaaaggtctctaagtcagtcacacagagatatagagtataatccttcttctgctttgatttgatatatgtatagtctctttttcaagagctctgctaagtctttttgttctctctgttttttctttttggttctatctccaagacacagattactacttatattagctaatgtttttgacttgggattttgtcattgggccattcaccactaggctcaatattagtggaaaggtattgatataaaatttcgctcggttcatac

SEQ ID NO: 46285 - protein, 280 aa, Arabidopsis thaliana
  peptide (1)..(280): Ceres Seq. ID no. 15168624
  misc_feature (122)..(280): Pfam Name: NAD dependent epimerase/dehydratase family Pfam Description: NAD dependent epimerase/dehydratase family
  misc_feature (208)..(280): Homolog of NCBI NO: 34908082 NR Description: P0506B12.30 [Oryza sativa (japonica
  misc_feature (6)..(166): Homolog of NCBI NO: 34908082 NR Description: P0506B12.30 [Oryza sativa (japonica
  misc_feature (7)..(279): Homolog of NCBI NO: 15227109 NR Description: NAD-dependent epimerase/dehydratase family
  misc_feature (6)..(280): Homolog of NCBI NO: 25396402 NR Description: UDP-glucuronic acid decarboxylase
  misc_feature (7)..(279): Homolog of NCBI NO: 2129578 NR Description: dTDP-glucose 4-6-dehydratase homolog D18 -
  misc_feature (7)..(279): Homolog of NCBI NO: 15229334 NR Description: NAD-dependent epimerase/dehydratase family
  misc_feature (1)..(280): Homolog of NCBI NO: 30693844 NR Description: NAD-dependent epimerase/dehydratase family
  misc_feature (1)..(280): Homolog of NCBI NO: 30693847 NR Description: NAD-dependent epimerase/dehydratase family
  misc_feature (1)..(280): Homolog of NCBI NO: 11270116 NR Description: dTDP-glucose 4-6-dehydratase-like protein -
  misc_feature (1)..(280): Homolog of NCBI NO: 17473549 NR Description: dTDP-glucose 4-6-dehydratase-like protein
MKQLHKQMSSKRDEETIPMSQSSPYSPKTLKHPRSLPRSLHYLFREQRLLFILVGILIGSTFFILQPSLSRLGAAESTSLITRSVSYAVTDSPPSRSTFNSGGGGGRTGRVPVGIGRKRLRIVVTGAGFVGSHLVDKLIGRGDEVIVIDNFFTGRKENLVHLFSNPRFELIRHDVVEPILLEVDQIYHLACPASPVHYKYNPVKTIKTNVMGTLKMLGLAKRVGARFLLTSTSEVYGDPLEHPQKETYWGNVNPIGERSCYDEGKRTAETLAMDYHRGAG

SEQ ID NO: 46286 - protein, 273 aa, Arabidopsis thaliana
  peptide (1)..(273): Ceres Seq. ID no. 15168625
  misc_feature (115)..(273): Pfam Name: NAD dependent epimerase/dehydratase family Pfam Description: NAD dependent epimerase/dehydratase family
  misc_feature (201)..(273): Homolog of NCBI NO: 34908082 NR Description: P0506B12.30 [Oryza sativa (japonica
  misc_feature (1)..(159): Homolog of NCBI NO: 34908082 NR Description: P0506B12.30 [Oryza sativa (japonica
  misc_feature (1)..(272): Homolog of NCBI NO: 15227109 NR Description: NAD-dependent epimerase/dehydratase family
  misc_feature (1)..(273): Homolog of NCBI NO: 25396402 NR Description: UDP-glucuronic acid decarboxylase
  misc_feature (1)..(272): Homolog of NCBI NO: 2129578 NR Description: dTDP-glucose 4-6-dehydratase homolog D18 -
  misc_feature (1)..(272): Homolog of NCBI NO: 15229334 NR Description: NAD-dependent epimerase/dehydratase family
  misc_feature (1)..(273): Homolog of NCBI NO: 30693844 NR Description: NAD-dependent epimerase/dehydratase family
  misc_feature (1)..(273): Homolog of NCBI NO: 30693847 NR Description: NAD-dependent epimerase/dehydratase family
  misc_feature (1)..(273): Homolog of NCBI NO: 11270116 NR Description: dTDP-glucose 4-6-dehydratase-like protein -
  misc_feature (1)..(273): Homolog of NCBI NO: 17473549 NR Description: dTDP-glucose 4-6-dehydratase-like protein
MSSKRDEETIPMSQSSPYSPKTLKHPRSLPRSLHYLFREQRLLFILVGILIGSTFFILQPSLSRLGAAESTSLITRSVSYAVTDSPPSRSTFNSGGGGGRTGRVPVGIGRKRLRIVVTGAGFVGSHLVDKLIGRGDEVIVIDNFFTGRKENLVHLFSNPRFELIRHDVVEPILLEVDQIYHLACPASPVHYKYNPVKTIKTNVMGTLKMLGLAKRVGARFLLTSTSEVYGDPLEHPQKETYWGNVNPIGERSCYDEGKRTAETLAMDYHRGAG

SEQ ID NO: 46287 - protein, 262 aa, Arabidopsis thaliana
  peptide (1)..(262): Ceres Seq. ID no. 15168626
  misc_feature (104)..(262): Pfam Name: NAD dependent epimerase/dehydratase family Pfam Description: NAD dependent epimerase/dehydratase family
  misc_feature (190)..(262): Homolog of NCBI NO: 34908082 NR Description: P0506B12.30 [Oryza sativa (japonica
  misc_feature (1)..(148): Homolog of NCBI NO: 34908082 NR Description: P0506B12.30 [Oryza sativa (japonica
  misc_feature (1)..(261): Homolog of NCBI NO: 15227109 NR Description: NAD-dependent epimerase/dehydratase family
  misc_feature (1)..(262): Homolog of NCBI NO: 25396402 NR Description: UDP-glucuronic acid decarboxylase
  misc_feature (1)..(261): Homolog of NCBI NO: 2129578 NR Description: dTDP-glucose 4-6-dehydratase homolog D18 -
  misc_feature (1)..(261): Homolog of NCBI NO: 15229334 NR Description: NAD-dependent epimerase/dehydratase family
  misc_feature (1)..(262): Homolog of NCBI NO: 30693844 NR Description: NAD-dependent epimerase/dehydratase family
  misc_feature (1)..(262): Homolog of NCBI NO: 30693847 NR Description: NAD-dependent epimerase/dehydratase family
  misc_feature (1)..(262): Homolog of NCBI NO: 11270116 NR Description: dTDP-glucose 4-6-dehydratase-like protein -
  misc_feature (1)..(262): Homolog of NCBI NO: 17473549 NR Description: dTDP-glucose 4-6-dehydratase-like protein
MSQSSPYSPKTLKHPRSLPRSLHYLFREQRLLFILVGILIGSTFFILQPSLSRLGAAESTSLITRSVSYAVTDSPPSRSTFNSGGGGGRTGRVPVGIGRKRLRIVVTGAGFVGSHLVDKLIGRGDEVIVIDNFFTGRKENLVHLFSNPRFELIRHDVVEPILLEVDQIYHLACPASPVHYKYNPVKTIKTNVMGTLKMLGLAKRVGARFLLTSTSEVYGDPLEHPQKETYWGNVNPIGERSCYDEGKRTAETLAMDYHRGAG

SEQ ID NO: 46288 - DNA, 2054 bp, Arabidopsis thaliana; identical to SEQ ID NO: 40106
  misc_feature (1)..(2054): Ceres Seq. ID no. 13509092
  misc_feature: MA Experiment ID: 108577 Result: Down-regulated in Transcription
  misc_feature: MA Experiment 108577 PARAMETER Experiment Name: At_42deg_Heat_cDNA_P Parameter: Temperature (deg C) Value: 42 vs. 22
  misc_feature: MA Experiment 108577 PARAMETER Experiment Name: At_42deg_Heat_cDNA_P Parameter: Timepoint (hr) Value: 6
  misc_feature: MA Experiment 108577 PARAMETER Experiment Name: At_42deg_Heat_cDNA_P Parameter: Tissue Value: Aerial
  misc_feature: MA Experiment ID: 20000111 Result: Down-regulated in Transcription
  misc_feature: MA Experiment 20000111 PARAMETER Experiment Name: At_42deg_Heat_cDNA_P Parameter: Temperature (deg C) Value: 42 vs. 22
  misc_feature: MA Experiment 20000111 PARAMETER Experiment Name: At_42deg_Heat_cDNA_P Parameter: Timepoint (hr) Value: 6
  misc_feature: MA Experiment 20000111 PARAMETER Experiment Name: At_42deg_Heat_cDNA_P Parameter: Tissue Value: Aerial
  misc_feature: MA Experiment ID: 20000113 Result: Down-regulated in Transcription
  misc_feature: MA Experiment 20000113 PARAMETER Experiment Name: At_42deg_Heat_cDNA_P Parameter: Temperature (deg C) Value: 42 vs. 22
  misc_feature: MA Experiment 20000113 PARAMETER Experiment Name: At_42deg_Heat_cDNA_P Parameter: Timepoint (hr) Value: 8
  misc_feature: MA Experiment 20000113 PARAMETER Experiment Name: At_42deg_Heat_cDNA_P Parameter: Tissue Value: Aerial

SEQ ID NO: 46289 - protein, 447 aa, Arabidopsis thaliana; identical to SEQ ID NO: 40107
  peptide (1)..(447): Ceres Seq. ID no. 13509093
  misc_feature (69)..(447): Homolog of NCBI NO: 27948448 NR Description: GAMYB-binding protein [Hordeum vulgare subsp.
  misc_feature (1)..(445): Homolog of NCBI NO: 13937195 NR Description: At1g78070/F28K19_28 [Arabidopsis thaliana]
  misc_feature (30)..(447): Homolog of NCBI NO: 9294540 NR Description: WD domain protein-like [Arabidopsis thaliana]
  misc_feature (1)..(447): Homolog of NCBI NO: 25405994 NR Description: protein F20N2.10 [imported] - Arabidopsis
  misc_feature (7)..(447): Homolog of NCBI NO: 30696707 NR Description: WD-40 repeat protein family [Arabidopsis
  misc_feature (1)..(447): Homolog of NCBI NO: 9758639 NR Description: WD-repeat protein-like [Arabidopsis thaliana]
  misc_feature (1)..(447): Homolog of NCBI NO: 21536732 NR Description: WD-repeat protein-like [Arabidopsis thaliana]
  misc_feature (1)..(447): Homolog of NCBI NO: 18423837 NR Description: WD-40 repeat protein family [Arabidopsis thaliana]
  misc_feature (1)..(447): Homolog of NCBI NO: 18405485 NR Description: WD-40 repeat protein family [Arabidopsis
  misc_feature (1)..(447): Homolog of NCBI NO: 18399975 NR Description: WD-40 repeat protein family [Arabidopsis
  misc_feature (69)..(447): Homolog of NCBI NO: 27948448 NR Description: GAMYB-binding protein [Hordeum vulgare subsp.
  misc_feature (1)..(445): Homolog of NCBI NO: 13937195 NR Description: At1g78070/F28K19_28 [Arabidopsis thaliana]
  misc_feature (30)..(447): Homolog of NCBI NO: 9294540 NR Description: WD domain protein-like [Arabidopsis thaliana]
  misc_feature (1)..(447): Homolog of NCBI NO: 25405994 NR Description: protein F20N2.10 [imported] - Arabidopsis
  misc_feature (7)..(447): Homolog of NCBI NO: 30696707 NR Description: WD-40 repeat protein family [Arabidopsis
  misc_feature (1)..(447): Homolog of NCBI NO: 9758639 NR Description: WD-repeat protein-like [Arabidopsis thaliana]
  misc_feature (1)..(447): Homolog of NCBI NO: 21536732 NR Description: WD-repeat protein-like [Arabidopsis thaliana]
  misc_feature (1)..(447): Homolog of NCBI NO: 18423837 NR Description: WD-40 repeat protein family [Arabidopsis thaliana]
  misc_feature (1)..(447): Homolog of NCBI NO: 18405485 NR Description: WD-40 repeat protein family [Arabidopsis
  misc_feature (1)..(447): Homolog of NCBI NO: 18399975 NR Description: WD-40 repeat protein family [Arabidopsis

SEQ ID NO: 46290 - protein, 436 aa, Arabidopsis thaliana; identical to SEQ ID NO: 40108
  peptide (1)..(436): Ceres Seq. ID no. 13509094
  misc_feature (58)..(436): Homolog of NCBI NO: 27948448 NR Description: GAMYB-binding protein [Hordeum vulgare subsp.
  misc_feature (1)..(434): Homolog of NCBI NO: 13937195 NR Description: At1g78070/F28K19_28 [Arabidopsis thaliana]
  misc_feature (19)..(436): Homolog of NCBI NO: 9294540 NR Description: WD domain protein-like [Arabidopsis thaliana]
  misc_feature (1)..(436): Homolog of NCBI NO: 25405994 NR Description: protein F20N2.10 [imported] - Arabidopsis
  misc_feature (1)..(436): Homolog of NCBI NO: 30696707 NR Description: WD-40 repeat protein family [Arabidopsis
  misc_feature (1)..(436): Homolog of NCBI NO: 9758639 NR Description: WD-repeat protein-like [Arabidopsis thaliana]
  misc_feature (1)..(436): Homolog of NCBI NO: 21536732 NR Description: WD-repeat protein-like [Arabidopsis thaliana]
  misc_feature (1)..(436): Homolog of NCBI NO: 18423837 NR Description: WD-40 repeat protein family [Arabidopsis thaliana]
  misc_feature (1)..(436): Homolog of NCBI NO: 18405485 NR Description: WD-40 repeat protein family [Arabidopsis
  misc_feature (1)..(436): Homolog of NCBI NO: 18399975 NR Description: WD-40 repeat protein family [Arabidopsis
  misc_feature (58)..(436): Homolog of NCBI NO: 27948448 NR Description: GAMYB-binding protein [Hordeum vulgare subsp.
  misc_feature (1)..(434): Homolog of NCBI NO: 13937195 NR Description: At1g78070/F28K19_28 [Arabidopsis thaliana]
  misc_feature (19)..(436): Homolog of NCBI NO: 9294540 NR Description: WD domain protein-like [Arabidopsis thaliana]
  misc_feature (1)..(436): Homolog of NCBI NO: 25405994 NR Description: protein F20N2.10 [imported] - Arabidopsis
  misc_feature (1)..(436): Homolog of NCBI NO: 30696707 NR Description: WD-40 repeat protein family [Arabidopsis
  misc_feature (1)..(436): Homolog of NCBI NO: 9758639 NR Description: WD-repeat protein-like [Arabidopsis thaliana]
  misc_feature (1)..(436): Homolog of NCBI NO: 21536732 NR Description: WD-repeat protein-like [Arabidopsis thaliana]
  misc_feature (1)..(436): Homolog of NCBI NO: 18423837 NR Description: WD-40 repeat protein family [Arabidopsis thaliana]
  misc_feature (1)..(436): Homolog of NCBI NO: 18405485 NR Description: WD-40 repeat protein family [Arabidopsis
  misc_feature (1)..(436): Homolog of NCBI NO: 18399975 NR Description: WD-40 repeat protein family [Arabidopsis

SEQ ID NO: 46291 - protein, 429 aa, Arabidopsis thaliana; identical to SEQ ID NO: 40109
  peptide (1)..(429): Ceres Seq. ID no. 13509095
  misc_feature (51)..(429): Homolog of NCBI NO: 27948448 NR Description: GAMYB-binding protein [Hordeum vulgare subsp.
  misc_feature (1)..(427): Homolog of NCBI NO: 13937195 NR Description: At1g78070/F28K19_28 [Arabidopsis thaliana]
  misc_feature (12)..(429): Homolog of NCBI NO: 9294540 NR Description: WD domain protein-like [Arabidopsis thaliana]
  misc_feature (1)..(429): Homolog of NCBI NO: 25405994 NR Description: protein F20N2.10 [imported] - Arabidopsis
  misc_feature (1)..(429): Homolog of NCBI NO: 30696707 NR Description: WD-40 repeat protein family [Arabidopsis
  misc_feature (1)..(429): Homolog of NCBI NO: 9758639 NR Description: WD-repeat protein-like [Arabidopsis thaliana]
  misc_feature (1)..(429): Homolog of NCBI NO: 21536732 NR Description: WD-repeat protein-like [Arabidopsis thaliana]
  misc_feature (1)..(429): Homolog of NCBI NO: 18423837 NR Description: WD-40 repeat protein family [Arabidopsis thaliana]
  misc_feature (1)..(429): Homolog of NCBI NO: 18405485 NR Description: WD-40 repeat protein family [Arabidopsis
  misc_feature (1)..(429): Homolog of NCBI NO: 18399975 NR Description: WD-40 repeat protein family [Arabidopsis
  misc_feature (51)..(429): Homolog of NCBI NO: 27948448 NR Description: GAMYB-binding protein [Hordeum vulgare subsp.
  misc_feature (1)..(427): Homolog of NCBI NO: 13937195 NR Description: At1g78070/F28K19_28 [Arabidopsis thaliana]
  misc_feature (12)..(429): Homolog of NCBI NO: 9294540 NR Description: WD domain protein-like [Arabidopsis thaliana]
  misc_feature (1)..(429): Homolog of NCBI NO: 25405994 NR Description: protein F20N2.10 [imported] - Arabidopsis
  misc_feature (1)..(429): Homolog of NCBI NO: 30696707 NR Description: WD-40 repeat protein family [Arabidopsis
  misc_feature (1)..(429): Homolog of NCBI NO: 9758639 NR Description: WD-repeat protein-like [Arabidopsis thaliana]
  misc_feature (1)..(429): Homolog of NCBI NO: 21536732 NR Description: WD-repeat protein-like [Arabidopsis thaliana]
  misc_feature (1)..(429): Homolog of NCBI NO: 18423837 NR Description: WD-40 repeat protein family [Arabidopsis thaliana]
  misc_feature (1)..(429): Homolog of NCBI NO: 18405485 NR Description: WD-40 repeat protein family [Arabidopsis
  misc_feature (1)..(429): Homolog of NCBI NO: 18399975 NR Description: WD-40 repeat protein family [Arabidopsis

SEQ ID NO: 46292 - DNA, 1934 bp, Arabidopsis thaliana
  misc_feature (1)..(1934): Ceres Seq. ID no. 14310008
  misc_feature: MA Experiment ID: 108488 Result: Up-regulated in Transcription
  misc_feature: MA Experiment ID: 108585 Result: Down-regulated in Transcription
  misc_feature: MA Experiment 108585 PARAMETER Experiment Name: At_5mM_NaNP_cDNA_P Parameter: Timepoint (hr) Value: 6
  misc_feature: MA Experiment 108585 PARAMETER Experiment Name: At_5mM_NaNP_cDNA_P Parameter: Tissue Value: Aerial
  misc_feature: MA Experiment 108585 PARAMETER Experiment Name: At_5mM_NaNP_cDNA_P Parameter: Treatment Value: null
  misc_feature: MA Experiment ID: 108595 Result: Down-regulated in Transcription
  misc_feature: MA Experiment 108595 PARAMETER Experiment Name: At_Ler-pi_Ovule_cDNA_P Parameter: Plant Line Value: null
  misc_feature: MA Experiment ID: 108668 Result: Down-regulated in Transcription
  misc_feature: MA Experiment 108668 PARAMETER Experiment Name: At_2mM_SA_cDNA_P Parameter: Plant Line Value: WS
  misc_feature: MA Experiment 108668 PARAMETER Experiment Name: At_2mM_SA_cDNA_P Parameter: Timepoint (hr) Value: 6
  misc_feature: MA Experiment 108668 PARAMETER Experiment Name: At_2mM_SA_cDNA_P Parameter: Treatment Value: 2mM SA vs. No Treatment
  misc_feature: MA Experiment ID: 20000069 Result: Down-regulated in Transcription
  misc_feature: MA Experiment 20000069 PARAMETER Experiment Name: At_100uM_ABA_Mutants_cDNA_P Parameter: Plant Line Value: CS23
  misc_feature: MA Experiment 20000069 PARAMETER Experiment Name: At_100uM_ABA_Mutants_cDNA_P Parameter: Timepoint (hr) Value: 6
  misc_feature: MA Experiment 20000069 PARAMETER Experiment Name: At_100uM_ABA_Mutants_cDNA_P Parameter: Tissue Value: Aerial
  misc_feature: MA Experiment 20000069 PARAMETER Experiment Name: At_100uM_ABA_Mutants_cDNA_P Parameter: Treatment Value: 100uM ABA vs. No Treatment
  misc_feature: MA Experiment ID: 20000070 Result: Down-regulated in Transcription
  misc_feature: MA Experiment 20000070 PARAMETER Experiment Name: At_100uM_ABA_Mutants_cDNA_P Parameter: Plant Line Value: CS24
  misc_feature: MA Experiment 20000070 PARAMETER Experiment Name: At_100uM_ABA_Mutants_cDNA_P Parameter: Timepoint (hr) Value: 6
  misc_feature: MA Experiment 20000070 PARAMETER Experiment Name: At_100uM_ABA_Mutants_cDNA_P Parameter: Tissue Value: Aerial
  misc_feature: MA Experiment 20000070 PARAMETER Experiment Name: At_100uM_ABA_Mutants_cDNA_P Parameter: Treatment Value: 100uM ABA vs. No Treatment
  misc_feature: MA Experiment ID: 20000071 Result: Down-regulated in Transcription
  misc_feature: MA Experiment 20000071 PARAMETER Experiment Name: At_100uM_ABA_Mutants_cDNA_P Parameter: Plant Line Value: CS8104
  misc_feature: MA Experiment 20000071 PARAMETER Experiment Name: At_100uM_ABA_Mutants_cDNA_P Parameter: Timepoint (hr) Value: 6
  misc_feature: MA Experiment 20000071 PARAMETER Experiment Name: At_100uM_ABA_Mutants_cDNA_P Parameter: Tissue Value: Aerial
  misc_feature: MA Experiment 20000071 PARAMETER Experiment Name: At_100uM_ABA_Mutants_cDNA_P Parameter: Treatment Value: 100uM ABA vs. No Treatment
  misc_feature: MA Experiment ID: 20000072 Result: Down-regulated in Transcription
  misc_feature: MA Experiment 20000072 PARAMETER Experiment Name: At_100uM_ABA_Mutants_cDNA_P Parameter: Plant Line Value: CS8105
  misc_feature: MA Experiment 20000072 PARAMETER Experiment Name: At_100uM_ABA_Mutants_cDNA_P Parameter: Timepoint (hr) Value: 6
  misc_feature: MA Experiment 20000072 PARAMETER Experiment Name: At_100uM_ABA_Mutants_cDNA_P Parameter: Tissue Value: Aerial
  misc_feature: MA Experiment 20000072 PARAMETER Experiment Name: At_100uM_ABA_Mutants_cDNA_P Parameter: Treatment Value: 100uM ABA vs. No Treatment
  misc_feature: MA Experiment ID: 20000086 Result: Down-regulated in Transcription
  misc_feature: MA Experiment 20000086 PARAMETER Experiment Name: At_100uM_ABA_Mutants_cDNA_P Parameter: Plant Line Value: CS22
  misc_feature: MA Experiment 20000086 PARAMETER Experiment Name: At_100uM_ABA_Mutants_cDNA_P Parameter: Timepoint (hr) Value: 6
  misc_feature: MA Experiment 20000086 PARAMETER Experiment Name: At_100uM_ABA_Mutants_cDNA_P Parameter: Tissue Value: Aerial
  misc_feature: MA Experiment 20000086 PARAMETER Experiment Name: At_100uM_ABA_Mutants_cDNA_P Parameter: Treatment Value: 100uM ABA vs. No Treatment
  misc_feature: MA Experiment ID: 20000087 Result: Down-regulated in Transcription
  misc_feature: MA Experiment 20000087 PARAMETER Experiment Name: At_100uM_ABA_Mutants_cDNA_P Parameter: Plant Line Value: WS
  misc_feature: MA Experiment 20000087 PARAMETER Experiment Name: At_100uM_ABA_Mutants_cDNA_P Parameter: Timepoint (hr) Value: 6
  misc_feature: MA Experiment 20000087 PARAMETER Experiment Name: At_100uM_ABA_Mutants_cDNA_P Parameter: Tissue Value: Aerial
  misc_feature: MA Experiment 20000087 PARAMETER Experiment Name: At_100uM_ABA_Mutants_cDNA_P Parameter: Treatment Value: 100uM ABA vs. No Treatment
  misc_feature: MA Experiment ID: 20000088 Result: Down-regulated in Transcription
  misc_feature: MA Experiment 20000088 PARAMETER Experiment Name: At_100uM_ABA_Mutants_cDNA_P Parameter: Plant Line Value: Landsberg
  misc_feature: MA Experiment 20000088 PARAMETER Experiment Name: At_100uM_ABA_Mutants_cDNA_P Parameter: Timepoint (hr) Value: 6
  misc_feature: MA Experiment 20000088 PARAMETER Experiment Name: At_100uM_ABA_Mutants_cDNA_P Parameter: Tissue Value: Aerial
  misc_feature: MA Experiment 20000088 PARAMETER Experiment Name: At_100uM_ABA_Mutants_cDNA_P Parameter: Treatment Value: 100uM ABA vs. No Treatment
  misc_feature: MA Experiment ID: 20000090 Result: Down-regulated in Transcription
  misc_feature: MA Experiment ID: 20000117 Result: Down-regulated in Transcription
  misc_feature: MA Experiment 20000117 PARAMETER Experiment Name: At_100uM_ABA_Mutants_cDNA_P Parameter: Plant Line Value: Columbia
  misc_feature: MA Experiment 20000117 PARAMETER Experiment Name: At_100uM_ABA_Mutants_cDNA_P Parameter: Timepoint (hr) Value: 6
  misc_feature: MA Experiment 20000117 PARAMETER Experiment Name: At_100uM_ABA_Mutants_cDNA_P Parameter: Tissue Value: Aerial
  misc_feature: MA Experiment 20000117 PARAMETER Experiment Name: At_100uM_ABA_Mutants_cDNA_P Parameter: Treatment Value: 100uM ABA vs. No Treatment
  misc_feature: MA Experiment ID: 20000185 Result: Down-regulated in Transcription
  misc_feature: MA Experiment 20000185 PARAMETER Experiment Name: At_Roots__P Parameter: Age (day) Value: 7 vs. 21
  misc_feature: MA Experiment 20000185 PARAMETER Experiment Name: At_Roots__P Parameter: Organism Value: A. thaliana
  misc_feature: MA Experiment 20000185 PARAMETER Experiment Name: At_Roots__P Parameter: Tissue Value: Roots vs. Whole Plant
  misc_feature: MA Experiment ID: 20000438 Result: Up-regulated in Transcription
  misc_feature: MA Experiment 20000438 PARAMETER Experiment Name: At_Shoots__P Parameter: Age (day) Value: 14
  misc_feature: MA Experiment 20000438 PARAMETER Experiment Name: At_Shoots__P Parameter: Tissue Value: Shoots vs. Whole Plant
  misc_feature: MA Experiment ID: 20000439 Result: Down-regulated in Transcription
  misc_feature: MA Experiment 20000439 PARAMETER Experiment Name: At_Roots__P Parameter: Age (day) Value: 14 vs. 21
  misc_feature: MA Experiment 20000439 PARAMETER Experiment Name: At_Roots__P Parameter: Organism Value: A. thaliana
  misc_feature: MA Experiment 20000439 PARAMETER Experiment Name: At_Roots__P Parameter: Tissue Value: Roots vs. Whole Plant
  misc_feature: MA Experiment ID: 20000794 Result: Down-regulated in Transcription
  misc_feature: MA Experiment 20000794 PARAMETER Experiment Name: At_Petals_P Parameter: Age (day) Value: 23-25 days
  misc_feature: MA Experiment 20000794 PARAMETER Experiment Name: At_Petals_P Parameter: Plant Line Value: WS
  misc_feature: MA Experiment 20000794 PARAMETER Experiment Name: At_Petals_P Parameter: Tissue Value: Petals vs. Whole plant
  misc_feature: MA Experiment ID: 20001450 Result: Down-regulated in Transcription
  misc_feature: MA Experiment 20001450 PARAMETER Experiment Name: At_Far-red-induction_P Parameter: Age (day) Value: 7
  misc_feature: MA Experiment 20001450 PARAMETER Experiment Name: At_Far-red-induction_P Parameter: Light Value: Far-red vs. White
  misc_feature: MA Experiment 20001450 PARAMETER Experiment Name: At_Far-red-induction_P Parameter: Organism Value: A. thaliana
  misc_feature: MA Experiment 20001450 PARAMETER Experiment Name: At_Far-red-induction_P Parameter: Plant Line Value: Columbia
  misc_feature: MA Experiment 20001450 PARAMETER Experiment Name: At_Far-red-induction_P Parameter: Timepoint (hr) Value: 8
  misc_feature: MA Experiment 20001450 PARAMETER Experiment Name: At_Far-red-induction_P Parameter: Tissue Value: Whole Plant
  misc_feature: MA Experiment ID: 20001906 Result: Down-regulated in Transcription
  misc_feature: MA Experiment 20001906 PARAMETER Experiment Name: At_Drought_Reproduction_P Parameter: Age (day) Value: 35
  misc_feature: MA Experiment 20001906 PARAMETER Experiment Name: At_Drought_Reproduction_P Parameter: Organism Value: A. thaliana
  misc_feature: MA Experiment 20001906 PARAMETER Experiment Name: At_Drought_Reproduction_P Parameter: Plant Line Value: WS
  misc_feature: MA Experiment 20001906 PARAMETER Experiment Name: At_Drought_Reproduction_P Parameter: Timepoint (day) Value: 5
  misc_feature: MA Experiment 20001906 PARAMETER Experiment Name: At_Drought_Reproduction_P Parameter: Tissue Value: Siliques
  misc_feature: MA Experiment 20001906 PARAMETER Experiment Name: At_Drought_Reproduction_P Parameter: Treatment Value: Drought vs. No Drought
  misc_feature: MA Experiment ID: 20001911 Result: Down-regulated in Transcription
  misc_feature: MA Experiment 20001911 PARAMETER Experiment Name: At_Drought_Reproduction_P Parameter: Age (day) Value: 40
  misc_feature: MA Experiment 20001911 PARAMETER Experiment Name: At_Drought_Reproduction_P Parameter: Organism Value: A. thaliana
  misc_feature: MA Experiment 20001911 PARAMETER Experiment Name: At_Drought_Reproduction_P Parameter: Plant Line Value: WS
  misc_feature: MA Experiment 20001911 PARAMETER Experiment Name: At_Drought_Reproduction_P Parameter: Timepoint (day) Value: 10
  misc_feature: MA Experiment 20001911 PARAMETER Experiment Name: At_Drought_Reproduction_P Parameter: Tissue Value: Flowers
  misc_feature: MA Experiment 20001911 PARAMETER Experiment Name: At_Drought_Reproduction_P Parameter: Treatment Value: Drought vs. No Drought
gacagaccgctagttttttttgccactctcttcgtctctctcttgtagcaatgccgcttcttcatccacagtcgttgcggcatccttctttcgagattcagacccaaagaagaagcaattccacaacaagattgcttctttctcacaagtttctccattctcaagcttccattatctcaatctccaggacaagaatcctcaaacgggtctctcagaatctctctgtagctaaagctgcttcagctcaaggttataaagtttgttcctttgtctccgcctgaaaaattgttaacgttatacgcgaaggagactaagcaagttctgatattttttaacttatgcattttggaaaacagctagtagtagtgttggtgagagtgttgctcaaacatcagaaaaagatgtgttgaaggctctgtctcagattattgatcctgattttgggacagatattgtttcttgtggttttgtgaaagatttggggattaatgaagctttgggtgaggtttcgttccgtttggagctgacaacacccgcatgtccagtcaaagacatgtttgagaacaaggcaaatgaggtagttgcagcccttccatgggtgaagaaggtaaatctgacaatgtcagcacaaccagccaagcccatttttgcagggcagcttccctttggattatcaagaatttcgaacatcatcgctgtttctagttgcaagggtggtgttgggaaatcaacagtagctgtaaatcttgcttatacattagctggtatgggtgctagagttggtatctttgatgctgatgtctatggtccaagtctaccaaccatggtcaatcctgagagccgtatattggaaatgaacccggagaagaagaccatcattccaacagaatacatgggcgtcaagctagtctcatttggatttgcaggacaagggcgtgccattatgagaggtcctatggtgtctggtgttataaaccaactccttacaacaactgaatggggagagctggactatcttgttatcgacatgcctcctggaactggtgatatacaactgaccttatgccaggttgcgccattgacagcagcggtaaatgtcaccacccctcaaaagttggcgtttattgatgttgcaaaaggtgtaaggatgttctcaaaacttaaggtgccttgcgttgctgttgtggagaatatgtgccactttgacgctgatgggaaacgttattacccttttgggaaaggttcaggttctgaggtggtcaagcaattcggcatacctcacctctttgacctccccattagaccaacgttatctgcttcgggggatagcggaactcctgaagtagtgtcggatcctctaagtgacgttgccagaacgttccaggatcttggtgtatgtgtagtgcaacaatgcgccaagatacgccagcaagtatcaacggccgtgacatacgacaagtatctcaaggcaattagagtgaaggtaccaaactcagacgaagagttcttactgcaccctgcaaccgtcagaagaaatgatagatctgcacaaagtgtggatgaatggactggagagcaaaaagttctatatggcgatgtagcggaagatatcgaacctgaggacatacgaccaatgggaaactacgctgtctcgataacctggcccgacgggtttagccagattgctccatatgaccagttggaagaaattgaaaggctagtagatgttcctccattgtctccagtcgaagtctagttcttgaacaatatgttttcgctttacgatatctcttgaaaatgaaatttgtatattcatattaagagcattgttatgaatcttacaatgatgaaaagagggttactgtaagcttttatttttactattataaactacagttataaccacagattttggactaggacgtagttgatct

SEQ ID NO: 46293 - protein, 400 aa, Arabidopsis thaliana
  peptide (1)..(400): Ceres Seq. ID no. 14310009
  misc_feature (45)..(76): Pfam Name: 4Fe-4S iron sulfur cluster binding proteins, Pfam Description: 4Fe-4S iron sulfur cluster binding proteins,
  misc_feature (1)..(283): Homolog of NCBI NO: 17228148 NR Description: mrp protein homolog [Nostoc sp. PCC 7120]
  misc_feature (1)..(299): Homolog of NCBI NO: 23136009 NR Description: hypothetical protein [Cytophaga hutchinsonii]
  misc_feature (1)..(26): Homolog of NCBI NO: 21674599 NR Description: ATP-binding protein, Mrp/Nbp35 family [Chlorobium
  misc_feature (40)..(268): Homolog of NCBI NO: 21674599 NR Description: ATP-binding protein, Mrp/Nbp35 family [Chlorobium
  misc_feature (1)..(279): Homolog of NCBI NO: 22970050 NR Description: hypothetical protein [Chloroflexus aurantiacus]
  misc_feature (1)..(393): Homolog of NCBI NO: 34910672 NR Description: putative MRP protein (ATP/GTP-binding protein)
  misc_feature (1)..(158): Homolog of NCBI NO: 11994706 NR Description: contains similarity to nucleotide-binding
  misc_feature (173)..(400): Homolog of NCBI NO: 11994706 NR Description: contains similarity to nucleotide-binding
  misc_feature (1)..(400): Homolog of NCBI NO: 15230111 NR Description: mrp protein -related [Arabidopsis thaliana]
  misc_feature (1)..(400): Homolog of NCBI NO: 21592386 NR Description: mrp protein, putative [Arabidopsis thaliana]
MFENKANEVVAALPWVKKVNLTMSAQPAKPIFAGQLPFGLSRISNIIAVSSCKGGVGKSTVAVNLAYTLAGMGARVGIFDADVYGPSLPTMVNPESRILEMNPEKKTIIPTEYMGVKLVSFGFAGQGRAIMRGPMVSGVINQLLTTTEWGELDYLVIDMPPGTGDIQLTLCQVAPLTAAVNVTTPQKLAFIDVAKGVRMFSKLKVPCVAVVENMCHFDADGKRYYPFGKGSGSEVVKQFGIPHLFDLPIRPTLSASGDSGTPEVVSDPLSDVARTFQDLGVCVVQQCAKIRQQVSTAVTYDKYLKAIRVKVPNSDEEFLLHPATVRRNDRSAQSVDEWTGEQKVLYGDVAEDIEPEDIRPMGNYAVSITWPDGFSQIAPYDQLEEIERLVDVPPLSPVEV

SEQ ID NO: 46294 - protein, 378 aa, Arabidopsis thaliana
  peptide (1)..(378): Ceres Seq. ID no. 14310010
  misc_feature (23)..(54): Pfam Name: 4Fe-4S iron sulfur cluster binding proteins, Pfam Description: 4Fe-4S iron sulfur cluster binding proteins,
  misc_feature (1)..(261): Homolog of NCBI NO: 23123585 NR Description: hypothetical protein [Nostoc punctiforme]
  misc_feature (1)..(261): Homolog of NCBI NO: 17228148 NR Description: mrp protein homolog [Nostoc sp. PCC 7120]
  misc_feature (1)..(277): Homolog of NCBI NO: 23136009 NR Description: hypothetical protein [Cytophaga hutchinsonii]
  misc_feature (18)..(246): Homolog of NCBI NO: 21674599 NR Description: ATP-binding protein, Mrp/Nbp35 family [Chlorobium
  misc_feature (1)..(257): Homolog of NCBI NO: 22970050 NR Description: hypothetical protein [Chloroflexus aurantiacus]
  misc_feature (1)..(371): Homolog of NCBI NO: 34910672 NR Description: putative MRP protein (ATP/GTP-binding protein)
  misc_feature (1)..(136): Homolog of NCBI NO: 11994706 NR Description: contains similarity to nucleotide-binding
  misc_feature (151)..(378): Homolog of NCBI NO: 11994706 NR Description: contains similarity to nucleotide-binding
  misc_feature (1)..(378): Homolog of NCBI NO: 15230111 NR Description: mrp protein -related [Arabidopsis thaliana]
  misc_feature (1)..(378): Homolog of NCBI NO: 21592386 NR Description: mrp protein, putative [Arabidopsis thaliana]
MSAQPAKPIFAGQLPFGLSRISNIIAVSSCKGGVGKSTVAVNLAYTLAGMGARVGIFDADVYGPSLPTMVNPESRILEMNPEKKTIIPTEYMGVKLVSFGFAGQGRAIMRGPMVSGVINQLLTTTEWGELDYLVIDMPPGTGDIQLTLCQVAPLTAAVNVTTPQKLAFIDVAKGVRMFSKLKVPCVAVVENMCHFDADGKRYYPFGKGSGSEVVKQFGIPHLFDLPIRPTLSASGDSGTPEVVSDPLSDVARTFQDLGVCVVQQCAKIRQQVSTAVTYDKYLKAIRVKVPNSDEEFLLHPATVRRNDRSAQSVDEWTGEQKVLYGDVAEDIEPEDIRPMGNYAVSITWPDGFSQIAPYDQLEEIERLVDVPPLSPVEV

SEQ ID NO: 46295 - protein, 329 aa, Arabidopsis thaliana
  peptide (1)..(329): Ceres Seq. ID no. 14310011
  misc_feature (1)..(212): Homolog of NCBI NO: 23123585 NR Description: hypothetical protein [Nostoc punctiforme]
  misc_feature (1)..(212): Homolog of NCBI NO: 17228148 NR Description: mrp protein homolog [Nostoc sp. PCC 7120]
  misc_feature (1)..(228): Homolog of NCBI NO: 23136009 NR Description: hypothetical protein [Cytophaga hutchinsonii]
  misc_feature (1)..(197): Homolog of NCBI NO: 21674599 NR Description: ATP-binding protein, Mrp/Nbp35 family [Chlorobium
  misc_feature (1)..(208): Homolog of NCBI NO: 22970050 NR Description: hypothetical protein [Chloroflexus aurantiacus]
  misc_feature (1)..(322): Homolog of NCBI NO: 34910672 NR Description: putative MRP protein (ATP/GTP-binding protein)
  misc_feature (1)..(87): Homolog of NCBI NO: 11994706 NR Description: contains similarity to nucleotide-binding
  misc_feature (102)..(329): Homolog of NCBI NO: 11994706 NR Description: contains similarity to nucleotide-binding
  misc_feature (1)..(329): Homolog of NCBI NO: 15230111 NR Description: mrp protein -related [Arabidopsis thaliana]
  misc_feature (1)..(329): Homolog of NCBI NO: 21592386 NR Description: mrp protein, putative [Arabidopsis thaliana]
MGARVGIFDADVYGPSLPTMVNPESRILEMNPEKKTIIPTEYMGVKLVSFGFAGQGRAIMRGPMVSGVINQLLTTTEWGELDYLVIDMPPGTGDIQLTLCQVAPLTAAVNVTTPQKLAFIDVAKGVRMFSKLKVPCVAVVENMCHFDADGKRYYPFGKGSGSEVVKQFGIPHLFDLPIRPTLSASGDSGTPEVVSDPLSDVARTFQDLGVCVVQQCAKIRQQVSTAVTYDKYLKAIRVKVPNSDEEFLLHPATVRRNDRSAQSVDEWTGEQKVLYGDVAEDIEPEDIRPMGNYAVSITWPDGFSQIAPYDQLEEIERLVDVPPLSPVEV

SEQ ID NO: 46296 - DNA, 3647 bp, Arabidopsis thaliana
  misc_feature (1)..(3647): Ceres Seq. ID no. 13579175
  misc_feature: MA Experiment ID: 20000234 Result: Up-regulated in Transcription
  misc_feature: MA Experiment 20000234 PARAMETER Experiment Name: At_Siliques_P Parameter: Age (day) Value: 21
  misc_feature: MA Experiment 20000234 PARAMETER Experiment Name: At_Siliques_P Parameter: Organism Value: A. thaliana
  misc_feature: MA Experiment 20000234 PARAMETER Experiment Name: At_Siliques_P Parameter: Plant Line Value: WS
  misc_feature: MA Experiment 20000234 PARAMETER Experiment Name: At_Siliques_P Parameter: Tissue Value: Less Than 5mm Siliques vs. Whole Plant
  misc_feature: MA Experiment ID: 20000264 Result: Up-regulated in Transcription
  misc_feature: MA Experiment 20000264 PARAMETER Experiment Name: At_Open_Flower_P Parameter: Age (day) Value: 21
  misc_feature: MA Experiment 20000264 PARAMETER Experiment Name: At_Open_Flower_P Parameter: Plant Line Value: WS
  misc_feature: MA Experiment 20000264 PARAMETER Experiment Name: At_Open_Flower_P Parameter: Tissue Value: Open Flower vs. Whole Plant
  misc_feature: MA Experiment ID: 20000265 Result: Up-regulated in Transcription
  misc_feature: MA Experiment 20000265 PARAMETER Experiment Name: At_Open_Flower_P Parameter: Age (day) Value: 21
  misc_feature: MA Experiment 20000265 PARAMETER Experiment Name: At_Open_Flower_P Parameter: Plant Line Value: WS
  misc_feature: MA Experiment 20000265 PARAMETER Experiment Name: At_Open_Flower_P Parameter: Tissue Value: Closed Flower vs. Whole Plant
  misc_feature: MA Experiment ID: 20000286 Result: Up-regulated in Transcription
  misc_feature: MA Experiment 20000286 PARAMETER Experiment Name: At_Open_Flower_P Parameter: Age (day) Value: 21
  misc_feature: MA Experiment 20000286 PARAMETER Experiment Name: At_Open_Flower_P Parameter: Plant Line Value: WS
  misc_feature: MA Experiment 20000286 PARAMETER Experiment Name: At_Open_Flower_P Parameter: Tissue Value: Half Open vs. Whole Plant
  misc_feature: MA Experiment ID: 20000495 Result: Up-regulated in Transcription
  misc_feature: MA Experiment 20000495 PARAMETER Experiment Name: At_Guard_Cells_P Parameter: Harvest Date Value: 8/2/2002
  misc_feature: MA Experiment 20000495 PARAMETER Experiment Name: At_Guard_Cells_P Parameter: Organism Value: A. thaliana
  misc_feature: MA Experiment 20000495 PARAMETER Experiment Name: At_Guard_Cells_P Parameter: Tissue Value: Guard Cells vs. Leaves
tcgtctcttttaaatctccgagttttcttcctccttctctaaaagaacatggcgtttcttaccgcattgttcctgtttctcttcttctctttttcgagttccgccattgttgatcttagctcggaaacaacttctctcatctccttcaagcgctcactagaaaacccatctctcctttcttcatggaacgtttcgtcttccgcgtctcactgcgattgggttggcgttacgtgtctgcttggacgagtcaactcgctctccttaccgtctttgtctctgagaggccagattccgaaggaaatttcgagtttgaagaaccttagagagctttgtcttgccggaaatcaattctccgggaagattccgcctgagatttggaatctaaaacatctccaaacccttgacctctcaggaaattctctcaccggacttctcccgaggctactcagtgagttacctcagcttctctacctcgaccttagtgacaaccacttctccggttcacttcctccatcgttcttcatcagcttacctgcactgtcttctcttgacgtctccaacaactctctctccggcgaaatccctcctgaaatcgggaaactgagtaacctctccaatctttacatgggactcaactcattttccggtcaaattccgtcggagattggtaacatctcgttgctgaagaactttgctgcaccttcttgcttcttcaatggaccgttaccaaaggagatttcgaaactgaaacacttagcaaagctcgacctttcttataatccactcaagtgttccattcccaaatcgtttggagagttgcataatctgagtatactaaatcttgtctccgcagagcttattggattgatcccaccagagcttggtaattgtaaaagcctcaagtcactgatgctgtctttcaattctctctctggacctttgccattggagctttcagagattcctctgttgacgttttctgctgaaaggaatcagctttcgggttcattgccttcatggatggggaaatggaaggtactggactcacttctgttagctaacaatcggttttcaggtgaaatccctcatgagattgaggattgtccaatgttgaaacatctcagtctagctagcaacttgttaagtggttcgattcctagggagctctgtggttcaggttcgttggaggcgattgatctctctgggaatttgctttctggaacaattgaggaggtctttgatggatgttcctctcttggagagttgttacttactaataatcagatcaatggctctattcctgaggatctttggaagcttccattgatggcacttgacttggattccaacaacttcacaggagaaatcccaaagagtctctggaaatcaacgaacttgatggagtttacagcttcttataatcgtctagaaggttatttgcctgcagagattggtaatgcagcttcactgaagcggttggttctcagtgataatcagttaacaggtgaaatcccaagagagattggaaaactcacatctttgtctgtcttgaatctgaatgcaaacatgtttcaagggaagataccagttgagctcggtgattgtacttctttgactacattggatctaggcagcaacaatcttcaaggacagattccagacaaaatcactgctctcgctcagcttcagtgcctggttctctcttacaacaatctctccgggtcaattccatcaaaaccctctgcttatttccatcagattgagatgcctgatctcagctttcttcagcaccatgggatatttgatctctcctacaatagattgtctggccctataccagaagaacttggcgagtgtttggtattggtagagatttcactgagcaacaaccatctctctggagagattccagcttcactctctcgtttgaccaacctcacaatcctggatctatctggaaatgcactgactggatctattccaaaggagatgggcaactctcttaagttgcagggattaaacttggcgaataatcagctcaatggccatattccagaaagctttggcttgttaggtagcttggtgaagctaaacttgactaagaacaagcttgatggaccggttcctgcttctcttgggaacttgaaagagcttacacacatggacttgagctttaacaacctaagtggcgagctttcatcagaactgtctacaatggaaaaacttgtcggcctctacattgagcagaataagttcaccggggaaataccttcagaacttggtaatcttacgcagctggagtaccttgatgtttctgagaacttgttatctggagagataccaacaaagatctgtggattgcccaatctggagttcttgaatctagccaagaacaatctgcgaggagaggtgccgagtgatggtgtttgtcaggatccttccaaggcattgctttcagggaacaaagagttgtgtggcagagtggttggatcagattgcaagatcgagggaactaagttgaggagtgcttgggggattgcaggactcatgcttggctttacgatcatcgtttttgtgtttgttttctctctgcgcagatgggctatgacaaagagagtgaagcaaagagatgatccagagcgaatggaggaaagcagattgaaagggtttgttgatcagaacctgtatttcttaagtggaagcagatcaagggagcctttaagcatcaatatagcaatgttcgagcagccgcttctgaaggtgcgtttaggagatattgtcgaggctacagatcatttctctaagaagaacattataggagacggtggttttgggacggtttacaaagcttgtttaccaggtgagaaaacagtagcggtgaagaagctaagtgaagccaaaacgcagggaaaccgagaattcatggcagagatggagactctagggaaagtgaagcatccgaatcttgtgtctttgcttggatattgctctttcagtgaagagaagcttctggtatatgagtatatggtaaatggaagcttagatcactggttaaggaaccaaactgggatgctagaggttctggactggtcaaaacgcctcaaaatcgcagttggagctgcaagaggtctagctttcctacatcacggtttcatccctcacattatacacagggacatcaaagcgagcaacattctgttagatggtgattttgaaccaaaggtggcggattttgggctagcaagactaattagtgcctgtgaatcccatgttagtacagtcatagcagggactttcgggtatatcccaccggagtatggtcagagtgcccgagccacaaccaaaggagatgtctatagctttggcgtgatactattggagcttgtcacagggaaagagccaaccggtccagactttaaggagagtgaaggagggaacttggttggttgggcgattcagaagatcaaccaagggaaagctgtggatgttattgatccactgctcgtatctgtggctttgaagaactctcagcttcgtctgcttcagatagctatgctttgtcttgctgaaacgccagctaagcgccctaacatgcttgatgtgttgaaggctcttaaggagatatgagccatataaccttaaatgtt

SEQ ID NO: 46297 - protein, 1192 aa, Arabidopsis thaliana
  peptide (1)..(1192): Ceres Seq. ID no. 13579176
  misc_feature (1)..(693): Homolog of NCBI NO: 15237562 NR Description: leucine-rich repeat transmembrane protein kinase,
  misc_feature (907)..(1189): Homolog of NCBI NO: 7522138 NR Description: receptor-like protein kinase - Ipomoea nil
  misc_feature (8)..(721): Homolog of NCBI NO: 7522138 NR Description: receptor-like protein kinase - Ipomoea nil
  misc_feature (907)..(1189): Homolog of NCBI NO: 14495542 NR Description: receptor-like protein kinase INRPK1 [Ipomoea nil]
  misc_feature (6)..(721): Homolog of NCBI NO: 14495542 NR Description: receptor-like protein kinase INRPK1 [Ipomoea nil]
  misc_feature (883)..(1191): Homolog of NCBI NO: 15237562 NR Description: leucine-rich repeat transmembrane protein kinase,
  misc_feature (79)..(716): Homolog of NCBI NO: 15237562 NR Description: leucine-rich repeat transmembrane protein kinase,
  misc_feature (32)..(1181): Homolog of NCBI NO: 9758374 NR Description: receptor-like protein kinase [Arabidopsis
  misc_feature (64)..(1192): Homolog of NCBI NO: 5441895 NR Description: EST C96716(C10608) corresponds to a region of the
MAFLTALFLFLFFSFSSSAIVDLSSETTSLISFKRSLENPSLLSSWNVSSSASHCDWVGVTCLLGRVNSLSLPSLSLRGQIPKEISSLKNLRELCLAGNQFSGKIPPEIWNLKHLQTLDLSGNSLTGLLPRLLSELPQLLYLDLSDNHFSGSLPPSFFISLPALSSLDVSNNSLSGEIPPEIGKLSNLSNLYMGLNSFSGQIPSEIGNISLLKNFAAPSCFFNGPLPKEISKLKHLAKLDLSYNPLKCSIPKSFGELHNLSILNLVSAELIGLIPPELGNCKSLKSLMLSFNSLSGPLPLELSEIPLLTFSAERNQLSGSLPSWMGKWKVLDSLLLANNRFSGEIPHEIEDCPMLKHLSLASNLLSGSIPRELCGSGSLEAIDLSGNLLSGTIEEVFDGCSSLGELLLTNNQINGSIPEDLWKLPLMALDLDSNNFTGEIPKSLWKSTNLMEFTASYNRLEGYLPAEIGNAASLKRLVLSDNQLTGEIPREIGKLTSLSVLNLNANMFQGKIPVELGDCTSLTTLDLGSNNLQGQIPDKITALAQLQCLVLSYNNLSGSIPSKPSAYFHQIEMPDLSFLQHHGIFDLSYNRLSGPIPEELGECLVLVEISLSNNHLSGEIPASLSRLTNLTILDLSGNALTGSIPKEMGNSLKLQGLNLANNQLNGHIPESFGLLGSLVKLNLTKNKLDGPVPASLGNLKELTHMDLSFNNLSGELSSELSTMEKLVGLYIEQNKFTGEIPSELGNLTQLEYLDVSENLLSGEIPTKICGLPNLEFLNLAKNNLRGEVPSDGVCQDPSKALLSGNKELCGRVVGSDCKIEGTKLRSAWGIAGLMLGFTIIVFVFVFSLRRWAMTKRVKQRDDPERMEESRLKGFVDQNLYFLSGSRSREPLSINIAMFEQPLLKVRLGDIVEATDHFSKKNIIGDGGFGTVYKACLPGEKTVAVKKLSEAKTQGNREFMAEMETLGKVKHPNLVSLLGYCSFSEEKLLVYEYMVNGSLDHWLRNQTGMLEVLDWSKRLKIAVGAARGLAFLHHGFIPHIIHRDIKASNILLDGDFEPKVADFGLARLISACESHVSTVIAGTFGYIPPEYGQSARATTKGDVYSFGVILLELVTGKEPTGPDFKESEGGNLVGWAIQKINQGKAVDVIDPLLVSVALKNSQLRLLQIAMLCLAETPAKRPNMLDVLKALKEI

SEQ ID NO: 46298 - protein, 1000 aa, Arabidopsis thaliana
  peptide (1)..(1000): Ceres Seq. ID no. 13579177
  misc_feature (1)..(501): Homolog of NCBI NO: 15237562 NR Description: leucine-rich repeat transmembrane protein kinase,
  misc_feature (715)..(997): Homolog of NCBI NO: 7522138 NR Description: receptor-like protein kinase - Ipomoea nil
  misc_feature (1)..(529): Homolog of NCBI NO: 7522138 NR Description: receptor-like protein kinase - Ipomoea nil
  misc_feature (715)..(997): Homolog of NCBI NO: 14495542 NR Description: receptor-like protein kinase INRPK1 [Ipomoea nil]
  misc_feature (1)..(529): Homolog of NCBI NO: 14495542 NR Description: receptor-like protein kinase INRPK1 [Ipomoea nil]
  misc_feature (691)..(999): Homolog of NCBI NO: 15237562 NR Description: leucine-rich repeat transmembrane protein kinase,
  misc_feature (1)..(524): Homolog of NCBI NO: 15237562 NR Description: leucine-rich repeat transmembrane protein kinase,
  misc_feature (1)..(989): Homolog of NCBI NO: 9758374 NR Description: receptor-like protein kinase [Arabidopsis
  misc_feature (1)..(1000): Homolog of NCBI NO: 5441895 NR Description: EST C96716(C10608) corresponds to a region of the
MGLNSFSGQIPSEIGNISLLKNFAAPSCFFNGPLPKEISKLKHLAKLDLSYNPLKCSIPKSFGELHNLSILNLVSAELIGLIPPELGNCKSLKSLMLSFNSLSGPLPLELSEIPLLTFSAERNQLSGSLPSWMGKWKVLDSLLLANNRFSGEIPHEIEDCPMLKHLSLASNLLSGSIPRELCGSGSLEAIDLSGNLLSGTIEEVFDGCSSLGELLLTNNQINGSIPEDLWKLPLMALDLDSNNFTGEIPKSLWKSTNLMEFTASYNRLEGYLPAEIGNAASLKRLVLSDNQLTGEIPREIGKLTSLSVLNLNANMFQGKIPVELGDCTSLTTLDLGSNNLQGQIPDKITALAQLQCLVLSYNNLSGSIPSKPSAYFHQIEMPDLSFLQHHGIFDLSYNRLSGPIPEELGECLVLVEISLSNNHLSGEIPASLSRLTNLTILDLSGNALTGSIPKEMGNSLKLQGLNLANNQLNGHIPESFGLLGSLVKLNLTKNKLDGPVPASLGNLKELTHMDLSFNNLSGELSSELSTMEKLVGLYIEQNKFTGEIPSELGNLTQLEYLDVSENLLSGEIPTKICGLPNLEFLNLAKNNLRGEVPSDGVCQDPSKALLSGNKELCGRVVGSDCKIEGTKLRSAWGIAGLMLGFTIIVFVFVFSLRRWAMTKRVKQRDDPERMEESRLKGFVDQNLYFLSGSRSREPLSINIAMFEQPLLKVRLGDIVEATDHFSKKNIIGDGGFGTVYKACLPGEKTVAVKKLSEAKTQGNREFMAEMETLGKVKHPNLVSLLGYCSFSEEKLLVYEYMVNGSLDHWLRNQTGMLEVLDWSKRLKIAVGAARGLAFLHHGFIPHIIHRDIKASNILLDGDFEPKVADFGLARLISACESHVSTVIAGTFGYIPPEYGQSARATTKGDVYSFGVILLELVTGKEPTGPDFKESEGGNLVGWAIQKINQGKAVDVIDPLLVSVALKNSQLRLLQIAMLCLAETPAKRPNMLDVLKALKEI

SEQ ID NO: 46299 - protein, 905 aa, Arabidopsis thaliana
  peptide (1)..(905): Ceres Seq. ID no. 13579178
  misc_feature (1)..(406): Homolog of NCBI NO: 15237562 NR Description: leucine-rich repeat transmembrane protein kinase,
  misc_feature (620)..(902): Homolog of NCBI NO: 7522138 NR Description: receptor-like protein kinase - Ipomoea nil
  misc_feature (1)..(434): Homolog of NCBI NO: 7522138 NR Description: receptor-like protein kinase - Ipomoea nil
  misc_feature (620)..(902): Homolog of NCBI NO: 14495542 NR Description: receptor-like protein kinase INRPK1 [Ipomoea nil]
  misc_feature (1)..(434): Homolog of NCBI NO: 14495542 NR Description: receptor-like protein kinase INRPK1 [Ipomoea nil]
  misc_feature (596)..(904): Homolog of NCBI NO: 15237562 NR Description: leucine-rich repeat transmembrane protein kinase,
  misc_feature (1)..(429): Homolog of NCBI NO: 15237562 NR Description: leucine-rich repeat transmembrane protein kinase,
  misc_feature (1)..(894): Homolog of NCBI NO: 9758374 NR Description: receptor-like protein kinase [Arabidopsis
  misc_feature (1)..(905): Homolog of NCBI NO: 5441895 NR Description: EST C96716(C10608) corresponds to a region of the
MLSFNSLSGPLPLELSEIPLLTFSAERNQLSGSLPSWMGKWKVLDSLLLANNRFSGEIPHEIEDCPMLKHLSLASNLLSGSIPRELCGSGSLEAIDLSGNLLSGTIEEVFDGCSSLGELLLTNNQINGSIPEDLWKLPLMALDLDSNNFTGEIPKSLWKSTNLMEFTASYNRLEGYLPAEIGNAASLKRLVLSDNQLTGEIPREIGKLTSLSVLNLNANMFQGKIPVELGDCTSLTTLDLGSNNLQGQIPDKITALAQLQCLVLSYNNLSGSIPSKPSAYFHQIEMPDLSFLQHHGIFDLSYNRLSGPIPEELGECLVLVEISLSNNHLSGEIPASLSRLTNLTILDLSGNALTGSIPKEMGNSLKLQGLNLANNQLNGHIPESFGLLGSLVKLNLTKNKLDGPVPASLGNLKELTHMDLSFNNLSGELSSELSTMEKLVGLYIEQNKFTGEIPSELGNLTQLEYLDVSENLLSGEIPTKICGLPNLEFLNLAKNNLRGEVPSDGVCQDPSKALLSGNKELCGRVVGSDCKIEGTKLRSAWGIAGLMLGFTIIVFVFVFSLRRWAMTKRVKQRDDPERMEESRLKGFVDQNLYFLSGSRSREPLSINIAMFEQPLLKVRLGDIVEATDHFSKKNIIGDGGFGTVYKACLPGEKTVAVKKLSEAKTQGNREFMAEMETLGKVKHPNLVSLLGYCSFSEEKLLVYEYMVNGSLDHWLRNQTGMLEVLDWSKRLKIAVGAARGLAFLHHGFIPHIIHRDIKASNILLDGDFEPKVADFGLARLISACESHVSTVIAGTFGYIPPEYGQSARATTKGDVYSFGVILLELVTGKEPTGPDFKESEGGNLVGWAIQKINQGKAVDVIDPLLVSVALKNSQLRLLQIAMLCLAETPAKRPNMLDVLKALKEI

SEQ ID NO: 46300 - DNA, 2389 bp, Arabidopsis thaliana; identical to SEQ ID NO: 43744
  misc_feature (1)..(2389): Ceres Seq. ID no. 13591580
  misc_feature: MA Experiment ID: 108434 Result: Up-regulated in Transcription
  misc_feature: MA Experiment 108434 PARAMETER Experiment Name: At_Root_Tips_cDNA_P Parameter: Tissue Value: Root Tips
  misc_feature: MA Experiment ID: 108463 Result: Down-regulated in Transcription
  misc_feature: MA Experiment 108463 PARAMETER Experiment Name: At_Germinating_Seeds_cDNA_P Parameter: Age (day) Value: 3 vs. 0
  misc_feature: MA Experiment 108463 PARAMETER Experiment Name: At_Germinating_Seeds_cDNA_P Parameter: Tissue Value: Germinating Seeds
  misc_feature: MA Experiment ID: 108469 Result: Up-regulated in Transcription
  misc_feature: MA Experiment ID: 108573 Result: Down-regulated in Transcription
  misc_feature: MA Experiment 108573 PARAMETER Experiment Name: At_Drought_cDNA_P Parameter: Timepoint (hr) Value: 6
  misc_feature: MA Experiment 108573 PARAMETER Experiment Name: At_Drought_cDNA_P Parameter: Tissue Value: Aerial
  misc_feature: MA Experiment 108573 PARAMETER Experiment Name: At_Drought_cDNA_P Parameter: Treatment Value: Drought vs. No Drought
  misc_feature: MA Experiment ID: 108576 Result: Up-regulated in Transcription
  misc_feature: MA Experiment 108576 PARAMETER Experiment Name: At_42deg_Heat_cDNA_P Parameter: Temperature (deg C) Value: 42 vs. 22
  misc_feature: MA Experiment 108576 PARAMETER Experiment Name: At_42deg_Heat_cDNA_P Parameter: Timepoint (hr) Value: 1
  misc_feature: MA Experiment 108576 PARAMETER Experiment Name: At_42deg_Heat_cDNA_P Parameter: Tissue Value: Aerial
  misc_feature: MA Experiment ID: 108577 Result: Up-regulated in Transcription
  misc_feature: MA Experiment 108577 PARAMETER Experiment Name: At_42deg_Heat_cDNA_P Parameter: Temperature (deg C) Value: 42 vs. 22
  misc_feature: MA Experiment 108577 PARAMETER Experiment Name: At_42deg_Heat_cDNA_P Parameter: Timepoint (hr) Value: 6
  misc_feature: MA Experiment 108577 PARAMETER Experiment Name: At_42deg_Heat_cDNA_P Parameter: Tissue Value: Aerial
  misc_feature: MA Experiment ID: 108595 Result: Up-regulated in Transcription
  misc_feature: MA Experiment 108595 PARAMETER Experiment Name: At_Ler-pi_Ovule_cDNA_P Parameter: Plant Line Value: null
  misc_feature: MA Experiment ID: 108668 Result: Up-regulated in Transcription
  misc_feature: MA Experiment 108668 PARAMETER Experiment Name: At_2mM_SA_cDNA_P Parameter: Plant Line Value: WS
  misc_feature: MA Experiment 108668 PARAMETER Experiment Name: At_2mM_SA_cDNA_P Parameter: Timepoint (hr) Value: 6
  misc_feature: MA Experiment 108668 PARAMETER Experiment Name: At_2mM_SA_cDNA_P Parameter: Treatment Value: 2mM SA vs. No Treatment
  misc_feature: MA Experiment ID: 20000086 Result: Up-regulated in Transcription
  misc_feature: MA Experiment 20000086 PARAMETER Experiment Name: At_100uM_ABA_Mutants_cDNA_P Parameter: Plant Line Value: CS22
  misc_feature: MA Experiment 20000086 PARAMETER Experiment Name: At_100uM_ABA_Mutants_cDNA_P Parameter: Timepoint (hr) Value: 6
  misc_feature: MA Experiment 20000086 PARAMETER Experiment Name: At_100uM_ABA_Mutants_cDNA_P Parameter: Tissue Value: Aerial
  misc_feature: MA Experiment 20000086 PARAMETER Experiment Name: At_100uM_ABA_Mutants_cDNA_P Parameter: Treatment Value: 100uM ABA vs. No Treatment
  misc_feature: MA Experiment ID: 20000089 Result: Up-regulated in Transcription
  misc_feature: MA Experiment ID: 20000090 Result: Up-regulated in Transcription
  misc_feature: MA Experiment ID: 20000093 Result: Up-regulated in Transcription
  misc_feature: MA Experiment 20000093 PARAMETER Experiment Name: At_42deg_Heat_cDNA_P Parameter: Temperature (deg C) Value: 42 vs. 22
  misc_feature: MA Experiment 20000093 PARAMETER Experiment Name: At_42deg_Heat_cDNA_P Parameter: Timepoint (hr) Value: 0.5
  misc_feature: MA Experiment 20000093 PARAMETER Experiment Name: At_42deg_Heat_cDNA_P Parameter: Tissue Value: Aerial
  misc_feature: MA Experiment ID: 20000111 Result: Up-regulated in Transcription
  misc_feature: MA Experiment 20000111 PARAMETER Experiment Name: At_42deg_Heat_cDNA_P Parameter: Temperature (deg C) Value: 42 vs. 22
  misc_feature: MA Experiment 20000111 PARAMETER Experiment Name: At_42deg_Heat_cDNA_P Parameter: Timepoint (hr) Value: 6
  misc_feature: MA Experiment 20000111 PARAMETER Experiment Name: At_42deg_Heat_cDNA_P Parameter: Tissue Value: Aerial
  misc_feature: MA Experiment ID: 20000112 Result: Up-regulated in Transcription
  misc_feature: MA Experiment 20000112 PARAMETER Experiment Name: At_42deg_Heat_cDNA_P Parameter: Temperature (deg C) Value: 42 vs. 22
  misc_feature: MA Experiment 20000112 PARAMETER Experiment Name: At_42deg_Heat_cDNA_P Parameter: Timepoint (hr) Value: 2
  misc_feature: MA Experiment 20000112 PARAMETER Experiment Name: At_42deg_Heat_cDNA_P Parameter: Tissue Value: Aerial
  misc_feature: MA Experiment ID: 20000171 Result: Up-regulated in Transcription
  misc_feature: MA Experiment 20000171 PARAMETER Experiment Name: At_42deg_Heat_P Parameter: Age (day) Value: 14
  misc_feature: MA Experiment 20000171 PARAMETER Experiment Name: At_42deg_Heat_P Parameter: Organism Value: A. thaliana
  misc_feature: MA Experiment 20000171 PARAMETER Experiment Name: At_42deg_Heat_P Parameter: Plant Line Value: WS
  misc_feature: MA Experiment 20000171 PARAMETER Experiment Name: At_42deg_Heat_P Parameter: Temperature (deg C) Value: 42 vs. 22
  misc_feature: MA Experiment 20000171 PARAMETER Experiment Name: At_42deg_Heat_P Parameter: Timepoint (hr) Value: 1
  misc_feature: MA Experiment 20000171 PARAMETER Experiment Name: At_42deg_Heat_P Parameter: Tissue Value: Aerial
  misc_feature: MA Experiment ID: 20000173 Result: Up-regulated in Transcription
  misc_feature: MA Experiment 20000173 PARAMETER Experiment Name: At_42deg_Heat_P Parameter: Age (day) Value: 14
  misc_feature: MA Experiment 20000173 PARAMETER Experiment Name: At_42deg_Heat_P Parameter: Organism Value: A. thaliana
  misc_feature: MA Experiment 20000173 PARAMETER Experiment Name: At_42deg_Heat_P Parameter: Plant Line Value: WS
  misc_feature: MA Experiment 20000173 PARAMETER Experiment Name: At_42deg_Heat_P Parameter: Temperature (deg C) Value: 42 vs. 22
  misc_feature: MA Experiment 20000173 PARAMETER Experiment Name: At_42deg_Heat_P Parameter: Timepoint (hr) Value: 6
  misc_feature: MA Experiment 20000173 PARAMETER Experiment Name: At_42deg_Heat_P Parameter: Tissue Value: Aerial
  misc_feature: MA Experiment ID: 20000179 Result: Up-regulated in Transcription
  misc_feature: MA Experiment 20000179 PARAMETER Experiment Name: At_Germinating_Seeds_P Parameter: Age (hr) Value: 6 vs. 0
  misc_feature: MA Experiment 20000179 PARAMETER Experiment Name: At_Germinating_Seeds_P Parameter: Tissue Value: Germinating Seeds
  misc_feature: MA Experiment ID: 20000182 Result: Up-regulated in Transcription
  misc_feature: MA Experiment 20000182 PARAMETER Experiment Name: At_2mM_SA_P Parameter: Age (day) Value: 14
  misc_feature: MA Experiment 20000182 PARAMETER Experiment Name: At_2mM_SA_P Parameter: Organism Value: A. thaliana
  misc_feature: MA Experiment 20000182 PARAMETER Experiment Name: At_2mM_SA_P Parameter: Plant Line Value: WS
  misc_feature: MA Experiment 20000182 PARAMETER Experiment Name: At_2mM_SA_P Parameter: Timepoint (hr) Value: 6
  misc_feature: MA Experiment 20000182 PARAMETER Experiment Name: At_2mM_SA_P Parameter: Tissue Value: Aerial
  misc_feature: MA Experiment 20000182 PARAMETER Experiment Name: At_2mM_SA_P Parameter: Treatment Value: 2mM SA vs. No Treatment
  misc_feature: MA Experiment ID: 20000224 Result: Up-regulated in Transcription
  misc_feature: MA Experiment ID: 20000227 Result: Up-regulated in Transcription
  misc_feature: MA Experiment 20000227 PARAMETER Experiment Name: At_Root-Tips-vs-Tops_P Parameter: Tissue Value: Root Tips vs. Root Tops
  misc_feature: MA Experiment ID: 20000234 Result: Up-regulated in Transcription
  misc_feature: MA Experiment 20000234 PARAMETER Experiment Name: At_Siliques_P Parameter: Age (day) Value: 21
  misc_feature: MA Experiment 20000234 PARAMETER Experiment Name: At_Siliques_P Parameter: Organism Value: A. thaliana
  misc_feature: MA Experiment 20000234 PARAMETER Experiment Name: At_Siliques_P Parameter: Plant Line Value: WS
  misc_feature: MA Experiment 20000234 PARAMETER Experiment Name: At_Siliques_P Parameter: Tissue Value: Less Than 5mm Siliques vs. Whole Plant
  misc_feature: MA Experiment ID: 20000235 Result: Up-regulated in Transcription
  misc_feature: MA Experiment 20000235 PARAMETER Experiment Name: At_Siliques_P Parameter: Age (day) Value: 21
  misc_feature: MA Experiment 20000235 PARAMETER Experiment Name: At_Siliques_P Parameter: Organism Value: A. thaliana
  misc_feature: MA Experiment 20000235 PARAMETER Experiment Name: At_Siliques_P Parameter: Plant Line Value: WS
  misc_feature: MA Experiment 20000235 PARAMETER Experiment Name: At_Siliques_P Parameter: Tissue Value: 5-10mm Siliques vs. Whole Plant
  misc_feature: MA Experiment ID: 20000495 Result: Up-regulated in Transcription
  misc_feature: MA Experiment 20000495 PARAMETER Experiment Name: At_Guard_Cells_P Parameter: Harvest Date Value: 8/2/2002
  misc_feature: MA Experiment 20000495 PARAMETER Experiment Name: At_Guard_Cells_P Parameter: Organism Value: A. thaliana
  misc_feature: MA Experiment 20000495 PARAMETER Experiment Name: At_Guard_Cells_P Parameter: Tissue Value: Guard Cells vs. Leaves
  misc_feature: MA Experiment ID: 20000794 Result: Down-regulated in Transcription
  misc_feature: MA Experiment 20000794 PARAMETER Experiment Name: At_Petals_P Parameter: Age (day) Value: 23-25 days
  misc_feature: MA Experiment 20000794 PARAMETER Experiment Name: At_Petals_P Parameter: Plant Line Value: WS
  misc_feature: MA Experiment 20000794 PARAMETER Experiment Name: At_Petals_P Parameter: Tissue Value: Petals vs. Whole plant
  misc_feature: MA Experiment ID: 20001450 Result: Down-regulated in Transcription
  misc_feature: MA Experiment 20001450 PARAMETER Experiment Name: At_Far-red-induction_P Parameter: Age (day) Value: 7
  misc_feature: MA Experiment 20001450 PARAMETER Experiment Name: At_Far-red-induction_P Parameter: Light Value: Far-red vs. White
  misc_feature: MA Experiment 20001450 PARAMETER Experiment Name: At_Far-red-induction_P Parameter: Organism Value: A. thaliana
  misc_feature: MA Experiment 20001450 PARAMETER Experiment Name: At_Far-red-induction_P Parameter: Plant Line Value: Columbia
  misc_feature: MA Experiment 20001450 PARAMETER Experiment Name: At_Far-red-induction_P Parameter: Timepoint (hr) Value: 8
  misc_feature: MA Experiment 20001450 PARAMETER Experiment Name: At_Far-red-induction_P Parameter: Tissue Value: Whole Plant
  misc_feature: MA Experiment ID: 20001556 Result: Up-regulated in Transcription
  misc_feature: MA Experiment 20001556 PARAMETER Experiment Name: At_Drought_Soil_Dry_P Parameter: Age (day) Value: 26
  misc_feature: MA Experiment 20001556 PARAMETER Experiment Name: At_Drought_Soil_Dry_P Parameter: Organism Value: A. thaliana
  misc_feature: MA Experiment 20001556 PARAMETER Experiment Name: At_Drought_Soil_Dry_P Parameter: Plant Line Value: WS
  misc_feature: MA Experiment 20001556 PARAMETER Experiment Name: At_Drought_Soil_Dry_P Parameter: Post Timepoint (hr) Value: None
  misc_feature: MA Experiment 20001556 PARAMETER Experiment Name: At_Drought_Soil_Dry_P Parameter: Post-Treatment Value: None
  misc_feature: MA Experiment 20001556 PARAMETER Experiment Name: At_Drought_Soil_Dry_P Parameter: Timepoint (day) Value: 12
  misc_feature: MA Experiment 20001556 PARAMETER Experiment Name: At_Drought_Soil_Dry_P Parameter: Treatment Value: Drought vs. No Drought
  misc_feature: MA Experiment ID: 20001558 Result: Up-regulated in Transcription
  misc_feature: MA Experiment 20001558 PARAMETER Experiment Name: At_Drought_Soil_Dry_P Parameter: Age (day) Value: 27
  misc_feature: MA Experiment 20001558 PARAMETER Experiment Name: At_Drought_Soil_Dry_P Parameter: Organism Value: A. thaliana
  misc_feature: MA Experiment 20001558 PARAMETER Experiment Name: At_Drought_Soil_Dry_P Parameter: Plant Line Value: WS
  misc_feature: MA Experiment 20001558 PARAMETER Experiment Name: At_Drought_Soil_Dry_P Parameter: Post Timepoint (hr) Value: 6
  misc_feature: MA Experiment 20001558 PARAMETER Experiment Name: At_Drought_Soil_Dry_P Parameter: Post-Treatment Value: Re-Water vs. No Drought
  misc_feature: MA Experiment 20001558 PARAMETER Experiment Name: At_Drought_Soil_Dry_P Parameter: Timepoint (day) Value: 13
  misc_feature: MA Experiment 20001558 PARAMETER Experiment Name: At_Drought_Soil_Dry_P Parameter: Treatment Value: Drought vs. No Drought
  misc_feature: MA Experiment ID: 20001560 Result: Up-regulated in Transcription
  misc_feature: MA Experiment 20001560 PARAMETER Experiment Name: At_Drought_Soil_Dry_P Parameter: Age (day) Value: 28
  misc_feature: MA Experiment 20001560 PARAMETER Experiment Name: At_Drought_Soil_Dry_P Parameter: Organism Value: A. thaliana
  misc_feature: MA Experiment 20001560 PARAMETER Experiment Name: At_Drought_Soil_Dry_P Parameter: Plant Line Value: WS
  misc_feature: MA Experiment 20001560 PARAMETER Experiment Name: At_Drought_Soil_Dry_P Parameter: Post Timepoint (hr) Value: None
  misc_feature: MA Experiment 20001560 PARAMETER Experiment Name: At_Drought_Soil_Dry_P Parameter: Post-Treatment Value: None
  misc_feature: MA Experiment 20001560 PARAMETER Experiment Name: At_Drought_Soil_Dry_P Parameter: Timepoint (day) Value: 14
  misc_feature: MA Experiment 20001560 PARAMETER Experiment Name: At_Drought_Soil_Dry_P Parameter: Treatment Value: Drought vs. No Drought

SEQ ID NO: 46301 - protein, 669 aa, Arabidopsis thaliana; identical to SEQ ID NO: 25857
  peptide (1)..(669): Ceres Seq. ID no. 15221053
  misc_feature (34)..(655): Homolog of NCBI NO: 14423732 NR Description: Heat shock 70 kDa protein
  misc_feature (35)..(656): Homolog of NCBI NO: 21263753 NR Description: Heat shock cognate 71 kDa protein (Hsc70.1)
  misc_feature (199)..(669): Homolog of NCBI NO: 168424 NR Description: polypeptide chain-binding protein
  misc_feature (15)..(669): Homolog of NCBI NO: 23480384 NR Description: heat shock protein [Plasmodium yoelii yoelii]
  misc_feature (35)..(669): Homolog of NCBI NO: 29539338 NR Description: Heat shock 70 kDa protein [Cyanidioschyzon
  misc_feature (37)..(669): Homolog of NCBI NO: 1037176 NR Description: immunoglobulin heavy chain binding protein
  misc_feature (1)..(664): Homolog of NCBI NO: 13897312 NR Description: luminal binding protein, BiP [Scherffelia dubia]
  misc_feature (34)..(655): Homolog of NCBI NO: 14423732 NR Description: Heat shock 70 kDa protein
  misc_feature (35)..(656): Homolog of NCBI NO: 21263753 NR Description: Heat shock cognate 71 kDa protein (Hsc70.1)
  misc_feature (199)..(669): Homolog of NCBI NO: 168424 NR Description: polypeptide chain-binding protein
  misc_feature (15)..(669): Homolog of NCBI NO: 23480384 NR Description: heat shock protein [Plasmodium yoelii yoelii]
  misc_feature (35)..(669): Homolog of NCBI NO: 29539338 NR Description: Heat shock 70 kDa protein [Cyanidioschyzon
  misc_feature (37)..(669): Homolog of NCBI NO: 1037176 NR Description: immunoglobulin heavy chain binding protein
  misc_feature (1)..(664): Homolog of NCBI NO: 13897312 NR Description: luminal binding protein, BiP [Scherffelia dubia]
  misc_feature (34)..(655): Homolog of NCBI NO: 14423732 NR Description: Heat shock 70 kDa protein
  misc_feature (35)..(656): Homolog of NCBI NO: 21263753 NR Description: Heat shock cognate 71 kDa protein (Hsc70.1)
  misc_feature (199)..(669): Homolog of NCBI NO: 168424 NR Description: polypeptide chain-binding protein
  misc_feature (15)..(669): Homolog of NCBI NO: 23480384 NR Description: heat shock protein [Plasmodium yoelii yoelii]
  misc_feature (35)..(669): Homolog of NCBI NO: 29539338 NR Description: Heat shock 70 kDa protein [Cyanidioschyzon
  misc_feature (37)..(669): Homolog of NCBI NO: 1037176 NR Description: immunoglobulin heavy chain binding protein
  misc_feature (1)..(664): Homolog of NCBI NO: 13897312 NR Description: luminal binding protein, BiP [Scherffelia dubia]
  misc_feature (34)..(655): Homolog of NCBI NO: 14423732 NR Description: Heat shock 70 kDa protein
  misc_feature (35)..(656): Homolog of NCBI NO: 21263753 NR Description: Heat shock cognate 71 kDa protein (Hsc70.1)
  misc_feature (199)..(669): Homolog of NCBI NO: 168424 NR Description: polypeptide chain-binding protein
  misc_feature (15)..(669): Homolog of NCBI NO: 23480384 NR Description: heat shock protein [Plasmodium yoelii yoelii]
  misc_feature (35)..(669): Homolog of NCBI NO: 29539338 NR Description: Heat shock 70 kDa protein [Cyanidioschyzon
  misc_feature (37)..(669): Homolog of NCBI NO: 1037176 NR Description: immunoglobulin heavy chain binding protein
  misc_feature (1)..(664): Homolog of NCBI NO: 13897312 NR Description: luminal binding protein, BiP [Scherffelia dubia]
  misc_feature (34)..(655): Homolog of NCBI NO: 14423732 NR Description: Heat shock 70 kDa protein
  misc_feature (35)..(656): Homolog of NCBI NO: 21263753 NR Description: Heat shock cognate 71 kDa protein (Hsc70.1)
  misc_feature (199)..(669): Homolog of NCBI NO: 168424 NR Description: polypeptide chain-binding protein
  misc_feature (15)..(669): Homolog of NCBI NO: 23480384 NR Description: heat shock protein [Plasmodium yoelii yoelii]
  misc_feature (35)..(669): Homolog of NCBI NO: 29539338 NR Description: Heat shock 70 kDa protein [Cyanidioschyzon
  misc_feature (37)..(669): Homolog of NCBI NO: 1037176 NR Description: immunoglobulin heavy chain binding protein
  misc_feature (1)..(664): Homolog of NCBI NO: 13897312 NR Description: luminal binding protein, BiP [Scherffelia dubia]

SEQ ID NO: 46302 - protein, 516 aa, Arabidopsis thaliana; identical to SEQ ID NO: 25858
  peptide (1)..(516): Ceres Seq. ID no. 15221054
  misc_feature (1)..(502): Homolog of NCBI NO: 14423732 NR Description: Heat shock 70 kDa protein
  misc_feature (1)..(503): Homolog of NCBI NO: 21263753 NR Description: Heat shock cognate 71 kDa protein (Hsc70.1)
  misc_feature (46)..(516): Homolog of NCBI NO: 168424 NR Description: polypeptide chain-binding protein
  misc_feature (1)..(516): Homolog of NCBI NO: 23480384 NR Description: heat shock protein [Plasmodium yoelii yoelii]
  misc_feature (1)..(516): Homolog of NCBI NO: 29539338 NR Description: Heat shock 70 kDa protein [Cyanidioschyzon
  misc_feature (1)..(516): Homolog of NCBI NO: 1037176 NR Description: immunoglobulin heavy chain binding protein
  misc_feature (1)..(511): Homolog of NCBI NO: 13897312 NR Description: luminal binding protein, BiP [Scherffelia dubia]
  misc_feature (1)..(502): Homolog of NCBI NO: 14423732 NR Description: Heat shock 70 kDa protein
  misc_feature (1)..(503): Homolog of NCBI NO: 21263753 NR Description: Heat shock cognate 71 kDa protein (Hsc70.1)
  misc_feature (46)..(516): Homolog of NCBI NO: 168424 NR Description: polypeptide chain-binding protein
  misc_feature (1)..(516): Homolog of NCBI NO: 23480384 NR Description: heat shock protein [Plasmodium yoelii yoelii]
  misc_feature (1)..(516): Homolog of NCBI NO: 29539338 NR Description: Heat shock 70 kDa protein [Cyanidioschyzon
  misc_feature (1)..(516): Homolog of NCBI NO: 1037176 NR Description: immunoglobulin heavy chain binding protein
  misc_feature (1)..(511): Homolog of NCBI NO: 13897312 NR Description: luminal binding protein, BiP [Scherffelia dubia]
  misc_feature (1)..(502): Homolog of NCBI NO: 14423732 NR Description: Heat shock 70 kDa protein
  misc_feature (1)..(503): Homolog of NCBI NO: 21263753 NR Description: Heat shock cognate 71 kDa protein (Hsc70.1)
  misc_feature (46)..(516): Homolog of NCBI NO: 168424 NR Description: polypeptide chain-binding protein
  misc_feature (1)..(516): Homolog of NCBI NO: 23480384 NR Description: heat shock protein [Plasmodium yoelii yoelii]
  misc_feature (1)..(516): Homolog of NCBI NO: 29539338 NR Description: Heat shock 70 kDa protein [Cyanidioschyzon
  misc_feature (1)..(516): Homolog of NCBI NO: 1037176 NR Description: immunoglobulin heavy chain binding protein
  misc_feature (1)..(511): Homolog of NCBI NO: 13897312 NR Description: luminal binding protein, BiP [Scherffelia dubia]
  misc_feature (1)..(502): Homolog of NCBI NO: 14423732 NR Description: Heat shock 70 kDa protein
  misc_feature (1)..(503): Homolog of NCBI NO: 21263753 NR Description: Heat shock cognate 71 kDa protein (Hsc70.1)
  misc_feature (46)..(516): Homolog of NCBI NO: 168424 NR Description: polypeptide chain-binding protein
  misc_feature (1)..(516): Homolog of NCBI NO: 23480384 NR Description: heat shock protein [Plasmodium yoelii yoelii]
  misc_feature (1)..(516): Homolog of NCBI NO: 29539338 NR Description: Heat shock 70 kDa protein [Cyanidioschyzon
  misc_feature (1)..(516): Homolog of NCBI NO: 1037176 NR Description: immunoglobulin heavy chain binding protein
  misc_feature (1)..(511): Homolog of NCBI NO: 13897312 NR Description: luminal binding protein, BiP [Scherffelia dubia]
  misc_feature (1)..(502): Homolog of NCBI NO: 14423732 NR Description: Heat shock 70 kDa protein
  misc_feature (1)..(503): Homolog of NCBI NO: 21263753 NR Description: Heat shock cognate 71 kDa protein (Hsc70.1)
  misc_feature (46)..(516): Homolog of NCBI NO: 168424 NR Description: polypeptide chain-binding protein
  misc_feature (1)..(516): Homolog of NCBI NO: 23480384 NR Description: heat shock protein [Plasmodium yoelii yoelii]
  misc_feature (1)..(516): Homolog of NCBI NO: 29539338 NR Description: Heat shock 70 kDa protein [Cyanidioschyzon
  misc_feature (1)..(516): Homolog of NCBI NO: 1037176 NR Description: immunoglobulin heavy chain binding protein
  misc_feature (1)..(511): Homolog of NCBI NO: 13897312 NR Description: luminal binding protein, BiP [Scherffelia dubia]

SEQ ID NO: 46303 - protein, 511 aa, Arabidopsis thaliana; identical to SEQ ID NO: 43747
  peptide (1)..(511): Ceres Seq. ID no. 15221055
  misc_feature (1)..(497): Homolog of NCBI NO: 14423732 NR Description: Heat shock 70 kDa protein
  misc_feature (1)..(498): Homolog of NCBI NO: 21263753 NR Description: Heat shock cognate 71 kDa protein (Hsc70.1)
  misc_feature (41)..(511): Homolog of NCBI NO: 168424 NR Description: polypeptide chain-binding protein
  misc_feature (1)..(511): Homolog of NCBI NO: 23480384 NR Description: heat shock protein [Plasmodium yoelii yoelii]
  misc_feature (1)..(511): Homolog of NCBI NO: 29539338 NR Description: Heat shock 70 kDa protein [Cyanidioschyzon
  misc_feature (1)..(511): Homolog of NCBI NO: 1037176 NR Description: immunoglobulin heavy chain binding protein
  misc_feature (1)..(506): Homolog of NCBI NO: 13897312 NR Description: luminal binding protein, BiP [Scherffelia dubia]
  misc_feature (1)..(497): Homolog of NCBI NO: 14423732 NR Description: Heat shock 70 kDa protein
  misc_feature (1)..(498): Homolog of NCBI NO: 21263753 NR Description: Heat shock cognate 71 kDa protein (Hsc70.1)
  misc_feature (41)..(511): Homolog of NCBI NO: 168424 NR Description: polypeptide chain-binding protein
  misc_feature (1)..(511): Homolog of NCBI NO: 23480384 NR Description: heat shock protein [Plasmodium yoelii yoelii]
  misc_feature (1)..(511): Homolog of NCBI NO: 29539338 NR Description: Heat shock 70 kDa protein [Cyanidioschyzon
  misc_feature (1)..(511): Homolog of NCBI NO: 1037176 NR Description: immunoglobulin heavy chain binding protein
  misc_feature (1)..(506): Homolog of NCBI NO: 13897312 NR Description: luminal binding protein, BiP [Scherffelia dubia]
  misc_feature (1)..(497): Homolog of NCBI NO: 14423732 NR Description: Heat shock 70 kDa protein
  misc_feature (1)..(498): Homolog of NCBI NO: 21263753 NR Description: Heat shock cognate 71 kDa protein (Hsc70.1)
  misc_feature (41)..(511): Homolog of NCBI NO: 168424 NR Description: polypeptide chain-binding protein
  misc_feature (1)..(511): Homolog of NCBI NO: 23480384 NR Description: heat shock protein [Plasmodium yoelii yoelii]
  misc_feature (1)..(511): Homolog of NCBI NO: 29539338 NR Description: Heat shock 70 kDa protein [Cyanidioschyzon
  misc_feature (1)..(511): Homolog of NCBI NO: 1037176 NR Description: immunoglobulin heavy chain binding protein
  misc_feature (1)..(506): Homolog of NCBI NO: 13897312 NR Description: luminal binding protein, BiP [Scherffelia dubia]
  misc_feature (1)..(497): Homolog of NCBI NO: 14423732 NR Description: Heat shock 70 kDa protein
  misc_feature (1)..(498): Homolog of NCBI NO: 21263753 NR Description: Heat shock cognate 71 kDa protein (Hsc70.1)
  misc_feature (41)..(511): Homolog of NCBI NO: 168424 NR Description: polypeptide chain-binding protein
  misc_feature (1)..(511): Homolog of NCBI NO: 23480384 NR Description: heat shock protein [Plasmodium yoelii yoelii]
  misc_feature (1)..(511): Homolog of NCBI NO: 29539338 NR Description: Heat shock 70 kDa protein [Cyanidioschyzon
  misc_feature (1)..(511): Homolog of NCBI NO: 1037176 NR Description: immunoglobulin heavy chain binding protein
  misc_feature (1)..(506): Homolog of NCBI NO: 13897312 NR Description: luminal binding protein, BiP [Scherffelia dubia]
  misc_feature (1)..(497): Homolog of NCBI NO: 14423732 NR Description: Heat shock 70 kDa protein
  misc_feature (1)..(498): Homolog of NCBI NO: 21263753 NR Description: Heat shock cognate 71 kDa protein (Hsc70.1)
  misc_feature (41)..(511): Homolog of NCBI NO: 168424 NR Description: polypeptide chain-binding protein
  misc_feature (1)..(511): Homolog of NCBI NO: 23480384 NR Description: heat shock protein [Plasmodium yoelii yoelii]
  misc_feature (1)..(511): Homolog of NCBI NO: 29539338 NR Description: Heat shock 70 kDa protein [Cyanidioschyzon
  misc_feature (1)..(511): Homolog of NCBI NO: 1037176 NR Description: immunoglobulin heavy chain binding protein
  misc_feature (1)..(506): Homolog of NCBI NO: 13897312 NR Description: luminal binding protein, BiP [Scherffelia dubia]

SEQ ID NO: 46304 - DNA, 2704 bp, Arabidopsis thaliana
  misc_feature (1)..(2704): Ceres Seq. ID no. 13578529
  misc_feature: MA Experiment ID: 20000179 Result: Up-regulated in Transcription
  misc_feature: MA Experiment 20000179 PARAMETER Experiment Name: At_Germinating_Seeds_P Parameter: Age (hr) Value: 6 vs. 0
  misc_feature: MA Experiment 20000179 PARAMETER Experiment Name: At_Germinating_Seeds_P Parameter: Tissue Value: Germinating Seeds
  misc_feature: MA Experiment ID: 20000184 Result: Up-regulated in Transcription
  misc_feature: MA Experiment 20000184 PARAMETER Experiment Name: At_Shoots__P Parameter: Age (day) Value: 7
  misc_feature: MA Experiment 20000184 PARAMETER Experiment Name: At_Shoots__P Parameter: Tissue Value: Shoots vs. Whole Plant
  misc_feature: MA Experiment ID: 20000185 Result: Up-regulated in Transcription
  misc_feature: MA Experiment 20000185 PARAMETER Experiment Name: At_Roots__P Parameter: Age (day) Value: 7 vs. 21
  misc_feature: MA Experiment 20000185 PARAMETER Experiment Name: At_Roots__P Parameter: Organism Value: A. thaliana
  misc_feature: MA Experiment 20000185 PARAMETER Experiment Name: At_Roots__P Parameter: Tissue Value: Roots vs. Whole Plant
  misc_feature: MA Experiment ID: 20000235 Result: Up-regulated in Transcription
  misc_feature: MA Experiment 20000235 PARAMETER Experiment Name: At_Siliques_P Parameter: Age (day) Value: 21
  misc_feature: MA Experiment 20000235 PARAMETER Experiment Name: At_Siliques_P Parameter: Organism Value: A. thaliana
  misc_feature: MA Experiment 20000235 PARAMETER Experiment Name: At_Siliques_P Parameter: Plant Line Value: WS
  misc_feature: MA Experiment 20000235 PARAMETER Experiment Name: At_Siliques_P Parameter: Tissue Value: 5-10mm Siliques vs. Whole Plant
  misc_feature: MA Experiment ID: 20000286 Result: Up-regulated in Transcription
  misc_feature: MA Experiment 20000286 PARAMETER Experiment Name: At_Open_Flower_P Parameter: Age (day) Value: 21
  misc_feature: MA Experiment 20000286 PARAMETER Experiment Name: At_Open_Flower_P Parameter: Plant Line Value: WS
  misc_feature: MA Experiment 20000286 PARAMETER Experiment Name: At_Open_Flower_P Parameter: Tissue Value: Half Open vs. Whole Plant
  misc_feature: MA Experiment ID: 20000437 Result: Down-regulated in Transcription
  misc_feature: MA Experiment 20000437 PARAMETER Experiment Name: At_Drought_P Parameter: Age (day) Value: 8
  misc_feature: MA Experiment 20000437 PARAMETER Experiment Name: At_Drought_P Parameter: Organism Value: A. thaliana
  misc_feature: MA Experiment 20000437 PARAMETER Experiment Name: At_Drought_P Parameter: Plant Line Value: WS
  misc_feature: MA Experiment 20000437 PARAMETER Experiment Name: At_Drought_P Parameter: Timepoint (hr) Value: 24
  misc_feature: MA Experiment 20000437 PARAMETER Experiment Name: At_Drought_P Parameter: Tissue Value: Whole Plant
  misc_feature: MA Experiment 20000437 PARAMETER Experiment Name: At_Drought_P Parameter: Treatment Value: Drought vs. No Drought
  misc_feature: MA Experiment ID: 20000438 Result: Up-regulated in Transcription
  misc_feature: MA Experiment 20000438 PARAMETER Experiment Name: At_Shoots__P Parameter: Age (day) Value: 14
  misc_feature: MA Experiment 20000438 PARAMETER Experiment Name: At_Shoots__P Parameter: Tissue Value: Shoots vs. Whole Plant
  misc_feature: MA Experiment ID: 20000439 Result: Up-regulated in Transcription
  misc_feature: MA Experiment 20000439 PARAMETER Experiment Name: At_Roots__P Parameter: Age (day) Value: 14 vs. 21
  misc_feature: MA Experiment 20000439 PARAMETER Experiment Name: At_Roots__P Parameter: Organism Value: A. thaliana
  misc_feature: MA Experiment 20000439 PARAMETER Experiment Name: At_Roots__P Parameter: Tissue Value: Roots vs. Whole Plant
  misc_feature: MA Experiment ID: 20001451 Result: Down-regulated in Transcription
  misc_feature: MA Experiment 20001451 PARAMETER Experiment Name: At_Far-red-induction_P Parameter: Age (day) Value: 7
  misc_feature: MA Experiment 20001451 PARAMETER Experiment Name: At_Far-red-induction_P Parameter: Light Value: Far-red vs. White
  misc_feature: MA Experiment 20001451 PARAMETER Experiment Name: At_Far-red-induction_P Parameter: Organism Value: A. thaliana
  misc_feature: MA Experiment 20001451 PARAMETER Experiment Name: At_Far-red-induction_P Parameter: Plant Line Value: Columbia
  misc_feature: MA Experiment 20001451 PARAMETER Experiment Name: At_Far-red-induction_P Parameter: Timepoint (hr) Value: 24
  misc_feature: MA Experiment 20001451 PARAMETER Experiment Name: At_Far-red-induction_P Parameter: Tissue Value: Whole Plant
  misc_feature: MA Experiment ID: 20001911 Result: Down-regulated in Transcription
  misc_feature: MA Experiment 20001911 PARAMETER Experiment Name: At_Drought_Reproduction_P Parameter: Age (day) Value: 40
  misc_feature: MA Experiment 20001911 PARAMETER Experiment Name: At_Drought_Reproduction_P Parameter: Organism Value: A. thaliana
  misc_feature: MA Experiment 20001911 PARAMETER Experiment Name: At_Drought_Reproduction_P Parameter: Plant Line Value: WS
  misc_feature: MA Experiment 20001911 PARAMETER Experiment Name: At_Drought_Reproduction_P Parameter: Timepoint (day) Value: 10
  misc_feature: MA Experiment 20001911 PARAMETER Experiment Name: At_Drought_Reproduction_P Parameter: Tissue Value: Flowers
  misc_feature: MA Experiment 20001911 PARAMETER Experiment Name: At_Drought_Reproduction_P Parameter: Treatment Value: Drought vs. No Drought
ggtcacaccagttaccctctcatccgttttcgttttttttttctctctttcaaaaatctctcagctgaggttgatcgatcttcttcttcttcttcctcactctttagatttgttccttttgcattttacacttttggatctgaaaatgtggttctctgtttcgcccgttaccgtttagattcagttctgtttttttcttacccgatcgcttgattcggactgtgatctttgatcttttttcttctccagtgccgtgaaggatgtgtggtcttgctaagaagctggatatagaggatactttgacatcactgtcagaccaagagaatgaatctttggccaaacccatgaatgatgctgctgaatgggaacattcgttttctgccttgcttgagtttgctgcagacaacgatgtggaggggtttaggcggcaactctctgatgtgtcttgtatcaaccagatgggtctttggtacagacggcagaggtttgttagaagaatggttcttgagcaaagaaccccgctgatggttgcttcgttatatgggagtttagatgttgtgaagtttattctttctttcccggaagcggagttgaatctgtcttgtggtcctgataaaagtactgctcttcattgcgctgcttctggtgcttctgtgaattccttggatgttgtcaagttgcttttgagtgtaggagcagatcctaatatccctgatgctcatggaaatcgtcctgttgatgttcttgttgtgtctccacacgctcctggtttgagaaccatccttgaagagatcttgaagaaagacgagattatatctgaagatctgcatgcctcgtcatctagcttgggatcaagtttccggtctctctcatcatcccctgataatggttcctcgttactctccttagattcagtatcctctccgactaagccacacggtactgatgtaactttcgcatcagagaagaaagagtacccaattgatccatcattgcctgatatcaaaagcgggatttattcaaccgatgagtttcgtatgttctcgttcaagatccgcccatgttctcgagcatattcccatgactggactgaatgtccatttgcacacccaggtgagaatgcaaggagaagagacccgaggaagtttcactatacgtgtgttccatgcccggattttaagaaaggatcctgtaagcaaggtgatatgtgtgaatatgctcatggggtttttgaatgctggctacaccctgctcagtacagaacacgattgtgcaaggacggaatgggttgcaaccgaagggtttgcttctttgctcacgcaaatgaggagttgcgtcccttgtacccttccacaggatctggattgccatctcctcgggcttcgtctgctgtttccgcctctactatggacatggcgtcagttttgaacatgttaccaggctcaccatctgctgctcaacattcgttcaccccaccaatatctccttctggaaatggtagtatgccccattcatcgatgggttggcctcagcagaacataccggcgttgaatcttcctggaagcaatatccagttgagtcgtctgagatcttctcttaacgctagagatattccttctgagcagcttagcatgctgcatgagtttgaaatgcaacgtcagcttgctggcgatatgcacagtccacgctttatgaatcattccgctcgtcctaagacactgaacccttcaaatctggaggaactcttctcagctgaggttgcatctcctcgtttctctgatcaacttgctgtttcatctgttctatcgccttcccacaagtccgcgcttcttaatcagctgcagaataataagcagagcatgctttctcctatcaagacaaatctaatgtcttctccaaagaatgtggagcaacattctcttctgcagcaagcctcgtcaccccgaggcggagagcctatttccccaatgaatgctcgaatgaaacagcagctacattcacgcagcctaagctcccgtgattttggatctagtctgccccgtgatttaatgccgactgattctggttcgccattaagtccatggtcaagttgggaccagacccatggaagcaaggtggattggtcagtccaatcagatgagttaggtcggttgagaaaatctcattccttggctaataacccaaacagggaagcagatgtttcatgggctcagcagatgttaaaagactcttcatcacctaggaacggaaaccgtgttgtgaacatgaatggtgcaaggccattgactcaaggtggttcgagtgtgaatcctcacaacagtgacactcgtgagagcgacattcttgatgcgtggcttgaacagctgcacctagatcgctgagcctcagctgcgagagagaggttcacatttctgtgaagctgtgaaactgatgattcgtttatttattattcaagaaagcaaacggaaacaaaagcaaactccgggtaagcttttttcgattctaataaccctaaaaggctcagttttttcaggcttctttctgaaatttctttactttcttatttttatcacctcattaaattaattattgtatcatctctgttgtaacaatggccaaagtgcgcctctattacttcccggatttctgatttacattttttgtatcctctcagtttgtcaattgtttctaatatctccttcat

SEQ ID NO: 46305 - protein, 706 aa, Arabidopsis thaliana
  peptide (1)..(706): Ceres Seq. ID no. 13578530
  misc_feature (118)..(153): Pfam Name: Ankyrin repeat Pfam Description: Ankyrin repeat
  misc_feature (238)..(542): Homolog of NCBI NO: 18410398 NR Description: expressed protein [Arabidopsis thaliana]
  misc_feature (238)..(542): Homolog of NCBI NO: 11357692 NR Description: hypothetical protein F27K19.160 - Arabidopsis
  misc_feature (1)..(192): Homolog of NCBI NO: 15225637 NR Description: CCCH-type zinc finger protein -related
  misc_feature (238)..(454): Homolog of NCBI NO: 15225637 NR Description: CCCH-type zinc finger protein -related
  misc_feature (40)..(574): Homolog of NCBI NO: 34899832 NR Description: OJ1092_A07.25 [Oryza sativa (japonica
  misc_feature (34)..(211): Homolog of NCBI NO: 15237721 NR Description: zinc finger transcription factor-related protein
  misc_feature (234)..(545): Homolog of NCBI NO: 15237721 NR Description: zinc finger transcription factor-related protein
  misc_feature (25)..(613): Homolog of NCBI NO: 28273376 NR Description: unknown protein [Oryza sativa (japonica
  misc_feature (2)..(706): Homolog of NCBI NO: 25408764 NR Description: probable CCCH-type zinc finger protein
  misc_feature (2)..(706): Homolog of NCBI NO: 18405834 NR Description: CCCH-type zinc finger protein -related
MCGLAKKLDIEDTLTSLSDQENESLAKPMNDAAEWEHSFSALLEFAADNDVEGFRRQLSDVSCINQMGLWYRRQRFVRRMVLEQRTPLMVASLYGSLDVVKFILSFPEAELNLSCGPDKSTALHCAASGASVNSLDVVKLLLSVGADPNIPDAHGNRPVDVLVVSPHAPGLRTILEEILKKDEIISEDLHASSSSLGSSFRSLSSSPDNGSSLLSLDSVSSPTKPHGTDVTFASEKKEYPIDPSLPDIKSGIYSTDEFRMFSFKIRPCSRAYSHDWTECPFAHPGENARRRDPRKFHYTCVPCPDFKKGSCKQGDMCEYAHGVFECWLHPAQYRTRLCKDGMGCNRRVCFFAHANEELRPLYPSTGSGLPSPRASSAVSASTMDMASVLNMLPGSPSAAQHSFTPPISPSGNGSMPHSSMGWPQQNIPALNLPGSNIQLSRLRSSLNARDIPSEQLSMLHEFEMQRQLAGDMHSPRFMNHSARPKTLNPSNLEELFSAEVASPRFSDQLAVSSVLSPSHKSALLNQLQNNKQSMLSPIKTNLMSSPKNVEQHSLLQQASSPRGGEPISPMNARMKQQLHSRSLSSRDFGSSLPRDLMPTDSGSPLSPWSSWDQTHGSKVDWSVQSDELGRLRKSHSLANNPNREADVSWAQQMLKDSSSPRNGNRVVNMNGARPLTQGGSSVNPHNSDTRESDILDAWLEQLHLDR

SEQ ID NO: 46306 - protein, 678 aa, Arabidopsis thaliana
  peptide (1)..(678): Ceres Seq. ID no. 13578531
  misc_feature (90)..(125): Pfam Name: Ankyrin repeat Pfam Description: Ankyrin repeat
  misc_feature (210)..(514): Homolog of NCBI NO: 18410398 NR Description: expressed protein [Arabidopsis thaliana]
  misc_feature (210)..(514): Homolog of NCBI NO: 11357692 NR Description: hypothetical protein F27K19.160 - Arabidopsis
  misc_feature (1)..(164): Homolog of NCBI NO: 15225637 NR Description: CCCH-type zinc finger protein -related
  misc_feature (210)..(426): Homolog of NCBI NO: 15225637 NR Description: CCCH-type zinc finger protein -related
  misc_feature (12)..(546): Homolog of NCBI NO: 34899832 NR Description: OJ1092_A07.25 [Oryza sativa (japonica
  misc_feature (6)..(183): Homolog of NCBI NO: 15237721 NR Description: zinc finger transcription factor-related protein
  misc_feature (206)..(517): Homolog of NCBI NO: 15237721 NR Description: zinc finger transcription factor-related protein
  misc_feature (1)..(585): Homolog of NCBI NO: 28273376 NR Description: unknown protein [Oryza sativa (japonica
  misc_feature (1)..(678): Homolog of NCBI NO: 25408764 NR Description: probable CCCH-type zinc finger protein
  misc_feature (1)..(678): Homolog of NCBI NO: 18405834 NR Description: CCCH-type zinc finger protein -related
MNDAAEWEHSFSALLEFAADNDVEGFRRQLSDVSCINQMGLWYRRQRFVRRMVLEQRTPLMVASLYGSLDVVKFILSFPEAELNLSCGPDKSTALHCAASGASVNSLDVVKLLLSVGADPNIPDAHGNRPVDVLVVSPHAPGLRTILEEILKKDEIISEDLHASSSSLGSSFRSLSSSPDNGSSLLSLDSVSSPTKPHGTDVTFASEKKEYPIDPSLPDIKSGIYSTDEFRMFSFKIRPCSRAYSHDWTECPFAHPGENARRRDPRKFHYTCVPCPDFKKGSCKQGDMCEYAHGVFECWLHPAQYRTRLCKDGMGCNRRVCFFAHANEELRPLYPSTGSGLPSPRASSAVSASTMDMASVLNMLPGSPSAAQHSFTPPISPSGNGSMPHSSMGWPQQNIPALNLPGSNIQLSRLRSSLNARDIPSEQLSMLHEFEMQRQLAGDMHSPRFMNHSARPKTLNPSNLEELFSAEVASPRFSDQLAVSSVLSPSHKSALLNQLQNNKQSMLSPIKTNLMSSPKNVEQHSLLQQASSPRGGEPISPMNARMKQQLHSRSLSSRDFGSSLPRDLMPTDSGSPLSPWSSWDQTHGSKVDWSVQSDELGRLRKSHSLANNPNREADVSWAQQMLKDSSSPRNGNRVVNMNGARPLTQGGSSVNPHNSDTRESDILDAWLEQLHLDR

SEQ ID NO: 46307 - protein, 640 aa, Arabidopsis thaliana
  peptide (1)..(640): Ceres Seq. ID no. 13578532
  misc_feature (52)..(87): Pfam Name: Ankyrin repeat Pfam Description: Ankyrin repeat
  misc_feature (172)..(476): Homolog of NCBI NO: 18410398 NR Description: expressed protein [Arabidopsis thaliana]
  misc_feature (172)..(476): Homolog of NCBI NO: 11357692 NR Description: hypothetical protein F27K19.160 - Arabidopsis
  misc_feature (1)..(126): Homolog of NCBI NO: 15225637 NR Description: CCCH-type zinc finger protein -related
  misc_feature (172)..(388): Homolog of NCBI NO: 15225637 NR Description: CCCH-type zinc finger protein -related
  misc_feature (1)..(508): Homolog of NCBI NO: 34899832 NR Description: OJ1092_A07.25 [Oryza sativa (japonica
  misc_feature (1)..(145): Homolog of NCBI NO: 15237721 NR Description: zinc finger transcription factor-related protein
  misc_feature (168)..(479): Homolog of NCBI NO: 15237721 NR Description: zinc finger transcription factor-related protein
  misc_feature (1)..(547): Homolog of NCBI NO: 28273376 NR Description: unknown protein [Oryza sativa (japonica
  misc_feature (1)..(640): Homolog of NCBI NO: 25408764 NR Description: probable CCCH-type zinc finger protein
  misc_feature (1)..(640): Homolog of NCBI NO: 18405834 NR Description: CCCH-type zinc finger protein -related
MGLWYRRQRFVRRMVLEQRTPLMVASLYGSLDVVKFILSFPEAELNLSCGPDKSTALHCAASGASVNSLDVVKLLLSVGADPNIPDAHGNRPVDVLVVSPHAPGLRTILEEILKKDEIISEDLHASSSSLGSSFRSLSSSPDNGSSLLSLDSVSSPTKPHGTDVTFASEKKEYPIDPSLPDIKSGIYSTDEFRMFSFKIRPCSRAYSHDWTECPFAHPGENARRRDPRKFHYTCVPCPDFKKGSCKQGDMCEYAHGVFECWLHPAQYRTRLCKDGMGCNRRVCFFAHANEELRPLYPSTGSGLPSPRASSAVSASTMDMASVLNMLPGSPSAAQHSFTPPISPSGNGSMPHSSMGWPQQNIPALNLPGSNIQLSRLRSSLNARDIPSEQLSMLHEFEMQRQLAGDMHSPRFMNHSARPKTLNPSNLEELFSAEVASPRFSDQLAVSSVLSPSHKSALLNQLQNNKQSMLSPIKTNLMSSPKNVEQHSLLQQASSPRGGEPISPMNARMKQQLHSRSLSSRDFGSSLPRDLMPTDSGSPLSPWSSWDQTHGSKVDWSVQSDELGRLRKSHSLANNPNREADVSWAQQMLKDSSSPRNGNRVVNMNGARPLTQGGSSVNPHNSDTRESDILDAWLEQLHLDR

SEQ ID NO: 46308 - DNA, 2066 bp, Arabidopsis thaliana
  misc_feature (1)..(2066): Ceres Seq. ID no. 15177662
  misc_feature: MA Experiment ID: 20000227 Result: Up-regulated in Transcription
  misc_feature: MA Experiment 20000227 PARAMETER Experiment Name: At_Root-Tips-vs-Tops_P Parameter: Tissue Value: Root Tips vs. Root Tops
  misc_feature: MA Experiment ID: 20000286 Result: Up-regulated in Transcription
  misc_feature: MA Experiment 20000286 PARAMETER Experiment Name: At_Open_Flower_P Parameter: Age (day) Value: 21
  misc_feature: MA Experiment 20000286 PARAMETER Experiment Name: At_Open_Flower_P Parameter: Plant Line Value: WS
  misc_feature: MA Experiment 20000286 PARAMETER Experiment Name: At_Open_Flower_P Parameter: Tissue Value: Half Open vs. Whole Plant
  misc_feature: MA Experiment ID: 20001451 Result: Down-regulated in Transcription
  misc_feature: MA Experiment 20001451 PARAMETER Experiment Name: At_Far-red-induction_P Parameter: Age (day) Value: 7
  misc_feature: MA Experiment 20001451 PARAMETER Experiment Name: At_Far-red-induction_P Parameter: Light Value: Far-red vs. White
  misc_feature: MA Experiment 20001451 PARAMETER Experiment Name: At_Far-red-induction_P Parameter: Organism Value: A. thaliana
  misc_feature: MA Experiment 20001451 PARAMETER Experiment Name: At_Far-red-induction_P Parameter: Plant Line Value: Columbia
  misc_feature: MA Experiment 20001451 PARAMETER Experiment Name: At_Far-red-induction_P Parameter: Timepoint (hr) Value: 24
  misc_feature: MA Experiment 20001451 PARAMETER Experiment Name: At_Far-red-induction_P Parameter: Tissue Value: Whole Plant
  misc_feature: MA Experiment ID: 20001557 Result: Up-regulated in Transcription
  misc_feature: MA Experiment 20001557 PARAMETER Experiment Name: At_Drought_Soil_Dry_P Parameter: Age (day) Value: 27
  misc_feature: MA Experiment 20001557 PARAMETER Experiment Name: At_Drought_Soil_Dry_P Parameter: Organism Value: A. thaliana
  misc_feature: MA Experiment 20001557 PARAMETER Experiment Name: At_Drought_Soil_Dry_P Parameter: Plant Line Value: WS
  misc_feature: MA Experiment 20001557 PARAMETER Experiment Name: At_Drought_Soil_Dry_P Parameter: Post Timepoint (hr) Value: 3
  misc_feature: MA Experiment 20001557 PARAMETER Experiment Name: At_Drought_Soil_Dry_P Parameter: Post-Treatment Value: Re-Water vs. No Drought
  misc_feature: MA Experiment 20001557 PARAMETER Experiment Name: At_Drought_Soil_Dry_P Parameter: Timepoint (day) Value: 13
  misc_feature: MA Experiment 20001557 PARAMETER Experiment Name: At_Drought_Soil_Dry_P Parameter: Treatment Value: Drought vs. No Drought
  misc_feature: MA Experiment ID: 20001558 Result: Up-regulated in Transcription
  misc_feature: MA Experiment 20001558 PARAMETER Experiment Name: At_Drought_Soil_Dry_P Parameter: Age (day) Value: 27
  misc_feature: MA Experiment 20001558 PARAMETER Experiment Name: At_Drought_Soil_Dry_P Parameter: Organism Value: A. thaliana
  misc_feature: MA Experiment 20001558 PARAMETER Experiment Name: At_Drought_Soil_Dry_P Parameter: Plant Line Value: WS
  misc_feature: MA Experiment 20001558 PARAMETER Experiment Name: At_Drought_Soil_Dry_P Parameter: Post Timepoint (hr) Value: 6
  misc_feature: MA Experiment 20001558 PARAMETER Experiment Name: At_Drought_Soil_Dry_P Parameter: Post-Treatment Value: Re-Water vs. No Drought
  misc_feature: MA Experiment 20001558 PARAMETER Experiment Name: At_Drought_Soil_Dry_P Parameter: Timepoint (day) Value: 13
  misc_feature: MA Experiment 20001558 PARAMETER Experiment Name: At_Drought_Soil_Dry_P Parameter: Treatment Value: Drought vs. No Drought
  misc_feature: MA Experiment ID: 20001757 Result: Up-regulated in Transcription
  misc_feature: MA Experiment 20001757 PARAMETER Experiment Name: At_50mM_NH4NO3_L-to-H_P Parameter: Timepoint (hr) Value: 6
  misc_feature: MA Experiment 20001757 PARAMETER Experiment Name: At_50mM_NH4NO3_L-to-H_P Parameter: Tissue Value: Leaf
  misc_feature: MA Experiment 20001757 PARAMETER Experiment Name: At_50mM_NH4NO3_L-to-H_P Parameter: Treatment Value: 50mM NH4NO3 vs 100mM Mannitol
tcactagtcccccccccccccgctaaacccttaatttgagctctctgctctcctggttttagttttcctctatttcgtgctcaattcgcttgttctccagttccactctatcagtgccggcggcgatattgtccgaggataaaacatgtttgctctttccaaggttttgcggagaagtcagagtctccgcctaggagcttgcaatgctgtctactctaagctagatataccattgggagaaagaaacattgctattgaatcaaacgctttgattcatgataaacacgaagctttgcctagattttatgagctctcttggtcttcctctaccggaagacgttcactttcctcggacgctggagctaaaactaccggagatgacgatgacctcgaagacaagaatgtagaccttgcaactccagacgagactagtagtgatagtgaagatggtgaggagttttccggtgatgaaggggatattgaaggagcagagctggaactacatgtcccggaaagcaagagaccatcggagatgtttaaggccattgtttctgtctcaggtctgtctgtagggagtgctcttgataagtgggttgaacaaggaaaggataccaaccgtaaagagtttgaaagtgcgatgctacaactccgtaaacgtcggatgtttgggagagcattgcagatgacagaatggttagacgaaaataagcagtttgaaatggaggagagagattatgcttgtcggcttgatctgatttccaaggtacgtggctggtacaagggagaagcttatatcaaaacaatcccggaatctttcagaggggaattggtctaccgaaccctcctggcgaatcatgtggcaactagcaatgtgagaacagctgaagcagttttcaacaaaatgaaggacttgggattccctctgtcaacattcacctgtaatcagatgcttattctttacaaaagggtcgacaagaagaaaatagccgatgtgttattgctgttggagaaggaaaatctgaagccgaatcttaacacatacaaaatcctgattgataccaaaggatcatcaaatgacataactgggatggaacaaattgtggagacaatgaaaagtgaaggtgttgagcttgaccttcgtgcacgagctctcattgcaagacactatgcatcagctgggcttaaagagaaggctgagaaagtgctgaaagagatggaaggtgaaagcttggaggaaaatcggcatatgtgcaaggatttgctttccgtctatggctatctccagagggaggatgaagtgcgcagagtttggaagatctgtgaagaaaacccccgttataacgaggtccttgctgcaatcttggcttttggaaagatcgataaagtcaaagatgcagaggcggtttttgagaaggtgttgaagatgtcccatagagtttcttctaatgtttactccgttctcttgagggtttacgtggatcacaagatggtctcagagggtaaggatcttgttaagcagatgtcagacagcgggtgcaatattggggccttaacatgggatgcagtgatcaagctctatgtggaagccggggaagtagaaaaggctgagtcttcactgagcaaggcaatacagtcgaaacagattaaaccgttgatgagctccttcatgtacttaatgcacgagtatgtgagaaggggtgatgttcataacacagagaaaatcttccagaggatgaagcaagctggctatcaatctcgcttctgggcgtaccaaacccttatccaagcttatgtcaatgccaaagctccagcatggaatgaaggaaagaatgaaagctgataacatcttcccaaataaaagattagctgctcaactcgctaaagccgatcccttcaagaagacccctctctcggatctccttgattgagttgcgttacagctacaacatcatccgccttgtgaatctttggtttgattgatcaaccttttatccatgttggtagaaacttcagtagcttagtttaaaaaagacctcctgatatataaattctgtttggttgctgct

SEQ ID NO: 46309 - protein, 564 aa, Arabidopsis thaliana
  peptide (1)..(564): Ceres Seq. ID no. 15177663
  misc_feature (505)..(539): Pfam Name: PPR repeat Pfam Description: PPR repeat
  misc_feature (148)..(552): Homolog of NCBI NO: 17064738 NR Description: Unknown protein [Arabidopsis thaliana]
  misc_feature (148)..(552): Homolog of NCBI NO: 15235508 NR Description: pentatricopeptide (PPR) repeat-containing protein
  misc_feature (139)..(553): Homolog of NCBI NO: 15222438 NR Description: pentatricopeptide (PPR) repeat-containing protein
  misc_feature (141)..(553): Homolog of NCBI NO: 34905294 NR Description: putative DNA-binding protein
  misc_feature (225)..(556): Homolog of NCBI NO: 34394024 NR Description: putative DNA-binding protein
  misc_feature (67)..(556): Homolog of NCBI NO: 34900334 NR Description: P0592C06.16 [Oryza sativa (japonica
  misc_feature (71)..(557): Homolog of NCBI NO: 34903362 NR Description: unnamed protein product [Oryza sativa (japonica
  misc_feature (1)..(557): Homolog of NCBI NO: 22331104 NR Description: DNA-binding protein, putative [Arabidopsis
  misc_feature (51)..(557): Homolog of NCBI NO: 6958202 NR Description: DNA-binding protein [Triticum aestivum]
  misc_feature (1)..(557): Homolog of NCBI NO: 15220095 NR Description: DNA binding protein, putative [Arabidopsis
MFALSKVLRRSQSLRLGACNAVYSKLDIPLGERNIAIESNALIHDKHEALPRFYELSWSSSTGRRSLSSDAGAKTTGDDDDLEDKNVDLATPDETSSDSEDGEEFSGDEGDIEGAELELHVPESKRPSEMFKAIVSVSGLSVGSALDKWVEQGKDTNRKEFESAMLQLRKRRMFGRALQMTEWLDENKQFEMEERDYACRLDLISKVRGWYKGEAYIKTIPESFRGELVYRTLLANHVATSNVRTAEAVFNKMKDLGFPLSTFTCNQMLILYKRVDKKKIADVLLLLEKENLKPNLNTYKILIDTKGSSNDITGMEQIVETMKSEGVELDLRARALIARHYASAGLKEKAEKVLKEMEGESLEENRHMCKDLLSVYGYLQREDEVRRVWKICEENPRYNEVLAAILAFGKIDKVKDAEAVFEKVLKMSHRVSSNVYSVLLRVYVDHKMVSEGKDLVKQMSDSGCNIGALTWDAVIKLYVEAGEVEKAESSLSKAIQSKQIKPLMSSFMYLMHEYVRRGDVHNTEKIFQRMKQAGYQSRFWAYQTLIQAYVNAKAPAWNEGKNES

SEQ ID NO: 46310 - protein, 435 aa, Arabidopsis thaliana
  peptide (1)..(435): Ceres Seq. ID no. 15177664
  misc_feature (376)..(410): Pfam Name: PPR repeat Pfam Description: PPR repeat
  misc_feature (19)..(423): Homolog of NCBI NO: 17064738 NR Description: Unknown protein [Arabidopsis thaliana]
  misc_feature (19)..(423): Homolog of NCBI NO: 15235508 NR Description: pentatricopeptide (PPR) repeat-containing protein
  misc_feature (10)..(424): Homolog of NCBI NO: 15222438 NR Description: pentatricopeptide (PPR) repeat-containing protein
  misc_feature (12)..(424): Homolog of NCBI NO: 34905294 NR Description: putative DNA-binding protein
  misc_feature (96)..(427): Homolog of NCBI NO: 34394024 NR Description: putative DNA-binding protein
  misc_feature (1)..(427): Homolog of NCBI NO: 34900334 NR Description: P0592C06.16 [Oryza sativa (japonica
  misc_feature (1)..(428): Homolog of NCBI NO: 34903362 NR Description: unnamed protein product [Oryza sativa (japonica
  misc_feature (1)..(428): Homolog of NCBI NO: 22331104 NR Description: DNA-binding protein, putative [Arabidopsis
  misc_feature (1)..(428): Homolog of NCBI NO: 6958202 NR Description: DNA-binding protein [Triticum aestivum]
  misc_feature (1)..(428): Homolog of NCBI NO: 15220095 NR Description: DNA binding protein, putative [Arabidopsis
MFKAIVSVSGLSVGSALDKWVEQGKDTNRKEFESAMLQLRKRRMFGRALQMTEWLDENKQFEMEERDYACRLDLISKVRGWYKGEAYIKTIPESFRGELVYRTLLANHVATSNVRTAEAVFNKMKDLGFPLSTFTCNQMLILYKRVDKKKIADVLLLLEKENLKPNLNTYKILIDTKGSSNDITGMEQIVETMKSEGVELDLRARALIARHYASAGLKEKAEKVLKEMEGESLEENRHMCKDLLSVYGYLQREDEVRRVWKICEENPRYNEVLAAILAFGKIDKVKDAEAVFEKVLKMSHRVSSNVYSVLLRVYVDHKMVSEGKDLVKQMSDSGCNIGALTWDAVIKLYVEAGEVEKAESSLSKAIQSKQIKPLMSSFMYLMHEYVRRGDVHNTEKIFQRMKQAGYQSRFWAYQTLIQAYVNAKAPAWNEGKNES

SEQ ID NO: 46311 - protein, 400 aa, Arabidopsis thaliana
  peptide (1)..(400): Ceres Seq. ID no. 15177665
  misc_feature (341)..(375): Pfam Name: PPR repeat Pfam Description: PPR repeat
  misc_feature (1)..(388): Homolog of NCBI NO: 17064738 NR Description: Unknown protein [Arabidopsis thaliana]
  misc_feature (1)..(388): Homolog of NCBI NO: 15235508 NR Description: pentatricopeptide (PPR) repeat-containing protein
  misc_feature (1)..(389): Homolog of NCBI NO: 15222438 NR Description: pentatricopeptide (PPR) repeat-containing protein
  misc_feature (1)..(389): Homolog of NCBI NO: 34905294 NR Description: putative DNA-binding protein
  misc_feature (61)..(392): Homolog of NCBI NO: 34394024 NR Description: putative DNA-binding protein
  misc_feature (1)..(392): Homolog of NCBI NO: 34900334 NR Description: P0592C06.16 [Oryza sativa (japonica
  misc_feature (1)..(393): Homolog of NCBI NO: 34903362 NR Description: unnamed protein product [Oryza sativa (japonica
  misc_feature (1)..(393): Homolog of NCBI NO: 22331104 NR Description: DNA-binding protein, putative [Arabidopsis
  misc_feature (1)..(393): Homolog of NCBI NO: 6958202 NR Description: DNA-binding protein [Triticum aestivum]
  misc_feature (1)..(393): Homolog of NCBI NO: 15220095 NR Description: DNA binding protein, putative [Arabidopsis
MLQLRKRRMFGRALQMTEWLDENKQFEMEERDYACRLDLISKVRGWYKGEAYIKTIPESFRGELVYRTLLANHVATSNVRTAEAVFNKMKDLGFPLSTFTCNQMLILYKRVDKKKIADVLLLLEKENLKPNLNTYKILIDTKGSSNDITGMEQIVETMKSEGVELDLRARALIARHYASAGLKEKAEKVLKEMEGESLEENRHMCKDLLSVYGYLQREDEVRRVWKICEENPRYNEVLAAILAFGKIDKVKDAEAVFEKVLKMSHRVSSNVYSVLLRVYVDHKMVSEGKDLVKQMSDSGCNIGALTWDAVIKLYVEAGEVEKAESSLSKAIQSKQIKPLMSSFMYLMHEYVRRGDVHNTEKIFQRMKQAGYQSRFWAYQTLIQAYVNAKAPAWNEGKNES

SEQ ID NO: 46312 - DNA, 2388 bp, Arabidopsis thaliana
  misc_feature (1)..(2388): Ceres Seq. ID no. 12601683
  misc_feature: MA Experiment ID: 20000166 Result: Down-regulated in Transcription
  misc_feature: MA Experiment 20000166 PARAMETER Experiment Name: At_100uM_ABA_P Parameter: Age (day) Value: 14
  misc_feature: MA Experiment 20000166 PARAMETER Experiment Name: At_100uM_ABA_P Parameter: Organism Value: A. thaliana
  misc_feature: MA Experiment 20000166 PARAMETER Experiment Name: At_100uM_ABA_P Parameter: Plant Line Value: WS
  misc_feature: MA Experiment 20000166 PARAMETER Experiment Name: At_100uM_ABA_P Parameter: Timepoint (hr) Value: 1
  misc_feature: MA Experiment 20000166 PARAMETER Experiment Name: At_100uM_ABA_P Parameter: Tissue Value: Aerial
  misc_feature: MA Experiment 20000166 PARAMETER Experiment Name: At_100uM_ABA_P Parameter: Treatment Value: 100uM ABA vs. No Treatment
  misc_feature: MA Experiment ID: 20000173 Result: Up-regulated in Transcription
  misc_feature: MA Experiment 20000173 PARAMETER Experiment Name: At_42deg_Heat_P Parameter: Age (day) Value: 14
  misc_feature: MA Experiment 20000173 PARAMETER Experiment Name: At_42deg_Heat_P Parameter: Organism Value: A. thaliana
  misc_feature: MA Experiment 20000173 PARAMETER Experiment Name: At_42deg_Heat_P Parameter: Plant Line Value: WS
  misc_feature: MA Experiment 20000173 PARAMETER Experiment Name: At_42deg_Heat_P Parameter: Temperature (deg C) Value: 42 vs. 22
  misc_feature: MA Experiment 20000173 PARAMETER Experiment Name: At_42deg_Heat_P Parameter: Timepoint (hr) Value: 6
  misc_feature: MA Experiment 20000173 PARAMETER Experiment Name: At_42deg_Heat_P Parameter: Tissue Value: Aerial
  misc_feature: MA Experiment ID: 20000182 Result: Up-regulated in Transcription
  misc_feature: MA Experiment 20000182 PARAMETER Experiment Name: At_2mM_SA_P Parameter: Age (day) Value: 14
  misc_feature: MA Experiment 20000182 PARAMETER Experiment Name: At_2mM_SA_P Parameter: Organism Value: A. thaliana
  misc_feature: MA Experiment 20000182 PARAMETER Experiment Name: At_2mM_SA_P Parameter: Plant Line Value: WS
  misc_feature: MA Experiment 20000182 PARAMETER Experiment Name: At_2mM_SA_P Parameter: Timepoint (hr) Value: 6
  misc_feature: MA Experiment 20000182 PARAMETER Experiment Name: At_2mM_SA_P Parameter: Tissue Value: Aerial
  misc_feature: MA Experiment 20000182 PARAMETER Experiment Name: At_2mM_SA_P Parameter: Treatment Value: 2mM SA vs. No Treatment
  misc_feature: MA Experiment ID: 20000184 Result: Up-regulated in Transcription
  misc_feature: MA Experiment 20000184 PARAMETER Experiment Name: At_Shoots__P Parameter: Age (day) Value: 7
  misc_feature: MA Experiment 20000184 PARAMETER Experiment Name: At_Shoots__P Parameter: Tissue Value: Shoots vs. Whole Plant
  misc_feature: MA Experiment ID: 20000265 Result: Up-regulated in Transcription
  misc_feature: MA Experiment 20000265 PARAMETER Experiment Name: At_Open_Flower_P Parameter: Age (day) Value: 21
  misc_feature: MA Experiment 20000265 PARAMETER Experiment Name: At_Open_Flower_P Parameter: Plant Line Value: WS
  misc_feature: MA Experiment 20000265 PARAMETER Experiment Name: At_Open_Flower_P Parameter: Tissue Value: Closed Flower vs. Whole Plant
  misc_feature: MA Experiment ID: 20000269 Result: Up-regulated in Transcription
  misc_feature: MA Experiment 20000269 PARAMETER Experiment Name: At_1mM_KNO3_L-vs-H_Roots_P Parameter: Age (day) Value: 7,10,12
  misc_feature: MA Experiment 20000269 PARAMETER Experiment Name: At_1mM_KNO3_L-vs-H_Roots_P Parameter: Organism Value: A. thaliana
  misc_feature: MA Experiment 20000269 PARAMETER Experiment Name: At_1mM_KNO3_L-vs-H_Roots_P Parameter: Plant Line Value: WS
  misc_feature: MA Experiment 20000269 PARAMETER Experiment Name: At_1mM_KNO3_L-vs-H_Roots_P Parameter: Timepoint (day) Value: 7,10,12
  misc_feature: MA Experiment 20000269 PARAMETER Experiment Name: At_1mM_KNO3_L-vs-H_Roots_P Parameter: Tissue Value: Roots
  misc_feature: MA Experiment 20000269 PARAMETER Experiment Name: At_1mM_KNO3_L-vs-H_Roots_P Parameter: Treatment Value: 1mM KNO3 vs. 50mM KNO3
  misc_feature: MA Experiment ID: 20000438 Result: Up-regulated in Transcription
  misc_feature: MA Experiment 20000438 PARAMETER Experiment Name: At_Shoots__P Parameter: Age (day) Value: 14
  misc_feature: MA Experiment 20000438 PARAMETER Experiment Name: At_Shoots__P Parameter: Tissue Value: Shoots vs. Whole Plant
  misc_feature: MA Experiment ID: 20000573 Result: Down-regulated in Transcription
  misc_feature: MA Experiment 20000573 PARAMETER Experiment Name: At_100uM_ABA_Mutants__P Parameter: Organism Value: A. thaliana
  misc_feature: MA Experiment 20000573 PARAMETER Experiment Name: At_100uM_ABA_Mutants__P Parameter: Plant Line Value: CS22 vs. Ler wt
  misc_feature: MA Experiment 20000573 PARAMETER Experiment Name: At_100uM_ABA_Mutants__P Parameter: Timepoint (hr) Value: N/A
  misc_feature: MA Experiment 20000573 PARAMETER Experiment Name: At_100uM_ABA_Mutants__P Parameter: Tissue Value: Whole Plant
  misc_feature: MA Experiment 20000573 PARAMETER Experiment Name: At_100uM_ABA_Mutants__P Parameter: Treatment Value: None
  misc_feature: MA Experiment ID: 20000709 Result: Up-regulated in Transcription
  misc_feature: MA Experiment 20000709 PARAMETER Experiment Name: At_15mM_NH4NO3_L-to-H_P Parameter: Age (hr) Value: 14
  misc_feature: MA Experiment 20000709 PARAMETER Experiment Name: At_15mM_NH4NO3_L-to-H_P Parameter: Organism Value: A. thaliana
  misc_feature: MA Experiment 20000709 PARAMETER Experiment Name: At_15mM_NH4NO3_L-to-H_P Parameter: Plant Line Value: WS
  misc_feature: MA Experiment 20000709 PARAMETER Experiment Name: At_15mM_NH4NO3_L-to-H_P Parameter: Timepoint (hr) Value: 4
  misc_feature: MA Experiment 20000709 PARAMETER Experiment Name: At_15mM_NH4NO3_L-to-H_P Parameter: Tissue Value: Aerial
  misc_feature: MA Experiment 20000709 PARAMETER Experiment Name: At_15mM_NH4NO3_L-to-H_P Parameter: Treatment Value: 15mM NH4NO3 vs. 30mM Mannitol
  misc_feature: MA Experiment ID: 20000794 Result: Up-regulated in Transcription
  misc_feature: MA Experiment 20000794 PARAMETER Experiment Name: At_Petals_P Parameter: Age (day) Value: 23-25 days
  misc_feature: MA Experiment 20000794 PARAMETER Experiment Name: At_Petals_P Parameter: Plant Line Value: WS
  misc_feature: MA Experiment 20000794 PARAMETER Experiment Name: At_Petals_P Parameter: Tissue Value: Petals vs. Whole plant
  misc_feature: MA Experiment ID: 20001248 Result: Down-regulated in Transcription
  misc_feature: MA Experiment 20001248 PARAMETER Experiment Name: At_Far-red-induction_P Parameter: Age (day) Value: 7
  misc_feature: MA Experiment 20001248 PARAMETER Experiment Name: At_Far-red-induction_P Parameter: Light Value: Far-red vs. White
  misc_feature: MA Experiment 20001248 PARAMETER Experiment Name: At_Far-red-induction_P Parameter: Organism Value: A. thaliana
  misc_feature: MA Experiment 20001248 PARAMETER Experiment Name: At_Far-red-induction_P Parameter: Plant Line Value: Columbia
  misc_feature: MA Experiment 20001248 PARAMETER Experiment Name: At_Far-red-induction_P Parameter: Timepoint (hr) Value: 4
  misc_feature: MA Experiment 20001248 PARAMETER Experiment Name: At_Far-red-induction_P Parameter: Tissue Value: Whole Plant
  misc_feature: MA Experiment ID: 20001457 Result: Up-regulated in Transcription
  misc_feature: MA Experiment 20001457 PARAMETER Experiment Name: At_50mM_NH4NO3_L-to-H_P Parameter: Age (day) Value: Undefined
  misc_feature: MA Experiment 20001457 PARAMETER Experiment Name: At_50mM_NH4NO3_L-to-H_P Parameter: Organism Value: Undefined
  misc_feature: MA Experiment 20001457 PARAMETER Experiment Name: At_50mM_NH4NO3_L-to-H_P Parameter: Plant Line Value: Undefined
  misc_feature: MA Experiment 20001457 PARAMETER Experiment Name: At_50mM_NH4NO3_L-to-H_P Parameter: Timepoint (hr) Value: 0.5
  misc_feature: MA Experiment 20001457 PARAMETER Experiment Name: At_50mM_NH4NO3_L-to-H_P Parameter: Tissue Value: Siliques
  misc_feature: MA Experiment 20001457 PARAMETER Experiment Name: At_50mM_NH4NO3_L-to-H_P Parameter: Treatment Value: 50mM NH4NO3 vs. 100mM Manitol
  misc_feature: MA Experiment ID: 20001459 Result: Up-regulated in Transcription
  misc_feature: MA Experiment 20001459 PARAMETER Experiment Name: At_50mM_NH4NO3_L-to-H_P Parameter: Age (day) Value: Undefined
  misc_feature: MA Experiment 20001459 PARAMETER Experiment Name: At_50mM_NH4NO3_L-to-H_P Parameter: Organism Value: Undefined
  misc_feature: MA Experiment 20001459 PARAMETER Experiment Name: At_50mM_NH4NO3_L-to-H_P Parameter: Plant Line Value: Undefined
  misc_feature: MA Experiment 20001459 PARAMETER Experiment Name: At_50mM_NH4NO3_L-to-H_P Parameter: Timepoint (hr) Value: 4
  misc_feature: MA Experiment 20001459 PARAMETER Experiment Name: At_50mM_NH4NO3_L-to-H_P Parameter: Tissue Value: Siliques
  misc_feature: MA Experiment 20001459 PARAMETER Experiment Name: At_50mM_NH4NO3_L-to-H_P Parameter: Treatment Value: 50mM NH4NO3 vs. 100mM Manitol
  misc_feature: MA Experiment ID: 20001557 Result: Up-regulated in Transcription
  misc_feature: MA Experiment 20001557 PARAMETER Experiment Name: At_Drought_Soil_Dry_P Parameter: Age (day) Value: 27
  misc_feature: MA Experiment 20001557 PARAMETER Experiment Name: At_Drought_Soil_Dry_P Parameter: Organism Value: A. thaliana
  misc_feature: MA Experiment 20001557 PARAMETER Experiment Name: At_Drought_Soil_Dry_P Parameter: Plant Line Value: WS
  misc_feature: MA Experiment 20001557 PARAMETER Experiment Name: At_Drought_Soil_Dry_P Parameter: Post Timepoint (hr) Value: 3
  misc_feature: MA Experiment 20001557 PARAMETER Experiment Name: At_Drought_Soil_Dry_P Parameter: Post-Treatment Value: Re-Water vs. No Drought
  misc_feature: MA Experiment 20001557 PARAMETER Experiment Name: At_Drought_Soil_Dry_P Parameter: Timepoint (day) Value: 13
  misc_feature: MA Experiment 20001557 PARAMETER Experiment Name: At_Drought_Soil_Dry_P Parameter: Treatment Value: Drought vs. No Drought
  misc_feature: MA Experiment ID: 20001756 Result: Up-regulated in Transcription
  misc_feature: MA Experiment 20001756 PARAMETER Experiment Name: At_50mM_NH4NO3_L-to-H_P Parameter: Timepoint (hr) Value: 4
  misc_feature: MA Experiment 20001756 PARAMETER Experiment Name: At_50mM_NH4NO3_L-to-H_P Parameter: Tissue Value: Leaf
  misc_feature: MA Experiment 20001756 PARAMETER Experiment Name: At_50mM_NH4NO3_L-to-H_P Parameter: Treatment Value: 50mM NH4NO3 vs 100mM Mannitol
  misc_feature: MA Experiment ID: 20001757 Result: Up-regulated in Transcription
  misc_feature: MA Experiment 20001757 PARAMETER Experiment Name: At_50mM_NH4NO3_L-to-H_P Parameter: Timepoint (hr) Value: 6
  misc_feature: MA Experiment 20001757 PARAMETER Experiment Name: At_50mM_NH4NO3_L-to-H_P Parameter: Tissue Value: Leaf
  misc_feature: MA Experiment 20001757 PARAMETER Experiment Name: At_50mM_NH4NO3_L-to-H_P Parameter: Treatment Value: 50mM NH4NO3 vs 100mM Mannitol
  misc_feature: MA Experiment ID: 20001760 Result: Up-regulated in Transcription
  misc_feature: MA Experiment 20001760 PARAMETER Experiment Name: At_50mM_NH4NO3_L-to-H_P Parameter: Timepoint (hr) Value: 2
  misc_feature: MA Experiment 20001760 PARAMETER Experiment Name: At_50mM_NH4NO3_L-to-H_P Parameter: Tissue Value: Siliques
  misc_feature: MA Experiment 20001760 PARAMETER Experiment Name: At_50mM_NH4NO3_L-to-H_P Parameter: Treatment Value: 50mM NH4NO3 vs 100mM Mannitol
acaacaccacttgggggaggctcccatacacaaaacgaaggcgcgaatttcaaggactcttctcgacgaccaaaccacataaaacactcttaccagaatttgtgttgtcttcgttcatttccttctcctcttcttcttcttcttcgtcgtaattttgattgtttctttgcgaaaagtcgtttttttaatcaagtctgaatcacgttttattgatctacactcgcgtgggttctccgtttcgtgcttagatcagagagctccctcccgtgattccgagctttaaggtcggaaatggcggctcatgtttctactggaaacattcataatttctatcttgcggggcaggtttacaggggacaagctttttcatggagttctgcttctactttcatggcaaatccattcaaagagccctcttggtcaagtggggtatttaaggctctaaaagctgagagatgtggttgttactctcgtggtatttcccccatcagtgagacctcaaaacctatcagggctgtttcggtatcttcttcaacaaagtattatgatttcactgtgattggtagtggagtagcgggtctgcgttatgctttagaagttgcaaagcaaggaacagtcgcagtgattaccaaagatgagcctcatgagagtaacacaaactatgctcaaggtggtgttagtgctgtgttatgccctttggattctgttgaaagtcatatgcgggacactatggtcgctggtgctcatctttgtgatgaagaaaccgtaagagttgtgtgtactgaagggcctgaaaggattcgtgaactgattgcaatgggagcatcatttgatcacggcgaggatggaaatttgcatttggccagagagggtggtcactcgcattgtaggatcgttcacgctgctgatatgacaggaagagagattgagagagctttacttgaagctgtacttaatgatcccaacatatctgtcttcaaacaccattttgcaatcgatctgctcacttctcaggatggcttgaacacagtttgtcatggtgtggacactttgaatatcaaaactaatgaggtagtacgctttatatcgaaggtgacattgcttgcttcaggtggagctgggcatatctatccatcaaccacaaatcctctggtggctactggagatgggatggcgatggctcatcgagctcaagctgtgatctcaaatatggaatttgtgcagtttcatcctactgccctagccgacgaaggtcttcccatcaaactacaaactgctagggaaaacgcgttcctcatcaccgaggcggtgagaggtgatggtggcatcctctataatctaggaatggagcgattcatgcctgtttacgatgaacgagctgagcttgctccaagagacgtggttgcaagaagtattgatgaccagcttaagaaacgaaacgaaaagtatgtgttacttgacataagccataagccaagagaaaagattcttgcccatttcccgaacatagcttctgaatgtcttaaacacggtctggatatcacccgtcagcctattccggttgtccctgcagcccattacatgtgtggaggagttcgtgctggtttacaaggcgaaaccaatgtccttggattgtttgtagcaggtgaagtagcatgtacaggcctccacggggcaaatcgtcttgctagtaactcgcttttagaagctctggttttcgcgagacgggctgttcagccttcgactgagctcatgaaacgcacaagacttgatgtatgcgcatcagagaaatggacaaggcctgttgttgcgacagctagattgctaggagatgaagtaatagcaaagattatagctttgactaaagaagtgagaagagagcttcaggaggtaatgtggaagtatgttggtattgtcagatcgacaattcggctcaccactgctgagaggaaaatcgcagagctagaagcaaaatgggaaacatttttgtttgaacatggatgggaacaaacagtggtagctcttgaagcttgtgagatgagaaacttgttctgttgcgctaagcttgtggtgagcagcgcgttagctagacatgaaagcagaggtcttcattacatgacagactttccttttgtggaagaaagcaagcggattccgacgattattctaccgtcttctcctacaacagctagttggagctcaaggcggttacagaatataagtagcagctcacttattgattgctaaaactgcaggagtttttgttcttatttgaatccaaacctctctgattattgtatcaatttgaaaaaatttggatctcaaaaggaatctctgattctgacactctgtaatacaaaaggaaataaattattcatttgagatatc

SEQ ID NO: 46313 - protein, 651 aa, Arabidopsis thaliana
  peptide (1)..(651): Ceres Seq. ID no. 12601684
  misc_feature (182)..(480): Pfam Name: FAD binding domain Pfam Description: FAD binding domain
  misc_feature (85)..(627): Homolog of NCBI NO: 23103708 NR Description: hypothetical protein [Azotobacter vinelandii]
  misc_feature (85)..(634): Homolog of NCBI NO: 22976540 NR Description: hypothetical protein [Ralstonia metallidurans]
  misc_feature (85)..(633): Homolog of NCBI NO: 17547166 NR Description: PROBABLE L-ASPARTATE OXIDASE (QUINOLINATE
  misc_feature (85)..(617): Homolog of NCBI NO: 29348593 NR Description: L-aspartate oxidase [Bacteroides thetaiotaomicron
  misc_feature (85)..(627): Homolog of NCBI NO: 22983294 NR Description: hypothetical protein [Burkholderia fungorum]
  misc_feature (86)..(625): Homolog of NCBI NO: 24214211 NR Description: L-aspartate oxidase
  misc_feature (86)..(628): Homolog of NCBI NO: 21673396 NR Description: L-aspartate oxidase [Chlorobium tepidum TLS]
  misc_feature (86)..(613): Homolog of NCBI NO: 39996926 NR Description: L-aspartate oxidase [Geobacter sulfurreducens
  misc_feature (530)..(613): Homolog of NCBI NO: 30249844 NR Description: nadB1
  misc_feature (85)..(555): Homolog of NCBI NO: 30249844 NR Description: nadB1
MAAHVSTGNIHNFYLAGQVYRGQAFSWSSASTFMANPFKEPSWSSGVFKALKAERCGCYSRGISPISETSKPIRAVSVSSSTKYYDFTVIGSGVAGLRYALEVAKQGTVAVITKDEPHESNTNYAQGGVSAVLCPLDSVESHMRDTMVAGAHLCDEETVRVVCTEGPERIRELIAMGASFDHGEDGNLHLAREGGHSHCRIVHAADMTGREIERALLEAVLNDPNISVFKHHFAIDLLTSQDGLNTVCHGVDTLNIKTNEVVRFISKVTLLASGGAGHIYPSTTNPLVATGDGMAMAHRAQAVISNMEFVQFHPTALADEGLPIKLQTARENAFLITEAVRGDGGILYNLGMERFMPVYDERAELAPRDVVARSIDDQLKKRNEKYVLLDISHKPREKILAHFPNIASECLKHGLDITRQPIPVVPAAHYMCGGVRAGLQGETNVLGLFVAGEVACTGLHGANRLASNSLLEALVFARRAVQPSTELMKRTRLDVCASEKWTRPVVATARLLGDEVIAKIIALTKEVRRELQEVMWKYVGIVRSTIRLTTAERKIAELEAKWETFLFEHGWEQTVVALEACEMRNLFCCAKLVVSSALARHESRGLHYMTDFPFVEESKRIPTIILPSSPTTASWSSRRLQNISSSSLIDC

SEQ ID NO: 46314 - protein, 618 aa, Arabidopsis thaliana
  peptide (1)..(618): Ceres Seq. ID no. 12601685
  misc_feature (149)..(447): Pfam Name: FAD binding domain Pfam Description: FAD binding domain
  misc_feature (52)..(594): Homolog of NCBI NO: 23103708 NR Description: hypothetical protein [Azotobacter vinelandii]
  misc_feature (52)..(601): Homolog of NCBI NO: 22976540 NR Description: hypothetical protein [Ralstonia metallidurans]
  misc_feature (52)..(600): Homolog of NCBI NO: 17547166 NR Description: PROBABLE L-ASPARTATE OXIDASE (QUINOLINATE
  misc_feature (52)..(584): Homolog of NCBI NO: 29348593 NR Description: L-aspartate oxidase [Bacteroides thetaiotaomicron
  misc_feature (52)..(594): Homolog of NCBI NO: 22983294 NR Description: hypothetical protein [Burkholderia fungorum]
  misc_feature (53)..(592): Homolog of NCBI NO: 24214211 NR Description: L-aspartate oxidase
  misc_feature (53)..(595): Homolog of NCBI NO: 21673396 NR Description: L-aspartate oxidase [Chlorobium tepidum TLS]
  misc_feature (53)..(580): Homolog of NCBI NO: 39996926 NR Description: L-aspartate oxidase [Geobacter sulfurreducens
  misc_feature (497)..(580): Homolog of NCBI NO: 30249844 NR Description: nadB1
  misc_feature (52)..(522): Homolog of NCBI NO: 30249844 NR Description: nadB1
MANPFKEPSWSSGVFKALKAERCGCYSRGISPISETSKPIRAVSVSSSTKYYDFTVIGSGVAGLRYALEVAKQGTVAVITKDEPHESNTNYAQGGVSAVLCPLDSVESHMRDTMVAGAHLCDEETVRVVCTEGPERIRELIAMGASFDHGEDGNLHLAREGGHSHCRIVHAADMTGREIERALLEAVLNDPNISVFKHHFAIDLLTSQDGLNTVCHGVDTLNIKTNEVVRFISKVTLLASGGAGHIYPSTTNPLVATGDGMAMAHRAQAVISNMEFVQFHPTALADEGLPIKLQTARENAFLITEAVRGDGGILYNLGMERFMPVYDERAELAPRDVVARSIDDQLKKRNEKYVLLDISHKPREKILAHFPNIASECLKHGLDITRQPIPVVPAAHYMCGGVRAGLQGETNVLGLFVAGEVACTGLHGANRLASNSLLEALVFARRAVQPSTELMKRTRLDVCASEKWTRPVVATARLLGDEVIAKIIALTKEVRRELQEVMWKYVGIVRSTIRLTTAERKIAELEAKWETFLFEHGWEQTVVALEACEMRNLFCCAKLVVSSALARHESRGLHYMTDFPFVEESKRIPTIILPSSPTTASWSSRRLQNISSSSLIDC

SEQ ID NO: 46315 - protein, 509 aa, Arabidopsis thaliana
  peptide (1)..(509): Ceres Seq. ID no. 12601686
  misc_feature (40)..(338): Pfam Name: FAD binding domain Pfam Description: FAD binding domain
  misc_feature (1)..(485): Homolog of NCBI NO: 23103708 NR Description: hypothetical protein [Azotobacter vinelandii]
  misc_feature (1)..(492): Homolog of NCBI NO: 22976540 NR Description: hypothetical protein [Ralstonia metallidurans]
  misc_feature (1)..(491): Homolog of NCBI NO: 17547166 NR Description: PROBABLE L-ASPARTATE OXIDASE (QUINOLINATE
  misc_feature (1)..(475): Homolog of NCBI NO: 29348593 NR Description: L-aspartate oxidase [Bacteroides thetaiotaomicron
  misc_feature (1)..(485): Homolog of NCBI NO: 22983294 NR Description: hypothetical protein [Burkholderia fungorum]
  misc_feature (1)..(483): Homolog of NCBI NO: 24214211 NR Description: L-aspartate oxidase
  misc_feature (1)..(486): Homolog of NCBI NO: 21673396 NR Description: L-aspartate oxidase [Chlorobium tepidum TLS]
  misc_feature (1)..(471): Homolog of NCBI NO: 39996926 NR Description: L-aspartate oxidase [Geobacter sulfurreducens
  misc_feature (388)..(471): Homolog of NCBI NO: 30249844 NR Description: nadB1
  misc_feature (1)..(413): Homolog of NCBI NO: 30249844 NR Description: nadB1
MRDTMVAGAHLCDEETVRVVCTEGPERIRELIAMGASFDHGEDGNLHLAREGGHSHCRIVHAADMTGREIERALLEAVLNDPNISVFKHHFAIDLLTSQDGLNTVCHGVDTLNIKTNEVVRFISKVTLLASGGAGHIYPSTTNPLVATGDGMAMAHRAQAVISNMEFVQFHPTALADEGLPIKLQTARENAFLITEAVRGDGGILYNLGMERFMPVYDERAELAPRDVVARSIDDQLKKRNEKYVLLDISHKPREKILAHFPNIASECLKHGLDITRQPIPVVPAAHYMCGGVRAGLQGETNVLGLFVAGEVACTGLHGANRLASNSLLEALVFARRAVQPSTELMKRTRLDVCASEKWTRPVVATARLLGDEVIAKIIALTKEVRRELQEVMWKYVGIVRSTIRLTTAERKIAELEAKWETFLFEHGWEQTVVALEACEMRNLFCCAKLVVSSALARHESRGLHYMTDFPFVEESKRIPTIILPSSPTTASWSSRRLQNISSSSLIDC

SEQ ID NO: 46316 - DNA, 1545 bp, Arabidopsis thaliana
  misc_feature (1)..(1545): Ceres Seq. ID no. 12575907
  misc_feature: MA Experiment ID: 20000286 Result: Up-regulated in Transcription
  misc_feature: MA Experiment 20000286 PARAMETER Experiment Name: At_Open_Flower_P Parameter: Age (day) Value: 21
  misc_feature: MA Experiment 20000286 PARAMETER Experiment Name: At_Open_Flower_P Parameter: Plant Line Value: WS
  misc_feature: MA Experiment 20000286 PARAMETER Experiment Name: At_Open_Flower_P Parameter: Tissue Value: Half Open vs. Whole Plant
  misc_feature: MA Experiment ID: 20000437 Result: Down-regulated in Transcription
  misc_feature: MA Experiment 20000437 PARAMETER Experiment Name: At_Drought_P Parameter: Age (day) Value: 8
  misc_feature: MA Experiment 20000437 PARAMETER Experiment Name: At_Drought_P Parameter: Organism Value: A. thaliana
  misc_feature: MA Experiment 20000437 PARAMETER Experiment Name: At_Drought_P Parameter: Plant Line Value: WS
  misc_feature: MA Experiment 20000437 PARAMETER Experiment Name: At_Drought_P Parameter: Timepoint (hr) Value: 24
  misc_feature: MA Experiment 20000437 PARAMETER Experiment Name: At_Drought_P Parameter: Tissue Value: Whole Plant
  misc_feature: MA Experiment 20000437 PARAMETER Experiment Name: At_Drought_P Parameter: Treatment Value: Drought vs. No Drought
  misc_feature: MA Experiment ID: 20001248 Result: Down-regulated in Transcription
  misc_feature: MA Experiment 20001248 PARAMETER Experiment Name: At_Far-red-induction_P Parameter: Age (day) Value: 7
  misc_feature: MA Experiment 20001248 PARAMETER Experiment Name: At_Far-red-induction_P Parameter: Light Value: Far-red vs. White
  misc_feature: MA Experiment 20001248 PARAMETER Experiment Name: At_Far-red-induction_P Parameter: Organism Value: A. thaliana
  misc_feature: MA Experiment 20001248 PARAMETER Experiment Name: At_Far-red-induction_P Parameter: Plant Line Value: Columbia
  misc_feature: MA Experiment 20001248 PARAMETER Experiment Name: At_Far-red-induction_P Parameter: Timepoint (hr) Value: 4
  misc_feature: MA Experiment 20001248 PARAMETER Experiment Name: At_Far-red-induction_P Parameter: Tissue Value: Whole Plant
  misc_feature: MA Experiment ID: 20001450 Result: Down-regulated in Transcription
  misc_feature: MA Experiment 20001450 PARAMETER Experiment Name: At_Far-red-induction_P Parameter: Age (day) Value: 7
  misc_feature: MA Experiment 20001450 PARAMETER Experiment Name: At_Far-red-induction_P Parameter: Light Value: Far-red vs. White
  misc_feature: MA Experiment 20001450 PARAMETER Experiment Name: At_Far-red-induction_P Parameter: Organism Value: A. thaliana
  misc_feature: MA Experiment 20001450 PARAMETER Experiment Name: At_Far-red-induction_P Parameter: Plant Line Value: Columbia
  misc_feature: MA Experiment 20001450 PARAMETER Experiment Name: At_Far-red-induction_P Parameter: Timepoint (hr) Value: 8
  misc_feature: MA Experiment 20001450 PARAMETER Experiment Name: At_Far-red-induction_P Parameter: Tissue Value: Whole Plant
  misc_feature: MA Experiment ID: 20001451 Result: Down-regulated in Transcription
  misc_feature: MA Experiment 20001451 PARAMETER Experiment Name: At_Far-red-induction_P Parameter: Age (day) Value: 7
  misc_feature: MA Experiment 20001451 PARAMETER Experiment Name: At_Far-red-induction_P Parameter: Light Value: Far-red vs. White
  misc_feature: MA Experiment 20001451 PARAMETER Experiment Name: At_Far-red-induction_P Parameter: Organism Value: A. thaliana
  misc_feature: MA Experiment 20001451 PARAMETER Experiment Name: At_Far-red-induction_P Parameter: Plant Line Value: Columbia
  misc_feature: MA Experiment 20001451 PARAMETER Experiment Name: At_Far-red-induction_P Parameter: Timepoint (hr) Value: 24
  misc_feature: MA Experiment 20001451 PARAMETER Experiment Name: At_Far-red-induction_P Parameter: Tissue Value: Whole Plant
atgtctattaaagcatttgctttgattcaactactatccgtcacgattttatacaaccatgttcatgcaacaagtccgatcaaaaccatcgtagttgtggtgatggaaaatagatctttcgatcacatgcttggatggatgaagaaactaaacccggagatcaacggtgtggacgggtcggagtcaaacccggtctcggtgtcggacccttcctctagaaaaataaaattcgggtcaggttcgcattacgtagatccggaccctggtcattcgtttcaagcgataagagagcaagtattcgggtcaaatgatacatcaatggatcctccaccgatgaacgggtttgttcaacaagcatattccgaggaccctagtggtaacatgtcggcaagtgttatgaatggatttgaacctgataaggttcctgtctacaagtctcttgtctccgagttcgctgttttcgatagatggtttgcatcggttccatcatcgacacagccaaacagaatgtttgtacactcagggacgtcagcgggagccaccagcaacaaccctatctcccttgcaaagggttatcctcaaagaaccattttcgacaatcttgacgacgaagaattctctttcggtatatactaccagaatattccggcagtattgttttatcaaagcctaaggaaactcaaatacgtttttaagttccatagctatgggaactcttttaaggatcatgcaaagcaaggcaagctccctgcctacactgtcattgagcaacgttacatggacaccctcttggaaccggcttctgatgatcatccatcacatgatgtctaccaaggacagaagtttataaaggaagtgtacgagaccctaagggcgagcccacaatggaacgaaactttattgattatcacttacgacgagcatggtgggtatttcgatcacgtgcccacaccggttcgcaatgttcctagtccggatggtatagttggaccggatccattcctatttcagtttaacaggttaggtattcgtgtaccaacaatagcagtgtccccatggatagagaaaggaacggtcgtacatggaccaaacgggtctccatttccatcgtcagagtacgagcactcttcaatccccgcgactgtgaagaaactattcaatctatcatcgcctttcctcacaaagagagatgaatgggctggcacttttgagaacatcttacaaatccgaaaggagcctcgaactgattgccccgagacactacctgaaccggttaagataagaatgggagaggcaaatgagaaagctcttttgactgagtttcagcaagagcttgtacaactagctgcggttctaaaaggtgataatatgctcacaacatttcctaaagaaataagcaaaggaatgacagtgattgaagggaagaggtacatggaagatgctatgaaacgattcttagaggctggtcgtatggctctttccatgggagcgaataaagaagagcttgtccatatgaaaacttccctcaccggaagaagaccttaa

SEQ ID NO: 46317 - protein, 514 aa, Arabidopsis thaliana
  peptide (1)..(514): Ceres Seq. ID no. 12575908
  misc_feature (27)..(406): Pfam Name: Phosphoesterase family Pfam Description: Phosphoesterase family
  misc_feature (26)..(504): Homolog of NCBI NO: 18396577 NR Description: expressed protein
  misc_feature (23)..(510): Homolog of NCBI NO: 17529016 NR Description: unknown protein [Arabidopsis thaliana]
  misc_feature (23)..(510): Homolog of NCBI NO: 15228577 NR Description: unknown protein
  misc_feature (23)..(487): Homolog of NCBI NO: 27573343 NR Description: putative phosphoesterase [Oryza sativa (japonica
  misc_feature (11)..(512): Homolog of NCBI NO: 30693062 NR Description: phosphoesterase family [Arabidopsis thaliana]
  misc_feature (19)..(512): Homolog of NCBI NO: 34897344 NR Description: putative phospholipase [Oryza sativa]
  misc_feature (26)..(512): Homolog of NCBI NO: 15222342 NR Description: unknown protein; protein id: At1g07230.1
  misc_feature (26)..(512): Homolog of NCBI NO: 21703147 NR Description: At1g07230/F10K1_4 [Arabidopsis thaliana]
  misc_feature (23)..(512): Homolog of NCBI NO: 20161866 NR Description: B1139B11.7 [Oryza sativa (japonica
  misc_feature (1)..(514): Homolog of NCBI NO: 15225806 NR Description: putative phospholipase C; protein id: At2g26870.1
MSIKAFALIQLLSVTILYNHVHATSPIKTIVVVVMENRSFDHMLGWMKKLNPEINGVDGSESNPVSVSDPSSRKIKFGSGSHYVDPDPGHSFQAIREQVFGSNDTSMDPPPMNGFVQQAYSEDPSGNMSASVMNGFEPDKVPVYKSLVSEFAVFDRWFASVPSSTQPNRMFVHSGTSAGATSNNPISLAKGYPQRTIFDNLDDEEFSFGIYYQNIPAVLFYQSLRKLKYVFKFHSYGNSFKDHAKQGKLPAYTVIEQRYMDTLLEPASDDHPSHDVYQGQKFIKEVYETLRASPQWNETLLIITYDEHGGYFDHVPTPVRNVPSPDGIVGPDPFLFQFNRLGIRVPTIAVSPWIEKGTVVHGPNGSPFPSSEYEHSSIPATVKKLFNLSSPFLTKRDEWAGTFENILQIRKEPRTDCPETLPEPVKIRMGEANEKALLTEFQQELVQLAAVLKGDNMLTTFPKEISKGMTVIEGKRYMEDAMKRFLEAGRMALSMGANKEELVHMKTSLTGRRP

SEQ ID NO: 46318 - protein, 480 aa, Arabidopsis thaliana
  peptide (1)..(480): Ceres Seq. ID no. 12575909
  misc_feature (1)..(372): Pfam Name: Phosphoesterase family Pfam Description: Phosphoesterase family
  misc_feature (1)..(470): Homolog of NCBI NO: 18396577 NR Description: expressed protein
  misc_feature (1)..(476): Homolog of NCBI NO: 17529016 NR Description: unknown protein [Arabidopsis thaliana]
  misc_feature (1)..(476): Homolog of NCBI NO: 15228577 NR Description: unknown protein
  misc_feature (1)..(453): Homolog of NCBI NO: 27573343 NR Description: putative phosphoesterase [Oryza sativa (japonica
  misc_feature (1)..(478): Homolog of NCBI NO: 30693062 NR Description: phosphoesterase family [Arabidopsis thaliana]
  misc_feature (1)..(478): Homolog of NCBI NO: 34897344 NR Description: putative phospholipase [Oryza sativa]
  misc_feature (1)..(478): Homolog of NCBI NO: 15222342 NR Description: unknown protein; protein id: At1g07230.1
  misc_feature (1)..(478): Homolog of NCBI NO: 21703147 NR Description: At1g07230/F10K1_4 [Arabidopsis thaliana]
  misc_feature (1)..(478): Homolog of NCBI NO: 20161866 NR Description: B1139B11.7 [Oryza sativa (japonica
  misc_feature (1)..(480): Homolog of NCBI NO: 15225806 NR Description: putative phospholipase C; protein id: At2g26870.1
MENRSFDHMLGWMKKLNPEINGVDGSESNPVSVSDPSSRKIKFGSGSHYVDPDPGHSFQAIREQVFGSNDTSMDPPPMNGFVQQAYSEDPSGNMSASVMNGFEPDKVPVYKSLVSEFAVFDRWFASVPSSTQPNRMFVHSGTSAGATSNNPISLAKGYPQRTIFDNLDDEEFSFGIYYQNIPAVLFYQSLRKLKYVFKFHSYGNSFKDHAKQGKLPAYTVIEQRYMDTLLEPASDDHPSHDVYQGQKFIKEVYETLRASPQWNETLLIITYDEHGGYFDHVPTPVRNVPSPDGIVGPDPFLFQFNRLGIRVPTIAVSPWIEKGTVVHGPNGSPFPSSEYEHSSIPATVKKLFNLSSPFLTKRDEWAGTFENILQIRKEPRTDCPETLPEPVKIRMGEANEKALLTEFQQELVQLAAVLKGDNMLTTFPKEISKGMTVIEGKRYMEDAMKRFLEAGRMALSMGANKEELVHMKTSLTGRRP

SEQ ID NO: 46319 - protein, 472 aa, Arabidopsis thaliana
  peptide (1)..(472): Ceres Seq. ID no. 12575910
  misc_feature (1)..(364): Pfam Name: Phosphoesterase family Pfam Description: Phosphoesterase family
  misc_feature (1)..(462): Homolog of NCBI NO: 18396577 NR Description: expressed protein
  misc_feature (1)..(468): Homolog of NCBI NO: 17529016 NR Description: unknown protein [Arabidopsis thaliana]
  misc_feature (1)..(468): Homolog of NCBI NO: 15228577 NR Description: unknown protein
  misc_feature (1)..(445): Homolog of NCBI NO: 27573343 NR Description: putative phosphoesterase [Oryza sativa (japonica
  misc_feature (1)..(470): Homolog of NCBI NO: 30693062 NR Description: phosphoesterase family [Arabidopsis thaliana]
  misc_feature (1)..(470): Homolog of NCBI NO: 34897344 NR Description: putative phospholipase [Oryza sativa]
  misc_feature (1)..(470): Homolog of NCBI NO: 15222342 NR Description: unknown protein; protein id: At1g07230.1
  misc_feature (1)..(470): Homolog of NCBI NO: 21703147 NR Description: At1g07230/F10K1_4 [Arabidopsis thaliana]
  misc_feature (1)..(470): Homolog of NCBI NO: 20161866 NR Description: B1139B11.7 [Oryza sativa (japonica
  misc_feature (1)..(472): Homolog of NCBI NO: 15225806 NR Description: putative phospholipase C; protein id: At2g26870.1
MLGWMKKLNPEINGVDGSESNPVSVSDPSSRKIKFGSGSHYVDPDPGHSFQAIREQVFGSNDTSMDPPPMNGFVQQAYSEDPSGNMSASVMNGFEPDKVPVYKSLVSEFAVFDRWFASVPSSTQPNRMFVHSGTSAGATSNNPISLAKGYPQRTIFDNLDDEEFSFGIYYQNIPAVLFYQSLRKLKYVFKFHSYGNSFKDHAKQGKLPAYTVIEQRYMDTLLEPASDDHPSHDVYQGQKFIKEVYETLRASPQWNETLLIITYDEHGGYFDHVPTPVRNVPSPDGIVGPDPFLFQFNRLGIRVPTIAVSPWIEKGTVVHGPNGSPFPSSEYEHSSIPATVKKLFNLSSPFLTKRDEWAGTFENILQIRKEPRTDCPETLPEPVKIRMGEANEKALLTEFQQELVQLAAVLKGDNMLTTFPKEISKGMTVIEGKRYMEDAMKRFLEAGRMALSMGANKEELVHMKTSLTGRRP

SEQ ID NO: 46320 - DNA, 1706 bp, Arabidopsis thaliana
  misc_feature (1)..(1706): Ceres Seq. ID no. 13591923
  misc_feature: MA Experiment ID: 108576 Result: Down-regulated in Transcription
  misc_feature: MA Experiment 108576 PARAMETER Experiment Name: At_42deg_Heat_cDNA_P Parameter: Temperature (deg C) Value: 42 vs. 22
  misc_feature: MA Experiment 108576 PARAMETER Experiment Name: At_42deg_Heat_cDNA_P Parameter: Timepoint (hr) Value: 1
  misc_feature: MA Experiment 108576 PARAMETER Experiment Name: At_42deg_Heat_cDNA_P Parameter: Tissue Value: Aerial
  misc_feature: MA Experiment ID: 20000306 Result: Up-regulated in Transcription
  misc_feature: MA Experiment 20000306 PARAMETER Experiment Name: At_Germinating_Seeds_Sub_P Parameter: Age (hr) Value: 6 vs. 0
  misc_feature: MA Experiment 20000306 PARAMETER Experiment Name: At_Germinating_Seeds_Sub_P Parameter: Organism Value: A. thaliana
  misc_feature: MA Experiment 20000306 PARAMETER Experiment Name: At_Germinating_Seeds_Sub_P Parameter: Plant Line Value: WS
  misc_feature: MA Experiment 20000306 PARAMETER Experiment Name: At_Germinating_Seeds_Sub_P Parameter: Tissue Value: Germinating Seeds
  misc_feature: MA Experiment ID: 20000307 Result: Up-regulated in Transcription
  misc_feature: MA Experiment 20000307 PARAMETER Experiment Name: At_Germinating_Seeds_Sub_P Parameter: Age (hr) Value: 24 vs. 0
  misc_feature: MA Experiment 20000307 PARAMETER Experiment Name: At_Germinating_Seeds_Sub_P Parameter: Organism Value: A. thaliana
  misc_feature: MA Experiment 20000307 PARAMETER Experiment Name: At_Germinating_Seeds_Sub_P Parameter: Plant Line Value: WS
  misc_feature: MA Experiment 20000307 PARAMETER Experiment Name: At_Germinating_Seeds_Sub_P Parameter: Tissue Value: Germinating Seeds
gacagcatcaaacaccttcctcaaaacctagaaatcgaaaatatcagatctaaagaagagcgtcttcataaacgcccttcgtcttcttccctgcaaatctattttctagatctttctttcttccgcgaaacgacaatgagagagtgcatttcgatccacattggtcaggctggtattcaagtcggaaatgcttgctgggagctttactgtcttgaacatggcattcagcctgatggccagatgcctggtgacaagactgttggtggaggtgatgatgctttcaacaccttcttcagtgaaaccggtgcaggtaagcacgtcccacgtgctgtctttgttgatcttgagccaactgtgatcgacgaggtcaggactggtacttaccgtcagcttttccaccctgaacaactcatcagtggtaaagaagacgctgctaacaatttcgcccgtggtcattacaccattgggaaagagattgttgatctctgcttggaccggatcagaaagctcgctgataactgtactggtcttcaaggattccttgttttcaacgctgttggtggtgggactggatctggtcttggatctcttctccttgagagactttctgttgactatgggaaaaagtccaagttgggtttcactgtttacccatctccacaggtgtctacctctgtggttgagccttacaacagtgtcctctccactcactctctcttggaacacactgatgtctccatcctcctcgacaatgaagctatctatgacatctgtagacgctcccttaacattgagagacctacctacaccaacctcaaccgtctcgtctctcaggttatttcttccttgactgcttctctgaggttcgatggtgccttgaatgttgatgttactgagttccaaaccaacttggttccatacccaaggatccacttcatgctttcgtcctatgcaccagtcatctccgcggagaaggccttccatgagcaactctcagttgctgagatcacgaacagtgcctttgaacctgcttccatgatggcaaagtgtgacccgcgacatggaaagtacatggcttgctgtttgatgtaccgtggtgatgtagtccccaaggatgtgaacgcagcggttggcaccatcaagaccaagcgaactattcagtttgttgactggtgtcctactggattcaagtgtggtatcaactaccagccaccaactgttgttcctggaggtgatcttgctaaagtccagagagctgtttgtatgatctcaaactcaaccagtgttgctgaggtattctcccgtattgatcacaagtttgatcttatgtacgccaaacgtgctttcgttcactggtatgttggtgagggtatggaagaaggagaattctcagaggctcgtgaggatcttgcagcattggagaaggattatgaagaggtcggtgctgaaggtggtgacgatgaggatgatgaaggagaggaatactaagaagaatgtttcttaaaaattggattttgtgttgggtttttctctattatctcgtgttgtgatgaatgggggctcgaaactcttacgagtcttagttgtgtgtttttctaaacctatatttctatctcttgctggtggtttgatttctattatctagttcgtttgtgtattgactcatgtttctggtaatatctttcttactatgtgataaagtaatc

SEQ ID NO: 46321 - protein, 495 aa, Arabidopsis thaliana
  peptide (1)..(495): Ceres Seq. ID no. 13591924
  misc_feature (94)..(291): Pfam Name: Tubulin/FtsZ family, GTPase domain Pfam Description: Tubulin/FtsZ family, GTPase domain
  misc_feature (94)..(291): Pfam Name: Tubulin/FtsZ family, GTPase domain Pfam Description: Tubulin/FtsZ family, GTPase domain
  misc_feature (94)..(291): Pfam Name: Tubulin/FtsZ family, GTPase domain Pfam Description: Tubulin/FtsZ family, GTPase domain
  misc_feature (46)..(495): Homolog of NCBI NO: 8928422 NR Description: Tubulin alpha-2 chain
  misc_feature (46)..(495): Homolog of NCBI NO: 17402469 NR Description: alpha-tubulin [Nicotiana tabacum]
  misc_feature (46)..(495): Homolog of NCBI NO: 8928432 NR Description: Tubulin alpha-3 chain
  misc_feature (46)..(495): Homolog of NCBI NO: 15029368 NR Description: alpha tubulin subunit [Rosa hybrid cultivar]
  misc_feature (46)..(495): Homolog of NCBI NO: 29124983 NR Description: alpha-tubulin 1 [Populus tremuloides]
  misc_feature (46)..(495): Homolog of NCBI NO: 8928422 NR Description: Tubulin alpha-2 chain
  misc_feature (46)..(495): Homolog of NCBI NO: 8928432 NR Description: Tubulin alpha-3 chain
  misc_feature (46)..(495): Homolog of NCBI NO: 29124983 NR Description: alpha-tubulin 1 [Populus tremuloides]
  misc_feature (46)..(495): Homolog of NCBI NO: 15029368 NR Description: alpha tubulin subunit [Rosa hybrid cultivar]
  misc_feature (46)..(495): Homolog of NCBI NO: 8928432 NR Description: Tubulin alpha-3 chain
  misc_feature (46)..(495): Homolog of NCBI NO: 17402469 NR Description: alpha-tubulin [Nicotiana tabacum]
  misc_feature (46)..(495): Homolog of NCBI NO: 8928422 NR Description: Tubulin alpha-2 chain
  misc_feature (46)..(495): Homolog of NCBI NO: 15233627 NR Description: tubulin alpha-6 chain (TUA6) [Arabidopsis
  misc_feature (46)..(495): Homolog of NCBI NO: 15220329 NR Description: tubulin alpha-2/alpha-4 chain (TUA4) [Arabidopsis
  misc_feature (46)..(495): Homolog of NCBI NO: 16226462 NR Description: AT4g14960/dl3520c [Arabidopsis thaliana]
  misc_feature (46)..(495): Homolog of NCBI NO: 464849 NR Description: TUBULIN ALPHA CHAIN
  misc_feature (46)..(494): Homolog of NCBI NO: 1174592 NR Description: TUBULIN ALPHA-1 CHAIN
  misc_feature (46)..(495): Homolog of NCBI NO: 15233627 NR Description: tubulin alpha-6 chain (TUA6) [Arabidopsis
  misc_feature (46)..(495): Homolog of NCBI NO: 15220329 NR Description: tubulin alpha-2/alpha-4 chain (TUA4) [Arabidopsis
  misc_feature (46)..(495): Homolog of NCBI NO: 16226462 NR Description: AT4g14960/dl3520c [Arabidopsis thaliana]
  misc_feature (46)..(495): Homolog of NCBI NO: 464849 NR Description: TUBULIN ALPHA CHAIN
  misc_feature (46)..(494): Homolog of NCBI NO: 1174592 NR Description: TUBULIN ALPHA-1 CHAIN
  misc_feature (46)..(495): Homolog of NCBI NO: 29124983 NR Description: alpha-tubulin 1 [Populus tremuloides]
  misc_feature (46)..(495): Homolog of NCBI NO: 15029368 NR Description: alpha tubulin subunit [Rosa hybrid cultivar]
  misc_feature (46)..(495): Homolog of NCBI NO: 17402469 NR Description: alpha-tubulin [Nicotiana tabacum]
  misc_feature (46)..(494): Homolog of NCBI NO: 1174592 NR Description: TUBULIN ALPHA-1 CHAIN
  misc_feature (46)..(495): Homolog of NCBI NO: 464849 NR Description: TUBULIN ALPHA CHAIN
  misc_feature (46)..(495): Homolog of NCBI NO: 16226462 NR Description: AT4g14960/dl3520c [Arabidopsis thaliana]
  misc_feature (46)..(495): Homolog of NCBI NO: 15220329 NR Description: tubulin alpha-2/alpha-4 chain (TUA4) [Arabidopsis
  misc_feature (46)..(495): Homolog of NCBI NO: 15233627 NR Description: tubulin alpha-6 chain (TUA6) [Arabidopsis
DSIKHLPQNLEIENIRSKEERLHKRPSSSSLQIYFLDLSFFRETTMRECISIHIGQAGIQVGNACWELYCLEHGIQPDGQMPGDKTVGGGDDAFNTFFSETGAGKHVPRAVFVDLEPTVIDEVRTGTYRQLFHPEQLISGKEDAANNFARGHYTIGKEIVDLCLDRIRKLADNCTGLQGFLVFNAVGGGTGSGLGSLLLERLSVDYGKKSKLGFTVYPSPQVSTSVVEPYNSVLSTHSLLEHTDVSILLDNEAIYDICRRSLNIERPTYTNLNRLVSQVISSLTASLRFDGALNVDVTEFQTNLVPYPRIHFMLSSYAPVISAEKAFHEQLSVAEITNSAFEPASMMAKCDPRHGKYMACCLMYRGDVVPKDVNAAVGTIKTKRTIQFVDWCPTGFKCGINYQPPTVVPGGDLAKVQRAVCMISNSTSVAEVFSRIDHKFDLMYAKRAFVHWYVGEGMEEGEFSEAREDLAALEKDYEEVGAEGGDDEDDEGEEY

SEQ ID NO: 46322 - protein, 450 aa, Arabidopsis thaliana
  peptide (1)..(450): Ceres Seq. ID no. 13591925
  misc_feature (49)..(246): Pfam Name: Tubulin/FtsZ family, GTPase domain Pfam Description: Tubulin/FtsZ family, GTPase domain
  misc_feature (49)..(246): Pfam Name: Tubulin/FtsZ family, GTPase domain Pfam Description: Tubulin/FtsZ family, GTPase domain
  misc_feature (49)..(246): Pfam Name: Tubulin/FtsZ family, GTPase domain Pfam Description: Tubulin/FtsZ family, GTPase domain
  misc_feature (1)..(450): Homolog of NCBI NO: 8928422 NR Description: Tubulin alpha-2 chain
  misc_feature (1)..(450): Homolog of NCBI NO: 17402469 NR Description: alpha-tubulin [Nicotiana tabacum]
  misc_feature (1)..(450): Homolog of NCBI NO: 8928432 NR Description: Tubulin alpha-3 chain
  misc_feature (1)..(450): Homolog of NCBI NO: 15029368 NR Description: alpha tubulin subunit [Rosa hybrid cultivar]
  misc_feature (1)..(450): Homolog of NCBI NO: 29124983 NR Description: alpha-tubulin 1 [Populus tremuloides]
  misc_feature (1)..(450): Homolog of NCBI NO: 8928422 NR Description: Tubulin alpha-2 chain
  misc_feature (1)..(450): Homolog of NCBI NO: 8928432 NR Description: Tubulin alpha-3 chain
  misc_feature (1)..(450): Homolog of NCBI NO: 29124983 NR Description: alpha-tubulin 1 [Populus tremuloides]
  misc_feature (1)..(450): Homolog of NCBI NO: 15029368 NR Description: alpha tubulin subunit [Rosa hybrid cultivar]
  misc_feature (1)..(450): Homolog of NCBI NO: 8928432 NR Description: Tubulin alpha-3 chain
  misc_feature (1)..(450): Homolog of NCBI NO: 17402469 NR Description: alpha-tubulin [Nicotiana tabacum]
  misc_feature (1)..(450): Homolog of NCBI NO: 8928422 NR Description: Tubulin alpha-2 chain
  misc_feature (1)..(450): Homolog of NCBI NO: 15233627 NR Description: tubulin alpha-6 chain (TUA6) [Arabidopsis
  misc_feature (1)..(450): Homolog of NCBI NO: 15220329 NR Description: tubulin alpha-2/alpha-4 chain (TUA4) [Arabidopsis
  misc_feature (1)..(450): Homolog of NCBI NO: 16226462 NR Description: AT4g14960/dl3520c [Arabidopsis thaliana]
  misc_feature (1)..(450): Homolog of NCBI NO: 464849 NR Description: TUBULIN ALPHA CHAIN
  misc_feature (1)..(449): Homolog of NCBI NO: 1174592 NR Description: TUBULIN ALPHA-1 CHAIN
  misc_feature (1)..(450): Homolog of NCBI NO: 15233627 NR Description: tubulin alpha-6 chain (TUA6) [Arabidopsis
  misc_feature (1)..(450): Homolog of NCBI NO: 15220329 NR Description: tubulin alpha-2/alpha-4 chain (TUA4) [Arabidopsis
  misc_feature (1)..(450): Homolog of NCBI NO: 16226462 NR Description: AT4g14960/dl3520c [Arabidopsis thaliana]
  misc_feature (1)..(450): Homolog of NCBI NO: 464849 NR Description: TUBULIN ALPHA CHAIN
  misc_feature (1)..(449): Homolog of NCBI NO: 1174592 NR Description: TUBULIN ALPHA-1 CHAIN
  misc_feature (1)..(450): Homolog of NCBI NO: 29124983 NR Description: alpha-tubulin 1 [Populus tremuloides]
  misc_feature (1)..(450): Homolog of NCBI NO: 15029368 NR Description: alpha tubulin subunit [Rosa hybrid cultivar]
  misc_feature (1)..(450): Homolog of NCBI NO: 17402469 NR Description: alpha-tubulin [Nicotiana tabacum]
  misc_feature (1)..(449): Homolog of NCBI NO: 1174592 NR Description: TUBULIN ALPHA-1 CHAIN
  misc_feature (1)..(450): Homolog of NCBI NO: 464849 NR Description: TUBULIN ALPHA CHAIN
  misc_feature (1)..(450): Homolog of NCBI NO: 16226462 NR Description: AT4g14960/dl3520c [Arabidopsis thaliana]
  misc_feature (1)..(450): Homolog of NCBI NO: 15220329 NR Description: tubulin alpha-2/alpha-4 chain (TUA4) [Arabidopsis
  misc_feature (1)..(450): Homolog of NCBI NO: 15233627 NR Description: tubulin alpha-6 chain (TUA6) [Arabidopsis
MRECISIHIGQAGIQVGNACWELYCLEHGIQPDGQMPGDKTVGGGDDAFNTFFSETGAGKHVPRAVFVDLEPTVIDEVRTGTYRQLFHPEQLISGKEDAANNFARGHYTIGKEIVDLCLDRIRKLADNCTGLQGFLVFNAVGGGTGSGLGSLLLERLSVDYGKKSKLGFTVYPSPQVSTSVVEPYNSVLSTHSLLEHTDVSILLDNEAIYDICRRSLNIERPTYTNLNRLVSQVISSLTASLRFDGALNVDVTEFQTNLVPYPRIHFMLSSYAPVISAEKAFHEQLSVAEITNSAFEPASMMAKCDPRHGKYMACCLMYRGDVVPKDVNAAVGTIKTKRTIQFVDWCPTGFKCGINYQPPTVVPGGDLAKVQRAVCMISNSTSVAEVFSRIDHKFDLMYAKRAFVHWYVGEGMEEGEFSEAREDLAALEKDYEEVGAEGGDDEDDEGEEY

SEQ ID NO: 46323 - protein, 415 aa, Arabidopsis thaliana
  peptide (1)..(415): Ceres Seq. ID no. 13591926
  misc_feature (14)..(211): Pfam Name: Tubulin/FtsZ family, GTPase domain Pfam Description: Tubulin/FtsZ family, GTPase domain
  misc_feature (14)..(211): Pfam Name: Tubulin/FtsZ family, GTPase domain Pfam Description: Tubulin/FtsZ family, GTPase domain
  misc_feature (14)..(211): Pfam Name: Tubulin/FtsZ family, GTPase domain Pfam Description: Tubulin/FtsZ family, GTPase domain
  misc_feature (1)..(415): Homolog of NCBI NO: 8928422 NR Description: Tubulin alpha-2 chain
  misc_feature (1)..(415): Homolog of NCBI NO: 17402469 NR Description: alpha-tubulin [Nicotiana tabacum]
  misc_feature (1)..(415): Homolog of NCBI NO: 8928432 NR Description: Tubulin alpha-3 chain
  misc_feature (1)..(415): Homolog of NCBI NO: 15029368 NR Description: alpha tubulin subunit [Rosa hybrid cultivar]
  misc_feature (1)..(415): Homolog of NCBI NO: 29124983 NR Description: alpha-tubulin 1 [Populus tremuloides]
  misc_feature (1)..(415): Homolog of NCBI NO: 8928422 NR Description: Tubulin alpha-2 chain
  misc_feature (1)..(415): Homolog of NCBI NO: 8928432 NR Description: Tubulin alpha-3 chain
  misc_feature (1)..(415): Homolog of NCBI NO: 29124983 NR Description: alpha-tubulin 1 [Populus tremuloides]
  misc_feature (1)..(415): Homolog of NCBI NO: 15029368 NR Description: alpha tubulin subunit [Rosa hybrid cultivar]
  misc_feature (1)..(415): Homolog of NCBI NO: 8928432 NR Description: Tubulin alpha-3 chain
  misc_feature (1)..(415): Homolog of NCBI NO: 17402469 NR Description: alpha-tubulin [Nicotiana tabacum]
  misc_feature (1)..(415): Homolog of NCBI NO: 8928422 NR Description: Tubulin alpha-2 chain
  misc_feature (1)..(415): Homolog of NCBI NO: 15233627 NR Description: tubulin alpha-6 chain (TUA6) [Arabidopsis
  misc_feature (1)..(415): Homolog of NCBI NO: 15220329 NR Description: tubulin alpha-2/alpha-4 chain (TUA4) [Arabidopsis
  misc_feature (1)..(415): Homolog of NCBI NO: 16226462 NR Description: AT4g14960/dl3520c [Arabidopsis thaliana]
  misc_feature (1)..(415): Homolog of NCBI NO: 464849 NR Description: TUBULIN ALPHA CHAIN
  misc_feature (1)..(414): Homolog of NCBI NO: 1174592 NR Description: TUBULIN ALPHA-1 CHAIN
  misc_feature (1)..(415): Homolog of NCBI NO: 15233627 NR Description: tubulin alpha-6 chain (TUA6) [Arabidopsis
  misc_feature (1)..(415): Homolog of NCBI NO: 15220329 NR Description: tubulin alpha-2/alpha-4 chain (TUA4) [Arabidopsis
  misc_feature (1)..(415): Homolog of NCBI NO: 16226462 NR Description: AT4g14960/dl3520c [Arabidopsis thaliana]
  misc_feature (1)..(415): Homolog of NCBI NO: 464849 NR Description: TUBULIN ALPHA CHAIN
  misc_feature (1)..(414): Homolog of NCBI NO: 1174592 NR Description: TUBULIN ALPHA-1 CHAIN
  misc_feature (1)..(415): Homolog of NCBI NO: 29124983 NR Description: alpha-tubulin 1 [Populus tremuloides]
  misc_feature (1)..(415): Homolog of NCBI NO: 15029368 NR Description: alpha tubulin subunit [Rosa hybrid cultivar]
  misc_feature (1)..(415): Homolog of NCBI NO: 17402469 NR Description: alpha-tubulin [Nicotiana tabacum]
  misc_feature (1)..(414): Homolog of NCBI NO: 1174592 NR Description: TUBULIN ALPHA-1 CHAIN
  misc_feature (1)..(415): Homolog of NCBI NO: 464849 NR Description: TUBULIN ALPHA CHAIN
  misc_feature (1)..(415): Homolog of NCBI NO: 16226462 NR Description: AT4g14960/dl3520c [Arabidopsis thaliana]
  misc_feature (1)..(415): Homolog of NCBI NO: 15220329 NR Description: tubulin alpha-2/alpha-4 chain (TUA4) [Arabidopsis
  misc_feature (1)..(415): Homolog of NCBI NO: 15233627 NR Description: tubulin alpha-6 chain (TUA6) [Arabidopsis
MPGDKTVGGGDDAFNTFFSETGAGKHVPRAVFVDLEPTVIDEVRTGTYRQLFHPEQLISGKEDAANNFARGHYTIGKEIVDLCLDRIRKLADNCTGLQGFLVFNAVGGGTGSGLGSLLLERLSVDYGKKSKLGFTVYPSPQVSTSVVEPYNSVLSTHSLLEHTDVSILLDNEAIYDICRRSLNIERPTYTNLNRLVSQVISSLTASLRFDGALNVDVTEFQTNLVPYPRIHFMLSSYAPVISAEKAFHEQLSVAEITNSAFEPASMMAKCDPRHGKYMACCLMYRGDVVPKDVNAAVGTIKTKRTIQFVDWCPTGFKCGINYQPPTVVPGGDLAKVQRAVCMISNSTSVAEVFSRIDHKFDLMYAKRAFVHWYVGEGMEEGEFSEAREDLAALEKDYEEVGAEGGDDEDDEGEEY

SEQ ID NO: 46324 - DNA, 1286 bp, Arabidopsis thaliana
  misc_feature (1)..(1286): Ceres Seq. ID no. 12600663
  misc_feature: MA Experiment ID: 20000307 Result: Up-regulated in Transcription
  misc_feature: MA Experiment 20000307 PARAMETER Experiment Name: At_Germinating_Seeds_Sub_P Parameter: Age (hr) Value: 24 vs. 0
  misc_feature: MA Experiment 20000307 PARAMETER Experiment Name: At_Germinating_Seeds_Sub_P Parameter: Organism Value: A. thaliana
  misc_feature: MA Experiment 20000307 PARAMETER Experiment Name: At_Germinating_Seeds_Sub_P Parameter: Plant Line Value: WS
  misc_feature: MA Experiment 20000307 PARAMETER Experiment Name: At_Germinating_Seeds_Sub_P Parameter: Tissue Value: Germinating Seeds
agtcgaacaaaagttgagatatggagctgaagcagagatggtcaaagtcaaacaaatagctaccatttgcacaaggaagaatcttcttctcatttgggtgatcaaaaatggcggttgtgcagaaaggaaaggtttgtgtaaccggtgccggaggttttttgggttcttgggtcgtcaatcatctcctctctagggattacttcgtccacggcactgtcagagaccctggtaatgaaaagtatgctcatttgaagaagcttgataaagctggtgacaaactcaagctcttcaaggctgatttgctcaactacggctctcttcaatctgctattgctggctgcagcggcgtcttccatgtcgcttgccctgttccatctgcttcagtccctaatcctgaggtagatttgatcgcacctgcagtggatggtacgctgaatgtgcttaaggcatgcgttgaagcaaaagttaagcgtgttgtgtatgtttcctctgtatctgcagttgctatgaaccctatgtggtcaaagagtcaagtgttagatgagaccgcttggtctgaccaagattattgcaaaaaaactgagaattggtattctttgtcaaagacacgagcagaaagtgaagctttcgaatttgcaaaacgaaccggacttgatctcgtcagtgtttgccctacccttgtcttgggacctgtattgcagcagcacacagtaaatgctagtagccttgttcttctcaagcttcttaaagagggttatgaatcgcgtaataaccaagaacggcatttggtagatgtgcgtgatgtggctcaagctttacttttggtttatgagaaagcagaagctgaaggaaggtacatctgcataggccacacggttagggaacaagaagtcgctgagaagctgaaaagtctttatctaaattacaactacccaaagagatacatcgaagcggatggaaaagtgaaggtgagttcagagaagttgcagaagttgggttggacttaccggccgttggaggaaacacttgtggattctgttgagagctaccgcaaagctaagcttgtggactgaaaactgggaacgaatagcatatgagtgttttgggtccatgtgttaagtgttcctatctgcacacgctctttcatcttttactcaagaataagagttgtgcaacatattttccatcatgaacttctgagtttttgttactttcttagacaccattacttttatgaccaatctacaattactccttccataactatgttccaatatctctttgat

SEQ ID NO: 46325 - protein, 321 aa, Arabidopsis thaliana
  peptide (1)..(321): Ceres Seq. ID no. 12600664
  misc_feature (8)..(266): Pfam Name: 3-beta hydroxysteroid dehydrogenase/isomerase family Pfam Description: 3-beta hydroxysteroid dehydrogenase/isomerase
  misc_feature (9)..(316): Homolog of NCBI NO: 40233135 NR Description: cinnamoyl CoA reductase [Populus tomentosa]
  misc_feature (9)..(316): Homolog of NCBI NO: 9998901 NR Description: cinnamoyl-CoA reductase [Populus balsamifera
  misc_feature (9)..(316): Homolog of NCBI NO: 7431407 NR Description: cinnamoyl-CoA reductase (EC 1.2.1.44) CCR - cider
  misc_feature (9)..(316): Homolog of NCBI NO: 31414896 NR Description: cinnamoyl CoA reductase [Fragaria x ananassa]
  misc_feature (5)..(316): Homolog of NCBI NO: 17978649 NR Description: cinnamoyl-CoA reductase [Pinus taeda]
  misc_feature (3)..(223): Homolog of NCBI NO: 25140436 NR Description: cinnamoyl CoA reductase 2 [Solanum tuberosum]
  misc_feature (1)..(317): Homolog of NCBI NO: 6554472 NR Description: putative cinnamoyl-CoA reductase; 14056-15506
  misc_feature (1)..(317): Homolog of NCBI NO: 15223068 NR Description: putative cinnamoyl-CoA reductase; protein id:
  misc_feature (1)..(321): Homolog of NCBI NO: 15226134 NR Description: putative cinnamoyl-CoA reductase
  misc_feature (1)..(321): Homolog of NCBI NO: 15226135 NR Description: putative cinnamoyl-CoA reductase
MAVVQKGKVCVTGAGGFLGSWVVNHLLSRDYFVHGTVRDPGNEKYAHLKKLDKAGDKLKLFKADLLNYGSLQSAIAGCSGVFHVACPVPSASVPNPEVDLIAPAVDGTLNVLKACVEAKVKRVVYVSSVSAVAMNPMWSKSQVLDETAWSDQDYCKKTENWYSLSKTRAESEAFEFAKRTGLDLVSVCPTLVLGPVLQQHTVNASSLVLLKLLKEGYESRNNQERHLVDVRDVAQALLLVYEKAEAEGRYICIGHTVREQEVAEKLKSLYLNYNYPKRYIEADGKVKVSSEKLQKLGWTYRPLEETLVDSVESYRKAKLVD

SEQ ID NO: 46326 - protein, 188 aa, Arabidopsis thaliana
  peptide (1)..(188): Ceres Seq. ID no. 12600665
  misc_feature (1)..(133): Pfam Name: 3-beta hydroxysteroid dehydrogenase/isomerase family Pfam Description: 3-beta hydroxysteroid dehydrogenase/isomerase
  misc_feature (1)..(183): Homolog of NCBI NO: 40233135 NR Description: cinnamoyl CoA reductase [Populus tomentosa]
  misc_feature (1)..(183): Homolog of NCBI NO: 9998901 NR Description: cinnamoyl-CoA reductase [Populus balsamifera
  misc_feature (1)..(183): Homolog of NCBI NO: 7431407 NR Description: cinnamoyl-CoA reductase (EC 1.2.1.44) CCR - cider
  misc_feature (1)..(183): Homolog of NCBI NO: 31414896 NR Description: cinnamoyl CoA reductase [Fragaria x ananassa]
  misc_feature (1)..(183): Homolog of NCBI NO: 17978649 NR Description: cinnamoyl-CoA reductase [Pinus taeda]
  misc_feature (1)..(90): Homolog of NCBI NO: 25140436 NR Description: cinnamoyl CoA reductase 2 [Solanum tuberosum]
  misc_feature (1)..(184): Homolog of NCBI NO: 6554472 NR Description: putative cinnamoyl-CoA reductase; 14056-15506
  misc_feature (1)..(184): Homolog of NCBI NO: 15223068 NR Description: putative cinnamoyl-CoA reductase; protein id:
  misc_feature (1)..(188): Homolog of NCBI NO: 15226134 NR Description: putative cinnamoyl-CoA reductase
  misc_feature (1)..(188): Homolog of NCBI NO: 15226135 NR Description: putative cinnamoyl-CoA reductase
MNPMWSKSQVLDETAWSDQDYCKKTENWYSLSKTRAESEAFEFAKRTGLDLVSVCPTLVLGPVLQQHTVNASSLVLLKLLKEGYESRNNQERHLVDVRDVAQALLLVYEKAEAEGRYICIGHTVREQEVAEKLKSLYLNYNYPKRYIEADGKVKVSSEKLQKLGWTYRPLEETLVDSVESYRKAKLVD

SEQ ID NO: 46327 - protein, 185 aa, Arabidopsis thaliana
  peptide (1)..(185): Ceres Seq. ID no. 12600666
  misc_feature (1)..(130): Pfam Name: 3-beta hydroxysteroid dehydrogenase/isomerase family Pfam Description: 3-beta hydroxysteroid dehydrogenase/isomerase
  misc_feature (1)..(180): Homolog of NCBI NO: 40233135 NR Description: cinnamoyl CoA reductase [Populus tomentosa]
  misc_feature (1)..(180): Homolog of NCBI NO: 9998901 NR Description: cinnamoyl-CoA reductase [Populus balsamifera
  misc_feature (1)..(180): Homolog of NCBI NO: 7431407 NR Description: cinnamoyl-CoA reductase (EC 1.2.1.44) CCR - cider
  misc_feature (1)..(180): Homolog of NCBI NO: 31414896 NR Description: cinnamoyl CoA reductase [Fragaria x ananassa]
  misc_feature (1)..(180): Homolog of NCBI NO: 17978649 NR Description: cinnamoyl-CoA reductase [Pinus taeda]
  misc_feature (1)..(87): Homolog of NCBI NO: 25140436 NR Description: cinnamoyl CoA reductase 2 [Solanum tuberosum]
  misc_feature (1)..(181): Homolog of NCBI NO: 6554472 NR Description: putative cinnamoyl-CoA reductase; 14056-15506
  misc_feature (1)..(181): Homolog of NCBI NO: 15223068 NR Description: putative cinnamoyl-CoA reductase; protein id:
  misc_feature (1)..(185): Homolog of NCBI NO: 15226134 NR Description: putative cinnamoyl-CoA reductase
  misc_feature (1)..(185): Homolog of NCBI NO: 15226135 NR Description: putative cinnamoyl-CoA reductase
MWSKSQVLDETAWSDQDYCKKTENWYSLSKTRAESEAFEFAKRTGLDLVSVCPTLVLGPVLQQHTVNASSLVLLKLLKEGYESRNNQERHLVDVRDVAQALLLVYEKAEAEGRYICIGHTVREQEVAEKLKSLYLNYNYPKRYIEADGKVKVSSEKLQKLGWTYRPLEETLVDSVESYRKAKLVD

SEQ ID NO: 46328 - DNA, 2419 bp, Arabidopsis thaliana
  misc_feature (1)..(2419): Ceres Seq. ID no. 15168947
  misc_feature: MA Experiment ID: 20000173 Result: Down-regulated in Transcription
  misc_feature: MA Experiment 20000173 PARAMETER Experiment Name: At_42deg_Heat_P Parameter: Age (day) Value: 14
  misc_feature: MA Experiment 20000173 PARAMETER Experiment Name: At_42deg_Heat_P Parameter: Organism Value: A. thaliana
  misc_feature: MA Experiment 20000173 PARAMETER Experiment Name: At_42deg_Heat_P Parameter: Plant Line Value: WS
  misc_feature: MA Experiment 20000173 PARAMETER Experiment Name: At_42deg_Heat_P Parameter: Temperature (deg C) Value: 42 vs. 22
  misc_feature: MA Experiment 20000173 PARAMETER Experiment Name: At_42deg_Heat_P Parameter: Timepoint (hr) Value: 6
  misc_feature: MA Experiment 20000173 PARAMETER Experiment Name: At_42deg_Heat_P Parameter: Tissue Value: Aerial
  misc_feature: MA Experiment ID: 20000444 Result: Up-regulated in Transcription
  misc_feature: MA Experiment 20000444 PARAMETER Experiment Name: At_100uM_NAA__P Parameter: Age (day) Value: 14
  misc_feature: MA Experiment 20000444 PARAMETER Experiment Name: At_100uM_NAA__P Parameter: Organism Value: A. thaliana
  misc_feature: MA Experiment 20000444 PARAMETER Experiment Name: At_100uM_NAA__P Parameter: Plant Line Value: WS
  misc_feature: MA Experiment 20000444 PARAMETER Experiment Name: At_100uM_NAA__P Parameter: Timepoint (hr) Value: 1
  misc_feature: MA Experiment 20000444 PARAMETER Experiment Name: At_100uM_NAA__P Parameter: Tissue Value: Aerial
  misc_feature: MA Experiment 20000444 PARAMETER Experiment Name: At_100uM_NAA__P Parameter: Treatment Value: 100uM NAA vs. No Treatment
  misc_feature: MA Experiment ID: 20000794 Result: Up-regulated in Transcription
  misc_feature: MA Experiment 20000794 PARAMETER Experiment Name: At_Petals_P Parameter: Age (day) Value: 23-25 days
  misc_feature: MA Experiment 20000794 PARAMETER Experiment Name: At_Petals_P Parameter: Plant Line Value: WS
  misc_feature: MA Experiment 20000794 PARAMETER Experiment Name: At_Petals_P Parameter: Tissue Value: Petals vs. Whole plant
  misc_feature: MA Experiment ID: 20001248 Result: Down-regulated in Transcription
  misc_feature: MA Experiment 20001248 PARAMETER Experiment Name: At_Far-red-induction_P Parameter: Age (day) Value: 7
  misc_feature: MA Experiment 20001248 PARAMETER Experiment Name: At_Far-red-induction_P Parameter: Light Value: Far-red vs. White
  misc_feature: MA Experiment 20001248 PARAMETER Experiment Name: At_Far-red-induction_P Parameter: Organism Value: A. thaliana
  misc_feature: MA Experiment 20001248 PARAMETER Experiment Name: At_Far-red-induction_P Parameter: Plant Line Value: Columbia
  misc_feature: MA Experiment 20001248 PARAMETER Experiment Name: At_Far-red-induction_P Parameter: Timepoint (hr) Value: 4
  misc_feature: MA Experiment 20001248 PARAMETER Experiment Name: At_Far-red-induction_P Parameter: Tissue Value: Whole Plant
tctttcacttcgctttctctatttcccctgaaaccgttcttgtctctctctctctctctctcttcttctctgctcaagacaagaacttgatgttcatgtcttgaaacttaacaaagtattgatctttccttttaagtaaagaatttgggggttacacaacttcgtctagatggagcaagagaaaagcttggatccacaactatggcatgcttgtgcaggatcaatggttcaaatcccttcactgaattcaacggttttttacttcgctcaaggccacacagagcacgctcacgcgcctcctgattttcacgcgccgcgcgttccacctcttatcctctgtcgtgtcgtctccgtgaagttcctcgccgacgctgaaacagacgaagtttttgctaaaattacgcttttgccacttccgggaaacgacttggatctagaaaacgacgccgttttgggtctaactcctccttcttctgacggtaacggtaacggtaaagagaaaccggcgtctttcgctaaaacgttaacgcagtctgacgctaataacggcggtggtttctccgttccacgttattgcgccgagacgattttcccgcggcttgattactcggcggagccaccggttcaaacagtgattgctaaagacatccacggcgagacttggaaattccagattctttacagaggaacacctcgccgtcatctcctaaccaccggttggagcactttcgttaaccagaagaaactaatcgccggagactcaatcgtcttcctccgttctgaatccggtgacctctgcgtcggaatccgccgcgctaaacgcggcggtctcggatctaacgcaggatccgacaatccttaccctggattctccggtttcctccgtgacgacgagtcaacaacaacaacatcgaagctaatgatgatgaaacgcaacggaaacaacgacggaaacgccgcggctacagggagggttagagtagaagcagtagcggaagcggtggcgcgtgcagcgtgtggacaagcgtttgaggttgtttattatccacgcgctagtacaccggagttttgcgtaaaagcagctgatgttagatcagcaatgaggataagatggtgtagtggtatgcgttttaaaatggcgtttgaaacagaggattcttctagaatcagttggtttatgggtactgtctccgccgttcaagtcgctgatccaattcgttggcctaattcaccatggcgtctccttcaggtagcttgggacgaaccggatttgttacaaaacgttaagcgggttagtccgtggttagtcgaattggtatcgaacatgcctacaatacatttatctccattctctccgaggaagaagattaggattccgcagccatttgagtttccattcgacggtactaaattcccgattttctccccgggattcgccaacaatggcggtggcgagtccatgtgttatctgtcaaacgacaacaataatgctcctgcaggaatacagggagccaggcaagctcaacaactcttcggatcaccatctccgtctttgttgtctgatctcaatcttagtagttacaccggtaacaacaagttacattctccggcgatgtttctatcgagtttcaacccgaggcatcatcattatcaggctagggatagtgagaatagtaataacatttcgtgttctttaactatggggaatcctgctatggttcaggataagaagaagtctgttggttcggttaagactcatcagttcgtgttgttcggtcaaccgattttaaccgaacagcaagttatgaaccgaaaacggtttttggaagaagaggcggaagcggaggaggagaaaggtttagtggctcgtgggttaacatggaattatagtttacaaggacttgagacgggtcattgtaaagttttcatggaatctgaggatgttggacgcacactcgatctctcggttattggctcgtaccaagaattgtaccggaaattggctgagatgtttcatatagaagagaggtcggatttgttgactcatgttgtgtaccgggatgcaaatggtgttatcaaacgtattggagacgaacctttcagtgatttcatgaaagcaactaaacggctaacaatcaagatggatattggtggcgacaacgtgagaaagacgtggataaccggaatcaggactggtgaaaatggtatagacgcttctacgaagactggtccgctcagcatcttcgcttgaaattgaagcatattgaggaataagcagtggcctttgttttgaacctaattttatttctgtctttaattctcttttttccctattttaaatcctttttttgctggtcttttgtgtgtaacaaaccattcccaagtgttaccaaaagtactctaattggtatttgaattt

SEQ ID NO: 46329 - protein, 693 aa, Arabidopsis thaliana
  peptide (1)..(693): Ceres Seq. ID no. 15168948
  misc_feature (114)..(219): Pfam Name: B3 DNA binding domain Pfam Description: B3 DNA binding domain
  misc_feature (20)..(543): Homolog of NCBI NO: 25370632 NR Description: protein F28K19.6 [imported] - Arabidopsis
  misc_feature (5)..(543): Homolog of NCBI NO: 12323297 NR Description: putative auxin response factor; 79762-82020
  misc_feature (5)..(543): Homolog of NCBI NO: 15810291 NR Description: auxin response factor ARF17 [Arabidopsis thaliana]
  misc_feature (578)..(665): Homolog of NCBI NO: 21741865 NR Description: OSJNBa0019D11.3 [Oryza sativa (japonica
  misc_feature (6)..(547): Homolog of NCBI NO: 21741865 NR Description: OSJNBa0019D11.3 [Oryza sativa (japonica
  misc_feature (4)..(644): Homolog of NCBI NO: 7484815 NR Description: auxin response factor 7 homolog F6G3.110 -
  misc_feature (1)..(666): Homolog of NCBI NO: 37535416 NR Description: putative transcription factor
  misc_feature (4)..(665): Homolog of NCBI NO: 18417527 NR Description: transcription factor-related protein [Arabidopsis
  misc_feature (577)..(667): Homolog of NCBI NO: 19352051 NR Description: auxin response factor 10 [Oryza sativa]
  misc_feature (2)..(545): Homolog of NCBI NO: 19352051 NR Description: auxin response factor 10 [Oryza sativa]
MEQEKSLDPQLWHACAGSMVQIPSLNSTVFYFAQGHTEHAHAPPDFHAPRVPPLILCRVVSVKFLADAETDEVFAKITLLPLPGNDLDLENDAVLGLTPPSSDGNGNGKEKPASFAKTLTQSDANNGGGFSVPRYCAETIFPRLDYSAEPPVQTVIAKDIHGETWKFQILYRGTPRRHLLTTGWSTFVNQKKLIAGDSIVFLRSESGDLCVGIRRAKRGGLGSNAGSDNPYPGFSGFLRDDESTTTTSKLMMMKRNGNNDGNAAATGRVRVEAVAEAVARAACGQAFEVVYYPRASTPEFCVKAADVRSAMRIRWCSGMRFKMAFETEDSSRISWFMGTVSAVQVADPIRWPNSPWRLLQVAWDEPDLLQNVKRVSPWLVELVSNMPTIHLSPFSPRKKIRIPQPFEFPFDGTKFPIFSPGFANNGGGESMCYLSNDNNNAPAGIQGARQAQQLFGSPSPSLLSDLNLSSYTGNNKLHSPAMFLSSFNPRHHHYQARDSENSNNISCSLTMGNPAMVQDKKKSVGSVKTHQFVLFGQPILTEQQVMNRKRFLEEEAEAEEEKGLVARGLTWNYSLQGLETGHCKVFMESEDVGRTLDLSVIGSYQELYRKLAEMFHIEERSDLLTHVVYRDANGVIKRIGDEPFSDFMKATKRLTIKMDIGGDNVRKTWITGIRTGENGIDASTKTGPLSIFA

SEQ ID NO: 46330 - protein, 675 aa, Arabidopsis thaliana
  peptide (1)..(675): Ceres Seq. ID no. 15168949
  misc_feature (96)..(201): Pfam Name: B3 DNA binding domain Pfam Description: B3 DNA binding domain
  misc_feature (2)..(525): Homolog of NCBI NO: 25370632 NR Description: protein F28K19.6 [imported] - Arabidopsis
  misc_feature (1)..(525): Homolog of NCBI NO: 12323297 NR Description: putative auxin response factor; 79762-82020
  misc_feature (1)..(525): Homolog of NCBI NO: 15810291 NR Description: auxin response factor ARF17 [Arabidopsis thaliana]
  misc_feature (560)..(647): Homolog of NCBI NO: 21741865 NR Description: OSJNBa0019D11.3 [Oryza sativa (japonica
  misc_feature (1)..(529): Homolog of NCBI NO: 21741865 NR Description: OSJNBa0019D11.3 [Oryza sativa (japonica
  misc_feature (1)..(626): Homolog of NCBI NO: 7484815 NR Description: auxin response factor 7 homolog F6G3.110 -
  misc_feature (1)..(648): Homolog of NCBI NO: 37535416 NR Description: putative transcription factor
  misc_feature (1)..(647): Homolog of NCBI NO: 18417527 NR Description: transcription factor-related protein [Arabidopsis
  misc_feature (559)..(649): Homolog of NCBI NO: 19352051 NR Description: auxin response factor 10 [Oryza sativa]
  misc_feature (1)..(527): Homolog of NCBI NO: 19352051 NR Description: auxin response factor 10 [Oryza sativa]
MVQIPSLNSTVFYFAQGHTEHAHAPPDFHAPRVPPLILCRVVSVKFLADAETDEVFAKITLLPLPGNDLDLENDAVLGLTPPSSDGNGNGKEKPASFAKTLTQSDANNGGGFSVPRYCAETIFPRLDYSAEPPVQTVIAKDIHGETWKFQILYRGTPRRHLLTTGWSTFVNQKKLIAGDSIVFLRSESGDLCVGIRRAKRGGLGSNAGSDNPYPGFSGFLRDDESTTTTSKLMMMKRNGNNDGNAAATGRVRVEAVAEAVARAACGQAFEVVYYPRASTPEFCVKAADVRSAMRIRWCSGMRFKMAFETEDSSRISWFMGTVSAVQVADPIRWPNSPWRLLQVAWDEPDLLQNVKRVSPWLVELVSNMPTIHLSPFSPRKKIRIPQPFEFPFDGTKFPIFSPGFANNGGGESMCYLSNDNNNAPAGIQGARQAQQLFGSPSPSLLSDLNLSSYTGNNKLHSPAMFLSSFNPRHHHYQARDSENSNNISCSLTMGNPAMVQDKKKSVGSVKTHQFVLFGQPILTEQQVMNRKRFLEEEAEAEEEKGLVARGLTWNYSLQGLETGHCKVFMESEDVGRTLDLSVIGSYQELYRKLAEMFHIEERSDLLTHVVYRDANGVIKRIGDEPFSDFMKATKRLTIKMDIGGDNVRKTWITGIRTGENGIDASTKTGPLSIFA

SEQ ID NO: 46331 - protein, 443 aa, Arabidopsis thaliana
  peptide (1)..(443): Ceres Seq. ID no. 15168950
  misc_feature (334)..(417): Pfam Name: AUX/IAA family Pfam Description: AUX/IAA family
  misc_feature (1)..(293): Homolog of NCBI NO: 25370632 NR Description: protein F28K19.6 [imported] - Arabidopsis
  misc_feature (1)..(293): Homolog of NCBI NO: 12323297 NR Description: putative auxin response factor; 79762-82020
  misc_feature (1)..(293): Homolog of NCBI NO: 15810291 NR Description: auxin response factor ARF17 [Arabidopsis thaliana]
  misc_feature (328)..(415): Homolog of NCBI NO: 21741865 NR Description: OSJNBa0019D11.3 [Oryza sativa (japonica
  misc_feature (1)..(297): Homolog of NCBI NO: 21741865 NR Description: OSJNBa0019D11.3 [Oryza sativa (japonica
  misc_feature (1)..(394): Homolog of NCBI NO: 7484815 NR Description: auxin response factor 7 homolog F6G3.110 -
  misc_feature (1)..(416): Homolog of NCBI NO: 37535416 NR Description: putative transcription factor
  misc_feature (1)..(415): Homolog of NCBI NO: 18417527 NR Description: transcription factor-related protein [Arabidopsis
  misc_feature (327)..(417): Homolog of NCBI NO: 19352051 NR Description: auxin response factor 10 [Oryza sativa]
  misc_feature (1)..(295): Homolog of NCBI NO: 19352051 NR Description: auxin response factor 10 [Oryza sativa]
MMMKRNGNNDGNAAATGRVRVEAVAEAVARAACGQAFEVVYYPRASTPEFCVKAADVRSAMRIRWCSGMRFKMAFETEDSSRISWFMGTVSAVQVADPIRWPNSPWRLLQVAWDEPDLLQNVKRVSPWLVELVSNMPTIHLSPFSPRKKIRIPQPFEFPFDGTKFPIFSPGFANNGGGESMCYLSNDNNNAPAGIQGARQAQQLFGSPSPSLLSDLNLSSYTGNNKLHSPAMFLSSFNPRHHHYQARDSENSNNISCSLTMGNPAMVQDKKKSVGSVKTHQFVLFGQPILTEQQVMNRKRFLEEEAEAEEEKGLVARGLTWNYSLQGLETGHCKVFMESEDVGRTLDLSVIGSYQELYRKLAEMFHIEERSDLLTHVVYRDANGVIKRIGDEPFSDFMKATKRLTIKMDIGGDNVRKTWITGIRTGENGIDASTKTGPLSIFA

SEQ ID NO: 46332 - DNA, 1562 bp, Arabidopsis thaliana
  misc_feature (1)..(1562): Ceres Seq. ID no. 13578622
  misc_feature: MA Experiment ID: 20000173 Result: Down-regulated in Transcription
  misc_feature: MA Experiment 20000173 PARAMETER Experiment Name: At_42deg_Heat_P Parameter: Age (day) Value: 14
  misc_feature: MA Experiment 20000173 PARAMETER Experiment Name: At_42deg_Heat_P Parameter: Organism Value: A. thaliana
  misc_feature: MA Experiment 20000173 PARAMETER Experiment Name: At_42deg_Heat_P Parameter: Plant Line Value: WS
  misc_feature: MA Experiment 20000173 PARAMETER Experiment Name: At_42deg_Heat_P Parameter: Temperature (deg C) Value: 42 vs. 22
  misc_feature: MA Experiment 20000173 PARAMETER Experiment Name: At_42deg_Heat_P Parameter: Timepoint (hr) Value: 6
  misc_feature: MA Experiment 20000173 PARAMETER Experiment Name: At_42deg_Heat_P Parameter: Tissue Value: Aerial
  misc_feature: MA Experiment ID: 20000179 Result: Up-regulated in Transcription
  misc_feature: MA Experiment 20000179 PARAMETER Experiment Name: At_Germinating_Seeds_P Parameter: Age (hr) Value: 6 vs. 0
  misc_feature: MA Experiment 20000179 PARAMETER Experiment Name: At_Germinating_Seeds_P Parameter: Tissue Value: Germinating Seeds
  misc_feature: MA Experiment ID: 20000180 Result: Up-regulated in Transcription
  misc_feature: MA Experiment 20000180 PARAMETER Experiment Name: At_Germinating_Seeds_P Parameter: Age (hr) Value: 24 vs. 0
  misc_feature: MA Experiment 20000180 PARAMETER Experiment Name: At_Germinating_Seeds_P Parameter: Tissue Value: Germinating Seeds
  misc_feature: MA Experiment ID: 20000794 Result: Down-regulated in Transcription
  misc_feature: MA Experiment 20000794 PARAMETER Experiment Name: At_Petals_P Parameter: Age (day) Value: 23-25 days
  misc_feature: MA Experiment 20000794 PARAMETER Experiment Name: At_Petals_P Parameter: Plant Line Value: WS
  misc_feature: MA Experiment 20000794 PARAMETER Experiment Name: At_Petals_P Parameter: Tissue Value: Petals vs. Whole plant
cgactcagtctccggctagttcgactcggtaaaatcacgattactttctccttccatttatcacgatcgtggatccagaaactctgaaagatggcgtctgagctgacaaaccggcgacacgagatagagcaaccagaagcggaatcttattatccaaagccgataaagccatggttcgtagcgattcgtccgatccgttacatgctcagagaacagagactcgtcttcgtcctcgtcggcattgccatcgccacattaggattcacaatcttctccaaatcatccaaccaccaaccaattccttacgacgtggatccgctttccggatacggaatgcgatcggagtcatcgtatctgccagcgacgattcataagaagccaagcatcgagtacatgagccggatcggatcggcaggcggcaaaatccctctaggcttgaaacggaaagtgctaagggttgttgtgacaggtggagcagggttcgtcgggtcacacctggtggaccggttgatggctcgaggagacaacgtgatcgtggtcgacaatttcttcacgggaaggaaagagaacgtgatgcaccatttcaataaccctaatttcgagatgatccgtcacgatgtagtggagccgatccttctagaggttgatcagatctaccatttggcatgccctgcttctcctgttcactacaaattcaatcccgtcaagactatcaagacgaatgtggtgggaacattgaacatgttgggactagcgaagagagtgggagcaagattcttgctgacgagtacgagtgaggtctatggagatcctcttcaacatcctcaggttgagacttactggggcaacgttaatcccatcggtgttcggagttgttacgacgaaggcaaacgtacggctgagactttgaccatggactatcacagaggcgctaatgttgaggttaggattgctaggatattcaacacttatggcccaaggatgtgtatcgatgacggtcgtgtggttagcaacttcgttgcccaggcattaagaaaagagcctttgactgtttatggtgatggtaagcagactaggagtttccagtttgtctctgatctggtggaaggtctgatgaggttgatggagggagaacatgtcggtccatttaaccttggtaaccccggtgaattcaccatgctcgagctcgctaaggtggttcaagagacaattgacccgaacgcaaagatagagttcagaccaaacacagaggacgacccacacaagaggaaaccagacatcacaaaggccaaagagcttcttggttgggaaccaaaggtggctctacgccaaggactcccacttatggtcaaagatttccgtcaacgtgtctttggcgaccaaaagcaggattcttccaccacttcatcatcaacagagtaactgtcgctggagattctcgtttctcttcgttttcatttttaattttgatatttctattcctgtcaatgtagtgatattgaaacctccccgattttaaagttttattttttttaatgcaatcaccgtagttttgagcttgg

SEQ ID NO: 46333 - protein, 443 aa, Arabidopsis thaliana
  peptide (1)..(443): Ceres Seq. ID no. 13578623
  misc_feature (123)..(427): Pfam Name: NAD dependent epimerase/dehydratase family Pfam Description: NAD dependent epimerase/dehydratase family
  misc_feature (121)..(434): Homolog of NCBI NO: 13591616 NR Description: UDP-D-glucuronate carboxy-lyase [Pisum sativum]
  misc_feature (84)..(169): Homolog of NCBI NO: 34908082 NR Description: P0506B12.30 [Oryza sativa (japonica
  misc_feature (210)..(430): Homolog of NCBI NO: 34908082 NR Description: P0506B12.30 [Oryza sativa (japonica
  misc_feature (1)..(432): Homolog of NCBI NO: 30693847 NR Description: NAD-dependent epimerase/dehydratase family
  misc_feature (84)..(430): Homolog of NCBI NO: 25396402 NR Description: UDP-glucuronic acid decarboxylase
  misc_feature (1)..(432): Homolog of NCBI NO: 11270116 NR Description: dTDP-glucose 4-6-dehydratase-like protein -
  misc_feature (1)..(432): Homolog of NCBI NO: 17473549 NR Description: dTDP-glucose 4-6-dehydratase-like protein
  misc_feature (1)..(443): Homolog of NCBI NO: 2129578 NR Description: dTDP-glucose 4-6-dehydratase homolog D18 -
  misc_feature (1)..(443): Homolog of NCBI NO: 15229334 NR Description: NAD-dependent epimerase/dehydratase family
  misc_feature (1)..(443): Homolog of NCBI NO: 15227109 NR Description: NAD-dependent epimerase/dehydratase family
MASELTNRRHEIEQPEAESYYPKPIKPWFVAIRPIRYMLREQRLVFVLVGIAIATLGFTIFSKSSNHQPIPYDVDPLSGYGMRSESSYLPATIHKKPSIEYMSRIGSAGGKIPLGLKRKVLRVVVTGGAGFVGSHLVDRLMARGDNVIVVDNFFTGRKENVMHHFNNPNFEMIRHDVVEPILLEVDQIYHLACPASPVHYKFNPVKTIKTNVVGTLNMLGLAKRVGARFLLTSTSEVYGDPLQHPQVETYWGNVNPIGVRSCYDEGKRTAETLTMDYHRGANVEVRIARIFNTYGPRMCIDDGRVVSNFVAQALRKEPLTVYGDGKQTRSFQFVSDLVEGLMRLMEGEHVGPFNLGNPGEFTMLELAKVVQETIDPNAKIEFRPNTEDDPHKRKPDITKAKELLGWEPKVALRQGLPLMVKDFRQRVFGDQKQDSSTTSSSTE

SEQ ID NO: 46334 - protein, 406 aa, Arabidopsis thaliana
  peptide (1)..(406): Ceres Seq. ID no. 13578624
  misc_feature (86)..(390): Pfam Name: NAD dependent epimerase/dehydratase family Pfam Description: NAD dependent epimerase/dehydratase family
  misc_feature (84)..(397): Homolog of NCBI NO: 13591616 NR Description: UDP-D-glucuronate carboxy-lyase [Pisum sativum]
  misc_feature (47)..(132): Homolog of NCBI NO: 34908082 NR Description: P0506B12.30 [Oryza sativa (japonica
  misc_feature (173)..(393): Homolog of NCBI NO: 34908082 NR Description: P0506B12.30 [Oryza sativa (japonica
  misc_feature (1)..(395): Homolog of NCBI NO: 30693847 NR Description: NAD-dependent epimerase/dehydratase family
  misc_feature (47)..(393): Homolog of NCBI NO: 25396402 NR Description: UDP-glucuronic acid decarboxylase
  misc_feature (1)..(395): Homolog of NCBI NO: 11270116 NR Description: dTDP-glucose 4-6-dehydratase-like protein -
  misc_feature (1)..(395): Homolog of NCBI NO: 17473549 NR Description: dTDP-glucose 4-6-dehydratase-like protein
  misc_feature (1)..(406): Homolog of NCBI NO: 2129578 NR Description: dTDP-glucose 4-6-dehydratase homolog D18 -
  misc_feature (1)..(406): Homolog of NCBI NO: 15229334 NR Description: NAD-dependent epimerase/dehydratase family
  misc_feature (1)..(406): Homolog of NCBI NO: 15227109 NR Description: NAD-dependent epimerase/dehydratase family
MLREQRLVFVLVGIAIATLGFTIFSKSSNHQPIPYDVDPLSGYGMRSESSYLPATIHKKPSIEYMSRIGSAGGKIPLGLKRKVLRVVVTGGAGFVGSHLVDRLMARGDNVIVVDNFFTGRKENVMHHFNNPNFEMIRHDVVEPILLEVDQIYHLACPASPVHYKFNPVKTIKTNVVGTLNMLGLAKRVGARFLLTSTSEVYGDPLQHPQVETYWGNVNPIGVRSCYDEGKRTAETLTMDYHRGANVEVRIARIFNTYGPRMCIDDGRVVSNFVAQALRKEPLTVYGDGKQTRSFQFVSDLVEGLMRLMEGEHVGPFNLGNPGEFTMLELAKVVQETIDPNAKIEFRPNTEDDPHKRKPDITKAKELLGWEPKVALRQGLPLMVKDFRQRVFGDQKQDSSTTSSSTE

SEQ ID NO: 46335 - protein, 362 aa, Arabidopsis thaliana
  peptide (1)..(362): Ceres Seq. ID no. 13578625
  misc_feature (42)..(346): Pfam Name: NAD dependent epimerase/dehydratase family Pfam Description: NAD dependent epimerase/dehydratase family
  misc_feature (40)..(353): Homolog of NCBI NO: 13591616 NR Description: UDP-D-glucuronate carboxy-lyase [Pisum sativum]
  misc_feature (3)..(88): Homolog of NCBI NO: 34908082 NR Description: P0506B12.30 [Oryza sativa (japonica
  misc_feature (129)..(349): Homolog of NCBI NO: 34908082 NR Description: P0506B12.30 [Oryza sativa (japonica
  misc_feature (1)..(351): Homolog of NCBI NO: 30693847 NR Description: NAD-dependent epimerase/dehydratase family
  misc_feature (3)..(349): Homolog of NCBI NO: 25396402 NR Description: UDP-glucuronic acid decarboxylase
  misc_feature (1)..(351): Homolog of NCBI NO: 11270116 NR Description: dTDP-glucose 4-6-dehydratase-like protein -
  misc_feature (1)..(351): Homolog of NCBI NO: 17473549 NR Description: dTDP-glucose 4-6-dehydratase-like protein
  misc_feature (1)..(362): Homolog of NCBI NO: 2129578 NR Description: dTDP-glucose 4-6-dehydratase homolog D18 -
  misc_feature (1)..(362): Homolog of NCBI NO: 15229334 NR Description: NAD-dependent epimerase/dehydratase family
  misc_feature (1)..(362): Homolog of NCBI NO: 15227109 NR Description: NAD-dependent epimerase/dehydratase family
MRSESSYLPATIHKKPSIEYMSRIGSAGGKIPLGLKRKVLRVVVTGGAGFVGSHLVDRLMARGDNVIVVDNFFTGRKENVMHHFNNPNFEMIRHDVVEPILLEVDQIYHLACPASPVHYKFNPVKTIKTNVVGTLNMLGLAKRVGARFLLTSTSEVYGDPLQHPQVETYWGNVNPIGVRSCYDEGKRTAETLTMDYHRGANVEVRIARIFNTYGPRMCIDDGRVVSNFVAQALRKEPLTVYGDGKQTRSFQFVSDLVEGLMRLMEGEHVGPFNLGNPGEFTMLELAKVVQETIDPNAKIEFRPNTEDDPHKRKPDITKAKELLGWEPKVALRQGLPLMVKDFRQRVFGDQKQDSSTTSSSTE

SEQ ID NO: 46336 - DNA, 1312 bp, Arabidopsis thaliana
  misc_feature (1)..(1312): Ceres Seq. ID no. 12574614
  misc_feature: MA Experiment ID: 20000180 Result: Up-regulated in Transcription
  misc_feature: MA Experiment 20000180 PARAMETER Experiment Name: At_Germinating_Seeds_P Parameter: Age (hr) Value: 24 vs. 0
  misc_feature: MA Experiment 20000180 PARAMETER Experiment Name: At_Germinating_Seeds_P Parameter: Tissue Value: Germinating Seeds
  misc_feature: MA Experiment ID: 20000227 Result: Down-regulated in Transcription
  misc_feature: MA Experiment 20000227 PARAMETER Experiment Name: At_Root-Tips-vs-Tops_P Parameter: Tissue Value: Root Tips vs. Root Tops
  misc_feature: MA Experiment ID: 20000265 Result: Down-regulated in Transcription
  misc_feature: MA Experiment 20000265 PARAMETER Experiment Name: At_Open_Flower_P Parameter: Age (day) Value: 21
  misc_feature: MA Experiment 20000265 PARAMETER Experiment Name: At_Open_Flower_P Parameter: Plant Line Value: WS
  misc_feature: MA Experiment 20000265 PARAMETER Experiment Name: At_Open_Flower_P Parameter: Tissue Value: Closed Flower vs. Whole Plant
  misc_feature: MA Experiment ID: 20001451 Result: Down-regulated in Transcription
  misc_feature: MA Experiment 20001451 PARAMETER Experiment Name: At_Far-red-induction_P Parameter: Age (day) Value: 7
  misc_feature: MA Experiment 20001451 PARAMETER Experiment Name: At_Far-red-induction_P Parameter: Light Value: Far-red vs. White
  misc_feature: MA Experiment 20001451 PARAMETER Experiment Name: At_Far-red-induction_P Parameter: Organism Value: A. thaliana
  misc_feature: MA Experiment 20001451 PARAMETER Experiment Name: At_Far-red-induction_P Parameter: Plant Line Value: Columbia
  misc_feature: MA Experiment 20001451 PARAMETER Experiment Name: At_Far-red-induction_P Parameter: Timepoint (hr) Value: 24
  misc_feature: MA Experiment 20001451 PARAMETER Experiment Name: At_Far-red-induction_P Parameter: Tissue Value: Whole Plant
gtttttgatttgagaaacaaaaacgatggagatgatgaagattgatcctttattcgatcgtgccagtgagcttaaagctttcgatgaaacgaaaacgggtgtgaaaggactcgtcgactccggagtttcacaagttccacgcatctttcatcatccaactgtcaaattatcaaccccaaaaccacttccctcggacctgctacatctcaagacgatcccaacgatcgatctcggaggacgggacttccaggacgcgattaagcgcaataacgcgattgaagagattaaagaagcagcagcgaagtggggtttcttccaggtgatcaaccatggagtttcgcttgaacttcttgagaagatgaaaaaaggagttcgtgacttccacgagcaatcacaagaagtgaggaaagaattctacagtcgcgatttcagcagaaggtttctgtatttaagtaatttcgatctctttagttctccagcagcaaattggagagacactttctcttgtaccatggctccagatactccaaaaccacaggatcttccggagatttgtagggatattatgatggaatattcaaagcaagtgatgaatttgggtaaatttctcttcgagcttttatcagaagctctagggttggaacctaatcacctcaatgacatggattgctctaagggtttgctcatgctctcccactactacccaccgtgtccagagcctgacctaactttaggcacaagtcagcactccgacaactcttttctcactgtccttcttcccgatcagatcgaagggcttcaggttcgtcgtgaagggcactggttcgatgttcctcatgtttccggcgctctcatcatcaacatcggagatcttttacagcttataacaaacgacaaattcatcagtttggagcacagagtattggcgaacagagcaacaagagctcgagtgtctgtcgcatgtttctttaccactggagtaagaccgaatcctagaatgtacggaccgattagagagcttgtgtctgaagaaaatcctccaaagtacagagagaccacaattaaagactacgctacttacttcaatgccaaaggacttgacgggacctctgctttgctccattttaagatatgaaacatggtgagctactactgtctcacacatatacgacatgacaatatatgtaataattcatttgcagattaaaattacttcagaaaagatcaaaagagtgctggtgaagaaaattctcaagaggttcataaacatatcactgttgatactttattttttaatactatctttaaagct

SEQ ID NO: 46337 - protein, 369 aa, Arabidopsis thaliana
  peptide (1)..(369): Ceres Seq. ID no. 12574615
  misc_feature (217)..(317): Pfam Name: 2OG-Fe(II) oxygenase superfamily Pfam Description: 2OG-Fe(II) oxygenase superfamily
  misc_feature (11)..(369): Homolog of NCBI NO: 30679748 NR Description: 2-oxoglutarate-dependent dioxygenase, putative
  misc_feature (1)..(312): Homolog of NCBI NO: 25406927 NR Description: protein F12K11.6 [imported] - Arabidopsis
  misc_feature (285)..(368): Homolog of NCBI NO: 25406927 NR Description: protein F12K11.6 [imported] - Arabidopsis
  misc_feature (1)..(285): Homolog of NCBI NO: 30679763 NR Description: 2-oxoglutarate-dependent dioxygenase, putative
  misc_feature (1)..(369): Homolog of NCBI NO: 15221544 NR Description: oxidoreductase, putative
  misc_feature (1)..(293): Homolog of NCBI NO: 25406927 NR Description: protein F12K11.6 [imported] - Arabidopsis
  misc_feature (1)..(369): Homolog of NCBI NO: 13878119 NR Description: putative oxidoreductase [Arabidopsis thaliana]
  misc_feature (1)..(369): Homolog of NCBI NO: 15221545 NR Description: oxidoreductase, putative
  misc_feature (283)..(369): Homolog of NCBI NO: 25406927 NR Description: protein F12K11.6 [imported] - Arabidopsis
  misc_feature (1)..(297): Homolog of NCBI NO: 25406927 NR Description: protein F12K11.6 [imported] - Arabidopsis
MEMMKIDPLFDRASELKAFDETKTGVKGLVDSGVSQVPRIFHHPTVKLSTPKPLPSDLLHLKTIPTIDLGGRDFQDAIKRNNAIEEIKEAAAKWGFFQVINHGVSLELLEKMKKGVRDFHEQSQEVRKEFYSRDFSRRFLYLSNFDLFSSPAANWRDTFSCTMAPDTPKPQDLPEICRDIMMEYSKQVMNLGKFLFELLSEALGLEPNHLNDMDCSKGLLMLSHYYPPCPEPDLTLGTSQHSDNSFLTVLLPDQIEGLQVRREGHWFDVPHVSGALIINIGDLLQLITNDKFISLEHRVLANRATRARVSVACFFTTGVRPNPRMYGPIRELVSEENPPKYRETTIKDYATYFNAKGLDGTSALLHFKI

SEQ ID NO: 46338 - protein, 367 aa, Arabidopsis thaliana
  peptide (1)..(367): Ceres Seq. ID no. 12574616
  misc_feature (215)..(315): Pfam Name: 2OG-Fe(II) oxygenase superfamily Pfam Description: 2OG-Fe(II) oxygenase superfamily
  misc_feature (9)..(367): Homolog of NCBI NO: 30679748 NR Description: 2-oxoglutarate-dependent dioxygenase, putative
  misc_feature (1)..(310): Homolog of NCBI NO: 25406927 NR Description: protein F12K11.6 [imported] - Arabidopsis
  misc_feature (283)..(366): Homolog of NCBI NO: 25406927 NR Description: protein F12K11.6 [imported] - Arabidopsis
  misc_feature (1)..(283): Homolog of NCBI NO: 30679763 NR Description: 2-oxoglutarate-dependent dioxygenase, putative
  misc_feature (1)..(367): Homolog of NCBI NO: 15221544 NR Description: oxidoreductase, putative
  misc_feature (1)..(291): Homolog of NCBI NO: 25406927 NR Description: protein F12K11.6 [imported] - Arabidopsis
  misc_feature (1)..(367): Homolog of NCBI NO: 13878119 NR Description: putative oxidoreductase [Arabidopsis thaliana]
  misc_feature (1)..(367): Homolog of NCBI NO: 15221545 NR Description: oxidoreductase, putative
  misc_feature (281)..(367): Homolog of NCBI NO: 25406927 NR Description: protein F12K11.6 [imported] - Arabidopsis
  misc_feature (1)..(295): Homolog of NCBI NO: 25406927 NR Description: protein F12K11.6 [imported] - Arabidopsis
MMKIDPLFDRASELKAFDETKTGVKGLVDSGVSQVPRIFHHPTVKLSTPKPLPSDLLHLKTIPTIDLGGRDFQDAIKRNNAIEEIKEAAAKWGFFQVINHGVSLELLEKMKKGVRDFHEQSQEVRKEFYSRDFSRRFLYLSNFDLFSSPAANWRDTFSCTMAPDTPKPQDLPEICRDIMMEYSKQVMNLGKFLFELLSEALGLEPNHLNDMDCSKGLLMLSHYYPPCPEPDLTLGTSQHSDNSFLTVLLPDQIEGLQVRREGHWFDVPHVSGALIINIGDLLQLITNDKFISLEHRVLANRATRARVSVACFFTTGVRPNPRMYGPIRELVSEENPPKYRETTIKDYATYFNAKGLDGTSALLHFKI

SEQ ID NO: 46339 - protein, 366 aa, Arabidopsis thaliana
  peptide (1)..(366): Ceres Seq. ID no. 12574617
  misc_feature (214)..(314): Pfam Name: 2OG-Fe(II) oxygenase superfamily Pfam Description: 2OG-Fe(II) oxygenase superfamily
  misc_feature (8)..(366): Homolog of NCBI NO: 30679748 NR Description: 2-oxoglutarate-dependent dioxygenase, putative
  misc_feature (1)..(309): Homolog of NCBI NO: 25406927 NR Description: protein F12K11.6 [imported] - Arabidopsis
  misc_feature (282)..(365): Homolog of NCBI NO: 25406927 NR Description: protein F12K11.6 [imported] - Arabidopsis
  misc_feature (1)..(282): Homolog of NCBI NO: 30679763 NR Description: 2-oxoglutarate-dependent dioxygenase, putative
  misc_feature (1)..(366): Homolog of NCBI NO: 15221544 NR Description: oxidoreductase, putative
  misc_feature (1)..(290): Homolog of NCBI NO: 25406927 NR Description: protein F12K11.6 [imported] - Arabidopsis
  misc_feature (1)..(366): Homolog of NCBI NO: 13878119 NR Description: putative oxidoreductase [Arabidopsis thaliana]
  misc_feature (1)..(366): Homolog of NCBI NO: 15221545 NR Description: oxidoreductase, putative
  misc_feature (280)..(366): Homolog of NCBI NO: 25406927 NR Description: protein F12K11.6 [imported] - Arabidopsis
  misc_feature (1)..(294): Homolog of NCBI NO: 25406927 NR Description: protein F12K11.6 [imported] - Arabidopsis
MKIDPLFDRASELKAFDETKTGVKGLVDSGVSQVPRIFHHPTVKLSTPKPLPSDLLHLKTIPTIDLGGRDFQDAIKRNNAIEEIKEAAAKWGFFQVINHGVSLELLEKMKKGVRDFHEQSQEVRKEFYSRDFSRRFLYLSNFDLFSSPAANWRDTFSCTMAPDTPKPQDLPEICRDIMMEYSKQVMNLGKFLFELLSEALGLEPNHLNDMDCSKGLLMLSHYYPPCPEPDLTLGTSQHSDNSFLTVLLPDQIEGLQVRREGHWFDVPHVSGALIINIGDLLQLITNDKFISLEHRVLANRATRARVSVACFFTTGVRPNPRMYGPIRELVSEENPPKYRETTIKDYATYFNAKGLDGTSALLHFKI

SEQ ID NO: 46340 - DNA, 1219 bp, Arabidopsis thaliana
  misc_feature (1)..(1219): Ceres Seq. ID no. 13591899
  misc_feature: MA Experiment ID: 20000166 Result: Up-regulated in Transcription
  misc_feature: MA Experiment 20000166 PARAMETER Experiment Name: At_100uM_ABA_P Parameter: Age (day) Value: 14
  misc_feature: MA Experiment 20000166 PARAMETER Experiment Name: At_100uM_ABA_P Parameter: Organism Value: A. thaliana
  misc_feature: MA Experiment 20000166 PARAMETER Experiment Name: At_100uM_ABA_P Parameter: Plant Line Value: WS
  misc_feature: MA Experiment 20000166 PARAMETER Experiment Name: At_100uM_ABA_P Parameter: Timepoint (hr) Value: 1
  misc_feature: MA Experiment 20000166 PARAMETER Experiment Name: At_100uM_ABA_P Parameter: Tissue Value: Aerial
  misc_feature: MA Experiment 20000166 PARAMETER Experiment Name: At_100uM_ABA_P Parameter: Treatment Value: 100uM ABA vs. No Treatment
  misc_feature: MA Experiment ID: 20000169 Result: Up-regulated in Transcription
  misc_feature: MA Experiment 20000169 PARAMETER Experiment Name: At_100uM_ABA_P Parameter: Age (day) Value: 14
  misc_feature: MA Experiment 20000169 PARAMETER Experiment Name: At_100uM_ABA_P Parameter: Organism Value: A. thaliana
  misc_feature: MA Experiment 20000169 PARAMETER Experiment Name: At_100uM_ABA_P Parameter: Plant Line Value: WS
  misc_feature: MA Experiment 20000169 PARAMETER Experiment Name: At_100uM_ABA_P Parameter: Timepoint (hr) Value: 6
  misc_feature: MA Experiment 20000169 PARAMETER Experiment Name: At_100uM_ABA_P Parameter: Tissue Value: Aerial
  misc_feature: MA Experiment 20000169 PARAMETER Experiment Name: At_100uM_ABA_P Parameter: Treatment Value: 100uM ABA vs. No Treatment
  misc_feature: MA Experiment ID: 20000180 Result: Down-regulated in Transcription
  misc_feature: MA Experiment 20000180 PARAMETER Experiment Name: At_Germinating_Seeds_P Parameter: Age (hr) Value: 24 vs. 0
  misc_feature: MA Experiment 20000180 PARAMETER Experiment Name: At_Germinating_Seeds_P Parameter: Tissue Value: Germinating Seeds
  misc_feature: MA Experiment ID: 20000182 Result: Up-regulated in Transcription
  misc_feature: MA Experiment 20000182 PARAMETER Experiment Name: At_2mM_SA_P Parameter: Age (day) Value: 14
  misc_feature: MA Experiment 20000182 PARAMETER Experiment Name: At_2mM_SA_P Parameter: Organism Value: A. thaliana
  misc_feature: MA Experiment 20000182 PARAMETER Experiment Name: At_2mM_SA_P Parameter: Plant Line Value: WS
  misc_feature: MA Experiment 20000182 PARAMETER Experiment Name: At_2mM_SA_P Parameter: Timepoint (hr) Value: 6
  misc_feature: MA Experiment 20000182 PARAMETER Experiment Name: At_2mM_SA_P Parameter: Tissue Value: Aerial
  misc_feature: MA Experiment 20000182 PARAMETER Experiment Name: At_2mM_SA_P Parameter: Treatment Value: 2mM SA vs. No Treatment
  misc_feature: MA Experiment ID: 20000184 Result: Down-regulated in Transcription
  misc_feature: MA Experiment 20000184 PARAMETER Experiment Name: At_Shoots__P Parameter: Age (day) Value: 7
  misc_feature: MA Experiment 20000184 PARAMETER Experiment Name: At_Shoots__P Parameter: Tissue Value: Shoots vs. Whole Plant
  misc_feature: MA Experiment ID: 20000185 Result: Down-regulated in Transcription
  misc_feature: MA Experiment 20000185 PARAMETER Experiment Name: At_Roots__P Parameter: Age (day) Value: 7 vs. 21
  misc_feature: MA Experiment 20000185 PARAMETER Experiment Name: At_Roots__P Parameter: Organism Value: A. thaliana
  misc_feature: MA Experiment 20000185 PARAMETER Experiment Name: At_Roots__P Parameter: Tissue Value: Roots vs. Whole Plant
  misc_feature: MA Experiment ID: 20000211 Result: Up-regulated in Transcription
  misc_feature: MA Experiment 20000211 PARAMETER Experiment Name: At_0.001percent_MeJA__P Parameter: Age (day) Value: 14
  misc_feature: MA Experiment 20000211 PARAMETER Experiment Name: At_0.001percent_MeJA__P Parameter: Organism Value: A. thaliana
  misc_feature: MA Experiment 20000211 PARAMETER Experiment Name: At_0.001percent_MeJA__P Parameter: Plant Line Value: WS
  misc_feature: MA Experiment 20000211 PARAMETER Experiment Name: At_0.001percent_MeJA__P Parameter: Timepoint (hr) Value: 1
  misc_feature: MA Experiment 20000211 PARAMETER Experiment Name: At_0.001percent_MeJA__P Parameter: Tissue Value: Aerial
  misc_feature: MA Experiment 20000211 PARAMETER Experiment Name: At_0.001percent_MeJA__P Parameter: Treatment Value: 0.001percent MeJA vs. No Treatment
  misc_feature: MA Experiment ID: 20000234 Result: Down-regulated in Transcription
  misc_feature: MA Experiment 20000234 PARAMETER Experiment Name: At_Siliques_P Parameter: Age (day) Value: 21
  misc_feature: MA Experiment 20000234 PARAMETER Experiment Name: At_Siliques_P Parameter: Organism Value: A. thaliana
  misc_feature: MA Experiment 20000234 PARAMETER Experiment Name: At_Siliques_P Parameter: Plant Line Value: WS
  misc_feature: MA Experiment 20000234 PARAMETER Experiment Name: At_Siliques_P Parameter: Tissue Value: Less Than 5mm Siliques vs. Whole Plant
  misc_feature: MA Experiment ID: 20000235 Result: Down-regulated in Transcription
  misc_feature: MA Experiment 20000235 PARAMETER Experiment Name: At_Siliques_P Parameter: Age (day) Value: 21
  misc_feature: MA Experiment 20000235 PARAMETER Experiment Name: At_Siliques_P Parameter: Organism Value: A. thaliana
  misc_feature: MA Experiment 20000235 PARAMETER Experiment Name: At_Siliques_P Parameter: Plant Line Value: WS
  misc_feature: MA Experiment 20000235 PARAMETER Experiment Name: At_Siliques_P Parameter: Tissue Value: 5-10mm Siliques vs. Whole Plant
  misc_feature: MA Experiment ID: 20000264 Result: Up-regulated in Transcription
  misc_feature: MA Experiment 20000264 PARAMETER Experiment Name: At_Open_Flower_P Parameter: Age (day) Value: 21
  misc_feature: MA Experiment 20000264 PARAMETER Experiment Name: At_Open_Flower_P Parameter: Plant Line Value: WS
  misc_feature: MA Experiment 20000264 PARAMETER Experiment Name: At_Open_Flower_P Parameter: Tissue Value: Open Flower vs. Whole Plant
  misc_feature: MA Experiment ID: 20000267 Result: Up-regulated in Transcription
  misc_feature: MA Experiment 20000267 PARAMETER Experiment Name: At_Drought_P Parameter: Age (day) Value: 7
  misc_feature: MA Experiment 20000267 PARAMETER Experiment Name: At_Drought_P Parameter: Organism Value: A. thaliana
  misc_feature: MA Experiment 20000267 PARAMETER Experiment Name: At_Drought_P Parameter: Plant Line Value: WS
  misc_feature: MA Experiment 20000267 PARAMETER Experiment Name: At_Drought_P Parameter: Timepoint (hr) Value: 6
  misc_feature: MA Experiment 20000267 PARAMETER Experiment Name: At_Drought_P Parameter: Tissue Value: Whole Plant
  misc_feature: MA Experiment 20000267 PARAMETER Experiment Name: At_Drought_P Parameter: Treatment Value: Drought vs. No Drought
  misc_feature: MA Experiment ID: 20000268 Result: Up-regulated in Transcription
  misc_feature: MA Experiment 20000268 PARAMETER Experiment Name: At_100mM_NaCl__P Parameter: Age (day) Value: 14
  misc_feature: MA Experiment 20000268 PARAMETER Experiment Name: At_100mM_NaCl__P Parameter: Organism Value: A. thaliana
  misc_feature: MA Experiment 20000268 PARAMETER Experiment Name: At_100mM_NaCl__P Parameter: Plant Line Value: WS
  misc_feature: MA Experiment 20000268 PARAMETER Experiment Name: At_100mM_NaCl__P Parameter: Timepoint (hr) Value: 6
  misc_feature: MA Experiment 20000268 PARAMETER Experiment Name: At_100mM_NaCl__P Parameter: Tissue Value: Whole Plant
  misc_feature: MA Experiment 20000268 PARAMETER Experiment Name: At_100mM_NaCl__P Parameter: Treatment Value: 100mM NaCl vs. No Treatment
  misc_feature: MA Experiment ID: 20000308 Result: Up-regulated in Transcription
  misc_feature: MA Experiment 20000308 PARAMETER Experiment Name: At_100mM_NaCl__P Parameter: Age (day) Value: 17
  misc_feature: MA Experiment 20000308 PARAMETER Experiment Name: At_100mM_NaCl__P Parameter: Organism Value: A. thaliana
  misc_feature: MA Experiment 20000308 PARAMETER Experiment Name: At_100mM_NaCl__P Parameter: Plant Line Value: WS
  misc_feature: MA Experiment 20000308 PARAMETER Experiment Name: At_100mM_NaCl__P Parameter: Timepoint (hr) Value: 72
  misc_feature: MA Experiment 20000308 PARAMETER Experiment Name: At_100mM_NaCl__P Parameter: Tissue Value: Whole Plant
  misc_feature: MA Experiment 20000308 PARAMETER Experiment Name: At_100mM_NaCl__P Parameter: Treatment Value: 100mM NaCl vs. No Treatment
  misc_feature: MA Experiment ID: 20000436 Result: Up-regulated in Transcription
  misc_feature: MA Experiment 20000436 PARAMETER Experiment Name: At_Drought_P Parameter: Age (day) Value: 7
  misc_feature: MA Experiment 20000436 PARAMETER Experiment Name: At_Drought_P Parameter: Organism Value: A. thaliana
  misc_feature: MA Experiment 20000436 PARAMETER Experiment Name: At_Drought_P Parameter: Plant Line Value: WS
  misc_feature: MA Experiment 20000436 PARAMETER Experiment Name: At_Drought_P Parameter: Timepoint (hr) Value: 12
  misc_feature: MA Experiment 20000436 PARAMETER Experiment Name: At_Drought_P Parameter: Tissue Value: Whole Plant
  misc_feature: MA Experiment 20000436 PARAMETER Experiment Name: At_Drought_P Parameter: Treatment Value: Drought vs. No Drought
  misc_feature: MA Experiment ID: 20000437 Result: Up-regulated in Transcription
  misc_feature: MA Experiment 20000437 PARAMETER Experiment Name: At_Drought_P Parameter: Age (day) Value: 8
  misc_feature: MA Experiment 20000437 PARAMETER Experiment Name: At_Drought_P Parameter: Organism Value: A. thaliana
  misc_feature: MA Experiment 20000437 PARAMETER Experiment Name: At_Drought_P Parameter: Plant Line Value: WS
  misc_feature: MA Experiment 20000437 PARAMETER Experiment Name: At_Drought_P Parameter: Timepoint (hr) Value: 24
  misc_feature: MA Experiment 20000437 PARAMETER Experiment Name: At_Drought_P Parameter: Tissue Value: Whole Plant
  misc_feature: MA Experiment 20000437 PARAMETER Experiment Name: At_Drought_P Parameter: Treatment Value: Drought vs. No Drought
  misc_feature: MA Experiment ID: 20000438 Result: Down-regulated in Transcription
  misc_feature: MA Experiment 20000438 PARAMETER Experiment Name: At_Shoots__P Parameter: Age (day) Value: 14
  misc_feature: MA Experiment 20000438 PARAMETER Experiment Name: At_Shoots__P Parameter: Tissue Value: Shoots vs. Whole Plant
  misc_feature: MA Experiment ID: 20000439 Result: Down-regulated in Transcription
  misc_feature: MA Experiment 20000439 PARAMETER Experiment Name: At_Roots__P Parameter: Age (day) Value: 14 vs. 21
  misc_feature: MA Experiment 20000439 PARAMETER Experiment Name: At_Roots__P Parameter: Organism Value: A. thaliana
  misc_feature: MA Experiment 20000439 PARAMETER Experiment Name: At_Roots__P Parameter: Tissue Value: Roots vs. Whole Plant
  misc_feature: MA Experiment ID: 20000453 Result: Up-regulated in Transcription
  misc_feature: MA Experiment 20000453 PARAMETER Experiment Name: At_100uM_ABA_P Parameter: Age (day) Value: 15
  misc_feature: MA Experiment 20000453 PARAMETER Experiment Name: At_100uM_ABA_P Parameter: Organism Value: A. thaliana
  misc_feature: MA Experiment 20000453 PARAMETER Experiment Name: At_100uM_ABA_P Parameter: Plant Line Value: WS
  misc_feature: MA Experiment 20000453 PARAMETER Experiment Name: At_100uM_ABA_P Parameter: Timepoint (hr) Value: 24
  misc_feature: MA Experiment 20000453 PARAMETER Experiment Name: At_100uM_ABA_P Parameter: Tissue Value: Aerial
  misc_feature: MA Experiment 20000453 PARAMETER Experiment Name: At_100uM_ABA_P Parameter: Treatment Value: 100uM ABA vs. No Treatment
  misc_feature: MA Experiment ID: 20000455 Result: Up-regulated in Transcription
  misc_feature: MA Experiment 20000455 PARAMETER Experiment Name: At_100uM_ABA_P Parameter: Age (day) Value: 16
  misc_feature: MA Experiment 20000455 PARAMETER Experiment Name: At_100uM_ABA_P Parameter: Organism Value: A. thaliana
  misc_feature: MA Experiment 20000455 PARAMETER Experiment Name: At_100uM_ABA_P Parameter: Plant Line Value: WS
  misc_feature: MA Experiment 20000455 PARAMETER Experiment Name: At_100uM_ABA_P Parameter: Timepoint (hr) Value: 48
  misc_feature: MA Experiment 20000455 PARAMETER Experiment Name: At_100uM_ABA_P Parameter: Tissue Value: Aerial
  misc_feature: MA Experiment 20000455 PARAMETER Experiment Name: At_100uM_ABA_P Parameter: Treatment Value: 100uM ABA vs. No Treatment
  misc_feature: MA Experiment ID: 20000495 Result: Down-regulated in Transcription
  misc_feature: MA Experiment 20000495 PARAMETER Experiment Name: At_Guard_Cells_P Parameter: Harvest Date Value: 8/2/2002
  misc_feature: MA Experiment 20000495 PARAMETER Experiment Name: At_Guard_Cells_P Parameter: Organism Value: A. thaliana
  misc_feature: MA Experiment 20000495 PARAMETER Experiment Name: At_Guard_Cells_P Parameter: Tissue Value: Guard Cells vs. Leaves
  misc_feature: MA Experiment ID: 20000506 Result: Up-regulated in Transcription
  misc_feature: MA Experiment 20000506 PARAMETER Experiment Name: At_Wounding_P Parameter: Organism Value: A. thaliana
  misc_feature: MA Experiment 20000506 PARAMETER Experiment Name: At_Wounding_P Parameter: Plant Line Value: WS
  misc_feature: MA Experiment 20000506 PARAMETER Experiment Name: At_Wounding_P Parameter: Timepoint (hr) Value: 6
  misc_feature: MA Experiment 20000506 PARAMETER Experiment Name: At_Wounding_P Parameter: Tissue Value: Aerial
  misc_feature: MA Experiment 20000506 PARAMETER Experiment Name: At_Wounding_P Parameter: Treatment Value: Wounding vs. No Wounding
  misc_feature: MA Experiment ID: 20000573 Result: Up-regulated in Transcription
  misc_feature: MA Experiment 20000573 PARAMETER Experiment Name: At_100uM_ABA_Mutants__P Parameter: Organism Value: A. thaliana
  misc_feature: MA Experiment 20000573 PARAMETER Experiment Name: At_100uM_ABA_Mutants__P Parameter: Plant Line Value: CS22 vs. Ler wt
  misc_feature: MA Experiment 20000573 PARAMETER Experiment Name: At_100uM_ABA_Mutants__P Parameter: Timepoint (hr) Value: N/A
  misc_feature: MA Experiment 20000573 PARAMETER Experiment Name: At_100uM_ABA_Mutants__P Parameter: Tissue Value: Whole Plant
  misc_feature: MA Experiment 20000573 PARAMETER Experiment Name: At_100uM_ABA_Mutants__P Parameter: Treatment Value: None
  misc_feature: MA Experiment ID: 20000574 Result: Up-regulated in Transcription
  misc_feature: MA Experiment 20000574 PARAMETER Experiment Name: At_100uM_ABA_Mutants__P Parameter: Organism Value: A. thaliana
  misc_feature: MA Experiment 20000574 PARAMETER Experiment Name: At_100uM_ABA_Mutants__P Parameter: Plant Line Value: CS23 vs. Ler wt
  misc_feature: MA Experiment 20000574 PARAMETER Experiment Name: At_100uM_ABA_Mutants__P Parameter: Timepoint (hr) Value: N/A
  misc_feature: MA Experiment 20000574 PARAMETER Experiment Name: At_100uM_ABA_Mutants__P Parameter: Tissue Value: Whole Plant
  misc_feature: MA Experiment 20000574 PARAMETER Experiment Name: At_100uM_ABA_Mutants__P Parameter: Treatment Value: None
  misc_feature: MA Experiment ID: 20000794 Result: Up-regulated in Transcription
  misc_feature: MA Experiment 20000794 PARAMETER Experiment Name: At_Petals_P Parameter: Age (day) Value: 23-25 days
  misc_feature: MA Experiment 20000794 PARAMETER Experiment Name: At_Petals_P Parameter: Plant Line Value: WS
  misc_feature: MA Experiment 20000794 PARAMETER Experiment Name: At_Petals_P Parameter: Tissue Value: Petals vs. Whole plant
  misc_feature: MA Experiment ID: 20001248 Result: Up-regulated in Transcription
  misc_feature: MA Experiment 20001248 PARAMETER Experiment Name: At_Far-red-induction_P Parameter: Age (day) Value: 7
  misc_feature: MA Experiment 20001248 PARAMETER Experiment Name: At_Far-red-induction_P Parameter: Light Value: Far-red vs. White
  misc_feature: MA Experiment 20001248 PARAMETER Experiment Name: At_Far-red-induction_P Parameter: Organism Value: A. thaliana
  misc_feature: MA Experiment 20001248 PARAMETER Experiment Name: At_Far-red-induction_P Parameter: Plant Line Value: Columbia
  misc_feature: MA Experiment 20001248 PARAMETER Experiment Name: At_Far-red-induction_P Parameter: Timepoint (hr) Value: 4
  misc_feature: MA Experiment 20001248 PARAMETER Experiment Name: At_Far-red-induction_P Parameter: Tissue Value: Whole Plant
  misc_feature: MA Experiment ID: 20001554 Result: Up-regulated in Transcription
  misc_feature: MA Experiment 20001554 PARAMETER Experiment Name: At_Drought_Soil_Dry_P Parameter: Age (day) Value: 21
  misc_feature: MA Experiment 20001554 PARAMETER Experiment Name: At_Drought_Soil_Dry_P Parameter: Organism Value: A. thaliana
  misc_feature: MA Experiment 20001554 PARAMETER Experiment Name: At_Drought_Soil_Dry_P Parameter: Plant Line Value: WS
  misc_feature: MA Experiment 20001554 PARAMETER Experiment Name: At_Drought_Soil_Dry_P Parameter: Post Timepoint (hr) Value: None
  misc_feature: MA Experiment 20001554 PARAMETER Experiment Name: At_Drought_Soil_Dry_P Parameter: Post-Treatment Value: None
  misc_feature: MA Experiment 20001554 PARAMETER Experiment Name: At_Drought_Soil_Dry_P Parameter: Timepoint (day) Value: 7
  misc_feature: MA Experiment 20001554 PARAMETER Experiment Name: At_Drought_Soil_Dry_P Parameter: Treatment Value: Drought vs. No Drought
  misc_feature: MA Experiment ID: 20001555 Result: Up-regulated in Transcription
  misc_feature: MA Experiment 20001555 PARAMETER Experiment Name: At_Drought_Soil_Dry_P Parameter: Age (day) Value: 24
  misc_feature: MA Experiment 20001555 PARAMETER Experiment Name: At_Drought_Soil_Dry_P Parameter: Organism Value: A. thaliana
  misc_feature: MA Experiment 20001555 PARAMETER Experiment Name: At_Drought_Soil_Dry_P Parameter: Plant Line Value: WS
  misc_feature: MA Experiment 20001555 PARAMETER Experiment Name: At_Drought_Soil_Dry_P Parameter: Post Timepoint (hr) Value: None
  misc_feature: MA Experiment 20001555 PARAMETER Experiment Name: At_Drought_Soil_Dry_P Parameter: Post-Treatment Value: None
  misc_feature: MA Experiment 20001555 PARAMETER Experiment Name: At_Drought_Soil_Dry_P Parameter: Timepoint (day) Value: 10
  misc_feature: MA Experiment 20001555 PARAMETER Experiment Name: At_Drought_Soil_Dry_P Parameter: Treatment Value: Drought vs. No Drought
  misc_feature: MA Experiment ID: 20001556 Result: Up-regulated in Transcription
  misc_feature: MA Experiment 20001556 PARAMETER Experiment Name: At_Drought_Soil_Dry_P Parameter: Age (day) Value: 26
  misc_feature: MA Experiment 20001556 PARAMETER Experiment Name: At_Drought_Soil_Dry_P Parameter: Organism Value: A. thaliana
  misc_feature: MA Experiment 20001556 PARAMETER Experiment Name: At_Drought_Soil_Dry_P Parameter: Plant Line Value: WS
  misc_feature: MA Experiment 20001556 PARAMETER Experiment Name: At_Drought_Soil_Dry_P Parameter: Post Timepoint (hr) Value: None
  misc_feature: MA Experiment 20001556 PARAMETER Experiment Name: At_Drought_Soil_Dry_P Parameter: Post-Treatment Value: None
  misc_feature: MA Experiment 20001556 PARAMETER Experiment Name: At_Drought_Soil_Dry_P Parameter: Timepoint (day) Value: 12
  misc_feature: MA Experiment 20001556 PARAMETER Experiment Name: At_Drought_Soil_Dry_P Parameter: Treatment Value: Drought vs. No Drought
  misc_feature: MA Experiment ID: 20001557 Result: Up-regulated in Transcription
  misc_feature: MA Experiment 20001557 PARAMETER Experiment Name: At_Drought_Soil_Dry_P Parameter: Age (day) Value: 27
  misc_feature: MA Experiment 20001557 PARAMETER Experiment Name: At_Drought_Soil_Dry_P Parameter: Organism Value: A. thaliana
  misc_feature: MA Experiment 20001557 PARAMETER Experiment Name: At_Drought_Soil_Dry_P Parameter: Plant Line Value: WS
  misc_feature: MA Experiment 20001557 PARAMETER Experiment Name: At_Drought_Soil_Dry_P Parameter: Post Timepoint (hr) Value: 3
  misc_feature: MA Experiment 20001557 PARAMETER Experiment Name: At_Drought_Soil_Dry_P Parameter: Post-Treatment Value: Re-Water vs. No Drought
  misc_feature: MA Experiment 20001557 PARAMETER Experiment Name: At_Drought_Soil_Dry_P Parameter: Timepoint (day) Value: 13
  misc_feature: MA Experiment 20001557 PARAMETER Experiment Name: At_Drought_Soil_Dry_P Parameter: Treatment Value: Drought vs. No Drought
  misc_feature: MA Experiment ID: 20001559 Result: Up-regulated in Transcription
  misc_feature: MA Experiment 20001559 PARAMETER Experiment Name: At_Drought_Soil_Dry_P Parameter: Age (day) Value: 28
  misc_feature: MA Experiment 20001559 PARAMETER Experiment Name: At_Drought_Soil_Dry_P Parameter: Organism Value: A. thaliana
  misc_feature: MA Experiment 20001559 PARAMETER Experiment Name: At_Drought_Soil_Dry_P Parameter: Plant Line Value: WS
  misc_feature: MA Experiment 20001559 PARAMETER Experiment Name: At_Drought_Soil_Dry_P Parameter: Post Timepoint (hr) Value: 29
  misc_feature: MA Experiment 20001559 PARAMETER Experiment Name: At_Drought_Soil_Dry_P Parameter: Post-Treatment Value: Re-Water vs. No Drought
  misc_feature: MA Experiment 20001559 PARAMETER Experiment Name: At_Drought_Soil_Dry_P Parameter: Timepoint (day) Value: 14
  misc_feature: MA Experiment 20001559 PARAMETER Experiment Name: At_Drought_Soil_Dry_P Parameter: Treatment Value: Drought vs. No Drought
  misc_feature: MA Experiment ID: 20001757 Result: Down-regulated in Transcription
  misc_feature: MA Experiment 20001757 PARAMETER Experiment Name: At_50mM_NH4NO3_L-to-H_P Parameter: Timepoint (hr) Value: 6
  misc_feature: MA Experiment 20001757 PARAMETER Experiment Name: At_50mM_NH4NO3_L-to-H_P Parameter: Tissue Value: Leaf
  misc_feature: MA Experiment 20001757 PARAMETER Experiment Name: At_50mM_NH4NO3_L-to-H_P Parameter: Treatment Value: 50mM NH4NO3 vs 100mM Mannitol
  misc_feature: MA Experiment ID: 20001770 Result: Up-regulated in Transcription
  misc_feature: MA Experiment 20001770 PARAMETER Experiment Name: At_Far-red-enriched-adult_P Parameter: Age (day) Value: 28
  misc_feature: MA Experiment 20001770 PARAMETER Experiment Name: At_Far-red-enriched-adult_P Parameter: Light Value: Far-red enriched vs. White
  misc_feature: MA Experiment 20001770 PARAMETER Experiment Name: At_Far-red-enriched-adult_P Parameter: Organism Value: A. thaliana
  misc_feature: MA Experiment 20001770 PARAMETER Experiment Name: At_Far-red-enriched-adult_P Parameter: Plant Line Value: Columbia
  misc_feature: MA Experiment 20001770 PARAMETER Experiment Name: At_Far-red-enriched-adult_P Parameter: Timepoint (hr) Value: 8
  misc_feature: MA Experiment 20001770 PARAMETER Experiment Name: At_Far-red-enriched-adult_P Parameter: Tissue Value: Aerial
  misc_feature: MA Experiment ID: 20001771 Result: Up-regulated in Transcription
  misc_feature: MA Experiment 20001771 PARAMETER Experiment Name: At_Far-red-enriched-adult_P Parameter: Age (day) Value: 28
  misc_feature: MA Experiment 20001771 PARAMETER Experiment Name: At_Far-red-enriched-adult_P Parameter: Light Value: Far-red enriched vs. White
  misc_feature: MA Experiment 20001771 PARAMETER Experiment Name: At_Far-red-enriched-adult_P Parameter: Organism Value: A. thaliana
  misc_feature: MA Experiment 20001771 PARAMETER Experiment Name: At_Far-red-enriched-adult_P Parameter: Plant Line Value: Columbia
  misc_feature: MA Experiment 20001771 PARAMETER Experiment Name: At_Far-red-enriched-adult_P Parameter: Timepoint (hr) Value: 16
  misc_feature: MA Experiment 20001771 PARAMETER Experiment Name: At_Far-red-enriched-adult_P Parameter: Tissue Value: Aerial
  misc_feature: MA Experiment ID: 20001773 Result: Down-regulated in Transcription
  misc_feature: MA Experiment 20001773 PARAMETER Experiment Name: At_Far-red-enriched-adult_P Parameter: Age (day) Value: 30
  misc_feature: MA Experiment 20001773 PARAMETER Experiment Name: At_Far-red-enriched-adult_P Parameter: Light Value: Far-red enriched vs. White
  misc_feature: MA Experiment 20001773 PARAMETER Experiment Name: At_Far-red-enriched-adult_P Parameter: Organism Value: A. thaliana
  misc_feature: MA Experiment 20001773 PARAMETER Experiment Name: At_Far-red-enriched-adult_P Parameter: Plant Line Value: Columbia
  misc_feature: MA Experiment 20001773 PARAMETER Experiment Name: At_Far-red-enriched-adult_P Parameter: Timepoint (hr) Value: 48
  misc_feature: MA Experiment 20001773 PARAMETER Experiment Name: At_Far-red-enriched-adult_P Parameter: Tissue Value: Aerial
  misc_feature: MA Experiment ID: 20001904 Result: Up-regulated in Transcription
  misc_feature: MA Experiment 20001904 PARAMETER Experiment Name: At_Drought_Reproduction_P Parameter: Age (day) Value: 37
  misc_feature: MA Experiment 20001904 PARAMETER Experiment Name: At_Drought_Reproduction_P Parameter: Organism Value: A. thaliana
  misc_feature: MA Experiment 20001904 PARAMETER Experiment Name: At_Drought_Reproduction_P Parameter: Plant Line Value: WS
  misc_feature: MA Experiment 20001904 PARAMETER Experiment Name: At_Drought_Reproduction_P Parameter: Timepoint (day) Value: 7
  misc_feature: MA Experiment 20001904 PARAMETER Experiment Name: At_Drought_Reproduction_P Parameter: Tissue Value: Rosettes
  misc_feature: MA Experiment 20001904 PARAMETER Experiment Name: At_Drought_Reproduction_P Parameter: Treatment Value: Drought vs. No Drought
  misc_feature: MA Experiment ID: 20001905 Result: Up-regulated in Transcription
  misc_feature: MA Experiment 20001905 PARAMETER Experiment Name: At_Drought_Reproduction_P Parameter: Age (day) Value: 40
  misc_feature: MA Experiment 20001905 PARAMETER Experiment Name: At_Drought_Reproduction_P Parameter: Organism Value: A. thaliana
  misc_feature: MA Experiment 20001905 PARAMETER Experiment Name: At_Drought_Reproduction_P Parameter: Plant Line Value: WS
  misc_feature: MA Experiment 20001905 PARAMETER Experiment Name: At_Drought_Reproduction_P Parameter: Timepoint (day) Value: 10
  misc_feature: MA Experiment 20001905 PARAMETER Experiment Name: At_Drought_Reproduction_P Parameter: Tissue Value: Rosettes
  misc_feature: MA Experiment 20001905 PARAMETER Experiment Name: At_Drought_Reproduction_P Parameter: Treatment Value: Drought vs. No Drought
  misc_feature: MA Experiment ID: 20001906 Result: Up-regulated in Transcription
  misc_feature: MA Experiment 20001906 PARAMETER Experiment Name: At_Drought_Reproduction_P Parameter: Age (day) Value: 35
  misc_feature: MA Experiment 20001906 PARAMETER Experiment Name: At_Drought_Reproduction_P Parameter: Organism Value: A. thaliana
  misc_feature: MA Experiment 20001906 PARAMETER Experiment Name: At_Drought_Reproduction_P Parameter: Plant Line Value: WS
  misc_feature: MA Experiment 20001906 PARAMETER Experiment Name: At_Drought_Reproduction_P Parameter: Timepoint (day) Value: 5
  misc_feature: MA Experiment 20001906 PARAMETER Experiment Name: At_Drought_Reproduction_P Parameter: Tissue Value: Siliques
  misc_feature: MA Experiment 20001906 PARAMETER Experiment Name: At_Drought_Reproduction_P Parameter: Treatment Value: Drought vs. No Drought
  misc_feature: MA Experiment ID: 20001907 Result: Up-regulated in Transcription
  misc_feature: MA Experiment 20001907 PARAMETER Experiment Name: At_Drought_Reproduction_P Parameter: Age (day) Value: 37
  misc_feature: MA Experiment 20001907 PARAMETER Experiment Name: At_Drought_Reproduction_P Parameter: Organism Value: A. thaliana
  misc_feature: MA Experiment 20001907 PARAMETER Experiment Name: At_Drought_Reproduction_P Parameter: Plant Line Value: WS
  misc_feature: MA Experiment 20001907 PARAMETER Experiment Name: At_Drought_Reproduction_P Parameter: Timepoint (day) Value: 7
  misc_feature: MA Experiment 20001907 PARAMETER Experiment Name: At_Drought_Reproduction_P Parameter: Tissue Value: Siliques
  misc_feature: MA Experiment 20001907 PARAMETER Experiment Name: At_Drought_Reproduction_P Parameter: Treatment Value: Drought vs. No Drought
  misc_feature: MA Experiment ID: 20001908 Result: Up-regulated in Transcription
  misc_feature: MA Experiment 20001908 PARAMETER Experiment Name: At_Drought_Reproduction_P Parameter: Age (day) Value: 40
  misc_feature: MA Experiment 20001908 PARAMETER Experiment Name: At_Drought_Reproduction_P Parameter: Organism Value: A. thaliana
  misc_feature: MA Experiment 20001908 PARAMETER Experiment Name: At_Drought_Reproduction_P Parameter: Plant Line Value: WS
  misc_feature: MA Experiment 20001908 PARAMETER Experiment Name: At_Drought_Reproduction_P Parameter: Timepoint (day) Value: 10
  misc_feature: MA Experiment 20001908 PARAMETER Experiment Name: At_Drought_Reproduction_P Parameter: Tissue Value: Siliques
  misc_feature: MA Experiment 20001908 PARAMETER Experiment Name: At_Drought_Reproduction_P Parameter: Treatment Value: Drought vs. No Drought
  misc_feature: MA Experiment ID: 20001911 Result: Up-regulated in Transcription
  misc_feature: MA Experiment 20001911 PARAMETER Experiment Name: At_Drought_Reproduction_P Parameter: Age (day) Value: 40
  misc_feature: MA Experiment 20001911 PARAMETER Experiment Name: At_Drought_Reproduction_P Parameter: Organism Value: A. thaliana
  misc_feature: MA Experiment 20001911 PARAMETER Experiment Name: At_Drought_Reproduction_P Parameter: Plant Line Value: WS
  misc_feature: MA Experiment 20001911 PARAMETER Experiment Name: At_Drought_Reproduction_P Parameter: Timepoint (day) Value: 10
  misc_feature: MA Experiment 20001911 PARAMETER Experiment Name: At_Drought_Reproduction_P Parameter: Tissue Value: Flowers
  misc_feature: MA Experiment 20001911 PARAMETER Experiment Name: At_Drought_Reproduction_P Parameter: Treatment Value: Drought vs. No Drought
aaaacattattgtcaaaaataagaaagaaagaaaaaaatatgggtatccaagaaactgacccgttaacgcaattgagtttaccaccgggtttccgattttacccgaccgatgaagagcttatggttcaatatctctgtagaaaagcagctggttacgatttctctcttcagctcatcgccgaaatagatctttacaaattcgatccatgggttttaccaaataaagcattatttggagaaaaagaatggtatttttttagtcctagggatagaaaatatccaaacgggtcaagacctaaccgggttgccggatcgggttattggaaagctacgggtacggataaaataatctcgacggaaggacaaagagttggtattaaaaaagctttggtgttttacatcggaaaagctcctaaaggtactaaaaccaattggatcatgcatgagtatcgtctcattgaaccttctcgtagaaacggaagcactaagttggatgattgggttctatgtcgaatatacaagaagcaatcaagtgcacaaaaacaagtttacgataatggaatcgcgaatgctagagaattcagcaacaacggtacttcgtccacgacgtcgtcttcttctcactttgaagacgttcttgattcgtttcatcaagagatcgacaacagaaatttccagttttctaacccaaaccgcatctcgtcgctcagaccggacttaaccgaacagaaaaccgggttccacggtcttgcggatacttctaacttcgattgggctagttttgccggtaatgttgagcataataactcggtaccggaactcggaatgagtcatgttgttcctaatctcgagtacaactgtggctacctgaagacggaggaggaagtcgagagcagtcacgggtttaataactcgggcgagttagctcaaaagggttatggtgttgactcgtttgggtattcggggcaagttggtgggtttgggtttatgtgatgatgaaatgctgacgcaataaaaataagtcgttaatttttgtcccgtggcaaatcttatatgtatttgaatttcaattcttttgggttaagagggagactcatagatttagatgtagatttgtaatctttcatgcatagaaaatttgacgaatagatttcgtaactttattttgttgctgtttggttatctttgtattggtataaatttagtggattgaaattgc

SEQ ID NO: 46341 - protein, 330 aa, Arabidopsis thaliana
  peptide (1)..(330): Ceres Seq. ID no. 13591900
  misc_feature (27)..(153): Pfam Name: No apical meristem (NAM) protein Pfam Description: No apical meristem (NAM) protein
  misc_feature (12)..(306): Homolog of NCBI NO: 18407026 NR Description: No apical meristem (NAM) protein family
  misc_feature (14)..(225): Homolog of NCBI NO: 40786563 NR Description: putative NAC-domain protein
  misc_feature (20)..(307): Homolog of NCBI NO: 23397295 NR Description: unknown protein [Arabidopsis thaliana]
  misc_feature (14)..(75): Homolog of NCBI NO: 7486254 NR Description: hypothetical protein F27G19.10 - Arabidopsis
  misc_feature (75)..(307): Homolog of NCBI NO: 7486254 NR Description: hypothetical protein F27G19.10 - Arabidopsis
  misc_feature (14)..(307): Homolog of NCBI NO: 18416983 NR Description: No apical meristem (NAM) protein family
  misc_feature (14)..(284): Homolog of NCBI NO: 6175246 NR Description: jasmonic acid 2 [Lycopersicon esculentum]
  misc_feature (14)..(330): Homolog of NCBI NO: 21536744 NR Description: putative jasmonic acid regulatory protein
  misc_feature (14)..(330): Homolog of NCBI NO: 15232604 NR Description: No apical meristem (NAM) protein family
  misc_feature (14)..(330): Homolog of NCBI NO: 15219112 NR Description: No apical meristem (NAM) protein family
KTLLSKIRKKEKNMGIQETDPLTQLSLPPGFRFYPTDEELMVQYLCRKAAGYDFSLQLIAEIDLYKFDPWVLPNKALFGEKEWYFFSPRDRKYPNGSRPNRVAGSGYWKATGTDKIISTEGQRVGIKKALVFYIGKAPKGTKTNWIMHEYRLIEPSRRNGSTKLDDWVLCRIYKKQSSAQKQVYDNGIANAREFSNNGTSSTTSSSSHFEDVLDSFHQEIDNRNFQFSNPNRISSLRPDLTEQKTGFHGLADTSNFDWASFAGNVEHNNSVPELGMSHVVPNLEYNCGYLKTEEEVESSHGFNNSGELAQKGYGVDSFGYSGQVGGFGFM

SEQ ID NO: 46342 - protein, 317 aa, Arabidopsis thaliana
  peptide (1)..(317): Ceres Seq. ID no. 13591901
  misc_feature (14)..(140): Pfam Name: No apical meristem (NAM) protein Pfam Description: No apical meristem (NAM) protein
  misc_feature (1)..(293): Homolog of NCBI NO: 18407026 NR Description: No apical meristem (NAM) protein family
  misc_feature (1)..(212): Homolog of NCBI NO: 40786563 NR Description: putative NAC-domain protein
  misc_feature (7)..(294): Homolog of NCBI NO: 23397295 NR Description: unknown protein [Arabidopsis thaliana]
  misc_feature (1)..(62): Homolog of NCBI NO: 7486254 NR Description: hypothetical protein F27G19.10 - Arabidopsis
  misc_feature (62)..(294): Homolog of NCBI NO: 7486254 NR Description: hypothetical protein F27G19.10 - Arabidopsis
  misc_feature (1)..(294): Homolog of NCBI NO: 18416983 NR Description: No apical meristem (NAM) protein family
  misc_feature (1)..(271): Homolog of NCBI NO: 6175246 NR Description: jasmonic acid 2 [Lycopersicon esculentum]
  misc_feature (1)..(317): Homolog of NCBI NO: 21536744 NR Description: putative jasmonic acid regulatory protein
  misc_feature (1)..(317): Homolog of NCBI NO: 15232604 NR Description: No apical meristem (NAM) protein family
  misc_feature (1)..(317): Homolog of NCBI NO: 15219112 NR Description: No apical meristem (NAM) protein family
MGIQETDPLTQLSLPPGFRFYPTDEELMVQYLCRKAAGYDFSLQLIAEIDLYKFDPWVLPNKALFGEKEWYFFSPRDRKYPNGSRPNRVAGSGYWKATGTDKIISTEGQRVGIKKALVFYIGKAPKGTKTNWIMHEYRLIEPSRRNGSTKLDDWVLCRIYKKQSSAQKQVYDNGIANAREFSNNGTSSTTSSSSHFEDVLDSFHQEIDNRNFQFSNPNRISSLRPDLTEQKTGFHGLADTSNFDWASFAGNVEHNNSVPELGMSHVVPNLEYNCGYLKTEEEVESSHGFNNSGELAQKGYGVDSFGYSGQVGGFGFM

SEQ ID NO: 46343 - protein, 290 aa, Arabidopsis thaliana
  peptide (1)..(290): Ceres Seq. ID no. 13591902
  misc_feature (1)..(113): Pfam Name: No apical meristem (NAM) protein Pfam Description: No apical meristem (NAM) protein
  misc_feature (1)..(266): Homolog of NCBI NO: 18407026 NR Description: No apical meristem (NAM) protein family
  misc_feature (1)..(185): Homolog of NCBI NO: 40786563 NR Description: putative NAC-domain protein
  misc_feature (1)..(267): Homolog of NCBI NO: 23397295 NR Description: unknown protein [Arabidopsis thaliana]
  misc_feature (1)..(35): Homolog of NCBI NO: 7486254 NR Description: hypothetical protein F27G19.10 - Arabidopsis
  misc_feature (35)..(267): Homolog of NCBI NO: 7486254 NR Description: hypothetical protein F27G19.10 - Arabidopsis
  misc_feature (1)..(267): Homolog of NCBI NO: 18416983 NR Description: No apical meristem (NAM) protein family
  misc_feature (1)..(244): Homolog of NCBI NO: 6175246 NR Description: jasmonic acid 2 [Lycopersicon esculentum]
  misc_feature (1)..(290): Homolog of NCBI NO: 21536744 NR Description: putative jasmonic acid regulatory protein
  misc_feature (1)..(290): Homolog of NCBI NO: 15232604 NR Description: No apical meristem (NAM) protein family
  misc_feature (1)..(290): Homolog of NCBI NO: 15219112 NR Description: No apical meristem (NAM) protein family
MVQYLCRKAAGYDFSLQLIAEIDLYKFDPWVLPNKALFGEKEWYFFSPRDRKYPNGSRPNRVAGSGYWKATGTDKIISTEGQRVGIKKALVFYIGKAPKGTKTNWIMHEYRLIEPSRRNGSTKLDDWVLCRIYKKQSSAQKQVYDNGIANAREFSNNGTSSTTSSSSHFEDVLDSFHQEIDNRNFQFSNPNRISSLRPDLTEQKTGFHGLADTSNFDWASFAGNVEHNNSVPELGMSHVVPNLEYNCGYLKTEEEVESSHGFNNSGELAQKGYGVDSFGYSGQVGGFGFM

SEQ ID NO: 46344 - DNA, 1603 bp, Arabidopsis thaliana
  misc_feature (1)..(1603): Ceres Seq. ID no. 13578704
  misc_feature: MA Experiment ID: 20000180 Result: Up-regulated in Transcription
  misc_feature: MA Experiment 20000180 PARAMETER Experiment Name: At_Germinating_Seeds_P Parameter: Age (hr) Value: 24 vs. 0
  misc_feature: MA Experiment 20000180 PARAMETER Experiment Name: At_Germinating_Seeds_P Parameter: Tissue Value: Germinating Seeds
  misc_feature: MA Experiment ID: 20001451 Result: Up-regulated in Transcription
  misc_feature: MA Experiment 20001451 PARAMETER Experiment Name: At_Far-red-induction_P Parameter: Age (day) Value: 7
  misc_feature: MA Experiment 20001451 PARAMETER Experiment Name: At_Far-red-induction_P Parameter: Light Value: Far-red vs. White
  misc_feature: MA Experiment 20001451 PARAMETER Experiment Name: At_Far-red-induction_P Parameter: Organism Value: A. thaliana
  misc_feature: MA Experiment 20001451 PARAMETER Experiment Name: At_Far-red-induction_P Parameter: Plant Line Value: Columbia
  misc_feature: MA Experiment 20001451 PARAMETER Experiment Name: At_Far-red-induction_P Parameter: Timepoint (hr) Value: 24
  misc_feature: MA Experiment 20001451 PARAMETER Experiment Name: At_Far-red-induction_P Parameter: Tissue Value: Whole Plant
atggtgaaggaaacagagctaatcttcattccagttccatccacaggtcatattctcgtccatattgaattcgccaagcgtctcatcaatctcgaccatcggatccacaccatcactattctcaacttatcctcaccctcttctcctcacgcctccgtcttcgccagatctctcatcgcttcccagcccaaaatccgtctccacgaccttccccctatccaagatcctcctccattcgatctttaccaaagagctcccgaagcttacatagtaaaactcatcaagaaaaatactcctctgataaaagacgccgtctccagcatcgtcgcgtcgcgtcgtggaggctcagattcggttcaagtcgccggtttggttctcgatttattctgcaattcattggtaaaagatgttggcaacgagcttaatcttccttcttacatataccttacgtgtaacgctagatacttggggatgatgaaatatattccggatcggcatcggaaaatcgcatctgagttcgatttgagctccggcgatgaagaattgccggttccgggattcataaacgctattccgacgaaatttatgccgcctggattgttcaataaggaagcttacgaggcttacgtagagctagcgccgagattcgcagatgcgaagggtattttggttaattccttcacggagcttgagccgcacccgtttgactatttctctcacctggagaaattccctccggtttacccggtcggaccgattctcagcttgaaagatcgagcgagtccgaacgaagaagcagtcgatcgggatcagatcgttgggtggctcgatgatcagccggagtcatcggtggtgttcctctgtttcgggagcagaggaagcgttgatgagccgcaagtgaaggagatagctcgagctttggaactcgtcggctgcagatttctttggtcaattagaacaagcggcgacgtcgagacgaatcctaacgatgtgttgccggaggggttcatgggccgagtagcaggccgaggtttggtatgtggttgggctccacaagtggaagtgttggcccataaagcaataggaggatttgtgtctcactgtggttggaactccacgcttgaaagcttatggttcggggttcctgtcgcaacgtggccgatgtacgcagagcaacagcttaacgccttcacgctggtgaaagagcttgggcttgcggtggacctgcggatggattacgtgtcgagtcgtgggggtttggtgacttgtgatgagatagccagagccgtacgatctttgatggacggtggagatgagaagagaaaaaaggttaaggagatggctgatgcggcaaggaaggctttgatggatggaggatcgtcttctttggcaactgctcgattcatcgcagaattgtttgaagatggttcgtcgtgctaatgcaaatgttggtgcgataattcgtcatgcttacttatttgataccaaaaaagacacatgctaagtttttaaaactaaagatttttcttttcactacttaaacttatatgtacaagtgaaatactgtacttcaagaagcaaaaactatggcagtctttatggt

SEQ ID NO: 46345 - protein, 479 aa, Arabidopsis thaliana
  peptide (1)..(479): Ceres Seq. ID no. 13578705
  misc_feature (2)..(475): Homolog of NCBI NO: 14349251 NR Description: glucosyltransferase [Nicotiana tabacum]
  misc_feature (2)..(472): Homolog of NCBI NO: 21555082 NR Description: putative flavonol 3-O-glucosyltransferase
  misc_feature (2)..(472): Homolog of NCBI NO: 15227606 NR Description: UDP-glycosyltransferase family [Arabidopsis
  misc_feature (2)..(472): Homolog of NCBI NO: 15227610 NR Description: UDP-glycosyltransferase family [Arabidopsis
  misc_feature (2)..(475): Homolog of NCBI NO: 15222344 NR Description: UDP-glycosyltransferase family [Arabidopsis
  misc_feature (3)..(478): Homolog of NCBI NO: 15227616 NR Description: glycosyltransferase family [Arabidopsis thaliana]
  misc_feature (3)..(469): Homolog of NCBI NO: 15227613 NR Description: glycosyltransferase family [Arabidopsis thaliana]
  misc_feature (1)..(472): Homolog of NCBI NO: 15222348 NR Description: UDP-glycosyltransferase family [Arabidopsis
  misc_feature (18)..(479): Homolog of NCBI NO: 21954072 NR Description: putative UDP-glucose glucosyltransferase
  misc_feature (1)..(479): Homolog of NCBI NO: 30680040 NR Description: glycosyltransferase family [Arabidopsis thaliana]
MVKETELIFIPVPSTGHILVHIEFAKRLINLDHRIHTITILNLSSPSSPHASVFARSLIASQPKIRLHDLPPIQDPPPFDLYQRAPEAYIVKLIKKNTPLIKDAVSSIVASRRGGSDSVQVAGLVLDLFCNSLVKDVGNELNLPSYIYLTCNARYLGMMKYIPDRHRKIASEFDLSSGDEELPVPGFINAIPTKFMPPGLFNKEAYEAYVELAPRFADAKGILVNSFTELEPHPFDYFSHLEKFPPVYPVGPILSLKDRASPNEEAVDRDQIVGWLDDQPESSVVFLCFGSRGSVDEPQVKEIARALELVGCRFLWSIRTSGDVETNPNDVLPEGFMGRVAGRGLVCGWAPQVEVLAHKAIGGFVSHCGWNSTLESLWFGVPVATWPMYAEQQLNAFTLVKELGLAVDLRMDYVSSRGGLVTCDEIARAVRSLMDGGDEKRKKVKEMADAARKALMDGGSSSLATARFIAELFEDGSSC

SEQ ID NO: 46346 - protein, 322 aa, Arabidopsis thaliana
  peptide (1)..(322): Ceres Seq. ID no. 13578706
  misc_feature (1)..(318): Homolog of NCBI NO: 14349251 NR Description: glucosyltransferase [Nicotiana tabacum]
  misc_feature (1)..(315): Homolog of NCBI NO: 21555082 NR Description: putative flavonol 3-O-glucosyltransferase
  misc_feature (1)..(315): Homolog of NCBI NO: 15227606 NR Description: UDP-glycosyltransferase family [Arabidopsis
  misc_feature (1)..(315): Homolog of NCBI NO: 15227610 NR Description: UDP-glycosyltransferase family [Arabidopsis
  misc_feature (1)..(318): Homolog of NCBI NO: 15222344 NR Description: UDP-glycosyltransferase family [Arabidopsis
  misc_feature (1)..(321): Homolog of NCBI NO: 15227616 NR Description: glycosyltransferase family [Arabidopsis thaliana]
  misc_feature (1)..(312): Homolog of NCBI NO: 15227613 NR Description: glycosyltransferase family [Arabidopsis thaliana]
  misc_feature (1)..(315): Homolog of NCBI NO: 15222348 NR Description: UDP-glycosyltransferase family [Arabidopsis
  misc_feature (1)..(322): Homolog of NCBI NO: 21954072 NR Description: putative UDP-glucose glucosyltransferase
  misc_feature (1)..(322): Homolog of NCBI NO: 30680040 NR Description: glycosyltransferase family [Arabidopsis thaliana]
MMKYIPDRHRKIASEFDLSSGDEELPVPGFINAIPTKFMPPGLFNKEAYEAYVELAPRFADAKGILVNSFTELEPHPFDYFSHLEKFPPVYPVGPILSLKDRASPNEEAVDRDQIVGWLDDQPESSVVFLCFGSRGSVDEPQVKEIARALELVGCRFLWSIRTSGDVETNPNDVLPEGFMGRVAGRGLVCGWAPQVEVLAHKAIGGFVSHCGWNSTLESLWFGVPVATWPMYAEQQLNAFTLVKELGLAVDLRMDYVSSRGGLVTCDEIARAVRSLMDGGDEKRKKVKEMADAARKALMDGGSSSLATARFIAELFEDGSSC

SEQ ID NO: 46347 - protein, 321 aa, Arabidopsis thaliana
  peptide (1)..(321): Ceres Seq. ID no. 13578707
  misc_feature (1)..(317): Homolog of NCBI NO: 14349251 NR Description: glucosyltransferase [Nicotiana tabacum]
  misc_feature (1)..(314): Homolog of NCBI NO: 21555082 NR Description: putative flavonol 3-O-glucosyltransferase
  misc_feature (1)..(314): Homolog of NCBI NO: 15227606 NR Description: UDP-glycosyltransferase family [Arabidopsis
  misc_feature (1)..(314): Homolog of NCBI NO: 15227610 NR Description: UDP-glycosyltransferase family [Arabidopsis
  misc_feature (1)..(317): Homolog of NCBI NO: 15222344 NR Description: UDP-glycosyltransferase family [Arabidopsis
  misc_feature (1)..(320): Homolog of NCBI NO: 15227616 NR Description: glycosyltransferase family [Arabidopsis thaliana]
  misc_feature (1)..(311): Homolog of NCBI NO: 15227613 NR Description: glycosyltransferase family [Arabidopsis thaliana]
  misc_feature (1)..(314): Homolog of NCBI NO: 15222348 NR Description: UDP-glycosyltransferase family [Arabidopsis
  misc_feature (1)..(321): Homolog of NCBI NO: 21954072 NR Description: putative UDP-glucose glucosyltransferase
  misc_feature (1)..(321): Homolog of NCBI NO: 30680040 NR Description: glycosyltransferase family [Arabidopsis thaliana]
MKYIPDRHRKIASEFDLSSGDEELPVPGFINAIPTKFMPPGLFNKEAYEAYVELAPRFADAKGILVNSFTELEPHPFDYFSHLEKFPPVYPVGPILSLKDRASPNEEAVDRDQIVGWLDDQPESSVVFLCFGSRGSVDEPQVKEIARALELVGCRFLWSIRTSGDVETNPNDVLPEGFMGRVAGRGLVCGWAPQVEVLAHKAIGGFVSHCGWNSTLESLWFGVPVATWPMYAEQQLNAFTLVKELGLAVDLRMDYVSSRGGLVTCDEIARAVRSLMDGGDEKRKKVKEMADAARKALMDGGSSSLATARFIAELFEDGSSC

SEQ ID NO: 46348 - DNA, 1556 bp, Arabidopsis thaliana
  misc_feature (1)..(1556): Ceres Seq. ID no. 15168943
  misc_feature: MA Experiment ID: 20000173 Result: Down-regulated in Transcription
  misc_feature: MA Experiment 20000173 PARAMETER Experiment Name: At_42deg_Heat_P Parameter: Age (day) Value: 14
  misc_feature: MA Experiment 20000173 PARAMETER Experiment Name: At_42deg_Heat_P Parameter: Organism Value: A. thaliana
  misc_feature: MA Experiment 20000173 PARAMETER Experiment Name: At_42deg_Heat_P Parameter: Plant Line Value: WS
  misc_feature: MA Experiment 20000173 PARAMETER Experiment Name: At_42deg_Heat_P Parameter: Temperature (deg C) Value: 42 vs. 22
  misc_feature: MA Experiment 20000173 PARAMETER Experiment Name: At_42deg_Heat_P Parameter: Timepoint (hr) Value: 6
  misc_feature: MA Experiment 20000173 PARAMETER Experiment Name: At_42deg_Heat_P Parameter: Tissue Value: Aerial
  misc_feature: MA Experiment ID: 20000182 Result: Up-regulated in Transcription
  misc_feature: MA Experiment 20000182 PARAMETER Experiment Name: At_2mM_SA_P Parameter: Age (day) Value: 14
  misc_feature: MA Experiment 20000182 PARAMETER Experiment Name: At_2mM_SA_P Parameter: Organism Value: A. thaliana
  misc_feature: MA Experiment 20000182 PARAMETER Experiment Name: At_2mM_SA_P Parameter: Plant Line Value: WS
  misc_feature: MA Experiment 20000182 PARAMETER Experiment Name: At_2mM_SA_P Parameter: Timepoint (hr) Value: 6
  misc_feature: MA Experiment 20000182 PARAMETER Experiment Name: At_2mM_SA_P Parameter: Tissue Value: Aerial
  misc_feature: MA Experiment 20000182 PARAMETER Experiment Name: At_2mM_SA_P Parameter: Treatment Value: 2mM SA vs. No Treatment
  misc_feature: MA Experiment ID: 20000185 Result: Up-regulated in Transcription
  misc_feature: MA Experiment 20000185 PARAMETER Experiment Name: At_Roots__P Parameter: Age (day) Value: 7 vs. 21
  misc_feature: MA Experiment 20000185 PARAMETER Experiment Name: At_Roots__P Parameter: Organism Value: A. thaliana
  misc_feature: MA Experiment 20000185 PARAMETER Experiment Name: At_Roots__P Parameter: Tissue Value: Roots vs. Whole Plant
  misc_feature: MA Experiment ID: 20000234 Result: Down-regulated in Transcription
  misc_feature: MA Experiment 20000234 PARAMETER Experiment Name: At_Siliques_P Parameter: Age (day) Value: 21
  misc_feature: MA Experiment 20000234 PARAMETER Experiment Name: At_Siliques_P Parameter: Organism Value: A. thaliana
  misc_feature: MA Experiment 20000234 PARAMETER Experiment Name: At_Siliques_P Parameter: Plant Line Value: WS
  misc_feature: MA Experiment 20000234 PARAMETER Experiment Name: At_Siliques_P Parameter: Tissue Value: Less Than 5mm Siliques vs. Whole Plant
  misc_feature: MA Experiment ID: 20000264 Result: Down-regulated in Transcription
  misc_feature: MA Experiment 20000264 PARAMETER Experiment Name: At_Open_Flower_P Parameter: Age (day) Value: 21
  misc_feature: MA Experiment 20000264 PARAMETER Experiment Name: At_Open_Flower_P Parameter: Plant Line Value: WS
  misc_feature: MA Experiment 20000264 PARAMETER Experiment Name: At_Open_Flower_P Parameter: Tissue Value: Open Flower vs. Whole Plant
  misc_feature: MA Experiment ID: 20000265 Result: Down-regulated in Transcription
  misc_feature: MA Experiment 20000265 PARAMETER Experiment Name: At_Open_Flower_P Parameter: Age (day) Value: 21
  misc_feature: MA Experiment 20000265 PARAMETER Experiment Name: At_Open_Flower_P Parameter: Plant Line Value: WS
  misc_feature: MA Experiment 20000265 PARAMETER Experiment Name: At_Open_Flower_P Parameter: Tissue Value: Closed Flower vs. Whole Plant
  misc_feature: MA Experiment ID: 20000439 Result: Up-regulated in Transcription
  misc_feature: MA Experiment 20000439 PARAMETER Experiment Name: At_Roots__P Parameter: Age (day) Value: 14 vs. 21
  misc_feature: MA Experiment 20000439 PARAMETER Experiment Name: At_Roots__P Parameter: Organism Value: A. thaliana
  misc_feature: MA Experiment 20000439 PARAMETER Experiment Name: At_Roots__P Parameter: Tissue Value: Roots vs. Whole Plant
  misc_feature: MA Experiment ID: 20000453 Result: Up-regulated in Transcription
  misc_feature: MA Experiment 20000453 PARAMETER Experiment Name: At_100uM_ABA_P Parameter: Age (day) Value: 15
  misc_feature: MA Experiment 20000453 PARAMETER Experiment Name: At_100uM_ABA_P Parameter: Organism Value: A. thaliana
  misc_feature: MA Experiment 20000453 PARAMETER Experiment Name: At_100uM_ABA_P Parameter: Plant Line Value: WS
  misc_feature: MA Experiment 20000453 PARAMETER Experiment Name: At_100uM_ABA_P Parameter: Timepoint (hr) Value: 24
  misc_feature: MA Experiment 20000453 PARAMETER Experiment Name: At_100uM_ABA_P Parameter: Tissue Value: Aerial
  misc_feature: MA Experiment 20000453 PARAMETER Experiment Name: At_100uM_ABA_P Parameter: Treatment Value: 100uM ABA vs. No Treatment
  misc_feature: MA Experiment ID: 20000709 Result: Up-regulated in Transcription
  misc_feature: MA Experiment 20000709 PARAMETER Experiment Name: At_15mM_NH4NO3_L-to-H_P Parameter: Age (hr) Value: 14
  misc_feature: MA Experiment 20000709 PARAMETER Experiment Name: At_15mM_NH4NO3_L-to-H_P Parameter: Organism Value: A. thaliana
  misc_feature: MA Experiment 20000709 PARAMETER Experiment Name: At_15mM_NH4NO3_L-to-H_P Parameter: Plant Line Value: WS
  misc_feature: MA Experiment 20000709 PARAMETER Experiment Name: At_15mM_NH4NO3_L-to-H_P Parameter: Timepoint (hr) Value: 4
  misc_feature: MA Experiment 20000709 PARAMETER Experiment Name: At_15mM_NH4NO3_L-to-H_P Parameter: Tissue Value: Aerial
  misc_feature: MA Experiment 20000709 PARAMETER Experiment Name: At_15mM_NH4NO3_L-to-H_P Parameter: Treatment Value: 15mM NH4NO3 vs. 30mM Mannitol
  misc_feature: MA Experiment ID: 20001247 Result: Up-regulated in Transcription
  misc_feature: MA Experiment 20001247 PARAMETER Experiment Name: At_Far-red-induction_P Parameter: Age (day) Value: 7
  misc_feature: MA Experiment 20001247 PARAMETER Experiment Name: At_Far-red-induction_P Parameter: Light Value: Far-red vs. White
  misc_feature: MA Experiment 20001247 PARAMETER Experiment Name: At_Far-red-induction_P Parameter: Organism Value: A. thaliana
  misc_feature: MA Experiment 20001247 PARAMETER Experiment Name: At_Far-red-induction_P Parameter: Plant Line Value: Columbia
  misc_feature: MA Experiment 20001247 PARAMETER Experiment Name: At_Far-red-induction_P Parameter: Timepoint (hr) Value: 1
  misc_feature: MA Experiment 20001247 PARAMETER Experiment Name: At_Far-red-induction_P Parameter: Tissue Value: Whole Plant
  misc_feature: MA Experiment ID: 20001248 Result: Up-regulated in Transcription
  misc_feature: MA Experiment 20001248 PARAMETER Experiment Name: At_Far-red-induction_P Parameter: Age (day) Value: 7
  misc_feature: MA Experiment 20001248 PARAMETER Experiment Name: At_Far-red-induction_P Parameter: Light Value: Far-red vs. White
  misc_feature: MA Experiment 20001248 PARAMETER Experiment Name: At_Far-red-induction_P Parameter: Organism Value: A. thaliana
  misc_feature: MA Experiment 20001248 PARAMETER Experiment Name: At_Far-red-induction_P Parameter: Plant Line Value: Columbia
  misc_feature: MA Experiment 20001248 PARAMETER Experiment Name: At_Far-red-induction_P Parameter: Timepoint (hr) Value: 4
  misc_feature: MA Experiment 20001248 PARAMETER Experiment Name: At_Far-red-induction_P Parameter: Tissue Value: Whole Plant
  misc_feature: MA Experiment ID: 20001450 Result: Up-regulated in Transcription
  misc_feature: MA Experiment 20001450 PARAMETER Experiment Name: At_Far-red-induction_P Parameter: Age (day) Value: 7
  misc_feature: MA Experiment 20001450 PARAMETER Experiment Name: At_Far-red-induction_P Parameter: Light Value: Far-red vs. White
  misc_feature: MA Experiment 20001450 PARAMETER Experiment Name: At_Far-red-induction_P Parameter: Organism Value: A. thaliana
  misc_feature: MA Experiment 20001450 PARAMETER Experiment Name: At_Far-red-induction_P Parameter: Plant Line Value: Columbia
  misc_feature: MA Experiment 20001450 PARAMETER Experiment Name: At_Far-red-induction_P Parameter: Timepoint (hr) Value: 8
  misc_feature: MA Experiment 20001450 PARAMETER Experiment Name: At_Far-red-induction_P Parameter: Tissue Value: Whole Plant
  misc_feature: MA Experiment ID: 20001451 Result: Up-regulated in Transcription
  misc_feature: MA Experiment 20001451 PARAMETER Experiment Name: At_Far-red-induction_P Parameter: Age (day) Value: 7
  misc_feature: MA Experiment 20001451 PARAMETER Experiment Name: At_Far-red-induction_P Parameter: Light Value: Far-red vs. White
  misc_feature: MA Experiment 20001451 PARAMETER Experiment Name: At_Far-red-induction_P Parameter: Organism Value: A. thaliana
  misc_feature: MA Experiment 20001451 PARAMETER Experiment Name: At_Far-red-induction_P Parameter: Plant Line Value: Columbia
  misc_feature: MA Experiment 20001451 PARAMETER Experiment Name: At_Far-red-induction_P Parameter: Timepoint (hr) Value: 24
  misc_feature: MA Experiment 20001451 PARAMETER Experiment Name: At_Far-red-induction_P Parameter: Tissue Value: Whole Plant
  misc_feature: MA Experiment ID: 20001905 Result: Up-regulated in Transcription
  misc_feature: MA Experiment 20001905 PARAMETER Experiment Name: At_Drought_Reproduction_P Parameter: Age (day) Value: 40
  misc_feature: MA Experiment 20001905 PARAMETER Experiment Name: At_Drought_Reproduction_P Parameter: Organism Value: A. thaliana
  misc_feature: MA Experiment 20001905 PARAMETER Experiment Name: At_Drought_Reproduction_P Parameter: Plant Line Value: WS
  misc_feature: MA Experiment 20001905 PARAMETER Experiment Name: At_Drought_Reproduction_P Parameter: Timepoint (day) Value: 10
  misc_feature: MA Experiment 20001905 PARAMETER Experiment Name: At_Drought_Reproduction_P Parameter: Tissue Value: Rosettes
  misc_feature: MA Experiment 20001905 PARAMETER Experiment Name: At_Drought_Reproduction_P Parameter: Treatment Value: Drought vs. No Drought
gatcacaacaaatcaaaaactccaagttcttacctttttcccatttacaatcagtaaatttctccgatcacgagatacaaatttcactttctgatatcttggatcttccgatcactttgaattttttggtttgttgatttttttttttttttttgttccataaagttcgaattttttatagagaagaaaccatgaatgctttagctgcaacaaacagaaacttccgtcatgcatctcgaatcctgggtttggattcgaagatcgagagaagtcttatgatcccatttagagaaatcaaggttgagtgtacgattcctaaagacgatggcactctggtttcatacatcggatttagggttcaacatgacaatgctcgtggacccatgaaaggtggaatcagatatcatcctgaggttgatccagatgaagttaacgcactagctcagctgatgacttggaagactgctgtagcagatattccatatggtggtgctaaaggtggaattggatgtagtcctcgtgacttgagtttgagcgagcttgagaggttgactcgtgtgtttacacagaagattcatgatcttatcggtattcataccgatgtgcctgctcctgatatgggcactaacgctcaaaccatggcttggattcttgatgagtactccaagtttcatggtcattcccctgctgttgtcactggaaagcccattgatcttggtggttcattaggtagggaagctgccacaggtcgtggtgtagtatttgccaccgaagctcttcttgctgagtacgggaaatcgattcagggtttgacatttgttattcagggttttgggaatgttggaacatgggctgcgaagctgatccacgagaaaggcggtaaagtggttgcagtaagcgacattactggtgcaatcaggaaccttgaaggtatcgacatcaacgctctcataaaacacaaggacgcaactggaagtctcaatgatttcaatggtggagacgctatgaattcagatgaattgctcattcatgagtgtgatgttctcattccatgcgctcttggtggtgtcctgaacaaggaaaatgctggagatgtgaaggcaaagtttatagtagaggcagctaaccatccaacagatccagatgctgatgagattctgtcgaagaaaggagtgattatacttccagatatctacgcaaacgcaggaggagtgacagtgagttacttcgagtgggtgcagaacattcaaggattcatgtgggaagaggaaaaagtgaacttggagctgcaaaaatacatgactcgagcctttcacaacatcaagacaatgtgccatactcattcttgcaacctccgtatgggagctttcactcttggagttaaccgagtcgctcgagccacccagttgcgtggttgggaagcttaattcagttgaatcccccttatatactctgtttcttgcttgctctgttttccatttttttttttttttttggtttcattgttactgaaaatcattgagctttccgaaatggaaaaggaaacaaatggattg

SEQ ID NO: 46349 - protein, 411 aa, Arabidopsis thaliana
  peptide (1)..(411): Ceres Seq. ID no. 15168944
  misc_feature (176)..(408): Pfam Name: Glutamate/Leucine/Phenylalanine/Valine dehydrogenase Pfam Description: Glutamate/Leucine/Phenylalanine/Valine
  misc_feature (1)..(411): Homolog of NCBI NO: 21314959 NR Description: NADH-glutamate dehydrogenase [Lycopersicon
  misc_feature (1)..(411): Homolog of NCBI NO: 1931629 NR Description: glutamate dehydrogenase mutant [Zea mays]
  misc_feature (1)..(411): Homolog of NCBI NO: 7431775 NR Description: glutamate dehydrogenase (EC 1.4.1.2) - maize
  misc_feature (1)..(411): Homolog of NCBI NO: 12643763 NR Description: Glutamate dehydrogenase (GDH)
  misc_feature (1)..(411): Homolog of NCBI NO: 32488960 NR Description: OSJNBb0038F03.5 [Oryza sativa (japonica
  misc_feature (1)..(411): Homolog of NCBI NO: 1706403 NR Description: GLUTAMATE DEHYDROGENASE (GDH)
  misc_feature (1)..(411): Homolog of NCBI NO: 11691872 NR Description: NADH glutamate dehydrogenase [Vitis vinifera]
  misc_feature (1)..(411): Homolog of NCBI NO: 12229785 NR Description: Glutamate dehydrogenase A (GDH A)
  misc_feature (1)..(411): Homolog of NCBI NO: 15004984 NR Description: glutamate dehydrogenase [Brassica napus]
  misc_feature (1)..(411): Homolog of NCBI NO: 15240793 NR Description: glutamate dehydrogenase 2 [Arabidopsis thaliana]
MNALAATNRNFRHASRILGLDSKIERSLMIPFREIKVECTIPKDDGTLVSYIGFRVQHDNARGPMKGGIRYHPEVDPDEVNALAQLMTWKTAVADIPYGGAKGGIGCSPRDLSLSELERLTRVFTQKIHDLIGIHTDVPAPDMGTNAQTMAWILDEYSKFHGHSPAVVTGKPIDLGGSLGREAATGRGVVFATEALLAEYGKSIQGLTFVIQGFGNVGTWAAKLIHEKGGKVVAVSDITGAIRNLEGIDINALIKHKDATGSLNDFNGGDAMNSDELLIHECDVLIPCALGGVLNKENAGDVKAKFIVEAANHPTDPDADEILSKKGVIILPDIYANAGGVTVSYFEWVQNIQGFMWEEEKVNLELQKYMTRAFHNIKTMCHTHSCNLRMGAFTLGVNRVARATQLRGWEA

SEQ ID NO: 46350 - protein, 383 aa, Arabidopsis thaliana
  peptide (1)..(383): Ceres Seq. ID no. 15168945
  misc_feature (148)..(380): Pfam Name: Glutamate/Leucine/Phenylalanine/Valine dehydrogenase Pfam Description: Glutamate/Leucine/Phenylalanine/Valine
  misc_feature (1)..(383): Homolog of NCBI NO: 21314959 NR Description: NADH-glutamate dehydrogenase [Lycopersicon
  misc_feature (1)..(383): Homolog of NCBI NO: 1931629 NR Description: glutamate dehydrogenase mutant [Zea mays]
  misc_feature (1)..(383): Homolog of NCBI NO: 7431775 NR Description: glutamate dehydrogenase (EC 1.4.1.2) - maize
  misc_feature (1)..(383): Homolog of NCBI NO: 12643763 NR Description: Glutamate dehydrogenase (GDH)
  misc_feature (1)..(383): Homolog of NCBI NO: 32488960 NR Description: OSJNBb0038F03.5 [Oryza sativa (japonica
  misc_feature (1)..(383): Homolog of NCBI NO: 1706403 NR Description: GLUTAMATE DEHYDROGENASE (GDH)
  misc_feature (1)..(383): Homolog of NCBI NO: 11691872 NR Description: NADH glutamate dehydrogenase [Vitis vinifera]
  misc_feature (1)..(383): Homolog of NCBI NO: 12229785 NR Description: Glutamate dehydrogenase A (GDH A)
  misc_feature (1)..(383): Homolog of NCBI NO: 15004984 NR Description: glutamate dehydrogenase [Brassica napus]
  misc_feature (1)..(383): Homolog of NCBI NO: 15240793 NR Description: glutamate dehydrogenase 2 [Arabidopsis thaliana]
MIPFREIKVECTIPKDDGTLVSYIGFRVQHDNARGPMKGGIRYHPEVDPDEVNALAQLMTWKTAVADIPYGGAKGGIGCSPRDLSLSELERLTRVFTQKIHDLIGIHTDVPAPDMGTNAQTMAWILDEYSKFHGHSPAVVTGKPIDLGGSLGREAATGRGVVFATEALLAEYGKSIQGLTFVIQGFGNVGTWAAKLIHEKGGKVVAVSDITGAIRNLEGIDINALIKHKDATGSLNDFNGGDAMNSDELLIHECDVLIPCALGGVLNKENAGDVKAKFIVEAANHPTDPDADEILSKKGVIILPDIYANAGGVTVSYFEWVQNIQGFMWEEEKVNLELQKYMTRAFHNIKTMCHTHSCNLRMGAFTLGVNRVARATQLRGWEA

SEQ ID NO: 46351 - protein, 347 aa, Arabidopsis thaliana
  peptide (1)..(347): Ceres Seq. ID no. 15168946
  misc_feature (112)..(344): Pfam Name: Glutamate/Leucine/Phenylalanine/Valine dehydrogenase Pfam Description: Glutamate/Leucine/Phenylalanine/Valine
  misc_feature (1)..(347): Homolog of NCBI NO: 21314959 NR Description: NADH-glutamate dehydrogenase [Lycopersicon
  misc_feature (1)..(347): Homolog of NCBI NO: 1931629 NR Description: glutamate dehydrogenase mutant [Zea mays]
  misc_feature (1)..(347): Homolog of NCBI NO: 7431775 NR Description: glutamate dehydrogenase (EC 1.4.1.2) - maize
  misc_feature (1)..(347): Homolog of NCBI NO: 12643763 NR Description: Glutamate dehydrogenase (GDH)
  misc_feature (1)..(347): Homolog of NCBI NO: 32488960 NR Description: OSJNBb0038F03.5 [Oryza sativa (japonica
  misc_feature (1)..(347): Homolog of NCBI NO: 1706403 NR Description: GLUTAMATE DEHYDROGENASE (GDH)
  misc_feature (1)..(347): Homolog of NCBI NO: 11691872 NR Description: NADH glutamate dehydrogenase [Vitis vinifera]
  misc_feature (1)..(347): Homolog of NCBI NO: 12229785 NR Description: Glutamate dehydrogenase A (GDH A)
  misc_feature (1)..(347): Homolog of NCBI NO: 15004984 NR Description: glutamate dehydrogenase [Brassica napus]
  misc_feature (1)..(347): Homolog of NCBI NO: 15240793 NR Description: glutamate dehydrogenase 2 [Arabidopsis thaliana]
MKGGIRYHPEVDPDEVNALAQLMTWKTAVADIPYGGAKGGIGCSPRDLSLSELERLTRVFTQKIHDLIGIHTDVPAPDMGTNAQTMAWILDEYSKFHGHSPAVVTGKPIDLGGSLGREAATGRGVVFATEALLAEYGKSIQGLTFVIQGFGNVGTWAAKLIHEKGGKVVAVSDITGAIRNLEGIDINALIKHKDATGSLNDFNGGDAMNSDELLIHECDVLIPCALGGVLNKENAGDVKAKFIVEAANHPTDPDADEILSKKGVIILPDIYANAGGVTVSYFEWVQNIQGFMWEEEKVNLELQKYMTRAFHNIKTMCHTHSCNLRMGAFTLGVNRVARATQLRGWEA

SEQ ID NO: 46352 - DNA, 1809 bp, Arabidopsis thaliana; identical to SEQ ID NO: 23714
  misc_feature (1)..(1809): Ceres Seq. ID no. 13591810
  misc_feature: MA Experiment ID: 108434 Result: Down-regulated in Transcription
  misc_feature: MA Experiment 108434 PARAMETER Experiment Name: At_Root_Tips_cDNA_P Parameter: Tissue Value: Root Tips
  misc_feature: MA Experiment ID: 108461 Result: Up-regulated in Transcription
  misc_feature: MA Experiment 108461 PARAMETER Experiment Name: At_Germinating_Seeds_cDNA_P Parameter: Age (day) Value: 1 vs. 0
  misc_feature: MA Experiment 108461 PARAMETER Experiment Name: At_Germinating_Seeds_cDNA_P Parameter: Tissue Value: Germinating Seeds
  misc_feature: MA Experiment ID: 108462 Result: Up-regulated in Transcription
  misc_feature: MA Experiment 108462 PARAMETER Experiment Name: At_Germinating_Seeds_cDNA_P Parameter: Age (day) Value: 2 vs. 0
  misc_feature: MA Experiment 108462 PARAMETER Experiment Name: At_Germinating_Seeds_cDNA_P Parameter: Tissue Value: Germinating Seeds
  misc_feature: MA Experiment ID: 108463 Result: Up-regulated in Transcription
  misc_feature: MA Experiment 108463 PARAMETER Experiment Name: At_Germinating_Seeds_cDNA_P Parameter: Age (day) Value: 3 vs. 0
  misc_feature: MA Experiment 108463 PARAMETER Experiment Name: At_Germinating_Seeds_cDNA_P Parameter: Tissue Value: Germinating Seeds
  misc_feature: MA Experiment ID: 108577 Result: Down-regulated in Transcription
  misc_feature: MA Experiment 108577 PARAMETER Experiment Name: At_42deg_Heat_cDNA_P Parameter: Temperature (deg C) Value: 42 vs. 22
  misc_feature: MA Experiment 108577 PARAMETER Experiment Name: At_42deg_Heat_cDNA_P Parameter: Timepoint (hr) Value: 6
  misc_feature: MA Experiment 108577 PARAMETER Experiment Name: At_42deg_Heat_cDNA_P Parameter: Tissue Value: Aerial
  misc_feature: MA Experiment ID: 20000180 Result: Up-regulated in Transcription
  misc_feature: MA Experiment 20000180 PARAMETER Experiment Name: At_Germinating_Seeds_P Parameter: Age (hr) Value: 24 vs. 0
  misc_feature: MA Experiment 20000180 PARAMETER Experiment Name: At_Germinating_Seeds_P Parameter: Tissue Value: Germinating Seeds
  misc_feature: MA Experiment ID: 20000185 Result: Down-regulated in Transcription
  misc_feature: MA Experiment 20000185 PARAMETER Experiment Name: At_Roots__P Parameter: Age (day) Value: 7 vs. 21
  misc_feature: MA Experiment 20000185 PARAMETER Experiment Name: At_Roots__P Parameter: Organism Value: A. thaliana
  misc_feature: MA Experiment 20000185 PARAMETER Experiment Name: At_Roots__P Parameter: Tissue Value: Roots vs. Whole Plant
  misc_feature: MA Experiment ID: 20000224 Result: Up-regulated in Transcription
  misc_feature: MA Experiment ID: 20000234 Result: Up-regulated in Transcription
  misc_feature: MA Experiment 20000234 PARAMETER Experiment Name: At_Siliques_P Parameter: Age (day) Value: 21
  misc_feature: MA Experiment 20000234 PARAMETER Experiment Name: At_Siliques_P Parameter: Organism Value: A. thaliana
  misc_feature: MA Experiment 20000234 PARAMETER Experiment Name: At_Siliques_P Parameter: Plant Line Value: WS
  misc_feature: MA Experiment 20000234 PARAMETER Experiment Name: At_Siliques_P Parameter: Tissue Value: Less Than 5mm Siliques vs. Whole Plant
  misc_feature: MA Experiment ID: 20000235 Result: Up-regulated in Transcription
  misc_feature: MA Experiment 20000235 PARAMETER Experiment Name: At_Siliques_P Parameter: Age (day) Value: 21
  misc_feature: MA Experiment 20000235 PARAMETER Experiment Name: At_Siliques_P Parameter: Organism Value: A. thaliana
  misc_feature: MA Experiment 20000235 PARAMETER Experiment Name: At_Siliques_P Parameter: Plant Line Value: WS
  misc_feature: MA Experiment 20000235 PARAMETER Experiment Name: At_Siliques_P Parameter: Tissue Value: 5-10mm Siliques vs. Whole Plant
  misc_feature: MA Experiment ID: 20000265 Result: Up-regulated in Transcription
  misc_feature: MA Experiment 20000265 PARAMETER Experiment Name: At_Open_Flower_P Parameter: Age (day) Value: 21
  misc_feature: MA Experiment 20000265 PARAMETER Experiment Name: At_Open_Flower_P Parameter: Plant Line Value: WS
  misc_feature: MA Experiment 20000265 PARAMETER Experiment Name: At_Open_Flower_P Parameter: Tissue Value: Closed Flower vs. Whole Plant
  misc_feature: MA Experiment ID: 20000439 Result: Down-regulated in Transcription
  misc_feature: MA Experiment 20000439 PARAMETER Experiment Name: At_Roots__P Parameter: Age (day) Value: 14 vs. 21
  misc_feature: MA Experiment 20000439 PARAMETER Experiment Name: At_Roots__P Parameter: Organism Value: A. thaliana
  misc_feature: MA Experiment 20000439 PARAMETER Experiment Name: At_Roots__P Parameter: Tissue Value: Roots vs. Whole Plant
  misc_feature: MA Experiment ID: 20000573 Result: Down-regulated in Transcription
  misc_feature: MA Experiment 20000573 PARAMETER Experiment Name: At_100uM_ABA_Mutants__P Parameter: Organism Value: A. thaliana
  misc_feature: MA Experiment 20000573 PARAMETER Experiment Name: At_100uM_ABA_Mutants__P Parameter: Plant Line Value: CS22 vs. Ler wt
  misc_feature: MA Experiment 20000573 PARAMETER Experiment Name: At_100uM_ABA_Mutants__P Parameter: Timepoint (hr) Value: N/A
  misc_feature: MA Experiment 20000573 PARAMETER Experiment Name: At_100uM_ABA_Mutants__P Parameter: Tissue Value: Whole Plant
  misc_feature: MA Experiment 20000573 PARAMETER Experiment Name: At_100uM_ABA_Mutants__P Parameter: Treatment Value: None
  misc_feature: MA Experiment ID: 20000574 Result: Down-regulated in Transcription
  misc_feature: MA Experiment 20000574 PARAMETER Experiment Name: At_100uM_ABA_Mutants__P Parameter: Organism Value: A. thaliana
  misc_feature: MA Experiment 20000574 PARAMETER Experiment Name: At_100uM_ABA_Mutants__P Parameter: Plant Line Value: CS23 vs. Ler wt
  misc_feature: MA Experiment 20000574 PARAMETER Experiment Name: At_100uM_ABA_Mutants__P Parameter: Timepoint (hr) Value: N/A
  misc_feature: MA Experiment 20000574 PARAMETER Experiment Name: At_100uM_ABA_Mutants__P Parameter: Tissue Value: Whole Plant
  misc_feature: MA Experiment 20000574 PARAMETER Experiment Name: At_100uM_ABA_Mutants__P Parameter: Treatment Value: None
  misc_feature: MA Experiment ID: 20000794 Result: Up-regulated in Transcription
  misc_feature: MA Experiment 20000794 PARAMETER Experiment Name: At_Petals_P Parameter: Age (day) Value: 23-25 days
  misc_feature: MA Experiment 20000794 PARAMETER Experiment Name: At_Petals_P Parameter: Plant Line Value: WS
  misc_feature: MA Experiment 20000794 PARAMETER Experiment Name: At_Petals_P Parameter: Tissue Value: Petals vs. Whole plant
  misc_feature: MA Experiment ID: 20001451 Result: Down-regulated in Transcription
  misc_feature: MA Experiment 20001451 PARAMETER Experiment Name: At_Far-red-induction_P Parameter: Age (day) Value: 7
  misc_feature: MA Experiment 20001451 PARAMETER Experiment Name: At_Far-red-induction_P Parameter: Light Value: Far-red vs. White
  misc_feature: MA Experiment 20001451 PARAMETER Experiment Name: At_Far-red-induction_P Parameter: Organism Value: A. thaliana
  misc_feature: MA Experiment 20001451 PARAMETER Experiment Name: At_Far-red-induction_P Parameter: Plant Line Value: Columbia
  misc_feature: MA Experiment 20001451 PARAMETER Experiment Name: At_Far-red-induction_P Parameter: Timepoint (hr) Value: 24
  misc_feature: MA Experiment 20001451 PARAMETER Experiment Name: At_Far-red-induction_P Parameter: Tissue Value: Whole Plant
  misc_feature: MA Experiment ID: 20001557 Result: Down-regulated in Transcription
  misc_feature: MA Experiment 20001557 PARAMETER Experiment Name: At_Drought_Soil_Dry_P Parameter: Age (day) Value: 27
  misc_feature: MA Experiment 20001557 PARAMETER Experiment Name: At_Drought_Soil_Dry_P Parameter: Organism Value: A. thaliana
  misc_feature: MA Experiment 20001557 PARAMETER Experiment Name: At_Drought_Soil_Dry_P Parameter: Plant Line Value: WS
  misc_feature: MA Experiment 20001557 PARAMETER Experiment Name: At_Drought_Soil_Dry_P Parameter: Post Timepoint (hr) Value: 3
  misc_feature: MA Experiment 20001557 PARAMETER Experiment Name: At_Drought_Soil_Dry_P Parameter: Post-Treatment Value: Re-Water vs. No Drought
  misc_feature: MA Experiment 20001557 PARAMETER Experiment Name: At_Drought_Soil_Dry_P Parameter: Timepoint (day) Value: 13
  misc_feature: MA Experiment 20001557 PARAMETER Experiment Name: At_Drought_Soil_Dry_P Parameter: Treatment Value: Drought vs. No Drought
  misc_feature: MA Experiment ID: 20001558 Result: Down-regulated in Transcription
  misc_feature: MA Experiment 20001558 PARAMETER Experiment Name: At_Drought_Soil_Dry_P Parameter: Age (day) Value: 27
  misc_feature: MA Experiment 20001558 PARAMETER Experiment Name: At_Drought_Soil_Dry_P Parameter: Organism Value: A. thaliana
  misc_feature: MA Experiment 20001558 PARAMETER Experiment Name: At_Drought_Soil_Dry_P Parameter: Plant Line Value: WS
  misc_feature: MA Experiment 20001558 PARAMETER Experiment Name: At_Drought_Soil_Dry_P Parameter: Post Timepoint (hr) Value: 6
  misc_feature: MA Experiment 20001558 PARAMETER Experiment Name: At_Drought_Soil_Dry_P Parameter: Post-Treatment Value: Re-Water vs. No Drought
  misc_feature: MA Experiment 20001558 PARAMETER Experiment Name: At_Drought_Soil_Dry_P Parameter: Timepoint (day) Value: 13
  misc_feature: MA Experiment 20001558 PARAMETER Experiment Name: At_Drought_Soil_Dry_P Parameter: Treatment Value: Drought vs. No Drought
  misc_feature: MA Experiment ID: 20001560 Result: Down-regulated in Transcription
  misc_feature: MA Experiment 20001560 PARAMETER Experiment Name: At_Drought_Soil_Dry_P Parameter: Age (day) Value: 28
  misc_feature: MA Experiment 20001560 PARAMETER Experiment Name: At_Drought_Soil_Dry_P Parameter: Organism Value: A. thaliana
  misc_feature: MA Experiment 20001560 PARAMETER Experiment Name: At_Drought_Soil_Dry_P Parameter: Plant Line Value: WS
  misc_feature: MA Experiment 20001560 PARAMETER Experiment Name: At_Drought_Soil_Dry_P Parameter: Post Timepoint (hr) Value: None
  misc_feature: MA Experiment 20001560 PARAMETER Experiment Name: At_Drought_Soil_Dry_P Parameter: Post-Treatment Value: None
  misc_feature: MA Experiment 20001560 PARAMETER Experiment Name: At_Drought_Soil_Dry_P Parameter: Timepoint (day) Value: 14
  misc_feature: MA Experiment 20001560 PARAMETER Experiment Name: At_Drought_Soil_Dry_P Parameter: Treatment Value: Drought vs. No Drought
  misc_feature: MA Experiment ID: 20001757 Result: Up-regulated in Transcription
  misc_feature: MA Experiment 20001757 PARAMETER Experiment Name: At_50mM_NH4NO3_L-to-H_P Parameter: Timepoint (hr) Value: 6
  misc_feature: MA Experiment 20001757 PARAMETER Experiment Name: At_50mM_NH4NO3_L-to-H_P Parameter: Tissue Value: Leaf
  misc_feature: MA Experiment 20001757 PARAMETER Experiment Name: At_50mM_NH4NO3_L-to-H_P Parameter: Treatment Value: 50mM NH4NO3 vs 100mM Mannitol
  misc_feature: MA Experiment ID: 20001904 Result: Down-regulated in Transcription
  misc_feature: MA Experiment 20001904 PARAMETER Experiment Name: At_Drought_Reproduction_P Parameter: Age (day) Value: 37
  misc_feature: MA Experiment 20001904 PARAMETER Experiment Name: At_Drought_Reproduction_P Parameter: Organism Value: A. thaliana
  misc_feature: MA Experiment 20001904 PARAMETER Experiment Name: At_Drought_Reproduction_P Parameter: Plant Line Value: WS
  misc_feature: MA Experiment 20001904 PARAMETER Experiment Name: At_Drought_Reproduction_P Parameter: Timepoint (day) Value: 7
  misc_feature: MA Experiment 20001904 PARAMETER Experiment Name: At_Drought_Reproduction_P Parameter: Tissue Value: Rosettes
  misc_feature: MA Experiment 20001904 PARAMETER Experiment Name: At_Drought_Reproduction_P Parameter: Treatment Value: Drought vs. No Drought
  misc_feature: MA Experiment ID: 20001905 Result: Down-regulated in Transcription
  misc_feature: MA Experiment 20001905 PARAMETER Experiment Name: At_Drought_Reproduction_P Parameter: Age (day) Value: 40
  misc_feature: MA Experiment 20001905 PARAMETER Experiment Name: At_Drought_Reproduction_P Parameter: Organism Value: A. thaliana
  misc_feature: MA Experiment 20001905 PARAMETER Experiment Name: At_Drought_Reproduction_P Parameter: Plant Line Value: WS
  misc_feature: MA Experiment 20001905 PARAMETER Experiment Name: At_Drought_Reproduction_P Parameter: Timepoint (day) Value: 10
  misc_feature: MA Experiment 20001905 PARAMETER Experiment Name: At_Drought_Reproduction_P Parameter: Tissue Value: Rosettes
  misc_feature: MA Experiment 20001905 PARAMETER Experiment Name: At_Drought_Reproduction_P Parameter: Treatment Value: Drought vs. No Drought
  misc_feature: MA Experiment ID: 20001906 Result: Down-regulated in Transcription
  misc_feature: MA Experiment 20001906 PARAMETER Experiment Name: At_Drought_Reproduction_P Parameter: Age (day) Value: 35
  misc_feature: MA Experiment 20001906 PARAMETER Experiment Name: At_Drought_Reproduction_P Parameter: Organism Value: A. thaliana
  misc_feature: MA Experiment 20001906 PARAMETER Experiment Name: At_Drought_Reproduction_P Parameter: Plant Line Value: WS
  misc_feature: MA Experiment 20001906 PARAMETER Experiment Name: At_Drought_Reproduction_P Parameter: Timepoint (day) Value: 5
  misc_feature: MA Experiment 20001906 PARAMETER Experiment Name: At_Drought_Reproduction_P Parameter: Tissue Value: Siliques
  misc_feature: MA Experiment 20001906 PARAMETER Experiment Name: At_Drought_Reproduction_P Parameter: Treatment Value: Drought vs. No Drought
  misc_feature: MA Experiment ID: 20001908 Result: Down-regulated in Transcription
  misc_feature: MA Experiment 20001908 PARAMETER Experiment Name: At_Drought_Reproduction_P Parameter: Age (day) Value: 40
  misc_feature: MA Experiment 20001908 PARAMETER Experiment Name: At_Drought_Reproduction_P Parameter: Organism Value: A. thaliana
  misc_feature: MA Experiment 20001908 PARAMETER Experiment Name: At_Drought_Reproduction_P Parameter: Plant Line Value: WS
  misc_feature: MA Experiment 20001908 PARAMETER Experiment Name: At_Drought_Reproduction_P Parameter: Timepoint (day) Value: 10
  misc_feature: MA Experiment 20001908 PARAMETER Experiment Name: At_Drought_Reproduction_P Parameter: Tissue Value: Siliques
  misc_feature: MA Experiment 20001908 PARAMETER Experiment Name: At_Drought_Reproduction_P Parameter: Treatment Value: Drought vs. No Drought

SEQ ID NO: 46353 - protein, 541 aa, Arabidopsis thaliana; identical to SEQ ID NO: 23715
  peptide (1)..(541): Ceres Seq. ID no. 13591811
  misc_feature (1)..(541): Homolog of NCBI NO: 11034736 NR Description: myrosinase [Raphanus sativus]
  misc_feature (2)..(538): Homolog of NCBI NO: 27261134 NR Description: carboxypeptidase Y/myrosinase fusion protein
  misc_feature (1)..(538): Homolog of NCBI NO: 13605680 NR Description: AT5g25980/T1N24_18 [Arabidopsis thaliana]
  misc_feature (1)..(541): Homolog of NCBI NO: 127733 NR Description: Myrosinase precursor (Sinigrinase)
  misc_feature (1)..(538): Homolog of NCBI NO: 1362007 NR Description: thioglucosidase (EC 3.2.1.147) 2 - Arabidopsis
  misc_feature (1)..(538): Homolog of NCBI NO: 18420974 NR Description: glycosyl hydrolase family 1 [Arabidopsis
  misc_feature (1)..(456): Homolog of NCBI NO: 30690089 NR Description: glycosyl hydrolase family 1, myrosinase precursor
  misc_feature (1)..(541): Homolog of NCBI NO: 15809938 NR Description: AT5g26000/T1N24_7 [Arabidopsis thaliana]
  misc_feature (1)..(541): Homolog of NCBI NO: 16648811 NR Description: AT5g26000/T1N24_7 [Arabidopsis thaliana]
  misc_feature (1)..(541): Homolog of NCBI NO: 30690085 NR Description: glycosyl hydrolase family 1, myrosinase precursor
  misc_feature (1)..(541): Homolog of NCBI NO: 11034736 NR Description: myrosinase [Raphanus sativus]
  misc_feature (2)..(538): Homolog of NCBI NO: 27261134 NR Description: carboxypeptidase Y/myrosinase fusion protein
  misc_feature (1)..(538): Homolog of NCBI NO: 13605680 NR Description: AT5g25980/T1N24_18 [Arabidopsis thaliana]
  misc_feature (1)..(541): Homolog of NCBI NO: 127733 NR Description: Myrosinase precursor (Sinigrinase)
  misc_feature (1)..(538): Homolog of NCBI NO: 1362007 NR Description: thioglucosidase (EC 3.2.1.147) 2 - Arabidopsis
  misc_feature (1)..(538): Homolog of NCBI NO: 18420974 NR Description: glycosyl hydrolase family 1 [Arabidopsis
  misc_feature (1)..(456): Homolog of NCBI NO: 30690089 NR Description: glycosyl hydrolase family 1, myrosinase precursor
  misc_feature (1)..(541): Homolog of NCBI NO: 15809938 NR Description: AT5g26000/T1N24_7 [Arabidopsis thaliana]
  misc_feature (1)..(541): Homolog of NCBI NO: 16648811 NR Description: AT5g26000/T1N24_7 [Arabidopsis thaliana]
  misc_feature (1)..(541): Homolog of NCBI NO: 30690085 NR Description: glycosyl hydrolase family 1, myrosinase precursor
  misc_feature (1)..(541): Homolog of NCBI NO: 30690085 NR Description: glycosyl hydrolase family 1, myrosinase precursor
  misc_feature (1)..(541): Homolog of NCBI NO: 15809938 NR Description: AT5g26000/T1N24_7 [Arabidopsis thaliana]
  misc_feature (1)..(541): Homolog of NCBI NO: 16648811 NR Description: AT5g26000/T1N24_7 [Arabidopsis thaliana]
  misc_feature (1)..(541): Homolog of NCBI NO: 11034736 NR Description: myrosinase [Raphanus sativus]
  misc_feature (2)..(538): Homolog of NCBI NO: 27261134 NR Description: carboxypeptidase Y/myrosinase fusion protein
  misc_feature (1)..(538): Homolog of NCBI NO: 13605680 NR Description: AT5g25980/T1N24_18 [Arabidopsis thaliana]
  misc_feature (1)..(541): Homolog of NCBI NO: 127733 NR Description: Myrosinase precursor (Sinigrinase)
  misc_feature (1)..(538): Homolog of NCBI NO: 1362007 NR Description: thioglucosidase (EC 3.2.1.147) 2 - Arabidopsis
  misc_feature (1)..(538): Homolog of NCBI NO: 18420974 NR Description: glycosyl hydrolase family 1 [Arabidopsis
  misc_feature (1)..(456): Homolog of NCBI NO: 30690089 NR Description: glycosyl hydrolase family 1, myrosinase precursor

SEQ ID NO: 46354 - protein, 537 aa, Arabidopsis thaliana; identical to SEQ ID NO: 23716
  peptide (1)..(537): Ceres Seq. ID no. 13591812
  misc_feature (1)..(537): Homolog of NCBI NO: 11034736 NR Description: myrosinase [Raphanus sativus]
  misc_feature (1)..(534): Homolog of NCBI NO: 27261134 NR Description: carboxypeptidase Y/myrosinase fusion protein
  misc_feature (1)..(534): Homolog of NCBI NO: 13605680 NR Description: AT5g25980/T1N24_18 [Arabidopsis thaliana]
  misc_feature (1)..(537): Homolog of NCBI NO: 127733 NR Description: Myrosinase precursor (Sinigrinase)
  misc_feature (1)..(534): Homolog of NCBI NO: 1362007 NR Description: thioglucosidase (EC 3.2.1.147) 2 - Arabidopsis
  misc_feature (1)..(534): Homolog of NCBI NO: 18420974 NR Description: glycosyl hydrolase family 1 [Arabidopsis
  misc_feature (1)..(452): Homolog of NCBI NO: 30690089 NR Description: glycosyl hydrolase family 1, myrosinase precursor
  misc_feature (1)..(537): Homolog of NCBI NO: 15809938 NR Description: AT5g26000/T1N24_7 [Arabidopsis thaliana]
  misc_feature (1)..(537): Homolog of NCBI NO: 16648811 NR Description: AT5g26000/T1N24_7 [Arabidopsis thaliana]
  misc_feature (1)..(537): Homolog of NCBI NO: 30690085 NR Description: glycosyl hydrolase family 1, myrosinase precursor
  misc_feature (1)..(537): Homolog of NCBI NO: 11034736 NR Description: myrosinase [Raphanus sativus]
  misc_feature (1)..(534): Homolog of NCBI NO: 27261134 NR Description: carboxypeptidase Y/myrosinase fusion protein
  misc_feature (1)..(534): Homolog of NCBI NO: 13605680 NR Description: AT5g25980/T1N24_18 [Arabidopsis thaliana]
  misc_feature (1)..(537): Homolog of NCBI NO: 127733 NR Description: Myrosinase precursor (Sinigrinase)
  misc_feature (1)..(534): Homolog of NCBI NO: 1362007 NR Description: thioglucosidase (EC 3.2.1.147) 2 - Arabidopsis
  misc_feature (1)..(534): Homolog of NCBI NO: 18420974 NR Description: glycosyl hydrolase family 1 [Arabidopsis
  misc_feature (1)..(452): Homolog of NCBI NO: 30690089 NR Description: glycosyl hydrolase family 1, myrosinase precursor
  misc_feature (1)..(537): Homolog of NCBI NO: 15809938 NR Description: AT5g26000/T1N24_7 [Arabidopsis thaliana]
  misc_feature (1)..(537): Homolog of NCBI NO: 16648811 NR Description: AT5g26000/T1N24_7 [Arabidopsis thaliana]
  misc_feature (1)..(537): Homolog of NCBI NO: 30690085 NR Description: glycosyl hydrolase family 1, myrosinase precursor
  misc_feature (1)..(537): Homolog of NCBI NO: 11034736 NR Description: myrosinase [Raphanus sativus]
  misc_feature (1)..(534): Homolog of NCBI NO: 27261134 NR Description: carboxypeptidase Y/myrosinase fusion protein
  misc_feature (1)..(534): Homolog of NCBI NO: 13605680 NR Description: AT5g25980/T1N24_18 [Arabidopsis thaliana]
  misc_feature (1)..(537): Homolog of NCBI NO: 127733 NR Description: Myrosinase precursor (Sinigrinase)
  misc_feature (1)..(534): Homolog of NCBI NO: 1362007 NR Description: thioglucosidase (EC 3.2.1.147) 2 - Arabidopsis
  misc_feature (1)..(534): Homolog of NCBI NO: 18420974 NR Description: glycosyl hydrolase family 1 [Arabidopsis
  misc_feature (1)..(452): Homolog of NCBI NO: 30690089 NR Description: glycosyl hydrolase family 1, myrosinase precursor
  misc_feature (1)..(537): Homolog of NCBI NO: 15809938 NR Description: AT5g26000/T1N24_7 [Arabidopsis thaliana]
  misc_feature (1)..(537): Homolog of NCBI NO: 16648811 NR Description: AT5g26000/T1N24_7 [Arabidopsis thaliana]
  misc_feature (1)..(537): Homolog of NCBI NO: 30690085 NR Description: glycosyl hydrolase family 1, myrosinase precursor

SEQ ID NO: 46355 - protein, 438 aa, Arabidopsis thaliana; identical to SEQ ID NO: 23717
  peptide (1)..(438): Ceres Seq. ID no. 13591813
  misc_feature (1)..(438): Homolog of NCBI NO: 11034736 NR Description: myrosinase [Raphanus sativus]
  misc_feature (1)..(435): Homolog of NCBI NO: 27261134 NR Description: carboxypeptidase Y/myrosinase fusion protein
  misc_feature (1)..(435): Homolog of NCBI NO: 13605680 NR Description: AT5g25980/T1N24_18 [Arabidopsis thaliana]
  misc_feature (1)..(438): Homolog of NCBI NO: 127733 NR Description: Myrosinase precursor (Sinigrinase)
  misc_feature (1)..(435): Homolog of NCBI NO: 1362007 NR Description: thioglucosidase (EC 3.2.1.147) 2 - Arabidopsis
  misc_feature (1)..(435): Homolog of NCBI NO: 18420974 NR Description: glycosyl hydrolase family 1 [Arabidopsis
  misc_feature (1)..(353): Homolog of NCBI NO: 30690089 NR Description: glycosyl hydrolase family 1, myrosinase precursor
  misc_feature (1)..(438): Homolog of NCBI NO: 15809938 NR Description: AT5g26000/T1N24_7 [Arabidopsis thaliana]
  misc_feature (1)..(438): Homolog of NCBI NO: 16648811 NR Description: AT5g26000/T1N24_7 [Arabidopsis thaliana]
  misc_feature (1)..(438): Homolog of NCBI NO: 30690085 NR Description: glycosyl hydrolase family 1, myrosinase precursor
  misc_feature (1)..(438): Homolog of NCBI NO: 11034736 NR Description: myrosinase [Raphanus sativus]
  misc_feature (1)..(435): Homolog of NCBI NO: 27261134 NR Description: carboxypeptidase Y/myrosinase fusion protein
  misc_feature (1)..(435): Homolog of NCBI NO: 13605680 NR Description: AT5g25980/T1N24_18 [Arabidopsis thaliana]
  misc_feature (1)..(438): Homolog of NCBI NO: 127733 NR Description: Myrosinase precursor (Sinigrinase)
  misc_feature (1)..(435): Homolog of NCBI NO: 1362007 NR Description: thioglucosidase (EC 3.2.1.147) 2 - Arabidopsis
  misc_feature (1)..(435): Homolog of NCBI NO: 18420974 NR Description: glycosyl hydrolase family 1 [Arabidopsis
  misc_feature (1)..(353): Homolog of NCBI NO: 30690089 NR Description: glycosyl hydrolase family 1, myrosinase precursor
  misc_feature (1)..(438): Homolog of NCBI NO: 15809938 NR Description: AT5g26000/T1N24_7 [Arabidopsis thaliana]
  misc_feature (1)..(438): Homolog of NCBI NO: 16648811 NR Description: AT5g26000/T1N24_7 [Arabidopsis thaliana]
  misc_feature (1)..(438): Homolog of NCBI NO: 30690085 NR Description: glycosyl hydrolase family 1, myrosinase precursor
  misc_feature (1)..(438): Homolog of NCBI NO: 11034736 NR Description: myrosinase [Raphanus sativus]
  misc_feature (1)..(435): Homolog of NCBI NO: 27261134 NR Description: carboxypeptidase Y/myrosinase fusion protein
  misc_feature (1)..(435): Homolog of NCBI NO: 13605680 NR Description: AT5g25980/T1N24_18 [Arabidopsis thaliana]
  misc_feature (1)..(438): Homolog of NCBI NO: 127733 NR Description: Myrosinase precursor (Sinigrinase)
  misc_feature (1)..(435): Homolog of NCBI NO: 1362007 NR Description: thioglucosidase (EC 3.2.1.147) 2 - Arabidopsis
  misc_feature (1)..(435): Homolog of NCBI NO: 18420974 NR Description: glycosyl hydrolase family 1 [Arabidopsis
  misc_feature (1)..(353): Homolog of NCBI NO: 30690089 NR Description: glycosyl hydrolase family 1, myrosinase precursor
  misc_feature (1)..(438): Homolog of NCBI NO: 15809938 NR Description: AT5g26000/T1N24_7 [Arabidopsis thaliana]
  misc_feature (1)..(438): Homolog of NCBI NO: 16648811 NR Description: AT5g26000/T1N24_7 [Arabidopsis thaliana]
  misc_feature (1)..(438): Homolog of NCBI NO: 30690085 NR Description: glycosyl hydrolase family 1, myrosinase precursor

SEQ ID NO: 46356 - DNA, 2829 bp, Arabidopsis thaliana
  misc_feature (1)..(2829): Ceres Seq. ID no. 12574769
  misc_feature: MA Experiment ID: 20000180 Result: Up-regulated in Transcription
  misc_feature: MA Experiment 20000180 PARAMETER Experiment Name: At_Germinating_Seeds_P Parameter: Age (hr) Value: 24 vs. 0
  misc_feature: MA Experiment 20000180 PARAMETER Experiment Name: At_Germinating_Seeds_P Parameter: Tissue Value: Germinating Seeds
  misc_feature: MA Experiment ID: 20000184 Result: Up-regulated in Transcription
  misc_feature: MA Experiment 20000184 PARAMETER Experiment Name: At_Shoots__P Parameter: Age (day) Value: 7
  misc_feature: MA Experiment 20000184 PARAMETER Experiment Name: At_Shoots__P Parameter: Tissue Value: Shoots vs. Whole Plant
  misc_feature: MA Experiment ID: 20000185 Result: Up-regulated in Transcription
  misc_feature: MA Experiment 20000185 PARAMETER Experiment Name: At_Roots__P Parameter: Age (day) Value: 7 vs. 21
  misc_feature: MA Experiment 20000185 PARAMETER Experiment Name: At_Roots__P Parameter: Organism Value: A. thaliana
  misc_feature: MA Experiment 20000185 PARAMETER Experiment Name: At_Roots__P Parameter: Tissue Value: Roots vs. Whole Plant
  misc_feature: MA Experiment ID: 20000438 Result: Up-regulated in Transcription
  misc_feature: MA Experiment 20000438 PARAMETER Experiment Name: At_Shoots__P Parameter: Age (day) Value: 14
  misc_feature: MA Experiment 20000438 PARAMETER Experiment Name: At_Shoots__P Parameter: Tissue Value: Shoots vs. Whole Plant
  misc_feature: MA Experiment ID: 20000439 Result: Up-regulated in Transcription
  misc_feature: MA Experiment 20000439 PARAMETER Experiment Name: At_Roots__P Parameter: Age (day) Value: 14 vs. 21
  misc_feature: MA Experiment 20000439 PARAMETER Experiment Name: At_Roots__P Parameter: Organism Value: A. thaliana
  misc_feature: MA Experiment 20000439 PARAMETER Experiment Name: At_Roots__P Parameter: Tissue Value: Roots vs. Whole Plant
agaagctgaatcagaagagtttttttttgcttcaaaaggagctccggcgaaacttccggagatattaacacttactctgacgagtttttgtctcgtcttacgtctttgctgctgctgttgatggaacttgacgacttggatctcagcggttcttggccgttagatcagatcacttttgcttcaaatttcaagtctcctgtcattttctcttcctccgaacaacctttctctcctctctggtccttctccgaaacttctggagatgtcggcggcgagctttactccgccgcagtagctcccactcgcttcaccgattattccgtcttactcgctagttctgaatctgaaaccacgaccaaggagaataatcaggttccttctccgtcatggggtataatgcctttggagaatccagatagttactgtgccatcaaagccaagatgactcaagcgcttagatacttcaaggaatctactggacaacaacatgttcttgctcaggtttgggcgcctgtcaaaaaccgtggtcgatatgttcttacaacttcaggacagccatttgttcttggtcccaatagtaatggccttaatcaatacaggatggtttcattgacgtatatgttttcccttgatggtgaacgggacggagagctcgggcttcctggtcgcgttttcaggaaaaagttacctgagtggactcctaatgtgcagtattactccagcaaagagttttcaaggcttggtcacgccttgcactataatgttcagggaactttggctttgcctgtttttgaaccatccaggcaactctgtgtaggagttgtcgagcttattatgacttctccgaagattaactatgctcctgaggttgaaaaagtttgtaaagcgcttgaggccgtgaatctgaaaacttcggaaatattgaaccacgagactactcagatctgcaacgagggtcgccaaaatgcgttagctgagattttggagatactgacagtggtgtgcgagacctacaaactgcctttagcccagacatgggtcccttgcaggcatcgcagtgttctagcctttggaggtggttttaagaaaagctgttcgagcttcgatggaagctgtatggggaaagtctgtatgtctactagtgatttagcggtttatgttgttgatgctcatgtttggggtttccgagacgcctgtgctgaacaccatctgcagaagggacaaggtgttgctgggagggcgtttcagtctggaaatctatgcttctgtagagatgttactcggttctgcaaaaccgactacccattagtacactatgcacggatgttcaagttgacgagctgtttcgcggtctgcttaaagagcacatatacaggggatgatgagtacgttcttgaattctttcttcctccagccatcacagacaagagtgagcaagattgtctattgggttctctgcttcagacaatgaagcagcactattcgagtctcaaggttgtctctgaaactgaactctgtgaaaacaacatgtctcttgaagtcgtggaagcttcggaggacggaatggtttactcgaaacttgaaccaatcaggatacatcatccagcacaaatctctaaggattaccttgagctcaacgcacccgaacagaaggtgagcttaaactctgactttatggagaataatgaagttgatgatggggttgagaggttccaaacgcttgatcctataccagaggccaaaacagtgaaaaaatcagaaaggaagcgtgggaaaacagagaaaacgatcagtctagaagtgcttcaacaatattttgctggtagtctaaaagatgcagcaaagagcctcggagtttgcccaacaacaatgaaacgcatttgccgacaacacgggatctcacggtggccatctcgaaaaatcaacaaggtgaaccgatctctcacacgacttaaacatgttatagactcggttcaaggtgctgatggatcactcaacttgacgtccctctctcctcgcccttggcctcaccaaatccctccaatcgatatccaattagcaaagaactgccctccaacttctacatctcccctaagtaatctccaagatgtcaaaatcgaaaacagagatgcagaagacagtgcaggttcatcaacatcgcgtgcttcttgcaaagtgaatcctatttgcgagacgcgttttcggcttcctacacacaaccaagaaccatccagacaagtggccttggacgattcggatagtagctctaaaaacatgacaaatttttgggcacacttaacctgccaagatacagcttctccaacaattctccaacataagctcgtgagtataaaggcaacgtacagagaagacatcatcaggttcaagatctcaccagagtcggtaagcattacggaacttaagcagcaagtggccaaaaggctgaagctcgaaacggcagcctttgagctcaagtatctagacgacgatagagaatgggtctccgtctcatgcgatgctgacctcagcgaatgcctcgacacgtctgcagcaaaagcgaacacactgaggctctcagtacatgacgtgacttttaactttgggagctcatgcgaaagctcagaggaaactatgatgtgcttgtgacaatgcttcacttgtatacaactttcttgtatggatctgagagttttgtttcttatttttctctggaaacatgtcttctttagaagaaggttttagtgttctatttttttataagatgtataaaagcacacttctccacatcaatagatgttgattggaataatgatatataattgttattat

SEQ ID NO: 46357 - protein, 841 aa, Arabidopsis thaliana
  peptide (1)..(841): Ceres Seq. ID no. 12574770
  misc_feature (741)..(823): Pfam Name: PB1 domain Pfam Description: PB1 domain
  misc_feature (65)..(539): Homolog of NCBI NO: 30690272 NR Description: RWP-RK domain containing protein [Arabidopsis
  misc_feature (3)..(838): Homolog of NCBI NO: 15217991 NR Description: nodule inception protein, putative
  misc_feature (696)..(820): Homolog of NCBI NO: 33468530 NR Description: NIN-like protein 1 [Lotus corniculatus var.
  misc_feature (1)..(624): Homolog of NCBI NO: 33468530 NR Description: NIN-like protein 1 [Lotus corniculatus var.
  misc_feature (666)..(834): Homolog of NCBI NO: 34904438 NR Description: unnamed protein product [Oryza sativa (japonica
  misc_feature (75)..(661): Homolog of NCBI NO: 34904438 NR Description: unnamed protein product [Oryza sativa (japonica
  misc_feature (724)..(836): Homolog of NCBI NO: 28973727 NR Description: unknown protein [Arabidopsis thaliana]
  misc_feature (724)..(836): Homolog of NCBI NO: 15233656 NR Description: putative protein; protein id: At4g24020.1
  misc_feature (1)..(637): Homolog of NCBI NO: 28973727 NR Description: unknown protein [Arabidopsis thaliana]
  misc_feature (1)..(637): Homolog of NCBI NO: 15233656 NR Description: putative protein; protein id: At4g24020.1
MELDDLDLSGSWPLDQITFASNFKSPVIFSSSEQPFSPLWSFSETSGDVGGELYSAAVAPTRFTDYSVLLASSESETTTKENNQVPSPSWGIMPLENPDSYCAIKAKMTQALRYFKESTGQQHVLAQVWAPVKNRGRYVLTTSGQPFVLGPNSNGLNQYRMVSLTYMFSLDGERDGELGLPGRVFRKKLPEWTPNVQYYSSKEFSRLGHALHYNVQGTLALPVFEPSRQLCVGVVELIMTSPKINYAPEVEKVCKALEAVNLKTSEILNHETTQICNEGRQNALAEILEILTVVCETYKLPLAQTWVPCRHRSVLAFGGGFKKSCSSFDGSCMGKVCMSTSDLAVYVVDAHVWGFRDACAEHHLQKGQGVAGRAFQSGNLCFCRDVTRFCKTDYPLVHYARMFKLTSCFAVCLKSTYTGDDEYVLEFFLPPAITDKSEQDCLLGSLLQTMKQHYSSLKVVSETELCENNMSLEVVEASEDGMVYSKLEPIRIHHPAQISKDYLELNAPEQKVSLNSDFMENNEVDDGVERFQTLDPIPEAKTVKKSERKRGKTEKTISLEVLQQYFAGSLKDAAKSLGVCPTTMKRICRQHGISRWPSRKINKVNRSLTRLKHVIDSVQGADGSLNLTSLSPRPWPHQIPPIDIQLAKNCPPTSTSPLSNLQDVKIENRDAEDSAGSSTSRASCKVNPICETRFRLPTHNQEPSRQVALDDSDSSSKNMTNFWAHLTCQDTASPTILQHKLVSIKATYREDIIRFKISPESVSITELKQQVAKRLKLETAAFELKYLDDDREWVSVSCDADLSECLDTSAAKANTLRLSVHDVTFNFGSSCESSEETMMCL

SEQ ID NO: 46358 - protein, 749 aa, Arabidopsis thaliana
  peptide (1)..(749): Ceres Seq. ID no. 12574771
  misc_feature (649)..(731): Pfam Name: PB1 domain Pfam Description: PB1 domain
  misc_feature (1)..(447): Homolog of NCBI NO: 30690272 NR Description: RWP-RK domain containing protein [Arabidopsis
  misc_feature (1)..(746): Homolog of NCBI NO: 15217991 NR Description: nodule inception protein, putative
  misc_feature (604)..(728): Homolog of NCBI NO: 33468530 NR Description: NIN-like protein 1 [Lotus corniculatus var.
  misc_feature (1)..(532): Homolog of NCBI NO: 33468530 NR Description: NIN-like protein 1 [Lotus corniculatus var.
  misc_feature (574)..(742): Homolog of NCBI NO: 34904438 NR Description: unnamed protein product [Oryza sativa (japonica
  misc_feature (1)..(569): Homolog of NCBI NO: 34904438 NR Description: unnamed protein product [Oryza sativa (japonica
  misc_feature (632)..(744): Homolog of NCBI NO: 28973727 NR Description: unknown protein [Arabidopsis thaliana]
  misc_feature (632)..(744): Homolog of NCBI NO: 15233656 NR Description: putative protein; protein id: At4g24020.1
  misc_feature (1)..(545): Homolog of NCBI NO: 28973727 NR Description: unknown protein [Arabidopsis thaliana]
  misc_feature (1)..(545): Homolog of NCBI NO: 15233656 NR Description: putative protein; protein id: At4g24020.1
MPLENPDSYCAIKAKMTQALRYFKESTGQQHVLAQVWAPVKNRGRYVLTTSGQPFVLGPNSNGLNQYRMVSLTYMFSLDGERDGELGLPGRVFRKKLPEWTPNVQYYSSKEFSRLGHALHYNVQGTLALPVFEPSRQLCVGVVELIMTSPKINYAPEVEKVCKALEAVNLKTSEILNHETTQICNEGRQNALAEILEILTVVCETYKLPLAQTWVPCRHRSVLAFGGGFKKSCSSFDGSCMGKVCMSTSDLAVYVVDAHVWGFRDACAEHHLQKGQGVAGRAFQSGNLCFCRDVTRFCKTDYPLVHYARMFKLTSCFAVCLKSTYTGDDEYVLEFFLPPAITDKSEQDCLLGSLLQTMKQHYSSLKVVSETELCENNMSLEVVEASEDGMVYSKLEPIRIHHPAQISKDYLELNAPEQKVSLNSDFMENNEVDDGVERFQTLDPIPEAKTVKKSERKRGKTEKTISLEVLQQYFAGSLKDAAKSLGVCPTTMKRICRQHGISRWPSRKINKVNRSLTRLKHVIDSVQGADGSLNLTSLSPRPWPHQIPPIDIQLAKNCPPTSTSPLSNLQDVKIENRDAEDSAGSSTSRASCKVNPICETRFRLPTHNQEPSRQVALDDSDSSSKNMTNFWAHLTCQDTASPTILQHKLVSIKATYREDIIRFKISPESVSITELKQQVAKRLKLETAAFELKYLDDDREWVSVSCDADLSECLDTSAAKANTLRLSVHDVTFNFGSSCESSEETMMCL

SEQ ID NO: 46359 - protein, 734 aa, Arabidopsis thaliana
  peptide (1)..(734): Ceres Seq. ID no. 12574772
  misc_feature (634)..(716): Pfam Name: PB1 domain Pfam Description: PB1 domain
  misc_feature (1)..(432): Homolog of NCBI NO: 30690272 NR Description: RWP-RK domain containing protein [Arabidopsis
  misc_feature (1)..(731): Homolog of NCBI NO: 15217991 NR Description: nodule inception protein, putative
  misc_feature (589)..(713): Homolog of NCBI NO: 33468530 NR Description: NIN-like protein 1 [Lotus corniculatus var.
  misc_feature (1)..(517): Homolog of NCBI NO: 33468530 NR Description: NIN-like protein 1 [Lotus corniculatus var.
  misc_feature (559)..(727): Homolog of NCBI NO: 34904438 NR Description: unnamed protein product [Oryza sativa (japonica
  misc_feature (1)..(554): Homolog of NCBI NO: 34904438 NR Description: unnamed protein product [Oryza sativa (japonica
  misc_feature (617)..(729): Homolog of NCBI NO: 28973727 NR Description: unknown protein [Arabidopsis thaliana]
  misc_feature (617)..(729): Homolog of NCBI NO: 15233656 NR Description: putative protein; protein id: At4g24020.1
  misc_feature (1)..(530): Homolog of NCBI NO: 28973727 NR Description: unknown protein [Arabidopsis thaliana]
  misc_feature (1)..(530): Homolog of NCBI NO: 15233656 NR Description: putative protein; protein id: At4g24020.1
MTQALRYFKESTGQQHVLAQVWAPVKNRGRYVLTTSGQPFVLGPNSNGLNQYRMVSLTYMFSLDGERDGELGLPGRVFRKKLPEWTPNVQYYSSKEFSRLGHALHYNVQGTLALPVFEPSRQLCVGVVELIMTSPKINYAPEVEKVCKALEAVNLKTSEILNHETTQICNEGRQNALAEILEILTVVCETYKLPLAQTWVPCRHRSVLAFGGGFKKSCSSFDGSCMGKVCMSTSDLAVYVVDAHVWGFRDACAEHHLQKGQGVAGRAFQSGNLCFCRDVTRFCKTDYPLVHYARMFKLTSCFAVCLKSTYTGDDEYVLEFFLPPAITDKSEQDCLLGSLLQTMKQHYSSLKVVSETELCENNMSLEVVEASEDGMVYSKLEPIRIHHPAQISKDYLELNAPEQKVSLNSDFMENNEVDDGVERFQTLDPIPEAKTVKKSERKRGKTEKTISLEVLQQYFAGSLKDAAKSLGVCPTTMKRICRQHGISRWPSRKINKVNRSLTRLKHVIDSVQGADGSLNLTSLSPRPWPHQIPPIDIQLAKNCPPTSTSPLSNLQDVKIENRDAEDSAGSSTSRASCKVNPICETRFRLPTHNQEPSRQVALDDSDSSSKNMTNFWAHLTCQDTASPTILQHKLVSIKATYREDIIRFKISPESVSITELKQQVAKRLKLETAAFELKYLDDDREWVSVSCDADLSECLDTSAAKANTLRLSVHDVTFNFGSSCESSEETMMCL

SEQ ID NO: 46360 - DNA, 2389 bp, Arabidopsis thaliana
  misc_feature (1)..(2389): Ceres Seq. ID no. 15168896
  misc_feature: MA Experiment ID: 20000173 Result: Down-regulated in Transcription
  misc_feature: MA Experiment 20000173 PARAMETER Experiment Name: At_42deg_Heat_P Parameter: Age (day) Value: 14
  misc_feature: MA Experiment 20000173 PARAMETER Experiment Name: At_42deg_Heat_P Parameter: Organism Value: A. thaliana
  misc_feature: MA Experiment 20000173 PARAMETER Experiment Name: At_42deg_Heat_P Parameter: Plant Line Value: WS
  misc_feature: MA Experiment 20000173 PARAMETER Experiment Name: At_42deg_Heat_P Parameter: Temperature (deg C) Value: 42 vs. 22
  misc_feature: MA Experiment 20000173 PARAMETER Experiment Name: At_42deg_Heat_P Parameter: Timepoint (hr) Value: 6
  misc_feature: MA Experiment 20000173 PARAMETER Experiment Name: At_42deg_Heat_P Parameter: Tissue Value: Aerial
  misc_feature: MA Experiment ID: 20000184 Result: Down-regulated in Transcription
  misc_feature: MA Experiment 20000184 PARAMETER Experiment Name: At_Shoots__P Parameter: Age (day) Value: 7
  misc_feature: MA Experiment 20000184 PARAMETER Experiment Name: At_Shoots__P Parameter: Tissue Value: Shoots vs. Whole Plant
  misc_feature: MA Experiment ID: 20000185 Result: Down-regulated in Transcription
  misc_feature: MA Experiment 20000185 PARAMETER Experiment Name: At_Roots__P Parameter: Age (day) Value: 7 vs. 21
  misc_feature: MA Experiment 20000185 PARAMETER Experiment Name: At_Roots__P Parameter: Organism Value: A. thaliana
  misc_feature: MA Experiment 20000185 PARAMETER Experiment Name: At_Roots__P Parameter: Tissue Value: Roots vs. Whole Plant
  misc_feature: MA Experiment ID: 20000437 Result: Down-regulated in Transcription
  misc_feature: MA Experiment 20000437 PARAMETER Experiment Name: At_Drought_P Parameter: Age (day) Value: 8
  misc_feature: MA Experiment 20000437 PARAMETER Experiment Name: At_Drought_P Parameter: Organism Value: A. thaliana
  misc_feature: MA Experiment 20000437 PARAMETER Experiment Name: At_Drought_P Parameter: Plant Line Value: WS
  misc_feature: MA Experiment 20000437 PARAMETER Experiment Name: At_Drought_P Parameter: Timepoint (hr) Value: 24
  misc_feature: MA Experiment 20000437 PARAMETER Experiment Name: At_Drought_P Parameter: Tissue Value: Whole Plant
  misc_feature: MA Experiment 20000437 PARAMETER Experiment Name: At_Drought_P Parameter: Treatment Value: Drought vs. No Drought
  misc_feature: MA Experiment ID: 20000439 Result: Down-regulated in Transcription
  misc_feature: MA Experiment 20000439 PARAMETER Experiment Name: At_Roots__P Parameter: Age (day) Value: 14 vs. 21
  misc_feature: MA Experiment 20000439 PARAMETER Experiment Name: At_Roots__P Parameter: Organism Value: A. thaliana
  misc_feature: MA Experiment 20000439 PARAMETER Experiment Name: At_Roots__P Parameter: Tissue Value: Roots vs. Whole Plant
  misc_feature: MA Experiment ID: 20001557 Result: Down-regulated in Transcription
  misc_feature: MA Experiment 20001557 PARAMETER Experiment Name: At_Drought_Soil_Dry_P Parameter: Age (day) Value: 27
  misc_feature: MA Experiment 20001557 PARAMETER Experiment Name: At_Drought_Soil_Dry_P Parameter: Organism Value: A. thaliana
  misc_feature: MA Experiment 20001557 PARAMETER Experiment Name: At_Drought_Soil_Dry_P Parameter: Plant Line Value: WS
  misc_feature: MA Experiment 20001557 PARAMETER Experiment Name: At_Drought_Soil_Dry_P Parameter: Post Timepoint (hr) Value: 3
  misc_feature: MA Experiment 20001557 PARAMETER Experiment Name: At_Drought_Soil_Dry_P Parameter: Post-Treatment Value: Re-Water vs. No Drought
  misc_feature: MA Experiment 20001557 PARAMETER Experiment Name: At_Drought_Soil_Dry_P Parameter: Timepoint (day) Value: 13
  misc_feature: MA Experiment 20001557 PARAMETER Experiment Name: At_Drought_Soil_Dry_P Parameter: Treatment Value: Drought vs. No Drought
  misc_feature: MA Experiment ID: 20001905 Result: Down-regulated in Transcription
  misc_feature: MA Experiment 20001905 PARAMETER Experiment Name: At_Drought_Reproduction_P Parameter: Age (day) Value: 40
  misc_feature: MA Experiment 20001905 PARAMETER Experiment Name: At_Drought_Reproduction_P Parameter: Organism Value: A. thaliana
  misc_feature: MA Experiment 20001905 PARAMETER Experiment Name: At_Drought_Reproduction_P Parameter: Plant Line Value: WS
  misc_feature: MA Experiment 20001905 PARAMETER Experiment Name: At_Drought_Reproduction_P Parameter: Timepoint (day) Value: 10
  misc_feature: MA Experiment 20001905 PARAMETER Experiment Name: At_Drought_Reproduction_P Parameter: Tissue Value: Rosettes
  misc_feature: MA Experiment 20001905 PARAMETER Experiment Name: At_Drought_Reproduction_P Parameter: Treatment Value: Drought vs. No Drought
ggtgacactctttgatacagacttcaatgtttaagttatggccgatcatttgattctttctcttcaagctcctccttttctcatcttcccttgttctcttcaccgttcatggagatttcccggtggaatcagatattccgttcctgagttccgattgtcctctcagctacagttggctaattccatttcaccttcaaagtcttcagcttcctcttcttctccaccggagaattctgctccagagaagttcgatctcgtgtccagcactcagcttaaagatggaagtcatgtctttcggttcggggatgcaagtgagattgagaaatatctcgaggctgaagaaaaagcgagatgtgttgaggtagaaacgcaaaatgctaagattgctgaagaagccagtgaagtttcaaggaaacaaaagaaattggtcagttctattattgaaacaagtactgagaaagaggaaacagctgctccttccgatcttagcaatgtcattaaaataaaggatcgtaaaagggttcgttctcctactaagaagaagaaagaaactgtgaatgtatcacggagcgaagataaaattgatgccaagagtgctagtgtttccaatctgagctccatagttagtgtagcagaagctattccaattagctctactgaagaagaagctgttgttgagaaggaaatcacggctaagtcatataatgtagagcctctttcttctgaagccatgaagaaagtttctgtcaataaaataggagactgtgagacaaatggttatcaagagaatcgtatggaggttcaggcaagaccgtcattgtctacacaacaggaaattacgcctgtatccaccattgaaattgatgacaatttggatgtgacggaaaagcctattgaagctgaggagaatcttgtcgcggaaccaacagctacagatgatttgtctcctgatgaactcctttcaacttcagaagcaacacatcgcagcgttgatgagattgctcaaaaacctgtaattgatacgtctgaggaaaaccttctgaacacttttgaagctgaggagaatcctgtagttgaaccaacagctacagctgctgtctcttctgatgaactcatttcaacttcagaagcaacacgtcacagcgttgatgagatcgctcaaaagcctattattgatacgtctgagaaaaaccctatggaaacttttgttgaaccagaagcagtgcatagtagcgttgacgagagcattgaaaagcttgtagttgttacgtctgatgtggaaaatgatggagaaaatgtagcttcaaccacagaagatgaaataactgtgagggacacaataactgatagtggtagcatatccaataatgatgacacaaaagtggaagatctccaacttcctgtacctgaaacggccagtcttgaacccattaaagcggcttctggcagggaagaacttgtgtccaaagcattttacttggactctggttttgcttcactccaaagcccctttaaggcattggcaggtcgggaagatgcttattttatctctcaccacaattggataggtattgctgatggagtctctcagtggtcatttgaaggaatcaataagggaatgtatgctcaagaactcatgagcaactgtgaaaagattatttccaatgaaactgctaagataagtgacccagttcaagttctccatagaagtgtcaatgagactaagtcctctggatcatcaacagccttaattgctcatcttgacaataatgaactccacatagccaatattggagattcgggattcatggtcattagggatggcacagtattgcagaattcgtctccaatgtttcatcatttttgttttcccttgcatattacgcaaggctgtgatgtcctaaaacttgcagaggtttaccatgtgaacctggaagaaggcgatgttgtcatcgcagcaactgatgggctctttgataacttatacgaaaaagaaatcgtttcaatagtttgcgggtcactgaaacagagtctggaacctcagaaaatagcagagttggtagctgcaaaagcacaagaagtaggacgatctaagacagagagaacgccaattgctgacgcagctaaagaagaaggatacaatggacacaaaggtggtaaacttgatgctgttaccgtcaacatttcattcgtgaaaattgtctctacataaatatgcatcttcctattaattgtaaataatggagagagccgcacacattcacaacaccattctagtttttccaaaaatttcattgaaacgatgtacactggagtaagtttgcattcctgagctatatatgtgagccggatcagtcctggatctgacccgatatccagtttccgaccc

SEQ ID NO: 46361 - protein, 724 aa, Arabidopsis thaliana
  peptide (1)..(724): Ceres Seq. ID no. 15168897
  misc_feature (488)..(688): Pfam Name: Protein phosphatase 2C Pfam Description: Protein phosphatase 2C
  misc_feature (499)..(719): Homolog of NCBI NO: 34872403 NR Description: similar to T-cell activation protein phosphatase
  misc_feature (499)..(719): Homolog of NCBI NO: 28893291 NR Description: T-cell activation protein phosphatase 2C [Mus
  misc_feature (447)..(722): Homolog of NCBI NO: 34896100 NR Description: B1189A09.35 [Oryza sativa (japonica
  misc_feature (449)..(724): Homolog of NCBI NO: 18402284 NR Description: expressed protein [Arabidopsis thaliana]
  misc_feature (455)..(719): Homolog of NCBI NO: 15240071 NR Description: expressed protein [Arabidopsis thaliana]
  misc_feature (473)..(719): Homolog of NCBI NO: 30683717 NR Description: expressed protein [Arabidopsis thaliana]
  misc_feature (473)..(719): Homolog of NCBI NO: 25366932 NR Description: hypothetical protein dl4315c [imported] -
  misc_feature (347)..(720): Homolog of NCBI NO: 37533570 NR Description: putative protein phosphatase 2C
  misc_feature (43)..(721): Homolog of NCBI NO: 7485658 NR Description: hypothetical protein F17M5.260 - Arabidopsis
  misc_feature (1)..(471): Homolog of NCBI NO: 7485658 NR Description: hypothetical protein F17M5.260 - Arabidopsis
MADHLILSLQAPPFLIFPCSLHRSWRFPGGIRYSVPEFRLSSQLQLANSISPSKSSASSSSPPENSAPEKFDLVSSTQLKDGSHVFRFGDASEIEKYLEAEEKARCVEVETQNAKIAEEASEVSRKQKKLVSSIIETSTEKEETAAPSDLSNVIKIKDRKRVRSPTKKKKETVNVSRSEDKIDAKSASVSNLSSIVSVAEAIPISSTEEEAVVEKEITAKSYNVEPLSSEAMKKVSVNKIGDCETNGYQENRMEVQARPSLSTQQEITPVSTIEIDDNLDVTEKPIEAEENLVAEPTATDDLSPDELLSTSEATHRSVDEIAQKPVIDTSEENLLNTFEAEENPVVEPTATAAVSSDELISTSEATRHSVDEIAQKPIIDTSEKNPMETFVEPEAVHSSVDESIEKLVVVTSDVENDGENVASTTEDEITVRDTITDSGSISNNDDTKVEDLQLPVPETASLEPIKAASGREELVSKAFYLDSGFASLQSPFKALAGREDAYFISHHNWIGIADGVSQWSFEGINKGMYAQELMSNCEKIISNETAKISDPVQVLHRSVNETKSSGSSTALIAHLDNNELHIANIGDSGFMVIRDGTVLQNSSPMFHHFCFPLHITQGCDVLKLAEVYHVNLEEGDVVIAATDGLFDNLYEKEIVSIVCGSLKQSLEPQKIAELVAAKAQEVGRSKTERTPIADAAKEEGYNGHKGGKLDAVTVNISFVKIVST

SEQ ID NO: 46362 - protein, 493 aa, Arabidopsis thaliana
  peptide (1)..(493): Ceres Seq. ID no. 15168898
  misc_feature (257)..(457): Pfam Name: Protein phosphatase 2C Pfam Description: Protein phosphatase 2C
  misc_feature (268)..(488): Homolog of NCBI NO: 34872403 NR Description: similar to T-cell activation protein phosphatase
  misc_feature (268)..(488): Homolog of NCBI NO: 28893291 NR Description: T-cell activation protein phosphatase 2C [Mus
  misc_feature (216)..(491): Homolog of NCBI NO: 34896100 NR Description: B1189A09.35 [Oryza sativa (japonica
  misc_feature (218)..(493): Homolog of NCBI NO: 18402284 NR Description: expressed protein [Arabidopsis thaliana]
  misc_feature (224)..(488): Homolog of NCBI NO: 15240071 NR Description: expressed protein [Arabidopsis thaliana]
  misc_feature (242)..(488): Homolog of NCBI NO: 30683717 NR Description: expressed protein [Arabidopsis thaliana]
  misc_feature (242)..(488): Homolog of NCBI NO: 25366932 NR Description: hypothetical protein dl4315c [imported] -
  misc_feature (116)..(489): Homolog of NCBI NO: 37533570 NR Description: putative protein phosphatase 2C
  misc_feature (1)..(490): Homolog of NCBI NO: 7485658 NR Description: hypothetical protein F17M5.260 - Arabidopsis
  misc_feature (1)..(240): Homolog of NCBI NO: 7485658 NR Description: hypothetical protein F17M5.260 - Arabidopsis
MKKVSVNKIGDCETNGYQENRMEVQARPSLSTQQEITPVSTIEIDDNLDVTEKPIEAEENLVAEPTATDDLSPDELLSTSEATHRSVDEIAQKPVIDTSEENLLNTFEAEENPVVEPTATAAVSSDELISTSEATRHSVDEIAQKPIIDTSEKNPMETFVEPEAVHSSVDESIEKLVVVTSDVENDGENVASTTEDEITVRDTITDSGSISNNDDTKVEDLQLPVPETASLEPIKAASGREELVSKAFYLDSGFASLQSPFKALAGREDAYFISHHNWIGIADGVSQWSFEGINKGMYAQELMSNCEKIISNETAKISDPVQVLHRSVNETKSSGSSTALIAHLDNNELHIANIGDSGFMVIRDGTVLQNSSPMFHHFCFPLHITQGCDVLKLAEVYHVNLEEGDVVIAATDGLFDNLYEKEIVSIVCGSLKQSLEPQKIAELVAAKAQEVGRSKTERTPIADAAKEEGYNGHKGGKLDAVTVNISFVKIVST
